United States Patent Application Publication US 2008/0113342 A1 - sequence listing, part 10

SEQ ID NO: 34908 - DNA, 573 bp, Arabidopsis thaliana columbia
gctaaaaagtaaaaagttaaacttcgaagacagaaaaattgaaaattgaacttgcattgttttagtcaggcaaagtatacaattgtgttcatacaacttgttgaacatgagatggatgataagggagaaagaacattttgtttgctgtgaaattagacctatctttttttttaagtaaatggtggatatggtactttgaaattccatatttatcgcttctcgttattaaggaacatcacacaacactttatgtgttactttctccaattaatcagtgtattttaaatatactctgattagaacaccaacttattaaatcagacatggtattaacgtttgacagtatccgtatcttctcatctaatgctcttgttgagctggttcgaaatttattgcacatattgatttcttacaaatctgcagctgccatggaaatctgtagactgtagcaataccctttaaacagatacaaacttaaaacctcacttgaatttatttcccacaatagtactactctttaagatccaaaccgagatctctacttctagaagcaaacaattagcagaatatatg

SEQ ID NO: 34909 - DNA, 557 bp, Arabidopsis thaliana columbia
tctgtttatacctaatatgtactactagtactacaacaacagagaaacaaagaaagaaacaaggtcttgtagattcaccttgggtttaagctctaagcaactctgatgatgctgctattgctatctccatcgctgaagcttggcatcatcgtgaaagccgagtgtcttgagttgggttgctcgttaagattaaatgaggatgccagacaaaggttgagagaaagtggagcagcatctgtgtttagattgaatgttggctttgcttggaaggttactggaaccagatatggatcgttgagatgaaatgtctctggtgcattctcagtttttgtcggcacgtcagtaaaaacttgcatcgcttgctgtccagagctgatgttggtttcaggtagtggtgagttctcctgagtaggatcttgctccatggccatttctgtaacctgatcaaaccaatcacacctaactgtcacacacttaccattattgtttataaactacaacttaaaagatatatcccaattagccaaaaatcattatgatactctccatattacttt

SEQ ID NO: 34910 - DNA, 264 bp, Arabidopsis thaliana columbia
ggattagatgttacaggtccgggggaaaaagctgcgtctttctttcctcgattttgtatttcactccctctactcctttaaaacccctctattcctttagaaacttcatattttatctttctttcctcatatttgatctataaagaacaatataatttgcataatgataaatgtatgattctgtctttccaaaaggtgtgtcctagaatagaaattgaatgtggtcgatctcagagttacagatcaatgaatcacatgtttgta

SEQ ID NO: 34911 - DNA, 542 bp, Arabidopsis thaliana columbia
gtagaaacgaaattgaattcatccaaaccatttcaatttctataaatcgaaccaaatcaagtgaaaaacaattcggttctggttttattaaacttactcgaaccgaaccgaaccgataacgttcttatatatccttgccggagagagccaaagaaatcttagagatcaaacaatgacggcgagtgagactatcgccaccgcgataaatcagattgatgagaagaaggaaaagctaaagaaagctttcgacgatcttcaagctcatcgctctctcctttcaccgtctttctcactttcctggtctgagatcgattctcacttttcctctctccaatcctcccttgctagccgtttccgcctcctccactctacatctcctttggaacatgattcgtatagaatcgacgcttctgatgcagggaaatcgtcgtcttcggaggaggtatcggagcaacccgttgttgagccggagttgagagccttgtgtgagaagattgacggaattggtttgattaagtatttgattaggatatgggatgatg

SEQ ID NO: 34912 - DNA, 556 bp, Arabidopsis thaliana columbia
taaccagtcttctagagtacagttttatgaattgttaattaacttagaaagcttgtagttgtaattatgtgttaaagctaatctttttataaagtagccgtaaattactactgtttttacattgtgattttattttgttataatacttaatgtaataatataagatagagaagtactttcgaaagactccaaatctcggtgcaaccgttcacgtgacggatctgatgagtgatgaattttttaaaaatgaaaaatccaatgtaacgtgtatacatatggctatacataatcaaatactttgttgtcaatgattgacttatttggtgacaactatggtttcgtgcaacgtgataactatcactttttggccgtgttaatttttaaaaaaattagaatgaaatttatcaggttacggcctgtcaaagttagcaataacctaatatctgtttgcatgccagaatacggttatgtagaaagaaaattaaattatcatatttcacaattctttatcacctgtatacagcaattaataataaattaattagataccacatgt

SEQ ID NO: 34913 - DNA, 617 bp, Arabidopsis thaliana columbia
tcacaaccttaccctcttcattatttgtaatgttcttctgtctgatacatctccttaaaatgtaggtcggtgagactgtggcatgttctatggccacaaacttaggtcggtcgatgatatatatgcgttatatataatgctcttcgtgtgtttactattagtctagaggcatatctccgggattggacttgctgatcgagagtgtgaatatgattaacaagattgatcccatgcttgacctgtcatcaaacaaattaaccctacgtcaatatattcgtcaataacaactttacgtattaaattctgataggcaattccgatattcagtagcaatgtcgtacacgacttatgatagtttaatacattgactaattcagacttttaaatttaatatgataatatctaataatgatgtacaatgactaaagtagatacataaattgatctatatatgcaatccacaaatttgaattatatcattcatactaacaacgatgtattttcaagtagctaattctatatatgcattttgagttctatatcattgggggttaattatctagatatattatgatatgatgagattaaaggaagtgtgataattacttacaaagttg

SEQ ID NO: 34914 - DNA, 487 bp, Arabidopsis thaliana columbia
gagcgttaccataagtttggatacgggtcgggtcggtgaaccggatccggataaagtccgttcccacattagcttctctgctggatctttctggttattcagcttcatcttaagaaccaaagatgaagaaaaggaaacgaaatcaaaatctaagaaatataaataattggtaataaatatttcgatggaaacaaattttatgggtttaagaagaaagtgagattgagaagaagaacatgcagtggctctgttgtgattttctaaaagagaagacaaaagtgtcttgtgaaagagactcattttacttagtttatatattaatatattaaaaaatcatagtcaaaaagaaaattatacttttagttagcaaaaaatctaatctattttgtttcgatatgataaacggtagattctaattgttactcttagattgatcttggaattacgcgtatgagtagagtgataacaaaaaacgttatacgatatt

SEQ ID NO: 34915 - DNA, 449 bp, Arabidopsis thaliana columbia
atcttggcccagaatcttctcactcactattcggattttagtttaggtataatcgtaatctttggaattttgaatatgatatcttgacttgtcattgtgcaataatgttctgactcctccagaataatcagcattttgaatactgtgaaatattactaatttaatattaaaatattaccactagatttccgaaaacacccccattactcttgctccgcaacggtaaacgtaacgtactcaaaggggtgttaacgtaatttcaactgaaaaaaactaacggttcccgagaacccatcacatattaagaaagaaaataaaaaagagatctttttcgcttttccacaatcacaagacaaccacaaaactctcactccaaaactctcaattttgccttcctttgatcgaatactacaatggcgtctgtatctgcaattggagttctcaaggta

SEQ ID NO: 34916 - DNA, 970 bp, Arabidopsis thaliana columbia
taagattagtcatttaacgccatgcaactcatcccaactctaatcaataaaaaataattatgattttcgtatagaatgcgacaaccaaaagttaatgacgggggaaaatatgtgctgttttggaataaatcaactcaacttaaaaatgaagtcaaaaatggtattgattgatgttagatattgatcacattgggatgaacacgtgcaggggtaggttgttttctggtgcagggcacgactgccgactttaccgcattagaagtttcgatcaatattcctaatgtccttattaacatgtcaaccattatcataatccaaactcttcccaacatctttgattaaattatgtatacattagttttaagtttcaatttgttaggcaaagtagagagggacattatggtgaaaaaaaagacaagggacattaagaaactttagttatacgtcaacatatatataaaagacaatggttgggagagagatcacgtgcgacaaggctggaaagattgatttgccgtaatttcaaagcgaaggatttaaaaaaagatgagtcagaaaaaaaagatgaggatatagttcgggggtttgaacccgacgtgaatcgaacacgcaaccttctgatctggagtcagacgcgctaccattgcgccacggatcctcaggtaattacatctatacgtttacttatttatactaacaattagtgaatgataaaaaattaaaaaccccttccgattctaatttcctggcggagcaaatttagggtttatcgtttgcatcggtctcgcgtctcgtttcccacagacacatctctcgaatcttttgaaggccttcattgcaatagattgctcgtaagggataggtaggcctttatgttctgccgcttaatttcttcgccggattctgtttgattcattttaaggtgagtgaccccatcgcttttagattacagacaagtatgtatttatgg

SEQ ID NO: 34917 - DNA, 694 bp, Arabidopsis thaliana columbia
caagttaagttcgttttatgagactataatctgtgtcaagaattgagatgttgatcgctacttcttggataaattatatctataaaatttaagaattgcatttgatggaaagtcttatatgtaagcaaaaaagattactggaagcctcaatggcaccaaaaggattttcttgcatgtctttgaaactgcacttgcaagcatttcgttatgtaatatctttagctagatattggggtaatctgaagatagcggttaacaagagatttccggaaagtgatcgggattttgaactcgacgtgctaccattgaggcatggatccggatgataaacagggaaacatatacttttctaaccatgatttaactataatgaaaggttcttcaaatggtgtggtctttagttttcaaagatcattccaaaatgtattgacatgtcgtgtcggttgcacaaaaaatggtatccactctctaaacttttagaacaagtactctttcaagaagaaagagaaaaaatctatttacaacgaataagtcgatgtctaactcggaaaaacaaaatgttggatcatcatcattggagcctaaaagaaaattgttgttaactataattgttgccttaaataaacaggcaaaacgatgttgttaaaagacttttaaaacattggcaatgtcataaaaacgcaacgttttaagg

SEQ ID NO: 34918 - DNA, 530 bp, Arabidopsis thaliana columbia
gatatttaacaatcttcccaaaatctctcaacattaactacatgattagttactaaaataatctttttttttttttttaataattaaaatcatcccaatgggcaataggctcaaggccgaacaacaatagtacggttacaaaatgagaagaaacgaaatgacaaaaccggagacgcgagatcggatttggaggttgatcggaaaacaaagaaacacatccattaaaaccggcgattacaagaagcactgctttgcggctacgacggtggatccgaactcattgaccgaagtaatcggttccagtcgctatttcgaccccccgaacaaacctgaacctgcaacacttctcccgacatgaaccgttccccagataatccggaacccaatctctctaatcttcgacctagcaaaaagagagaacctagaaatctaacacccagtctccagcactgacaataaatgttatcttctccaagcaaagcaaacctcagatccggcctgacgaaaacaaaatcttggaagctgggagg

SEQ ID NO: 34919 - DNA, 752 bp, Arabidopsis thaliana columbia
aggcccaaggctcacaacaatatcacggttacaaaataagaagaaacgaaatgacaaaaccggagacacgagattggttttggaggttgatcggaaaacaaagaaacacatccattaataccggcgattacaagaagcactgctcgtcattaagaaacatcttgcactgatcgtcattaagaaacatcttctcttatgtctgattatataggagatcataataacgtcgataaaaaagagtttaaagtggaaatcaaccaagaaatagaaagcactatcaagatatatttcaaaatgaatatttcattaaaatggattaaaaaataattaaacactcgagttttgatcttgtcttgttaaaattttactcatcgtgttcctcataaattgtccccagcgaaggcgaacgtgaaaccctcatcggataaacaagaatcgccggtacagtttcgaatggtccgatcatcctagccatgatttgtaaatatactctttcttcgatttagacttcggcagctttcgactgtgttgagaagatctatgtggaaattattgttattgctgatatttatagagatagagaggaatagtagtagtgtaattaactaatcatcaagtgatctttatatatttgtatacttttttataggacgcagcttaatacttatcgcacgtgatatttatgtttcatatttaggtgatgctcgaaagttgaaacataagtatgcgtacactgctttagtttgcagata

SEQ ID NO: 34920 - DNA, 730 bp, Arabidopsis thaliana columbia
cttccaaagatacagattaactttagaaccatctcacttgcactagttcctactttatcccaataaaaataaacttctcaaaaaacagaatttgtgtttgttcgtttgggtaaaactttacatgtaggttgggcccaaagaataagaagaaaatagtgaaagtctctgctattattacaaaaacaaagcttctaagtaatcatcaacataagctaagcaaggccaataatctgttcttatatgcaccaatgtcgatccttgcccaacttccatttcaaacattagatgatatcttggcggcagaaacatcagcatctttatcgttcccattttccccctacttctcgtcatcggaacctcttggtcatctccatatccaatgtatgtcagacgaagagggcctcggtttaatcccaccgaggatgaagaaggctggtccgcatttgtgtgatccccttgttcttcttcctcttccttccacacaatgttctcaataattcctccgtctcttacaatgtttacaagctgttctccactgatagccaccacaaagggcgctaaacgaagctcagtggcctgtattacagtttccgcagggacttcaagcagttttactgaccgagtcccgctgactgctgcagccattttgccaccttttagtgcaaatgtttcgtgtgcagtgctggacgaagaacacacacttccacaaagcattgaatagatctgagta

SEQ ID NO: 34921 - DNA, 892 bp, Arabidopsis thaliana
caaatcttaaagtctatctccaatatatttcggctcattaccatttattgattgaatggtcaatttgtaaaccaatttgatttttaagaaaaatactattagcaaatttatatataaagctaattgtttttgaatggaatagtgtgattttatagtttaaagttaatttagtttaaagtatagtaaatactaacaacataaagacttgttctgataaatgcataaaacaatgaagcatatgattttattttattttgctcatgataaatgcataaaacattcatatttttgttaatgattttctaaagtgagtttatttatttattttttattttttatttaattgtaataacatgatgcaattttattggctaaaacaaaaggagtgaataaaagggtcatcctcggagtgaaccaagtattgctccacgatgaatatataaacaatgctcataaatagtcacaacgctgagactcaaccactttgaaccaaaaaaaaaaaaaagtagtcacaaagatggaagatcacaaatcaaagaattttgctacccactcacaaatctgtctcgggtaaaacattcattacaatctatgatcatcatcattacaagaaacctcattgtgctgtcagaaaatatgaagaatcaaacccaaaccaacccgatgtgtgcaatatcagtgagccgagtcattatgattgacagaagagaaaccaagtgactgcctcttcaaaccaacaacatattgactgacccacatataaccagactagaacaagtcgaacttcttcttaagcagatcatgcttccaacgtggtaagttgttgaatgcttctttctcgatccaaacacacttgggaactcttcctcagatagataagccttgtagtaaa

SEQ ID NO: 34922 - DNA, 647 bp, Arabidopsis thaliana columbia
aaagcaaatttataaattgaccctaattatatattttaaatcaatttatcaaagataaaaataaaaataaggtttaaggatttggataattaattttatacattcataacaaccaaatacattaggattgttatttgttagcagtaaatttaaaatgaaataattatgtcgaaatcttagttgacgacccgtgtcgttgttttccaaacatctttgccttcttgtccggtttgatctccaatccctctaagcctatgtttcattctaaagataactaaccacatgcatgcatttatattcgatatcggatcttgttgaattatgcttctatcgtttgatttgtatatttacaattctcgttggaatcggtgttttgtggctagattattattactagtatgctttattggtatagtgtcgataatttgattttgtcatgagtaagaagcatctaaaatgcctaaatctatgtaaccatattttattattgatttcacatggtcaatattgccatgctttggtgtggttaaatctcacaaactgaaagcatcattactttattgtttgtaacgttgggttctaagatcatttggtgaaattaatcttttgtaatgagtaatgatttggtcgagcttttgttgcatgac

SEQ ID NO: 34923 - DNA, 799 bp, Arabidopsis thaliana columbia
tagaatttagttattagtttacttagatgttaacaatgacattatcttcaaaaaggtggtgttttatttttgtgtgggtttttggtgtataacaaacattctgctaaattgttttgtaggtcgctaacaatgttacagatgaggttgttccccctctatattctggtcctgaagataaatcagaggttaggagtcattaaaaattttgagtttttattgttaaccatgttttcgtgttaactatctggaatttttttttgtttcgttatagcgtgggaacaatgtcccaattaatgaagatctcatctcccaagccgcgatggtccatgatacacaggtgagctagtacgcaaggatagtgtccattgtagttaactaacatagtatccggtttgttgttagttttaacagttagatcacgcgcaaaatcaataatatcatttttgagggtttttgtgggataacaaataatgtgggaattgtgtttggtagggtgtcaacaatgtaacgatagtcgttaatccccccccccctcccccatgtcgttgttgaagataacgcagaggttagaagttatggtgactatggtccaaaatttgtcttaacgattatcattttcacttttataagagagcaattttttgtaaatgtctggtaggtcgctaaccacaattccgtccaagacgacctccctcctgaaggtgatgttaacgatgaaggtgatgtaacgattgtcgttaatcccccccccacatgttgttgttgaagatagcgcagaggttagaaattatggtgatta

SEQ ID NO: 34924 - DNA, 1139 bp, Arabidopsis thaliana columbia
tgccataggagtcctgattctaggtctttggcttaccgtcaatgaaaaacttgacgatttcattacatcaaaacagaacggtaagctccttgctcatagtttgataaagctcctaagttgcaaacattgaataacagaaaagccatgactctctggattgtgcagttagctctttctggaccgcgttgagtttcttattgctctttgcttatccgacccctgagcacccaactcctagctacgagtaccacacagccttcaacggggttaccttaggaattgtaagcattgaaagattttcagacgatattgtatgcactagtgttatggtttatttagacaatggccttaatcgatgtttttacttgtcttaggttaccggagtgcagcaaacgtacagccaattccaccacgaagctgctccacgaatcttctcaccagagctccctatttcatcctaccttggtagagtcatggtgggaataccgacgatactcttagtgaagttctgcagtaaatctcttgcaaaatggactttaccaatggtatccaacgcacttgggattccaataagatccagcatgtacattcccaagctcaaggggtatgcaagtgggaagaagacagacgaacccaagaattcagttggatatttgcagaaactatgcgagtttttgagccacgactcgtttgatattgatactggtataaggttcttccaatatgcaggccttgcctggtccgttgttgatcttgttccttcactattctcttacgttaacttgtagtaacagtttcattgtgtgatatataaaatcagtgcctttacatgacatagttcatcaactctgtattcacttgaccattcacaaagtcttcattgttgtggcttgaaagaacagcatttcgatttatattatcaggtttcaaataaaaggtgcacgaaacagatatatggaacaaaagggaaaaattacgtgaaataaatcgaaaaaatatctcacaataaacagattctgatgcagaagggagctaataagttcagccaaacacatgttcatgagaggttttaaagttcattgacctctttgcctatattacactattccaagggagagggctaaattgattttaaagag

SEQ ID NO: 34925 - DNA, 772 bp, Arabidopsis thaliana columbia
ctctgatgtttgtgtgaaatcaattattcatgttccgttatatgctggacagaatagtggtaaaagtgatggcgctggaatcggtgggacggaagcaaaaaatattcctaaggagcttgcctccacaatcaacgatggtctttactactttgagcaggtaaggaatattttcctatcataatatgatttacctctttggagtccaatttctaatctttacctatgaaacaggagcttaaaaaaaaacgatctggccgtaggaagaacaactcccatttggataccaaagatgggaaaatcaaatctggggaaggattgaacactaagttgggcgaaaattccgcagcaaatgatggaggggaagagcatggaatcattacttcacggaggaagcaaaataagggaacgcacaaacatcatacagcccatgcacggaggttcttctcgagtaacataaggaacaatggaaatatatcagaaagtccgcctagtagctccattggatttttctttggttctacatcaccagacagtcatgggtcagtatcttagcaatcctttatattcccaactttttcttatttttttgtttatcacttgtccttaatattctgtttatattgtattttaacagccctaggctttcgaaattgagttcatctccacaatgtacactttctggaagcagtccacctgtgggctctttgccaaaatcatttccaccttttcaacatccgagccaccaactgttggaagagaatgggtttaaaca

SEQ ID NO: 34926 - DNA, 596 bp, Arabidopsis thaliana columbia
tttttgattttcacttctatttttgaggactacacaacttttggttttgttttaattagcctatacataagccataagtagtcatatgctatatagttaccctcaaaaccacatgtagtgtaccttgctataaataacaacaacaaaatttacatataacatatcactacttttatttaaaataaagtaaaatgaagctttacaccacaaacactagttaaaaaatatatatatatacacagtattggctaaatatttagatggttgaaaaacaaataaatagatggaaattttgttcaagttacctttgattgaataacccggtccatctggaccgtaatggtacattagcaataaactaaaccgaaccgaatttatggcgggccagcgcacgacattttgaaaagtgtttggtcggctcctaaatgacgcgtgtcatccaataattcgcttatctcgtgaaggaaaatctaaacgtcacgtggagaaatcgtagatgtcgacgtgagtaaaaacgctttttctccagatttaacgacaaccaatcgatgagtcatgactcatgagggacaccattgaaacgtttggttacatat

SEQ ID NO: 34927 - DNA, 888 bp, Arabidopsis thaliana columbia
tccttatcatacgactgtcagtgcccttctgtgttgtcattcttttttctctttttttttctcactttccttttaccccaaaattaccaaacaaagagagaaatagcttcttctttttttttttgtcaaaataattatcctctcacacgtgtgctctcgaacgcacgacgtagataacaagatgtcaagatgtatgccaaaaattttgttcgtacaagaaatcattccatcatctttttcattacatcaaaaaaatctcataatatgttttttcttttcttcaagaaggcatcgcaaattagatgttatagagttttatcaaggttttcacatttatagcaacaaacactatatattcgatgggaaaaaataagaaatttcccttttagaatgaccaaatcataaattaattcttacataccgaatttggttataataatgagaagaaaaacaacaacaagacggaccctatcgatccggccgacacgcttctccatgtccgtcccactctctctcccatccatgtgtattttttgctgaaattattattatttataaagaaaaatgaatttaatttaatttgattggtccagtccaactaggtagatacagcattctcaactggtgaatatatatatgggttcggaccacgactgcgccattatcagagctccgtcttgacttctgtagttggatgtttcacattaatttcattcactacctgattgattagatttttgtatgttagaagaataatagctttgtttgatgatttactactcgttgattttgtttccattaacatacatcttgataatcagtaaatcactatatcgtatactattgaagtttaataatttacaaaggtatgcatttttacgataaaat

SEQ ID NO: 34928 - DNA, 561 bp, Arabidopsis thaliana columbia
attgctagtttgctacaagggatggtctttggtatatagtcctttcaaaattgcttctttcaagtcctatcaaaaccaaatttacaagataatatgaaatcaggaaagtgaaaagcttatacaagtgatattgaattcgacacagaagcgtaatcactaaaatctaactaaaggatccagaaatctgaagtgagagtaaatacgccttattgtaaacagattggagatagaccatcactagaatactgcttaagtactaaaatatgttcgaaatccaaagaactagattcagtttggtcgttgaagatagaacataacagagacggagcacgtgggagaaatatagagaaagagagctagagagagaggaatcggcgagaggaagaagaagatgaaagggagtgaaaccccttaaaatctctcttcgtttgtcgagagaattagaggggaaggggtgacacccggaaagtcctcgtgttggctcctctttttaaccactcataggtgggccagtggtaggaaggatttcgggctgagggtgacatcccaataatccgggtt

SEQ ID NO: 34929 - DNA, 577 bp, Arabidopsis thaliana columbia
taatgttacgtaggagttcaacatgcgagattgcattcaaagatatggctgaacttccacagtatagcggcggtataagtaaagattggttgtttcgctgatagacttgttgccattgttggtttcttcttattataaccttatttaatggcatatatgcaatttctgttctaaaattctccatctagatacagattggatggatttggatttgaaaagtattagagttttacaaagccatccaaaaacaataaaaaaaaaaaaaaaaagagtttgattggtgcattcttttcagatgaaattagttcagtcaaaaatgcaaatgactaaattgcccctcaaaaacttgaagaattacaatgaaccatttcttcttcccctctaattctttttttttttttttttttttttggataacccaggtatcccaagcccaatggacccagactagcccactgcatacgtcccgaaggcggcaagagtagttcctggaggccgcataacccgattttaaattgtctgcggtggccacttaaggtgtttgcagccgtggggattcgaacccgggattattggg

SEQ ID NO: 34930 - DNA, 808 bp, Arabidopsis thaliana columbia
attgctactactaccagcggaaccgccgcgtttgaatgattgagcacgacgagtcattggaccggaaaatcgaggactgttgacgtgatgttgaggtacgccatcgccaccgtcgtggtggtggcccatttcaagctcttcttcttcgattgttgctatcttttttgtgaagaagacgaagaattggtttttgcgtttatcttcaattttgattttgcaatatatcgaatagatctgatgtaaccactctttcaagtgggaaactgagatattgcgtgtagttagtgtttatactggtagtctctggtttagtttgtgtcgacaatgttgatattatgatttgtggtattagatagtacacttatggattggtgaataaacaaaaaaaaaatgtgaatagtacgaatttgtcgagttgggaccaagggaaattaaacgagtatcagctgtcaagctgttcagataaatacactcctctagtgtctatactacaaggaattatagcatattaccataaacaaaagcgttggaaattctggacgaaatatgtcggaaattcgttgaaaaaactagggtggacgtactgtgaatttcagtttgatctcgattcgcctttttagttttacggtttttcaattttaaaaaaacttaaaccatataaaaacttttgtaatttggtttgattacggttccgttttatagtttttactgatttttcggttttataaaaattgaaattatatgaatcttagtttcgggtttttcggttattccatgtttttacaaatatatttataagttttataca

SEQ ID NO: 34931 - DNA, 870 bp, Arabidopsis thaliana columbia
atatctttggtcttaattaacatgagaatataaacagcgagttagcaacattcattaggattttcctgtttaaactccagatatcgaattgccataccgcaatttttttgaaaaccaacaaactcttcgattcagcagggggacatattaattagcaatggatttgaatttgttttcgctaaagtgagttagcaacattcattagcaaagtgtcgtcttgtcgagttgtcgtggtattacccatccggtgggttcaattcatattgtgtgtgttgtatgtgaaattaaaactgttaataagacaaaaccaaatttgtaaataatttgacaagtataaggtctaatctcataagagataaacgaaataggataaaataaactcaaacttgcagagataaacaaagtaaaataccatcattaggaaacatatcatatttttttttttataggaaacagatcttagacatgtataaggtctatctcacactcattaaacagggaacagtatctcagacatatataaactcaaacttgcaagcttacacgaaacaaaacaaaaagaaaacaagtttggttcttttcgtctcggttcttcaggcaagtatatatgatcatgtggtggtgtttgagtttcttgtatgtaaatgttatacgtctgtagatacactcattgtatatatctaatattctaatacaacaacttttctggcgctattgattttgcagagacaagttatatcatggaggactattctaagaacttgttcctattacttttctcatgcacagcgttgattatcagctactacaacgttgattctttaagtactgcatcagtcgtcggattgaattacggactcctcggagaca

SEQ ID NO: 34932 - DNA, 396 bp, Arabidopsis thaliana columbia
gaccacaagcgctggaacaaagctgccgagatgatcatcacagcgatgatcaagagcttcatgttattcatcatcgagacttatcaagagagtgtaaagttgagagtagtagtcgtagtttcgattacgttgaaacggtttgtgatgaaacacttggctaatctacacttttatagaggttaattcttcacgtagaggctcatcgaacatttgaccagattcttactcgaaaaagaaaatcaaaattactccgtcaaattcatggaataagaaatgaatacggtgcccaaaaaagatgaacctacacaaataaatgattcagtggatttgttttgctctgtatagtgatcaaagtcggtcaattcgcataattaattggtcaaagcctcaataatg

SEQ ID NO: 34933 - DNA, 694 bp, Arabidopsis thaliana columbia
ttgaaagaatgggaagagagtagtaagaaagaatgaaaatgcttgtaaatttcctcaaaatctttagtagaacaaaatctcaatttttttgcttactcatctcacttcaaaatagtttcaaggttactaaacagatcatccacatacaataaaagatcagttatacagaatctcagattcggagaaagaacatacatatgatcaaactgcggatttacactgttactaaccaaaaaaagagagcagataggtttggaaacttaaaaaactctgcaggtgatgagatatcgcctgattcaagatcggcactcttaagaaaccagtaaacccactaagtatatatattttatggcttgctttgttacagaacttccccatgatggctatttctttctgtttcaccaaggatgattacggatcctgaacttcaaagctttcatggctgcctttgcaaatatctgagcagcttcagcttctgcttctgctcgttctgcctcttttgctgcttgttcagcctctgtgatagcaaattctgcctctgcaactgctcttgctgcagcctctgcagcttcttgagctgtcatgccttttatcatatataatctacgtctactcggaatttagtgagactgttggcacgttctctcgggtttggtgggtcttcgtgttgttccgtccagaaagagttgaggag

SEQ ID NO: 34934 - DNA, 677 bp, Arabidopsis thaliana columbia
taggaacatgtaattggaaactgaaattttctagccaaatttatttttcccgcaaaaaaaaaaaattccgccaaatttttttcccgccaaaaaaattcccataacaattttttttttcagccaaaaaaatgcttttaaaaatccttgtgaaatatttttagcggaaaatagatttacaaaggattttaaaagagttttaaaagatttactagggatttaaaagagttttaaaatatctacaagggattttaaaaagattttaaaagatttacaagaaattttaaaaatttttaaaaagatttacaatcgaaccgacccgaacctgattggacccgaaccgagattttctatttattctattgaatcctagaataatatacccgatatacccgtacccgaccgggtattacccaaacccgacctgcatacctgaatgtcctgccctactacaaattttgatatacagtattgctaaaactttatcatcgttttgttattaatatgacgcggttaaaaaaatatgagaagtctacaaatttttagacgtagatgagataataaaaaggaaatataccttttctctattattggtatttagtttttataacaaaatgtttcaagaaagaataatattttgtttgtaataataactctgtaaattgtgtcttttgtgatat

SEQ ID NO: 34935 - DNA, 709 bp, Arabidopsis thaliana columbia
agggtctccaccagagaatatctgattaataaaaagcatctagattttggtgttgtttttgacagggcggtgatgatgagtcttttggaacaaagtgattggtaaagaaactagaaagctcaaaaaaaaggaagaatgcatgtggtttccttttgttctattcactaataaagactttttccaaagaggaaagtaaaacttttcaccgttttcagcttcagcttttcaccatcttgccgttttcctctctatcggtgcttttttcatcttctaccttagctcgtaagcctcagatccacgagccacgaggaccacgacccatttttttttttttgcttcgcattacttatttcacaatatttcatttaattaattaaagagctactagtaactaaaaaatgactttttaaaacgttaatgactagggttcttttgatcaactatttaatattgtgattaaccgtattattgtaatgttggttctggtaaccgttaataattgtgtcagaaaatgtctctttttttttaaattctaatttgtttttactaaaaaacaaactgaaaaagaaaccgaaaggtaaaattaatcgaggttaatgccaccatttgaaaatgattatttaacttttgtttgttgtcggttataattttgttttccgataaatatgagaaaattgagagtacagtgaagtagtatagtgtagtggga

SEQ ID NO: 34936 - DNA, 781 bp, Arabidopsis thaliana columbia
taactatggtaattaattatcttttgattaattaatcgagcctatggattaaacttccctctttggtttttcatgtatgacgtggcaccgtgcatgatatccacgtggaaattacagagataaaatgtccacgttaggaacttcgtggtgccagaaatagaaagatccaacataatattatataattttatatagaaaacatgctattttgattaagatcgagttatacaagtctaagtacgtcttagttgaaccgcgcaaagaagtgaaaatattgaaatacagtatcaatggaaatgttaatgttaatgaactaacttttgaataaaaagaaattatatattacaacttacgtgacaaagagctctaccgagagagttaacagaaggctcatcaacgccgtcgcaaatcatcatacccaaatctgacgaccctgaatacttcaccaacgcagttgatgacgtggacgacgacgaggaagccttagccgggaccaacgcgttctccgcagccgtggtaagaagacccgaagcgaaactaaagggaggataagaataagaataagcagaagaagaagaagagatgagaggaagaggaagatagtccaagaaaactctaaggatccaaagggtaagccacgtcatcatcatagacatgaacctgaggtggtccgaagccgaccatcgcctagaaggaatctctggtgtagaggcggtggaagcgacggagacgagagaacgagcggctgtgttgacggtggtcatgaagatggagttgagga

SEQ ID NO: 34937 - DNA, 584 bp, Arabidopsis thaliana columbia
cgtaaatcctcaagcaaattattcattttcaccctttgtggcactgacttgtcttcttccaaacgaacagaaacattgggcaccgtaagattctctccaattttgtccggcgattacaatcgaagatgatgaacgatgatcagctttctcctattggagaatcgagtgtcccagttcctaacaggatgctaagacgattgaagaaagctaaattgatctccgattcatgtcctggatctgaaaccttcgattccgaaaaccccgacggcgaggatctgggtaagtctgaattgcagtctgcgaagggttgcgatgggattgaggaagaagatggggttccatctgatctcgacggtttgggtgtagaggatggagttaccgcgaggaaggtacttgattttgattatgtgcctgagtttaatcagacgatcgaagatctgggcgagaaaagtggaagcgaaatctctgattcggaaacaagagatgaaattagggtttctgaaacgacggaatctgaaaaggaggatccggatttcgagacgactgtgcatgaatttgattccccaatggaggaattgcgtgag

SEQ ID NO: 34938 - DNA, 707 bp, Arabidopsis thaliana columbia
aagctgatcaagcaaggtataatgtttgtgaatggtactttctttattcatgcccataaataaaggttggaaatcgcaaacccaggtccaatttttaattgggctgatatttcaaaaattgggccttaataactaatatgttggctccacaaaaccatgaaccggttcaaagaataccggagctccagtttctacaaaggcaatggactttagcaagtgaagccatataatcatcagacctgaaacaaatttgggatgaaaagtatcaaaaacactagaccatcgaatcactttataactgctaccaatatgctataggggttcaaacctctgcccatatggagatccacaagccgcggttaaatgaaactttgcgttttctgatttaccctacaacaagaatcagacaagtaacttaaacaagattactcaaggattgtttgtttttgaatagcaataggccaatagatgtcaatggagattgtcttggataaattcaagatcaagagcttacctcagcttcatagtagagccctgcgtacagagaagcatagaagtattcgcttgcttgaccgctagagaagtcatttactaactgtatttcaaaatcagagtattaagatcgtttgatggaaataaatcaatgatatcaattatcaagaaacatgtctcaaaaccttttcaggatcaccacattcttgaataga

SEQ ID NO: 34939 - DNA, 803 bp, Arabidopsis thaliana columbia
tattgagttataaatttagttgttaatacacaaaggtactattcaccaaaaaaacaaatacacaaagatactagttggtttatgtaatgtatttttatcaaattcacctataatttatgtagccatcggttgacaaataaacatattgagccatcaacgtgtaacaattctaattttctaaatactccatcctccacctcattggtcgacattataaaatacagtagtatatcacaaattgtttaatgaaattcattttaaaaaaagaagaaaaaatagttaaaaagtgatataattattttgcagttagcacacttttgtttctggcatgattcacaggtcgaaacgatgtcgtttagtgtctttcccagaaaaaacggagatcaaataggtcccaaatggatcccacaaacagcagacacggcgcttcttttgaattttctactcggcgttttacactttccacgtttggtcaaaacgctccttctctatacgtaacgaccgtttataactccgctatcatctacccagtcaaacactcaccacgtgtctatttaccgtctaatccgacaccgttaattccgctcctaagaatcgccttaaaaaccacgttttcattttctcatcttcaaacctctctgtcattactctggtcagcgattcttctttcttcttcttctcagatcctttcaccgagtaagaagattttaaagatgccgtcaacgccgacgacgccgactacaacaacgccgatcacggcttcgtattggtgttacagctgtacgcgtttcgtcagcgtttgg

SEQ ID NO: 34940 - DNA, 605 bp, Arabidopsis thaliana columbia
tgtagctcaaggtttgatttctgaagaagttgcttttgagagagtcaagcttattggtgatgataaagctaaagagttgaatgatggatggaaagctttgtgtcttaaggaacaggatttgggtaatcagatgcttgagcttcttcttgcttcttcttctaccactaaaccctgaggaatttttcatgttttgattttgtctttgagaactttatgtatcgtttatgtttgtattgaaaccttaatgtgaaaaaattgcaaagtttctcatatagttcgttctttagaatatcatcaatcaaaccaaaacttttgtacattgaaactgagaatcaaaacgccattaaaacgctatgtagaagaaacgttaaacaaaacaaaaacagagagcttttggtgtttcttcaaacgacgtcgttggattcagaggtttctcgacattgtcttgagagagagaagctgttcataagagaagacacaaacaccacgagaggagagtacgtttcgtgagcctggagaattcgcaagaacctgaagaatctgttgacgtgtcagagatttgagcaaatctgtttctcctacgtcacggcggtgttgtagacaga

SEQ ID NO: 34941 - DNA, 442 bp, Arabidopsis thaliana columbia
attaagccattacgtgttattcacattcaaactgaacgggttaatcaagccatgtgcataaaaaacgacccatgtaagagatttttaaatgtaacgacctaaatatcatttatagggttgaaaaaaaaatgtctatagatttgatcaaccgaggccatgcattaattaacagattttagtaggtatttgcacaaaaacaaataattatttgtgtatatatatagatagttaaaaaaaaaaaaagcctaatgcatttatttacgaatgggtaccacaaaaagtatctggtttcgtaacaaatctagtaattgagctaccacaaaatcttaaccaaaaaaaagaaaaagaaatcagtataccggtttgtttgggttaagagatgtaccttctcggagagagcatcttggacgacgaggatgtcggaggtgatggcggagatgac

SEQ ID NO: 34942 - DNA, 738 bp, Arabidopsis thaliana
gcactcaaatctttctcaaacactaacacatcgaatcctttcttcttagccgctaaagcaaacaccaatcctccgattccacctccggcaactaaaaccctcgatttcttcttcttctccgtcaccgcctctctcttctcctccttctcaactaacgccgtcgccgcctttactccgagcaaagctcgacggctcctaaacccagatactcctccgggttttccggaaaacgatgataaatctaagtaaaactgtttagaaacaggactaaacacatgggtcctcgtgaaatcaagctttgatggagatggattgatagagtagcaaaacggagttgaacccatctcgatttttctttcaccgacgagaagagcaaaaactccgtttagaattcttgatcaaagttcaagactttatctgttgtgatgcctcagactcaaacctgagagaagaagaagaagaaattggtttgaagaagaaggaggcaaatgatggaggaggaggagacaggtggcatcagcaacgcaacacacttcatctctgagtgcctacaaatatcgccttctgatcttgacatgtcttttctctcctccattagaaattcatttaataaactaatcaatatatttagaaatgtttggtaaaaatatttgaacgtgacgtgatcagcgcttgtggtggattttttttggattgtgagtggataaatcatcaattttcaatattgttttcttatcc

SEQ ID NO: 34943 - DNA, 585 bp, Arabidopsis thaliana columbia
ataccttgagctaaatcctatagttccataccattatgcacaatgcccacaacttgttatattataaagttgccgactttattcaataatcacccaaaatctatagaaacttagctaaaccaatcatcaatcaaccaccaagaaatacccaaagtgtcaatttttctcgtctacccccgaaacagagaatcgatacaatactgaatttatcacgagattcaatcaacaaaactgcgaaaacaatcggaaggaaaaactcacgggagagtcattcgattcggagatggcggcgcgttttactcctctcatgatttcacagtcgcggcttcactcggcggaaggaggatcggaagaagaaaagagaggcagctgcgtgaaattatatttagggttttttgtgtctttcttcataaacatttaaaaaaaaaatacgaactttaaaaagagaagaacaaaaaaaatacttctttttagatgctttttttttaggtgaaaaataatgggaaatatactttttaaatttcaattgtggaaaatactaataagcattctttttcatttttttgtttgtaaaaataatttcta

SEQ ID NO: 34944 - DNA, 601 bp, Arabidopsis thaliana columbia
cgccagtgtgcctgcttattgtttcttttacattcaaaattggttttgatgctacattgtatggaaatgtgaaggttggaggaaaatatcgttttacttcaatgtgtcttatgaaataagagacaagactattgaattcgacgaaaacagaaatgtccagcgtgctgagttcatcgttcgagccattatgcagtaatgttcttctatataaacttgaatttgatggtgtgtttagcaaatagtgtgtagtgattaattggtgtttaaccttttggttgatggggtctcgcagtggaggaagattcgctgacggatggggttcttgtgagcgacgtgagaagaaatttcttaaaccgaatcacgatatccctagcacagcggagaccagagccaaaaacagggcttgtcaggtaaacttccacttctaatgctccagttacttgagcaagttgctatgtcattttgtcacagactgtacttgttgaatcttaaacatctgcatattcaaggaaacaaagaagcttagagaatcaagtaccttaacatgtagaggttttagcctaaaggtcctgcatatttgaaagagacaagacaacacact

SEQ ID NO: 34945 - DNA, 1037 bp, Arabidopsis thaliana columbia
ttgtgtgcattatggaatttgacattcataccccaaaaggaaccatctaccttccacattcgcataatatttggtgttgagagatttgagagtgattttgtaatcacacccagctgaattactaatgatctgcatgatccaatgtgacattactctcttaatatctcatcataatactagtacagagtctgtctattaaattttccaacacgttcatggtgtctgcattcaaattatttgttgttcgtataaatagattttagattaaggtatagtcatcagtcatgacaagattgatcggttttatacaggtagtagtgctgattatccaatggatttgcatcataaagaacaactccatgagaactcagttttaatgatgcaatctcaacaattatctgtgagtagcttgtcaaaaaatgtcattgggtttaattctcttccattgaaagttttcctcaaaacatttaccttatcctctagtgcggctccttgcagatgggaaggtctggtgggtttaacttaggtggagcatatacatcacaccgtcctcaacaacagcaacaacatgctcaagctgtgagtagtagtggtgtttccttacatgggtctgacatcttctcatcttcgcatccgccttaccactcacaggtatgatgtagtctgtaatattttaaaacaggcggagatcatttaaggttttatttcatgaaaccaacgttcttgttctttctaaggtatatttgattggtttcagactggtggagctccgggtattggattaagatctatgaattctgcaaattctatcactgggatgggttatgaccagcagctcatccagcaatatcagcaccaacagaactcagcccagtatcgcttgcagcagatgtcagcgtgctagcaacctttcagagatgtaggattaaaatcaatgcaatcgacacagtcaaatcctgatcggtttggcttactcggtttgctcagtgtgataaagatgagcgaccctgacttgacttctttggcacttggtattg

SEQ ID NO: 34946 - DNA, 837 bp, Arabidopsis thaliana columbia
gtcataagcggccaaaaaaaaaatattgtttgcaagttgatttaattatattttaataagtagtatatgaatgaatagtgggatctgatgaatgaatgaaatgtttgtttgtctgtgaggaaacatccgttgctgtcacgagttatgaccaagctaataatgtccgtaaagtgtgagcaaacttgtgctcatgttctcttgcttgcttctcaagattataatcatcatgaatctctcagccttacttatcttatctgacttttttttcttctctttgattgactaagacaataaagcgtcttgcattcttctgcagaatgtgattttgaggatcttgagaatttcaacttcattgtctgttagtctctcttgtgaatttctttggagatgaaaagattcgagaggccaagaacttcgattcactcgcagccaaggaccagtaccagttcaggtaagaaagatcagaagccgcgtagtagtagtagtaaaggatctggtgtgaaaccgttgaatgcggctcagctggtttctagagttttagatgcaacaacagcttctgagccttcttcagtcgctgtaactgattcaactactggatcagagtcttctgaagtctatgagaatgtgaatgtgcattacatggatgatgctaatgagaaatcaagaactgatggcaatgtagtgggttgtgaagaagaagaaggtaatggtgatgaatcagacactgagacaaacaatgggtctgtttcttggtctcaatgtgaactgttttccctgaagagaagaaatcagaaagaccatcaatggtttcaaaagtaaaagctctcaggatagacc

SEQ ID NO: 34947 - DNA, 682 bp, Arabidopsis thaliana columbia
caaagggtttaatcaatataaagtaataataatagcaattaaaaaggtttaatgatcaaatcaggtttgtagttagtaagattcgggaagatcttgccatgtctaaacaaatacttaatttcaacgtcaatcacgccaacactttaaacttgatgttaatctatagtttattaaagtattattggtgggaccttaattataacctgattaatcatacacaaatgcatagatcattatattaagtgggtagatcaaagatctattcaatcaaattgtaatctaataattatttgtacaaactaaaaaccatatggtaagagaaaattcctttatgtccaatcaactaattgaatggttcaaaatacttcaaatcccgtgacatagttgaaaacttaaacaatgatgggattatgtatatgcttatctatacttaaaactatataatatacgatcaatgccttacgaggtatgtagaccttcctagcttttatattattcttgtgtttattatgtggtacacgtacacatatgtatataccaaattttaagaattattaaagatgtattaaagaaccataaaactcggaaacttaaccattaaccctattgtaaactatgtggatgcatgccataagcactccataacaaagtgagtggaccacctagactccataattatttt

SEQ ID NO: 34948 - DNA, 624 bp, Arabidopsis thaliana columbia
aagttgatgtaagttttaactgtgtcacgccttcttacacgattccctccacttcactcaactctttctctctctcttctctctaaatttttgcaatcttcccgagaaattaaactccgtgaaagaaaaaaattaaaggaattttctcgggaactcataaaattgtggaaacacaaaagaagcttctttgttttttgatactctcccagagaatttgtttggtcgtttttggatttatgcgttttttgaagtcgagaaatgtcaacgacttcaggaaccggaggtgtcagttacagaaatggaactcaaagaagctcactcagaactcagtcctctgcttctacttcctccggtggccagaaagcttctgtcaaatccaagtcagtccttagaaaaagcagccccgccgcacttggtggtggtagctctaagtctggaggcggtggcgacgccggtggtaaaaacaaaaatcctctgttcatctttttttttacctataaattttcactgtttagtttttttctcccaaagatagaaactttatgattgatgtgtttgagattataaattggtttcttattggttgtgattgtgatttggtttttgaagtcctggaagagtcga

SEQ ID NO: 34949 - DNA, 2182 bp, Arabidopsis thaliana columbia
caccagatcaatcattaaaaaagtcttcaaaaattctcaacaaccacttctaaaagtcagacatgaaagccctcgcctctcgatatatagataatttgcatatacatgaaaactcaacaatctgacgcatatgcaacagagttgaaagatggaaagagcaaggatacgatggccgagtggaagaggaattaggctgaggcagaagacaaagagactgcgtgcgagagtgagaagctttttcaggcttctcaggagctggtgctgcagaaggcctccgctggtcagagaagacggtcttgattacacatctatacgtcgctctaactctttctacgccgatgcaattgcagactgcattgacttcatcaaccgctcctccgcttgacagcttctcattctcttccaataattctttcttccattttgtaaaatccaatgtttctgtatatgcaaccaattcgaattctctgtattatctgatttttttgacgagtcgatgcatcattaagaagtgggcttataatgggcctgatgatactacatccttagaaaccacattagtttaaatcagatctgacaactgcagtggttcatacccttaaagattaaaggcccgttgaaaacccattaagtatttcacatcatattctgggccagatgaacaatctgacagctatacaagtccattcccttatccaaaggcccgttaaaagcccacgtaaaatgaatgtgtcagatccttccttgctcgattcaacgcgtccgagtctcagacactccccggcgagatggaggaatacccggaagagctcaggacgccaccggtaagtctggtggctctcttcggatacgcggagctacacgcgtccattactaagtatctccactcccagcagcctcccatcaacgctctggccttccccgacttctctcaaatctctctcctccttgctcatgatgatcagatcagccgaacctcctccttcagagatcctctcagcgtctccgattctgcttctcccattccttccagatgcggcggtattttgaaacgggactggttgcttaagcatcgcaccaaggtccctgcacttgtcgccgccttctttccctcacatcacatcttcggcgatccaactcaatggctacaggtctgctccgatctcgacagcctcaagtatttcctcatctccctttatatttgtttccttgtttcccctcctttgtttcaaaccctcaaattaacactgcgatctcaattgcttgctagatccgtaatccgtcccaaaaacatcaaactggtggttgtcgtggtccagtcttctccccacggtagcgcattttatccgattattcttttcattttcctctcggaactactggtgacttactccttcccgacttgtttttagaggacattagcgacgatcgtctggtggcattgcgaaacgtggcagaattagattctaagtacgtgctcttcttcaattccagcatagtctctgaactcacgctctctctctccaggtatgtttctctcctcttttactttgcacctagaacaagaggcttttccttcaatgcatctcaacacggtatgtttgcagactcgcttctgcttttgcagagttggcactttcttattacagagaagaaggacggagaatcaaaagccgaattgagaaaaggagttccaattctcttgatttgaatgttcgctactgttttaaagtaagcttttctcgttacctctgctaagtctaatcatttcgttccaaagtatctgggaaaaggaaggctcattcatgccatgactgctaggtcgctgtatatgcagagtttcgtagagattggggtgaagcactgaagttttatgaagacgcataccattccttgcacgaggtctttattatctctaagtattttgttttttcccaacccatctgtcacgctaatatgtattctgcttctagtcaagaagttccttttgatgcatatatggtcattgctttcttattattacatatctttgcctgcggtttccacacattcaatttcgacgagcaattttgtttatgcaaacagatgatcgggacatcgactaggttgcctgcaatacaacgcttggtcgagatcaaaatcatagctgagcaattgcatttcaagatatcaacgcttttgt

SEQ ID NO: 34950 - DNA, 536 bp, Arabidopsis thaliana columbia
aataatagaaatgaaatctatgaaagtaatatttacagatttattctttatcaaaaaggaaaagaaaaggatattttattaaaaaaacagtgataggacgaaactgttaaatgggctggagagatataaaactgttagccactacctggcccataatatatcacatcgtctctttcgctgcacttggtggttctcaaattccgtatcgaaaatcttcttcgggtcagacgatctgaagccgatcgctgtagaatcagtttcgtgctccgcagtttctcgagtttcctctcacttcaggtagtcttcgacaccctaatcatgttagattgatattaatgttgaattttagctgatattcaatggttattgatccagatcttcataagagaattcacttacggagagggactttttcgtagacgattctcactggatatctatcacccggtaagatcgtcttgctcgaaaagaattgaaaagtttttaagtaattgaataaggaactgtgaatcggagaggcttacttttttgaaaag

SEQ ID NO: 34951 - DNA, 540 bp, Arabidopsis thaliana columbia
attctaagcttgcaacgtatccatttccctggtctttcttggtgatccggaactgaagtgaaggctctctggattgcttcatttagatcaatatagaggtttatctgacttaggttcttgatgagtttatgttctgtatcagagtagatatatgtggaggagatagttttagttttaaagattagattttgctgtccattttatacaggaattgaagtgaggcatggaagatgtgtccgagtctgataataatgttgagacctccattatccaccttccagatgattgcctttcctttatctttcaacgacttgatagtgttgctgaccatgattcatttggtttgacttgtcatcgctggctcaacatccaaaacattagccgtcgctctttacagttccagtgttctttctctgtcctgaacccttcaagtctgtctcagacaaatcctgatgtgagctctcatcatctccacaggcttcttactcggtttcagtggttggagcatctttcgctttctggctgcactgtgctgaatga

SEQ ID NO: 34952 - DNA, 500 bp, Arabidopsis thaliana columbia
cactatctttatttgttattggtctaactaatccattgccaagaaaatgttggtaagatatcaatttactttggtgaggtttttgaaaaatgtaacccaagtattgctctttagcaaatcatgcgttgtcttcactcttcaatcaatgtctgatactattattttgctctataacgatggttttgtagtatgtatattattatgtgtaaatcattacaccactcatgcctcccacattcccatttgagaattgaggattatattattactactagcgtggtccaaaaaactcttaacttttaaccacatcgctgcatcaattattactggcaagctaagcctattttatttacttaacctatttagtactttttttgtttgttcaaaaaatcgtattgtacgatgagtcccatgaataaagtgtagctttgtatcgaggaagagatatatatctacgaagtatttctagaaaacgtattttttttttttttttttataaa

SEQ ID NO: 34953 - DNA, 745 bp, Arabidopsis thaliana columbia
cttttgttaggtgattggatatcctaaatatttttgtagtcaatataggttcataaatcataatatttcatacggtttatgttctgtcttctcatccaaaatttagattatatctactataagtttcgaatcagtttgtccacttttatgaagatggtattagttctagatgacgtgactcgctgaagtgttgcattactctcaacccaaaaccaatatgtgttgtggtgagaactgagaaccactatcttccgtattgtaggtatatggtgatgatgtcatggaccaaaccaaaagttgtttcgcattgttgaactgtgagaaaaatgtaatatgaaatcgatgtaacgtagtggataacactgaatcttatatattcatcaatgtaaaattgtttggaattaatttataaaacaatttaccaaaacagacaagaatcatattattgtacatttcttttctttatagtgaaattaattagttctaaaatcctcaaaccatatctcaacatttatttttaagctatattatcgtgtaaggaaacttatttatatgactacattcaattaataattctttctgcctctcttccatgtttatagtttagtaaaagaatttgattttagaagctatataaataaaaaaaaataaaccgtaaaaaaaattgttatgaaatatagaaatatatgagccagatgatattggttgggctgaagaggacaagaacaagagagtagacatgtct

SEQ ID NO: 34954 - DNA, 538 bp, Arabidopsis thaliana columbia
  unsure (1)..(538): unsure at all n locations
tagataaaaatagaaattagaaaagcaatcactaattctaattcatattaccaaatattagaaaaggaaatattaaattaattatcaattatagaagaaaaaggaatatatacataattctacaaaagaaaaaacaaattgcaaacaaaacattatcaattaaaattgttaagattgtaattatgtataggaacatatacataattctatataacaaagaaataatctctttttttctcacacaaaacaaaaaaacctcaaaatcactattgacggctccggtcttgaattgctagcaaccgtcgggaagctcttttacgcagggtctcttggtacgtaaaacttctttctgggctgttgactataatacttacatctttcatatttattttctactttagacgcgcatgaccagagacattgctattagagtattattatatcatgcatgcgtttgaaaatattattcttggttgttatgttgactataatacgtattatatcatgcttacgtntgaaaaaaactcttggttgttgt

SEQ ID NO: 34955 - DNA, 728 bp, Arabidopsis thaliana columbia
ccttctcggttctcatctacagataacaacccatcttccgtatactgcaaggtaatgatatcatactcatcctctgttgagcctgaaatcgacatgtacttagaccaactaagtccatcattcaccggaagacacctctctctatagattgactctgcagcagtttctctgcaatgaagaaaagtaatcaataaacattacaaaccctagaaattatagaacacaatgtcacctcaagattatatctttcttaatcataacaagaagaacaataatgctacattttgcttcctatttcccctaatcataaaaacaaaacatcaaggtcgataccagatctgagtccatagttagcaaaagtacctatgcatcccaatctgtaaaagctcttcaatggcggaatcaagactctcacgttcatcttttttcgccaacaacttctcttcctggacaatatgaatcccccaaccactcttcagatccggcgaatacatatgcctagtcgcatccgtaataacctccttctcttcctcgctagcagatctgaaatcctccaaaaacctcatcaccgtccgccgccgtaaatctcgcgcgtcgatcccacgcgcctccatagccttctgagaagcggtgaacaaacatgttcccgtcggaagaaaccatctccgccagtgcgagagacggaatccgacggatgcagatgttgagttagatgtatgcgaagtttg

SEQ ID NO: 34956 - DNA, 908 bp, Arabidopsis thaliana columbia
aggaaacaaatgcagtgatgattttgcgttccaattcggcaacctatgttgtcgttttctgccacgtcaaaacctcctatcttttgttaaccgcacattttacatcacgtttcctaaaccgaacattaatatctaaccatttttatacattcacttaatatcgctcacacggttctttgtcaatcccattttaatccagcttcgtttcaaattattgaggtttagatctttttatgatcatagagcaactatatatagatttagtattgtcaatttgtcatgcactgttatatgcatgaattaggtgtttgtgtgttgtttagtaattaattataccttcttagtgacaatttgttttctttattagtaatgaaatttgtggtcaataattttgattagttttcaacccggaaaatcggttatatgtaaagtagatattatcataaagtttttatgtgaagtgctatacagcctggcttcgctattctaaagtcaagactaaacataaaaataaataaaaactgtccttacccaaacctaaccgttatcatctttttatgtttttcttcagatatttctttttcatttttatgttcccctataaaaaaatttaaattcacctcaaattgtgcgaatattatcatggctttgctagttgggtttcgtgattttgtctctttaacttcttactttcgccacgcgcttaaatggcgcgtgtactcacaaactcatactttgagactcgactgatctccacgctcaactatacgaaattgctgatcttgaacaaaattattacgaaaacgacaaaaaagacacatcgacgtagtcaggcttcgacgcgtgtccacttacagctggtacgcaaactttgaaaaccgcttgcgtggaagaagcgttgccatgac

SEQ ID NO: 34957 - DNA, 826 bp, Arabidopsis thaliana columbia
ctagattcaaagttcatagtttaatctcaatttgtaataaatcatgatcctaaaatatgtcatattatggtaagtgcttaaaaattagaagagtaaaacacttgaactatgttaatgtgtgaagataaaatagttagttatgttgctggagatatgtttgatgctgattatattctccatcaagtaacaaaattgataccactaatttcagatacataatgaattaatgatcccatcttgttgcaataaagacacaactagtctgaaaaaagaagaaagaggacaagacatgtgaacacattacagatctgtttaaatttgtttgtgcttattaaaccaagaaatttaactgttttctttactgttccaacaacttttcaccaggattattactcctccatgcaaaaacttgggaaaaaaaaaactaataatgacattggattcgatgtttctcttttcccattgtaataatagtaattttataaactcagatctctgttttgactagcgagtctcctacatgaaaaagcttatcttacacttatttcgctaagtgtcactacctccaagattctaaaaccgtaacccacaaatctcgtctttaaagacaccattaaagctcaagaatctctgtgtgagagacttcaagaacttggatccgagccatatccaagaagaaaaatggcgggattcaccatgagcttgaacttgcttctactagtagcaatggtagctacaaacatcctctcactctaccagctctcctccaccacaaatttcttccaatccaccgtcaaatcctcacaatcctctgttcccacagttc

SEQ ID NO: 34958 - DNA, 764 bp, Arabidopsis thaliana columbia
caaagtctgacactttttaagttccttataactaactatccaaacgtagaagtacctccaacactatcaaatacaaacacaataaacaaacgaaagcaaaaaactttagctggttttgagacttagctaagcttatacctctgtagaagtagttttaggattagaatccatgtctgaatctcgatctggacagctctcgtgaatccaataaaacccaaaaacgaaaagcaaaaccctagagagaaacctcccagaccggacgataacagtccgtttccaaccttccatgtgagcataatcttcctgaaaaacaactccaccttcatcttcctcttcctctggcccacgataaggagcagaaaacagcgtaaataccctacaaatcaagtaatagagaagcaagatgctcatcgagagaagaaaccgcaatggaacaagagtcaccaatgcaaccgccaatttaatattctccgtcatcgggaaaggacccaaacccatcgtcccatacaaatcggtcctcgcgtaaggtgcgaactttttgtctaactcttcaatggcagccgccaaatcggattctgatttcagtaacggccggtcctctttgctcgacggaggattcgaattcgaattcaaatctttgagctctgattccattattgttttcacctaacctaaaaatctaatctttttttggttttttttataaggaagagagagggtttcagatattgaatcacacaaggaagttcgtgttatgttgggat

SEQ ID NO: 34959 - DNA, 942 bp, Arabidopsis thaliana columbia
aagagaccgtcagaataaagtggatctattcatgaagcctagtagtttaagcgatataacttgggttaaacaagagataatcccaccttctcaagttgtaatctttgatttggtaatgaacactccctgttcctttgcacatagtgcaccgtaatgcctgccacccattacaagttttgcaatccctgaccaacaaaaaatgttttcatctcatcggatgaactcaaacagtagaaccaaaaacatagcgaggaagtgtgagaactgaggtttctcaaaaattctctgacccagaataaagcatcaaatcttgaagctgacctttggcatatgactttctttcccaaatccaatgcaatgtcataagttccaagcgtagaaccgcctgcaatcaatggaactccaatgataaaaagattccatatagaacaagtaaaacatgcattttccagtttcctaaactgattttgatcttacaaaacttcgacttagaaatcaagttgacaaactcagacagaaattcagcacaatataggcacactcaaattaaagctcaaaactttagcaaacattcgaagcgtaatttccccggaaacatcagctaccaaaaacccagaaagaaaatgatagtttcaagctagaaactcagcaaaaaccaacaaaagtttcaacctttaagacaactacatgtcaagttctaaacccagaaccatataagtttcaggagaaaccaactcacaaaaacagagagatacgaaattttggagatgaactcagggatgccaaaaccacgaggtgcagagccagcgatatcaaaggcgagagtgaaaggagacaagacgagcttgattggaaaatcgagaatgtctataacttgttgtccataacgagtagagaattgtttgaattgagcatcagcgaactgtgtcacgttctgtatta

SEQ ID NO: 34960 - DNA, 801 bp, Arabidopsis thaliana columbia
tctctcacgctgcagcttctctggatctcgagtgtcattctgatctcaggtacacatagaatttacgaaaaatcatttcaaaggtcaaaaaggacctagaatagtgggttggaacttggaacgcacaacaaacctggttaagaggtttctctcgcgctttcaaaattatgtctgcaaatcggttcttcaaaatagcagccctgtagctcttttcaggaggtaattgcttctcattctgagcactatttcctagtgtattaaagggtcaaggtcaagagtgagatgccacctcagacagaagagcagaaacatttttctgccatactccttttcttaccatcttgctgacaatccgcctcaacagaacttattttctccggagatgcactttccagctgatccaatccaccaacagatgctacttgtataaagcaacaaaacataagttccacacccaaaaactaaacttttgaccactaacaaaaaatccactcacatcctcttgttggggaagcgcttgtagctccatccaacataggttcaagatcgatggttccaagcccctgtatcagcgcaggacaggagcacgaagaaacaattaggttatcctaacaaatctgggaaccatcaagtaagttgaattttatatatatcaggattcaaacaaactatgacatccatttcatattgttatggttccgcaacagtaaaaaattgtggtccaagagttcctccatatcaaattatatcaactttatgacaaggtaacaaagatatccacatcgacatatgcattgtgtc

SEQ ID NO: 34961 - DNA, 514 bp, Arabidopsis thaliana columbia
tgggttgtgtacatcacatgcatcagcattatcagtttatcgtctttagctcgagtgtttacaacaaaatcttagcttcgagatttagacttctctaccaaagggtcttgatagccatggcacgagactcgtatgatatactaaccacagttaggtctgtttgcagaatggattctttgacagagcacgagcttcagcagccagaagagcatcataaaggtttgatcgctcttcaaaatctgtgtgtctaaccacatttccaaaaccacgggcaagaacgagctcagcactattcaccagctggctgactgccagcagatgatgcagtcacttcatcagaaaataagaccaaagttgctccaacgaccatatccttcctgcttagtctctgctctttttttgttctgtctaatgtcagtgtaacataaataagacggcttaaggaatggaaagataagttggaccagaaaacacacaaaaactgtaagcatggttcaaacttcccttatttcaa

SEQ ID NO: 34962 - DNA, 720 bp, Arabidopsis thaliana columbia
tcaaagctatacaaataatgtaatgcagaaatgaaatggttttccacccttttttgctcataggaaaacatcccaacggtcacggcagagaaagttaaagccgggatgcttcaaggtgtggaaatcgcattggggttgcctgaaggctcacttcctaaaccggtttatacacgtctccagctatggtaagtaatagttgtatcaacggtgctaaaatgtttgaagatttgtggagtgattcaatactttccacacaggggagcagctttgccgaagaacactcctgcagttccatgtatatttgatccacaaggccgtgctggtatatgcggtgattggcttctcggttctaacttagaatctgcagctataagcggtgcagccttaggaaaccatgtaagaagcttcctgtgactctccttaacaaaaatttgcggatttcagaataaaagatgacaagtgttttggtattttgctcctctttttttcctctgtagattgcggaattcttacagaacggtgaagctaatccagaagaatttgcaatcggtttacatgataggttaagtcctcttgctggccatgatattggtcagtttcctggtttaacatcagtgggagaaaaggaagaagctaatgcatatcagctgctgtgaatacatcagtctactgttacttgacgaaaaagctaagaagttttgcaaattaagcttacagtga

SEQ ID NO: 34963 - DNA, 606 bp, Arabidopsis thaliana columbia
  unsure (1)..(606): unsure at all n locations
caacaggtagattaagatgagcaaaagcaacctctcaggacacatcactaactcgtgcacactagaaagaataaaaaaacgatatagagcaagattttctaatcaattgctaaaaaggctttgatgtaggtatatattgatatgttagctacaaaaggcataaatagctaagagcaaaaaggaaaagaagaatgattggtagatgaaagaatgttgctttcgcttatattctaaaggaaggtcgttcaagagcacctgatggaggcgtgcaacatgatcagagaaaagttttgctaaaaatggaattgtagcatcgactgctgcccttgcaatgagagcataagagcctagtctttcgtccatggctgccagaacataatattaaaaagttaataaaggatagcacaaagcctgccttctcagactggctgcaaaaagactagatcaagaaccagtaataacagcatttattttgctcaccggatacagaagccaggcagtcagcatcatcttcagtagtagctgacgcagatgccactagagaaacaaactttcagcttgtatatagatttgataaaganaagagttcanaccaacaaaagttgt

SEQ ID NO: 34964 - DNA, 554 bp, Arabidopsis thaliana columbia
tcctgaatgctctctagctactgttcccacaagaatataaacccctgctccaattgtgatccaacacctaaaattgtgaaaccaaactctctaaagtttactgaagaaacaaagccaaaacaaacacagacccaacatttatacatacataagtaaacagatggaatctttcatcccacaacaaacagaaacagagaattaatataaagtcaaaccacaaaaagcttcaatctttaaaaaccatctacaaatcagattatataataagcaaattcatctactttctaagaaacccagattcctagaacatcattacgaaattagtaccaatggcaatcaagtgaggaaaggtcaacgcttttgcaagctgttggtgatgatgatgagtctctgctttgccatttgaagagtcgaattgtttccttcttactaagcttcttaaacaacccatgaatggtcaccaccaacaccaccttcattttgcgaattcaccataaaacccatttaaacaacaacgcttgggaattattctttggtagagaaatattctttca

SEQ ID NO: 34965 - DNA, 525 bp, Arabidopsis thaliana
cagagccgtgtaggttacagcagcggcgatatcctccacaaggtcgtggtgcaccatatggcgccggtcctagaggacctagcggtggctatggtgttggaccacccaactactcacaaggtggtggtcagtatggtggatctggtggctctggaagaggtcagaaccctatgggtggtgctagaaaccaacaatatggatggcaaccgtaaagagaactcaaagagactcgtatggtgtggtcttggcttgatgtctttaaggcagttgtgattttagatatgaagacttatcttcgcgaaagagaatctattttcatttgatttcttgtcttaatggcattcttccaaacattctgtgattgttgtatgtttaaatcaaggtttatatatcagaacacaggaaaccaaattggatttttcccaaatcttattatttcttgcaaaaaaacgtttcacaacctcttatctgttttcgatgaagtgtggaaaaactacacgaatcagtgtaaccccaaaaagaaac

SEQ ID NO: 34966 - DNA, 594 bp, Arabidopsis thaliana columbia
tagaagtcgaagagcaaagtgagtgaagtcgaagagcatagcaaagaatcgtctaaggatgtctcactttaattatgattctttcctttcctttgtaaaaaaaacaaacacgttttatcatctttttcttagactctgttttgtgttcaaatgttattttttttatttcatcttatattaaaattaggtattagatattttattatctttatctttctttcatgagataaaaataattataaatgtcattttaacattagtcaaaaaaattactgcatatgtattaaatattaattgagatgcaaattataatctgaccttaactttgtaagaactaattataatcctatggaagatatctttaaagaaaacatttaaggtggtcaattaaaaccaccgaagtcaaaggttcgcttgtttgtgatgaactcaatcttcctcacacaatatccgccgaatgctgtgacgattgtgatgtattcatcgtctctcgagccaaaactaccaaacaaaatggggaaaacaaataaaatcattaatgttttggaatagaaacaataaaacagaattaaaaaaatattagtttggtaatta

SEQ ID NO: 34967 - DNA, 507 bp, Arabidopsis thaliana columbia
gtttataagaccaatgtaattttattataaagttataaactcagttactctaattactgtaatgttcactaattgtatatttagttgtcaccagcaaaacgaagtcagatttaaagacaaaacaacgtctactttgactattgttttgtagttcagtagtcagattagataccggcatttaaaatgctccctttcaccaattaattattcatacaagttggctaacgcagtttcacaagcctttcaaagctgactttgaattagtctcagttttacgtctccttatccatccatctactacaaaatataaataacacagctaagatattcacaaagacacaagacgaaatattcaaccaacaaaacaaagacagaacagaacagaaggaagaaatgatgttagaatcttcaagcaaaaagagatggaacgttaacgtgttatcatcagcttcatctcacagagagacaattgtacttggaagatatagcaagagttgcagagaacag

SEQ ID NO: 34968 - DNA, 934 bp, Arabidopsis thaliana columbia
tcttcagaagcggctgcattcgctgccgtggtggcggcgagtttgcgtttgtggagagaagaagtgacggagcggaggggaatgagaaggagaaggaatctgagaactgcgggaacgattggcggcgttgaggtgggaagagtgagagtccatcgaagcagtatagtgaaggtgattgagaaaatcgtgacgaaatcgagagtctagggtttttgctcagataatttgggggcgggaaagactacgccgacgaacggaatattctggcatcgtttttttttttttgttttattgatccaacaaattttaaaccgaaactaattcggtaattgtaattcctatgagtaaatttatgcagtgattaaaatgtgattaactatattggtcggatataaacagtacaattcgtcggtaaattatttaaaagttcagtatactttttggatgaacattaacgtctttaatccgtttatgtgttgttttattttatagtatgttgttaaatttaacttcacaaaatttaatgtgtttggaatctgttactagtatttaacaaggaaacacaatttgctggtgacagattttgctatctctaatcaactttagtcttgaagtagtgttacaacataaatggtcaatagagcttgtttaccaaatgtaaaacgaggagaatgacaacttgatagtggtaatttcttataaaaaaacacaattagaagaggtgtaagcaagtgtggcaactcttcttcccatatatatatgcaaatccaagcttgtacataaataattagagggacgaccttatatttcgacatacaaagatatgtttttatttttttaggcattagacgttaaagcaccacttgacattagaatcaacagagagccaagtgcagtcgcaatgcatcaaaaaggcaggaagatcggaagttga

SEQ ID NO: 34969 - DNA, 725 bp, Arabidopsis thaliana columbia
tttttcgaaaaaaactcttccattataatgtcggttttttttttatttggataatggcacaaccatatcattactgtaaaccaatccggtaaaaaaaaaatagaatttaaacaattataaataaaatttggtaatggtaggatcagccattatggtcatctttggacgtgggatcagccattgtaatgtctatagggcggcctaaagaaaaatcctcccaaaacctctaaataatattgagccggcagaaggaccaccacacttgcacacatcataatcagaagctaagtcctaaatatgtatatatatccacttgattcctaatatacatttttttttttgttaaaatacctaatatacataagaataagatgtatatacttacaagattttataaaaagaaactaaagatgatatatatatcaaatatatgtacataacacttgattcctaatccaagcactaattctggctttgtctacttggtgagtcatgattcatgagtgttaatattaaattcataaatgtgtctctgtgtcttaatattctagttctgtgtttaatattttcataaactatttttgcgtacctttcttattacaggcttgctcaacttttttccctcgtgtttgtgcatggagagcgacattggttggctctcctctgacagagacaggccctttgaacatatccaattaaaaagcgctccacttactccttatata

SEQ ID NO: 34970 - DNA, 768 bp, Arabidopsis thaliana columbia
caatggaacacggacttcattttttttggtacaaagactttatctattttagtttacattataaaaaccccatgataaacaagataaaggaaagttaaaacaagcacacgaacatatttctttttcatattatttggtactaattaagtaaaagacaaagaagcgacaatgtggaagaactgcaaattcaccaagacatctttggcatggctagtggctcggctttcaactcgtgagaacagtttattgcttagctcttcgcctatgtgagcttccacgagcactccggccacactccgacaactactagcaaaggcacgaccaacttctgatgcatcgtctggctcattcaccacaagtggactccctcctttgtatactaccagcttatcaattgcaaatgagccgttggcgtcaactacttccttgaaatcttgcaagcttggtgcgtacaccgggatattgaatccatctcgtttctctgctgctaccaaaccctataaaacaaaaagtaaatttttttatgtcaattatgtccaatccattgaatgcaagaaaataaaagtttgaataattttatgattagcctcagtttccatgttatcgtaattcaatatgtggatttatatgtattaagttatttttaaaataaattatattgtataaatactttgattcacactaacttttatatgattatctgagtatatattataaatttaaatgactttcaacacatgtaaactttactttctggtatgactttta

SEQ ID NO: 34971 - DNA, 598 bp, Arabidopsis thaliana columbia
tgcaagtagtagaattgtgcttcttaattttcatggcttcataagtttgttgaagccattgattggtgttgtctataaaatggaaagaaaaatgtgatgtaggcaatatagaagacttgtatcctttcatagacatttaactgtaattaatctcattatgtatttctatccaatctcatattctgcctctgtcgtttgtaggtatttgcaagattgtatctcctttgacagcaacagttcctgctggcgctgtgttgatgaaagagaaatcaaactttaagttcactaccagagtacaaccccttcgacttgctgagtgggattctgatgataaagttacattcttcatgagtgggaggtttgttattaaacctattaccatttagctctacatcttcactttatagtttgtatttaattatttgtaaactactcaggacctatacatttcgcgactatgagaaaatggcgaacaaggtatttgcacgcagatattgcagtggtggctctttgccgactcattcttggagaaagaattctggaaggaaattgcgtgtggcaagactgaaacagttgagtatgcgtgtgatgtagatgg

SEQ ID NO: 34972 - DNA, 548 bp, Arabidopsis thaliana columbia
tgcataatagcatgtggttgagtagattatgtcttcttaaaattatgttatgagatttcagataggtatagctttcggttttgtttcttgcatttaatgctaaacctcttttgtgaaagttggttgatcaagtttggtagagcttccatcacccaccttagcttcttgatcaggattcatcttttaatttcttctcttaaattgttcatagacttaacctgagtgttaaactcttttttcttttctttatcggtttgttctcagagtgcaagggatttgggaagaaacttgaagagaattctacacaagccagcagctagtagctgataatgatattggtaacatatgtctactacttgctgaagccaaaagatgaactaccaaatggatagatttcattttgggactaaaattcaattttcgaaatcaaattgctctttttacattctatcgttggtaattatatagagctacttttataaatatatgtagaagcaaatggaaccttatgactttacacgaaaaagcaatggatcccttatgatata

SEQ ID NO: 34973 - DNA, 978 bp, Arabidopsis thaliana
atctacagatgaagaaaaaatctgaaaatttttgccaaaaaaaatttggaccatttctcgatttatgcgtgtcatccttgcgcaggggccatgctaatcttctctgtatcgttccaattttatcggatgtccccgaagggacaagcactacttcgtctctaactctatataaactcagctgctttctttacctaagcgctgtggtacttttgaagattgttaatagcttaaatgggcctattttagaaaaaggcctatccctcgcttccttctcaagcccatttatattattgaattttttcccaactaaagattttattttcttatgcaagtctcactcacactcacgtaaatttcaaatataatcgtggtggaactaaaacaatgaccgtctcgtttctacggatcgagattcaaaattgttctgccggaattttgagatttctcccacggaacccagatttattcgcagctataaagccttcttctgctttagcatctttatattcgactgtttctgggcaaatcgaagaaaacccgaagagatacgagcaccacaatgttgctacatgtatcgccacattgcaacgctgtgcacagcgcaaagattacgtttccggccaacagatccacggtttcatggttagaaaagggtttctggatgattcgccacgcgccggcacgagcctcgttaacatgtacgctaagtgtggtctcatgcggcgtgcggtgttggtctttggtggatccgaacgcgatgtatttggttacaacgctttgatttctgggtttgtggtaaatgggtctcctttggatgcgatggagacgtacagagaaatgagagctaatgggattttacctgataagtatacatttcctagtttgctaaaaggaagcgatgctatggagctttctgatgttaagaaggttcatggattggcgtttaaacttgggtttgattccgattgttatgtgggg

SEQ ID NO: 34974 - DNA, 1040 bp, Arabidopsis thaliana
ttccctctgaattttcccgagaaaaaatttctgtatcagatcttcaaaactcttgcgcgtgtctgctacgtgatttcttctatttttgataatttctttcaaatgggttttttaattctcaacgagcccgataactcttctctggcccaataatatttaaagaagttaggcccaattattcaaaaaaaatggtaattacgatttcaccacaaaaacttgtgtttcgatcaaaattatccactatccacaacaaggcaaaagaagagttaagaaagaagaggacgacaatggctgtaaatatgtgaccatgaaatggcgagaggctgagataattgtcttatcccttcaaaatttaagacttttaatgatcggaaggaacaagatgacgaggtcccacgaaccaccatacacacttcaatttcaaataagagcttttcttcagttgttgctcagagacttaaccaatcaaccatggcgaagatgatgatgttgcaacagcatcagccttctttctctctccttacttcttctctgtctgacttcaatggcgctaagctccatttacaagtccaggtctttttcatccttcgttctgacgactatcattatcaattttatcagatgggttctgcttttgtgtgtctgatgagccaaaatccgttcagcacatttcaaaactattccttttaaaatgggtttaagcttgtttgttcgacttcttgagctatggatcattgtgtctatattaatgaatgtgtgtctaaagtcttagtgtggttcttgtttcagctctgattttgtattatgagtaaagagttttatgagcttcttcgtcataattgtgagagtttctggtttgtggtttggctatggtttgagttgtctgaatacaccctcatttgtgtcaagtatgatttgtttctgtgacgctctgccttcagattctatcactagtcttagaattgaaactacagtttgtattttggggataagatttttcttatagagttggctttgttgttaaattgcagtcaagagga

SEQ ID NO: 34975 - DNA, 706 bp, Arabidopsis thaliana columbia
atcatctcttaagattcgtgactatatatttctcttcagttcaggtctgtttctctctgtatccactcttcagctccagctcttgtgtcacacgcacagtcttgcgccacacgtacaatcttgtgccacgcacatattttgtatcacagattatatcaactttgatcatcttctttatctagagtctaacaactagttacaaataaacattcattttatactacaaattgaggatagtatacaattttctttctttcttgattctgaatttttgtccttgaaggtttaatcccacttcgtaataataaattcttgagtgttccgatcatgcatccacatgttttctcattacttaaccttaaaaacgagagtaattagattttagtaatggcatatgcgcaactcacaaacaccattgttgaataatttatgcggcactggtagcagaaaagatgaaatccagcttatatgtaatttacgtgctcaactttaatcagcggacaaaaattataaatgcgtaaaccacatatctccccacctatatgcgtggaagttgtattcaatatacaaaaaaaaaaaagtcattataatttcaataaccagattgtatgaacccatgtcgattcatgtatgactcattatgttgcaaacaagttacaagttacaactatcacgtgactttgcaacaccaagtactagatttttt

SEQ ID NO: 34976 - DNA, 565 bp, Arabidopsis thaliana columbia
ggacttttgcaaccatgtctgaagaatcaagaacaggcactagacaattaaccattttgattggtccccaagaacgtttaaaatgataagtttttctatcaatgtttttagggttagtctaaactttttgatatgaaaactccaaatactactaggaaaaaagaggaattttaactgataaattaatgaaaggaagagaggattgggataaatagagtcatggggagaggcatgggagggatgggagaaacggaacggaagaacgccacgtggatattcacgtgggagaggatgaggtcacacgtgtgtagtgaaagagcagggtccacatttggatacggagaatcatagtgggcccttttctctcctgagatgaagaagtgagttcaagtggtgacttgcacggtaataacacaaactcaaaatggattgtttttttttttttaaataaaaaaccattcaaacaaaaagaaaaaaagattatttttattttttagattcttcttatgcagtattttgcagtgggtagattctctctttggcttcatcgacagattaattttat

SEQ ID NO: 34977 - DNA, 517 bp, Arabidopsis thaliana columbia
cgactcgatccccgtatgtactacagagatgttcttgattcttcagacatggttgcaaaagtccatagtcaaatcaaggttatatgtagcttcaacactgataacacgtttattaacaaaaccatatcaaaatggttgttttttgcattttcagtcttgacgtatacactgccatttttgaattagtcaaatcgttacgtagttggtctacgatgtctcgctgaaacaaatacatacgtgtgtatatacactatgcaagtagtatagttaacatcataattgaccctaaggaaaaaagttaatgtaaacagtgacacgtagatatcacacggttcttttttggtttttgttaaagatgaacttgttaataaagaatatgacgtgatcttctccggtacaactctttgtcctataaatagagaactcttgtcttcatattctcgacacacacatataaacgcacaaactcgttaaatttgtacgaatataattttttttaaacactcgttataatata

SEQ ID NO: 34978 - DNA, 614 bp, Arabidopsis thaliana columbia
cctagctcggattttttgttattgtatatgtgcgttcgtcgtctccatttcattatgccttagcaattcacttgttctattcatatggagctattaatctcattctttggatctctgggttttcgcataccctaaacaaaaaacctctataactatttatttagtacgtcttacaaattctgtattatgcagaatgcttcggaatttctgcgagcaggctacacgtgaaaaggtcccggataatgcatctgatcaggagatgctcgaggttgttatgaataggtacaactctgaacattactctttcttaggcagttaagggcacatgatgttgcattaatgtaaacaatcaaataattgttagtagttccaatcttgggtaatgaaagacgtttcctcatgactatgttggtcattagccttgtttccaaccacgttagacttggtagaatgatttcctctgaaacttcctggtatgtatttgaattttaccttcttattgcaggtatgaaaaagaacttgtgcaccctattcacaacctcctctagtggagagcttgcccgtggtttgcttattcaggtaatctaagttcttggcatgaagctatagtttat

SEQ ID NO: 34979 - DNA, 666 bp, Arabidopsis thaliana columbia
gcttactgatagatttctacaggggcacttagagaaagcatctgaaggaggttctggtgctcgagcttgttcgaccttgtttatagctaatctagggcctaattgtacagaagatgaactcaaacaactcctatctaggtaaccttgtacaatgactgaaacctacagcattagggtttgaatgtttcttcaaacaatcattggtttttgcctttccgaaagtcgattgatctgatccatttgcttacagatatcctggtttccacattttaaaaatccgagctagaggcggaatgccggttgcatttgctgattttgaggtataagttgttatacatgcttttgattttgtctttgtagtctatatacccactctcaccaattgcaggaaatcgagcaagctactgatgccatgaatcatcttcaagggaacctcttatcctcttcagaccgaggcggcatgcatatagagtaagagtagtttttcttacacttgttcaacaattagtttaaaattcaaattttgccagattattactctcatagtcattacagctccccaatgtccaccctggtttttggttctccagatatcaagacaaagatgaggaacagtaaagattatcatacacaaagctcacttctcaaatgagatgtggtgatatg

SEQ ID NO: 34980 - DNA, 566 bp, Arabidopsis thaliana columbia
ttttgttagttataaaacatgtctcttagcataagaattgttttaagagatcatcaataatgatgatctaagaactattatactatgttccgtctcgattttgaaagtacttaaacgtcgttatcgtgtttgtctcggcgttttaaattccactgtattagtaagaatttatttttaaaataactttagtcatttttaattatctcttctcccttttcaattattaatgatcatagtaacttctcttgatttgtaaatatgctacatagttgatcttttgaatatacgaatgaaaacatattataatagtatgtgttcaaaatcttttgagttttatgagtacagaactatatgtttaatgggcagattagtatataaaattaccagtgcatcagaaggaataatgatctactcgagtagtatatcataataatactattcaaatgtataccaacgacaatgagttcaaaatcatcaaaccccatgggatgatgagcaaataatatttttatcagctactctatacatcatttgatgataatatgcaaaaattgtatcctaatgag

SEQ ID NO: 34981 - DNA, 565 bp, Arabidopsis thaliana columbia
taaattatttattttcatacgtagcattgaaaacgttaccaatacgatatccaatatttagtatgtataattttcaaaatttcaaaccatatgactgatccatgatcgaatcctctttatatttttttcatgggtccgagtagatttttaatatctcatgttggagaatcctgagattattttaaacaagaaccatttacgacaaaaaacagaaccatttagtgggggtagattttaggtaagattttataataccatcaaccaaaagaattatgacggataaacaaactgctatcacttaattgaatcctcttgttaattatatatatagacagattaggagaattatgttattaccaaagctgtgctatatttgtctttgcatgtgttgttcattggacggttcacgatcgccgatcggtaatcatggtgaatcaaacggtgatgattgaagcacaggtttggcctcggtcggagattttgtctcttgctattatttggaccattgcttcttctttgtttttggtttattaataatctattcggaccacacacacaaaaaaaa

SEQ ID NO: 34982 - DNA, 601 bp, Arabidopsis thaliana columbia
tgtaaaacattgtgggtttgttcctctaccaacatcatttaaaatgaaaccattttaaaaactaaaacataactttatataaaaaggacgaatatactttgtatcaatgtggttgtattagtttcttaaaatatttgtagacgttaaatccagtaatatccaaggaaaagctcatataaaactttaaattgtattttatccttaacttttggttgttttcaatattatcattcagaggaggggcttgtctctttgtttgtttttttgtttttcttcccaaaccttctcattttgtctctcaaactttgatgcaactcgggcttgtctctttatttataggggctttggtacaatcctaaaaatctgaattgataagttaacattaacacaaacaaaaaagtttgatagttaaataattaatttgacgagtagaaaaatcctttttatcctttttatcattaaaacagaaaaatcctttttatcattatcatttttataaatattctaacttttctataattgtatattatcatatatttcatagattatttatttcatgacctatttaaatatatttccgctagagaaactatttgtaata

SEQ ID NO: 34983 - DNA, 707 bp, Arabidopsis thaliana columbia
ccactgtagtaaaggccaagcactaaatctcaattaatcaaagcgtgcatcaacaatgatagcaatactaagccatttgttcttaagattcagctgtcttagtcgtagatagaataactgctttgtgaattgtaagaactggattaggcttatatgggagaaattgtactaaatcaaagttcacatcaaaaaaatgcatatgattattgatcaacagaagcaaatgaaggcgagacggtagaggatgcaaaaccagctttgagctcacaaaaatagggttaatcgaaaccatcggaaacttaatcgtggagatatactgaaactttgtttctttaatctcttcttcttccctcgtctctgtaacctccatttttctactcgatttcgagctttctcttctgcagagccctttgttttagctggaggatgacccaatttgggctgaatttaaggcctcacatattcataggcccatatatgtttcaaacccaaatttaaggatcttgattaactgtgttacttttcaatcataattaatagaattgagctgtctaaaaaaaaaaacgaatttacctgtaaaacaaagaatgaaagtaccataaccatcccaacaaaaaaaaagagtcacctatggcttgaaatcatcttttgggcaaagaatttgcaggggtttgtcaaattgttcgtttcgtgttcatatcaccatg

SEQ ID NO: 34984 - DNA, 563 bp, Arabidopsis thaliana columbia
cgccagtgtgctctaaagctctgacatggacacctgcgagacgcagtgaagcataatgccgacaccctgaaacgtttttactccaagtatcttgtcggagtgtatatagttgtcctggcaggtaagcatgctttgcagcttgaaaacttgcttgaactgggtgatttctttatgatgcgatgtgctttgaagaccttccctgtaaaggagaaaagtaccgtctcaaatataaaccagaggtcccctgcgctccatgatgctctgatatcaagagagcactacactatagcgccgagatatacttcctcacatacgacaaccaagatccaaaggactagctaatctgactatatgtgcttctgattcttactcaatctctacgcctccgaccatcaccgttaccgatggctgccacacggctgaagcatttagtccacttgataccatcttttaggacctagcaccactgtgcaagcaccgcagagagtccttctttagaccctggtgtgaggaaatgtaagagacagatcaatggccttgctgtcgagtatcatgcagtggat

SEQ ID NO: 34985 - DNA, 492 bp, Arabidopsis thaliana columbia
cgtgtctttaaattaattttgcctataaaaacagagcatcggaggagcaaggactaaacacataactcaccagaatttacacagagcaaacaaaaagactaagaaaatttacgaaagatatttaccaaacaaaatgtcttcctcttcctcgcagacgtcgcgtcgcccatatatatcagcggctcttaattcgcgttccaatgcagccaagactctcaacgaattgatcaagatccatggattagaatttgctttcaaaaaagacggagtgaaaagggacatggaaaggggatgcaaatcggcgttacgtgaagagtacgtatccaacaacctacataatctgaggacacagtacttgacaaaggtgataaatctattccgccaaaagcaccacgtggcagagattatcaagacgtcatggacgtccgatgacggcaaagcgcagacatatgacatcatcgaagtcatacattacccatcaaacgaacggtt

SEQ ID NO: 34986 - DNA, 583 bp, Arabidopsis thaliana columbia
ttcttcttgcgggcagaaaaaaaaagtattaatttataaaatacttctattctaacgaattatttgcgccgagtaatcaagaaaccaatattatattagaacttcacaaactcaagtaaactcaaaaagataatctaaactaaaaagtacaaagacttggccatcgattggattatctataggattaataaatagagtatctcacttactttaacttatatttccatccatactttaatattaatatccgttgatattatacttactactgaaatctctctctctctctcatatcaacatgtagaaggggaagaagatgttcttctcatcacgaaaagtcagcgtctctctcttcatcatcaacctttcttcttcttcttctcaatcttttctcaagaaaatcacaaatttcccaagaaaacactcacatatatgatgctatatatagaaagatagtctcatctaattctctctctccctcggattcgttagatgtgatcattttttcgtgatttttgatcagattcttgcgtatagctgtatatatacacaagatacctcatcatcgcatatatagattatg

SEQ ID NO: 34987 - DNA, 315 bp, Arabidopsis thaliana columbia
atgacatcatcgaagtcatacattacccaacaaacgaacggttgatcgccgacatagatatgtacgacgggcttcaccaagtcatggaaattcctgaaaacctcgagaaggatgtgccggtcgcgttcgtcggaaccggcgatgatatacgccgtctcgtagcaactatttccgacgaaggagttgaggaagcccttctatctaaatggcttgccgtaacggtatctaagcccgatggcgtgtttcctaggttattttagttacacattgtcgtttaaatttgcgcacgtaatatatagacaattccgtcgtggt

SEQ ID NO: 34988 - DNA, 559 bp, Arabidopsis thaliana columbia
taaaaagtaagaagacaattgttccgtggtgaaccaaaaaaaaagctcaacaaatcttcagctttgttttcaccgaaccatttttgtttcaataacgtcacagcagaggccagaggggaaataaaaagagtagtttctgaaaaaacaaaaaagaagaagtagagtttcgcaaaacgtcaaaaacttaaaaatctccaaattgagtttgaagctaaagccctaagacgatctttgcccaaaaaaaaaaaaaaaaaaagccctaagacgatatctctcgaccttctgttctctccgccgtctgcaccgccgtgatcgaccttctccggcgcccactcagctttctccgtgcttagccgacgtaatttttcaccactacgtacgtctctcgtgatctccttgaaaaatcgaaccctggtttttgatttctctctctctctctcccttctcttatcatggtcgactggttctcaaaagtctgatgattggttgtgattagtccgattacttattagtataagtagatcgttgccttattggatcatcgaagctcctgttttga

SEQ ID NO: 34989 - DNA, 590 bp, Arabidopsis thaliana columbia
ggttagattgttggttgttgggtttatagtcatatattaccaaccaggatgcatgtttgctaagttcggctgatcgctcatttaatgttttctgaagaacttcagatgttttatgcttccgtattgtaaaaatgtaattgtcaaaaacactgataattaatatgcgagaacattaagcacgcaattttacccaaatccaatatccagattgtcacaccaacgaattttaaatcattaaatgtgttagtcataagataaaatctttttgtttgtcaaaaaaaaatcattctcaagatttaaaatctctaatcgttgctgatataacaaatgacaaaataataaaataaaatattaaatgtgttttattttacaagacagtaatatatttggtatgaaatgctccagttataaataatatatatatatattgttgatattgtgcaagccatcgcctgattttattgtgttttgatcccaatttgtatctgcaaatatatgacttcaaagggacaatatcgagcggatgtgaaaagtcaaatttgatatttctcaaaatatttaatcacactctgccaattgcataaggtttg

SEQ ID NO: 34990 - DNA, 478 bp, Arabidopsis thaliana columbia
gattcacttgtagcgatgatacaacgaaagtaaaactacttattacatttgtcaaatgatactatataggtagctcataactatgtatagatctctaaaattcatctaaacccgaattctgccgtgtggaattaacaaaaaaaaaaaaaagaagagtaaatcatttgaacaattacgtgtgttacattcctgttaatcatatttatatatgtataggttaaagcttgcttatctactatggaacaaagaggatctataataacccttcagcaagtcagcgacaaagactgtagtagcgcgttacgatagtgataacgttcacacgtgtctccattgccacatctactcagacaccaaccaaaaaaaccttgtagatcacacatgttactgaattaattacgttatctctaataagaattaccaaagtaaccttacgtagcttgctctgcaagtgaaagaattggtcttcaaaagactt

SEQ ID NO: 34991 - DNA, 524 bp, Arabidopsis thaliana columbia
atttccacgcaatattttcacgctactcacatgttttcttgtagtgtaatcacatatgctcataactgcacctcaccccatatctctccttcgatggcttttagagaaattgacgtgataaagatctttgttgggtcagagttttcagtcacaaggagctttccattacaattcaaaagttttgctctatttccaaacttgggtagcttttgctttcccttgacacgagcccataccttctcatgcatgtacaccttgatttggtttcgtttttgattgaaagagtaaaatcgcttgtttatcacacataaacgcttgagaatcctgtggtttacaacctccaatcacaaaaagtatgtatttgatgagatcggtctcatgacatgagtggaaggaaagttgggtgtcggacgcaagacgtactcatcgatgtaggctttttttgcataccgatttttgaattttggtagcctaaaacatacttaaataatataattttttatttaattaaaaagaaatcatcg

SEQ ID NO: 34992 - DNA, 626 bp, Arabidopsis thaliana columbia
ggttaagtttttacttgtaaacgtttaaatcttttctggtatattgaaaattaacactatatagcaactaaacactctaacaataaatgtttaactataacatattattgtgctagaaacatgaatatgtcagtgaaattataggggattaatatgaaaagaattgagagagggtagggaccaagtgaggatgagttatataggctatggactttagaaaccgaaattattgggagatgacaatgagaaatggaggcgattaggtgtaactaattaataaactagactagattagtagataggggctttcgtgttcatgctcccattctcatttgttcattagctatctcttctcctcaagtttccactttttttgttttctaaagagtttttaaaatccaatactggcaaaaatttaatatcaattatggagcatgtgtgccacctacttctccttccactggtttttaagtttcttagttattctattatctcgttaagcaaataaattaaactgattttttcaattaacaagtatatcataaaatttcgttttttaattttagaaatggagctttcatcgaattttatgcagacttttgaaatatttccgtgctatatttagc

SEQ ID NO: 34993 - DNA, 352 bp, Arabidopsis thaliana columbia
cgtcagcaggaggagcctccagtggtagtatcttcatcgaattgaacattttctgcagcgagcaaaaaaaaaaaacacattagcatcagattctgatgacattgggaaaatcaaaattgagcataattgacctaagaaacataccgcatctcaaccgataaggaatagcaccgccgcgagaatcgccgtgacgtggagacgaagagagggacggagcaaatcgtgatctgaaaacgtacaagacggattccatgcaaatccatcttcgaaggaagaacccgcaccctagaatatatatatactctgtattcaagtttgtatatcgggcttttccacttgcggcttaaaaagt

SEQ ID NO: 34994 - DNA, 712 bp, Arabidopsis thaliana columbia
tgtctcactagcatgcatgattatgtttcttttaccaatggagctgtgaagacgcatctagcttattgttaagtgttatgtggttcatgctcttaagattttatgctaaagcaggctcctggcataagctggaggaaagtaattgagaatctcgatcatgacggatttgacatccctaatatggagtctttctcattttttatgcggatctataaagctgcttgcaaggtgtgttctcatactctctaatttgactgtttaaaaatatgtttacttcattttgttgtttgagggtgttaatctgattcttgcaggagccatttcctcttgatgctgtatgtggttctgtctggaaaaatatggatggtcaattatcctttcttaagcacgcaatatctgctccaccagaagtattcacctttatgcattctccaaggaagctggtgagataccacacatctgtgcttagagctgttcttccttgtcccagtcactattctgaccagttgtatttcaggtatatattgataacatgcacagccaagagcaacagttaggactatccaatcatgcatggctgtcgctcgatctcttggatgtactgtgccaattggccgagagaggtcatgctgttttagttagttcgttactccagtatccactcacacagtgtcctagaaccttgcttcttggaatgacacacatcaaagta

SEQ ID NO: 34995 - DNA, 546 bp, Arabidopsis thaliana columbia
ttttgtttgtttggttggaacatggagaggattgggtttgggaatatgtatgtgcacattgcgacttttgttctcttctgtttagctcctttctttatattcaacttggctgctataaacattgataacgagatggtaagggatgcacttggatatactgggattgtgctttgcttgtttggtttgctctatggtggtttttggagaatacagatgaggaaaagattcaagttgccgggctataacatctgttgcgggagaccgcgattgctgattgtacactctggttgttctgttgttggtgctctttagctcaagaagtccggaccgcgaattcttatgaaatagtggaggataaattttgcaaaagaagagaagacaatagtaagattgatgatgaggttgtcgtatctgcattgcctcgtgaagacggtgtgtttgatccgagttgcttgcctaagaagatgaccacgacgatgatagctagctctactcttagcccgagcagacagaaagatgaaccttgcttgggagagaaaggtgatg

SEQ ID NO: 34996 - DNA, 608 bp, Arabidopsis thaliana columbia
agataccttctcttcatccatcaccagctgctggaaactgatagtgagtgacttctgacctgatcatctcttctccatttactgttttaacataatagttgctatgcgcgcaggaaaagaagtctctatatagttcagcagatgagtttaggagcttgatcacgcaggtcctgtcatgggacatacgatcaatgtcgcaacggaacaagccacaagatacattggatgaggaaattgtttatcacttggttctggagggactagacgtgtcttacatgatagataatgaaagtaatattctcgtgcaggatgtttctcttcccaaaaacctgcaagatgttgcaggaagctgatctttgtaagatttttagtggatcctctggacatgaaatttctatagagtagcttccccttggcaagagcattcaccatctcttacaataaataatgtgaaagtatgacaatgaccttggtaagacatagacagttaaaacggtttataagaagaatttcagatacaagagataaatcatttgtacatgttcccattgacaagtatctctggaactaatgttacaagcacgagacgatgaaaataggagtggatg

SEQ ID NO: 34997 - DNA, 562 bp, Arabidopsis thaliana columbia
attcagaaaattcaacaaaatcttgtgtagacgttttgaaaaacatttcaacttacacgagcattttcatttgtagcttttttcccacttttgtttcgattgtcagtctgcatgttcaacaaagaaaaaagaacaacgtgattctcctctacattgcctatcagcctatagcttgatccggaatgagagaggttcactttagtagtgatcgaagttgtttaggagagtgtctatacaaaacccatgggtcatgggccatgactaccaataaaatgttttcaagacttcccaaaatacccaatgatctagcattttttgaaggatcatctacaacaagctccttaagagaagaaacacgatatctaaatagtggaaagacgcaaaaaattggtgcacttgaacatcctctagcatgccaaatatccttcctctagactaaccttgattttagatgaccatgattctcgtctcggatactccgaagattataaatgaaactgacttgatctgcataagacactagaatcgactgatcaattttttcgaaattctatgtgttgat

SEQ ID NO: 34998 - DNA, 587 bp, Arabidopsis thaliana columbia
ctccatcacacgtggaccataaggtccagaaccttaagattttgtctgtattgtcacgtggcgttgtcagtgaccgtctctcggctctttttacggattcgccccgttggaatcttacggcctttgtcctccaacggataagcaagcaatatttatgtacgaataaaatcatttattgattcagaaattcaaattcatgcatgcaaagcaatttattatagagagttatttccaattcaactacagaggatgatatataattagataatggcatgttttgaatatatatttgtgatttgattttggtttttaaaaggataaagcaattaataatttaagatagtcacaagacttgcaagtcttgtcacatgagccacctctattgtatagtaccattatgttttggccgtttataaattcgcatttacgtatgtgtacaatgaatcttacaacggtgcaagtaagtaacttacaccaaacatttttgttaccaataagatctattaattgtcaggtttgaccatccataaaattaaagacgaagcagaaaagagaagagttaggcgaaaaaagagagaaataggaag

SEQ ID NO: 34999 - DNA, 649 bp, Arabidopsis thaliana
gtaacggccgccagtgcatagatacaggaaggagatagagagtgaacaggagaaattattacattatgttgtagaaacttgtggtacaaatatctgtaacgggaaaaggtgaggattctacaaccagaggaacagtagttctactttgatttgacccaacaatgtaacatcgaaaccgcattcgagcagataaaaagggtcagaactatctaaagctattaactaacatcatttctattttaagaatggtgtggagctccgtaatacattatccctggtggctggaaagttggaccttgttgagattgctgagctgagttcgactgaggaatttgaggctgttgattacctatcaaatgtggtggtggtggtggtggcggaacgcaggtggcattaacggaatgttgccaaaggcgtaagggttattcattaccggtggttttaggaactgtggtggtggtggattaggtattacatggtactgaccttgtgtggtaggtgtctgattctgggagttgttgtaagaagggaatgaagcattagtgtctgagaccggaactgtgctctctgatttggatagaccagaagtctttgttgcttcagctgcgaatgaagatagaccagactgcattatcatatgtgatgaggg

SEQ ID NO: 35000 - DNA, 912 bp, Arabidopsis thaliana
  unsure (1)..(912): unsure at all n locations
tgtgcctatgttaaaacattttcataattcatttataatattatttaaaaaaaaaaaaaaaaaaaatgtactgcgttggctactcctgaatgcaaacaacattgcaaaagtatttagttgtgtttttaatgcctaatcacattaatagatactagatctaagggaaatagactttatgaaaaaatcaattgacgttaggtaaaaatttgtttagactatttttgtctaccagcagacaactctgactaaatttttaatcttatttactgcaactaactattaataaactaataaaatcctaatttacaatatagatctacagtaaatgaatataaaagtctggtagtaccgtaaatagtacatcaagataagggtataatagtaaacaaccatcgtactcgcttcatcttttattttactctaaaatctctttctgaagaaaacaacaaagcaaagcgttgaagagagaagaagaagcaaagatataacccccaaaagtatcaattagtttccattttcgccgctaagattctgttttcgaacatttacaccctcaagaatcgccgccatgtgtggaggagctataatatccgatttcattccaccgccgaggtctcgccgtgttactagcgagtttatttggccggatctgaagaagaatttgaaaggatcgaagaaaagctcgaagaatcgttcgaatttcttcgattttgacgctgagttcgaagctgatttccaaggtttcaaagatgattcgtctatcgattgcgatgatgatttcgacgtcggtgatgttttcgccgatgtgaaaccattcgttttcacttcgactccaaaaccncgccgtctccgccgctgcggaaggtaaatatttagggattgactttagtttgagcgattgaattgggatcc

SEQ ID NO: 35001 - DNA, 736 bp, Arabidopsis thaliana columbia
aatccatagcttcaccatgagttcaaatctagcaaatactgtatagtattatttaatagaatcgagtttaatattcctcaatcttacatgtgggctttacatgtacagaccaaattccaggcccaaaaatatatttatatatttaggccgatattgggcccaatatgctatcatgttgatcaaataagattaaactctaatatatatgccaagttcaaatttatatattcatgtaacattggtatgttataccaagacataaattagttagctcacttaggaaacatgactttttttcgaagataaaaggccgagtgttatcgttggttcatgtatatctttattgttatgaatgtctgtataattttgaagtgttataaaatttcacaatgctcccatcttcaaaatagggaggacgatgagtatctctctcattttaaactcccagtggtaggttttgcgtgtatattacgcggatttgttactgagagtttaaaatgggaaagacacttagggggaaagcgaactgaatagtgggtcgatggttgccttgccatggttaacacttaacactatcccttctttcgtcaaaggtctattggtaagattacttattttgtttatgatgtctatattgaaattgtaaacatgaccaaattttttttgtaaaagtgagatgagtcaaactcattggcaatttagtttaagaacaaacttcatcgattcactttattac

SEQ ID NO: 35002 - DNA, 550 bp, Arabidopsis thaliana columbia
taatctttacacctccttgaggaactttttatttttttcatcgtcagtcagaactcacaagtcagtaaaacagtcatcgaaacaaaaagctttcatttgttgcacgcgggagagctttgctttgcacgtgtcagtaaaaaatgtcctaacggatttttgttcgtagattttgttattaaccaaaatgataaagatcgtcattcataatgattgttaatgattgttagtcatctctttattgataaccaaagaaatcctagtgagtgatcagatttttcgataattacttggattctgacataaactggtatttgaccaatcatagagatgcgtacgatgaaaaattgcaagcctatttccaacggatcccaacttgaacaaacaacagacaacatttcaaagcatcgtcacgaaaatgcaaattttcttccaccattacttttaccattttttttaccatgaaacaaattaggaaacagaatgacttaaaagattaataaaaaggaaacacacacccaagagatgagaaaatgaaaagcaacacagggaa

SEQ ID NO: 35003 - DNA, 691 bp, Arabidopsis thaliana columbia
tgcagatattcttctgaataagataaatttattacattttcaaaggatccttcacaaaatatatagtctgtctaaacatatcaatttaattaaccgacaagtgtggttagctggagttcacagattctaattattgaaaaatgaccactatactgtattagcgaatccaattatatcatcattatactacatacgactttaatataaacgtaatctacatggacaaacaaaactttcactatcatcagaagatccaactcaaaatgtcaattaaattactccacttgaatataagtaagcttttccttattgttttcctcaccataagtactacaaaaaatgtttaaataaaaagaaaactcttacaccaaacaagtcacatagatcgaggaaaaaaaaaaaactcctaaaagattcagcaaaatgataacctaaatgatgaaaaaaacaaagtaagatgataacctaaataaataaatgagtcatataagaaagagcctctgaaatctcaccaactctttctctctctctttcatttcattacttcatctctgtttttcttctctaccactatctcttctactattctgatctttctcttacacacgcaattacgtatatataaacactttcagagtagggaggaaaaagattcaatagaaaataattacttgatttcttgatttttttt

SEQ ID NO: 35004 - DNA, 462 bp, Arabidopsis thaliana columbia
gatcgaatttcactcgagaaataacgctcactgctgccactgtagctgctgctcatcctccattgacagattcttcgcagcaattcacaattagttaacggatttcttgggttaattcggtaatctctcctaattaggatcgtatctatgggggcgcttaatcaagtagatcacttaaggacacggtgtcgttaaacgaccagtgttaacgcaaacgataaaccattttgaaagtagaccaattaaaataccgtttgcttatttatcaactgagaacggcgtcgtataaagtagaccaattatccaaaccgttgtcgctttgaccatttctttcagctctttctccatcttcttcttatctccggtgagtcaatttggatgcggagaatgagtgtgacggggattgcgacatcgacggcgaagggacttcggagagtagttacccgaaccttttaggaggag

SEQ ID NO: 35005 - DNA, 593 bp, Arabidopsis thaliana columbia
tcctctttatctctctaactttccccttagagagattcctctttctctcaaactagggtttcctctctgaaaacaacaaaaatatcccaataattgcaaaatctacttgaagatttttcattctcctttcttataattaatgcccaagagagaaacaaagaagatcaaaccttctcaagaagttatcaaggaaggaccttttcttgttgcgatccatttaaaggtaagaccaagagtttttcattctgtacagccaattcactcacacttgcataatatatatactttctatatatgttgattgattatataaatttagagagtttagatcatgaaaatttgatcactggtcttgaactaccaagttataatttggacgaccttttttctttacaaaagaaagaagaagttacaattgaaagtgaaatcaggaattcgggacttctaatatacagtgaaagtatcctatatagcaggtaataaaactcggtcataaattcaagattcacactaatatgtagtacatgtggggactcagagtcagagagacagagagtgctttgatgagaacatgttgtttgtttgtttagact

SEQ ID NO: 35006 - DNA, 939 bp, Arabidopsis thaliana columbia
cattccaacttggccaatcgatgtctagactcgctatattcttcaaggcagacgacacattcttccccaacctcaagattgaattcctcgacggcaacaaaaatatatcttcgaacgttttgttgtgtctgatcagccaactccacatctttaggtaaactctaatatcctagagaatcatagaaatctataatactagttacaatgtagaagaagagacaacctataacgaagctagatactatagccaacgtaaccaaaccaaacaacaaaagtatgttgtgatagaccagtttttctttccaaaatacggcccaattaaaagtttggttctaaaaacaatttgggccttagtttgtatagtttaaaatgtgtttcttagtgaggattggtttttcatgcccttttgtttgtgtgctcctttttttgtatattgaagatcatatcaaagcaaaagcaatacaatacttttcattcaaaaagttcctccttctgcttgttcatcaaatctctcaggtaattaaatatatggttgtaccacttttagttttgtggtattcggctctgatgttgaatacttcaaatatctagatttgcatctgatgcaattgaaaaccttttttttttttgcaattgaaaactcatatatatagtatggctagatatatgcaattgaaaactcatatatctagccatactatgaaataacaattgaagaacttctaagttgaaagaattctcactttgtatgttttgatgaatttgatcttacattccaatcgttccaaatatcgaaactcttaaagcgtattcaatcaaacgaatctcgtcctagatataccttggtcatttcaagaagaagagaaaaaagttatggtcaagaaactaaaagtctaaacccatattataattctagtgttgatatacgagaattatata

SEQ ID NO: 35007 - DNA, 569 bp, Arabidopsis thaliana columbia
actgtatattctaggaaattgtttgactaataaaattgaataatttcattgaataatctcataattgtctagctaccaatgagaagtactagtaaagagcggaaactacatagcagaaagagtcttagggtctacgatcctagctttttaggcctgcagaagctaacagttacaaatatctgtaaaaataacctcaaagtgaaaaggaaagaggaaaaaaagcagaagctagttaagagaaacgacaaaagagtctgaatttatcgaaagaacaaaaagagcagaaaaatgtcacatggcaatagtcgtggcttctgtaataacggtacagagtaatcggatgaagaaaattaccaaaaacaaacaaagagaaagctctaacgtcagttaaatctgtttcttttcccaattttttttttttttctctctcacaatttcatgaagaaaaaaataagattaacacattgaagagcgtgtaaaagaagaaactggtaaattgcattatcccaattcccaaatagagatttgtttggctttcctctattttcattattcggcaagcacgacac

SEQ ID NO: 35008 - DNA, 908 bp, Arabidopsis thaliana columbia
gaggtgggagcatcttccagtcaacaacaacagtttgaactgtttagcgttcttaagtatgcagattccaacttcttcgaaagttatgaaaccgatctattgtttgcagattccaacttctgaaatgacaaagcagaatctggaggcatcatcttcaagtcaaactaaagcataagtaagaataggacttattgttacccttaatgaattctttatgagttttcgtactaaaaaacagatcatcatcatcttgcttgcaggttccatcttctaatatggaaaatttaagcagaagaatcatcttccacactgaatctgctagtagctttaacaaagcaacacttctcgaagcaaagagatccaacaacatgcatggttagggaagaagaatcttgagtttatgttaaaaaatataaaaaagaagtgatatcttttacccttgttatatattaaaaaaaatacgtatacatttctctcttctttttgttaaagggttcaaatgaatttatctcattaattaacaatatcactagcaaaactataattctactaaaaaagttttcaaataattaaccaaaaaaaatatcatacacctttgaaatccacttgtcacaccaccatgcaatttcaaacttcctaaatatgaaaatataattttgacccactagtgaaaaaacaaggaaaatatataacaaaaaactataataataactagaagatgaagatcaacgataaagattgcgtaatcttgagtttagattttagggataatagtctgttataaaaggttctttcctttgtgtaaactcacttgttagtgatacaatctctttctctttctctctcgcaaagaacgctttcaatattctctctgcttttgcaggcgaaaacgaaaccatgggtggttg

SEQ ID NO: 35009 - DNA, 186 bp, Arabidopsis thaliana columbia
tgcggttctccgggtttgtcatggtgtttggtcggaagtagcaatgaggagatgaaaccgcgcttctgaaataagcttctttgaggttcctgccattctcataagatacagatgattccacaacacgacctggtctacctgtaaaacatagggtgaaagttagttgaagtttctaactttaggaaa

SEQ ID NO: 35010 - DNA, 654 bp, Arabidopsis thaliana columbia
ttcttgtactggaaatgagttatgatgacaaacaaaacaaaacaaaaataaaataaaaaataatttctgaatgttgcagtttttatgtaccatctatgatctatgataaatatacaaaaaaaaaaaaagtgttcatgatgctggtttctggtgtaatctttttgtttctttgatcggaacacgaatctttgcaagattattgggataattaactaatataacttgcgtgagatatggcaaaaatcaaagatgattattgattagggtttggatatagcatcttccgatgacatgagttgaagatgatatatattttgaactagcttggttaagaggaaccacaatataatgttatatatgttcaccgtttaattagatctatagtcttatgtttataggaatataggatccacgactctaattttcacatgaggtaataatgaatttattggtttttactttttgagttagagctccattttattgagttttgaggtgaggttaccattatgtgatatttgttgtaacttttgatgatacatatatgcttttttggttaatagacctttaacttagtcacaccgtaaaaacatgcatatatgttgctaaattcggctaaaaacaatattaatggttcagaaagatgatatccaa

SEQ ID NO: 35011 - DNA, 546 bp, Arabidopsis thaliana columbia
gtgaatcaaatcatattctgaaactgtaaataataaatcgtagttatttttcactcttgatacaaatcatcgtaacgaagctcaaatgtacaagaaacgtgtaacgtagttccatacgcctctttttatagtatatttttcctagttgaatcgcgtgtattatggaatgccagtaacatatacacatacatcaccgatcattcacccataagttttacatatctttaattaatatttgtttgatatcttttatagtcctaggaaatgacatatctgtattgctgatcaaatttgaaaaacttaaggacaaagtcaattcacgagtctggttcagtgggtattcaggtatctcgattatatcacattatcacattggcgagatattcaggtatacctcgattctcggattcaacattatgttctaaaagaagacaaaattgtgacatcggatatcttcgaggcgaataatccactttttaatgttataatttcgacgagactattactctttaatatcttaaaataatgcatgcatgagattatgta

SEQ ID NO: 35012 - DNA, 464 bp, Arabidopsis thaliana columbia
  unsure (1)..(464): unsure at all n locations
tnnnnnnnnnnnnnnnnnnnnnnnctaaagtgctctgggccaagtgagatagtgagctgagcacgggggcaagcagccttatctgagcctcatgctgtactatacctatgacactcaaaggtggcaaccaggagaacgatagagccgatgctagtggcaagcgactgataagctggagatgactagcttacatcaggctcatctgtgggagacaaccggctatctagtgatgatgtacggactgagactctggtgctgagcataggcctgtagctggtccgctagggcgaggagtcctcacggacagatgtgagtacctggctctgaaacagatacaggccagtagcccacagagcataacagtgcgaacacttagggtgcgtggctgagcatgcagagccatattcacatgactctcacctggtcataaagggccgagatgtgagtgttagggtgtgtgtgtg

SEQ ID NO: 35013 - DNA, 379 bp, Arabidopsis thaliana columbia
tacaacaaagcaataaatctggaaggcaacataagttacataaccatatgatacgcacctaatcaaataaacatagaatcataatccaaatcttgaactgtagatttgtcactagagaaagtaatatgcaaaagacatgaaaggaggcaaacctgcatgaaattgtagcgttctcgtccaatagactcgttctcagcaatagcaaagtatgaaagcatagggtagtgaccaatgtatgaagcataactatcacgctgaatgttcacagcccactcactgtaccatttaaaccaattccacaaattagtagccaataaaaccaatgcatataaaaatttgaactctaaattcaaaggaaactcacaatctactcaaatca

SEQ ID NO: 35014 - DNA, 562 bp, Arabidopsis thaliana columbia
tgaagatttctctttgaagaactaatcaaaagttcagattcaacagtttgtctaaaaaaaaatgatttttctatattaaaaagtacacactaagactcaaaacttcaacttggttctccacatttctccaataactttcccaggctgtggattatctggtcctctatccctctgtcccgacgtgaagtacaaataaccgttccagaatccggccatcgctgttttgacacggtatggtaaccgtccaatcacagaccaagtctgcaaaatatttcatattcagtttaagaaacaaaagaacagaactatgattgagatgatgctgatatcatagtaatactgaccaacgtatctaactgaaaccggaatatctctccaacaagaacaagccttttcgtcactggatgccaatctgtggtaccaccaacgataacaattgagttattgacaatgatccacgcagattcaatgtgggaattgttttttggcattggtggcaacattttccacttcatctcctcgtccatcatgtacacctcaccattaaagatctgaaatgcga

SEQ ID NO: 35015 - DNA, 605 bp, Arabidopsis thaliana columbia
caatagttgcatggcttacgcgcatcactggccgactgcaaatatgtgacgttttgcaaagttagtaaatagtcttttaatttacgtaattttatatgatgaatttaaatcaactcatgcttagtattttaataaaacactgatatatgttttccaaaaaataacaaatgagaacattcattcaacagctacagaaattgatgtattgataagatcaataaaaatggaatataatagtaagatctttcttcaatgtgaagaagactcgaaaactagctaagggagggttttgacctctgagagacccgaaacggcaagtcacagagttgatggctcatgtggatcctcgtgtcgttcgtttagccattattagcgtcaacgtggaacatatcttccacgtaagttacccagtcaatctccactagctagtgtatgtatatgagaatatgcaatgtatatagttttgcttatctttataataatatgtgtaataaaatctacaaggaaaccatttttttgttatattttgattttgtcttttaatgttatcttatcatggtgttaaatagatttgtactaattcgaattaagaatttattataaac

SEQ ID NO: 35016 - DNA, 543 bp, Arabidopsis thaliana columbia
tatagtttgaagaattgatatataacttttattgataaacttagattataatgcgattgtaaatattattacaaacattcacatttttgaaggattaggttgcagaatcctcccctgcgacactgaaaagtacagtcgatgtccctcttgcaagatggggatttgttcaaagtgtcattctcatcgatgataccgtactgtggacttgcggcttcaccttcaacaattacgtcagcaactccggtcagctttcttgcttctgctccaagatcttctcatccatcatttgcataaacaaaatggctttaaggttagaaatttccatccactaataaaagttctaaaagttaatacgatcaagatctaaccaaaattttgctcgttggtaaatgttattttccaccaaaaatgaatcaatacctagtaatgcattatccactacgctcgttaaacttgtcaaattgcaaaacaatataattatgacttaacaagattcaggattgaatatgttttcacgatattttagatattcagttagtatga

SEQ ID NO: 35017 - DNA, 525 bp, Arabidopsis thaliana columbia
tacagttttcaagtttttgtcaacaagtaaattgtaattcacaaagacttgttctttcaacttgaatctgacttgaaactttggaacttgattcgacgaacttaaacaacaagtacgtgttgcaattatttgtctagtcatgaatgatcagataaacaatcctcgtttagaataaacaatttctccaaacatcttatatgcattggactctgcatagataaatatatatctctctgttttgtttaatcttcatgccattgatcttcgatttctcttgacttcaaattcacagatcgagagttaatgtggtgctaagtcccaaacgttagaaaagggttggatcgtgtcaaagggtttcaatcatggggaaggagaatgctgtttctggaaactctataccaatccatggtcgccctgtaactcgtgctcttgcctctgctctgcgtgcttcttctaagctgataacatcttctgaagtggctgctacaaacagaaccagggcgggtcttagacaaagagtaaaga

SEQ ID NO: 35018 - DNA, 513 bp, Arabidopsis thaliana columbia
gtctgtagtcttttattttcttagtaaattattttcattgttacatgattacataaatcagtggttatgtaaatatcagattctactctttttctttgtcaatataaatatccaccacgtcagcaaacaattagggtttttgaagtaatacaaataggtttcgagtggggacttacccaatcttcttcaggcaaatttgttttcgtcgcaaactttcctttatggcggctcgttcgaggattcttcaatttcatcgcttctcgcttcgtcgtcgtctatcactatgcccggccaaaaagggaggtttagctcgtgagtttccgtaaattttaatagatttagcatcgaatatccgaattattcatgttttttctgttgtctaggttttatctcttgaagcgtttttttggttgtaaattaacaatttcaagagacttaataatatttagtgatttttctttttttttgtgtgtggaaatgatcagatctaataggatcttgaagtgttctagg

SEQ ID NO: 35019 - DNA, 417 bp, Arabidopsis thaliana columbia
cttggtactgggtgtggcattgatagccgctgctgcctgtgtttcctttattggtttagcgttatgttcatgttgctctgttagttgtttggttaacgaccttacgcacttgttaaccttgttgtaatgtttaaatctttgcttcaactgttgtgacatttactccagcttcttattgtctttgcacctcacatctgattttaattggcttcactgactatcatcaacatttgtgatgttaccactgacctttcacttaaatttatacgcaaccagacaatacacaatgacataacccacttgttcgccctatttcacctgcatcctttaatgctactgtgtttacttacgcaacaccttttagacctacctatgtaccctattctccttacatatcagttctaacatatatatata

SEQ ID NO: 35020 - DNA, 610 bp, Arabidopsis thaliana columbia
ccttatcgttaatgcttgtttagttttagggatttagatatgagagttggaattcatgctactaagcatagatagtcaataccgacgagatgtggttgattatagttttgtgacttttaagtttgagaacggttagcgaataatttctaattaattgctagatctacaatttatctttttctgagaagttctctacgcatgtcgcttcaatccatctgaatttacaatcaatttgatttgcttttcatattttaatttacttgatattaaatttagcttaattttgattcttataactttctatgtgaacaaaagagctttgtaaatccgacccttaagtactacaaccatctcttaatttaactactacaaccatctcttatctgatgtttaatttaatccatatcaaaatgtatgatattttacctttgtttaaaaactaatttttctaaccttcatttgatttacatgttcatagatcactctgaatgtcccatgacacatatcaaattttcactcatattacataattgcaacgagagtgtgtaatttgtgttcaaattttctttttaaagggtcactttgaagtgaattgaaacaagtacatata

SEQ ID NO: 35021 - DNA, 547 bp, Arabidopsis thaliana columbia
cgatcctcccctttgctcaagacaaagacaaaagattgaacctgaaaatccacaagaagaattacgcctccaagtgagtagtctcatccaagatctttacagatacaaatcacaagaacagtcaacatatatcgaactatgcatgcactgatgccaagtcttcaacttacccctattgttgtcccatttctgcaaaatgatgggtaatgtttgagctgtttaccacacatccaaggagctcctgaccacataatctcccaactgtgaataatcaagtttatgggaagacggacctgtaagagagattttcccatcagtataacaggaaagtaaaatgcagtgacaattgtatgagagcaacaagcagctaaacatcacctcttcacttgcttgagctcgctgagcagtaaatccattgcttggaaattcgggagatcgattagattccctgactcacattttggtgactctgtaaatgacaatataacaagtgctttagaataatcagttataaagttagaagagacgacataaaggaagaatcatc

SEQ ID NO: 35022 - DNA, 520 bp, Arabidopsis thaliana columbia
atgaaaacaccctcaaataatggttactcaaacaaaaaaatcctgaactttctattttggtttgttgaaaataacattttttgcataaaaacaataacagatgtaatcatttgaaaatctgaaacgatcaatcaatataaccaagatattgttttagaagttgatgaaattgacactttacacgagttagtacacaacagagcgaatggttcgcaggacctctttagatatgaacagaaacaaggaacagaggcaaaatactgctcctaaggagattttttaaaatattattatgtcaaatcctaaatctaaaccccaatccaaagagatttgcaatgtggtcaatcctgtggtccaaattgatgataaatagccgaatccacgttagagaaatcatggactatttagttctaatcatattattcatactaagaaagaatgtggttgaatcaatgggaagcttgatcaatgtgaggtcattactccattgtttggcgttttggtggagacacatcagtaa

SEQ ID NO: 35023 - DNA, 891 bp, Arabidopsis thaliana columbia
tggtttcaatggagctactactctcttgccgagctcgcatgagggacaaaacatatcttctttcaagccttatgtagataaaagccatgatgaattaaggtgggaatattacaagaaagaagctaaaggtaactatctcatcatttaaatctttggtatgtatattttctcttttatatgtctctgtaattttgactaatctcatgttcaggtgggtcgtttcctgctgctcatgcctctcccataggctcaaagccaaacgctgtgttttcaccatcaacggtatcgacatcattatttgcttctccaagcgtacctgatcatcatcagaggacaaattttagtacaacgctaggaaactttactggtcctgcttttggtttcttcctgctgctgctggtggtgctacaacattttcatctaccggtttcggtcaacctaatgcgcctttccctggtttcgattcccagtttccgagcgctttttcatctttctcgacgacatatcctgccgtaagctcgagtgttcagagaccccatgaaacaggtgctgtttcttccccagcatttggatgcacagcctgtggagcaacaagtagctcctctgcttctgatcacttcacctttaatggtgccacaactcctcccgggttgttctttcctaccactagttctggtcctatgatgtttggaacaactcttgctgctcaaggcacaactccagcacttcaaacctatcctgttcaaggtttcattcttctcccattcgccgccatgagtctgcagtaatttctttactctccagcagttcaaggctatcttgtccaaggtttcattcttctcccattcaccgccatgaatctgcacttctgccgtaatttctttactttct

SEQ ID NO: 35024 - DNA, 270 bp, Arabidopsis thaliana columbia
cctaaagctcttgacatcccacacatgcaagatgatccagctaaacaagaaagatttgagcagtttctcaaggagaaatacaaaggagggttacgtacaacagactccaacagagttaatagcatgtcggaatcagctcgggcacaagagaggctggactttgaggctgcagccgaggcaattgagaaagggaaagcttacaaggaggtcagacgggctaccgaacagcctctcgatttccttgctggaggtcttcagtttacttctggg

SEQ ID NO: 35025 - DNA, 291 bp, Arabidopsis thaliana columbia
gaaaaagaacttctaaggagccttcacagtggagaaaaaacgaataagacctacactaaacgctgttcaccaaatcactagagcaaatacctttactcacgatatagtccgcataataagctaaatctgatccgtttcaggtagctgacactggatcactaagatgatgcctactttcttcttgaggataatattcactaaccactatacatatcagatgagataacatgacatagttcactatgcgaccgatcggcagctactgaaacaatcatgtgtgatctagctact

SEQ ID NO: 35026 - DNA, 462 bp, Arabidopsis thaliana columbia
taaaatgtcaagtttctaaagaaaagatcaatatttttttatctaattacaaaagcaaagttcaatttttttcatctctcattctaattacaaaagcaaagtcaatataataacatcacagatctctcaatctaattacaaaagtcaaattggagatcaaacctgacacagaacgtgacactgagtccttatttagtcggctacaaattagagatttgcatccaaatcttatgaactcccccgaacttctcaatttctgcatcatcattcttctacttctccacgtcttcttcgatcttaccaacaaaatgttcgataaaagcgataaagcagcggctgagagcgaatgtcaatattaccctgagtatggctaactaatcgctgcgttttcttgtggagtagatattgtaaaatccctaagcttgagagagacatccgatgttgtgatggagactttggagc

SEQ ID NO: 35027 - DNA, 519 bp, Arabidopsis thaliana columbia
aatgttataacaacttttgaataagtgtttcttaattaaatgattatataaatggaccccgatattaattgttctatgtatgtaatgattttcatgcaaacccttagacaaaagcagaaacctttagttgggctttagatgttgccagactgtagcaaattagtaattagtatttgatgtgcatgctagcacctatttctcgtctctttacgattctgcggatgtatatgatgtgttaacttttttcagaaaaacttttttctgtaattagtggtttaaatcttataggattgtctgatttatggtcgatttgattacaaaaagttaagcagaacttggtacttggtccttggtaggtccttggtgaggatttcaaaaactatatcaacaaaacatgattgaccatgatatatctacaaacttgaactgtttagaacgttatatcgatatttgaatcagagtttcaattccaaaagaagtctcatatatatctccgtggaaaacaaattcacatttagg

SEQ ID NO: 35028 - DNA, 586 bp, Arabidopsis thaliana columbia
ttgggatttgcttcgaaaaggtaacgaacaagcaacgatacgtagattagaacaagtaacgatacgtcgattagagaagcaattagaagatctcaaaatggttgacaaagaatctggcagttcctacttggataaggctttggaaatccttgaacgattgggccgtgcgaaacttgagaaatctgattacgagatttgcaagaatgtgttcacgacactctctgggtcattcgatggtctagattcaatgttggaggaactcattgatgttcataagatgactagtaagagtcttgttgagtatttttactatcgtgtacatgaatcatcgacagaggaagctatctttggactattgaaggatttgaggcttaaatcaaagtctgagaagtggtgtggcttgtgctacaagaacaatcacaaccaagaagactgcaaatttaggattcatacagataaggaggagaaagaagatgaaatcgtagttgattatcgtctggaaacggtaccaaatttagggcaaaaacatatgatgatgatatttggataatcacaagatggccccgattaacatgctcatatgtga

SEQ ID NO: 35029 - DNA, 579 bp, Arabidopsis thaliana columbia
taataatggacaaaaatattgaaaactaaccaataagaagccatacacaatcaatcataattttataataaataacaacaaaaagtattatatacaacaattaatcggttttttaaaaagaagaaattattaatcctgcagtgtatattgaattatatatttttaaaataaaagtattattaaaaagaaaaataagaatatgatgtttatttttaagggacgggattatatggttaaaacggttttggatcgaggttaatacatgacaatatatcacagataaaatcttaaattaacaatcaaaacacaattatacaatcttaaatacgatttagttataaaaaatctaccaggagtgtaatcaaattcaaacataagtttctaccaataaaacataaaagataaataatacaccaatgtcataagtttataacaaaaaagtatatatatttatttcacggtgtatttcatacttattaattactgtcccaactattaccgacaacaaaaatacatttgtaacatcttgttttatagataaaataatttattaaatggcgacacaaaatgcgattttgg

SEQ ID NO: 35030 - DNA, 593 bp, Arabidopsis thaliana columbia
cgtctttcatttaccattttggggaacaaatgttgaaaacagtgtgctctgattgaaattttgcagtgaagttgatgaatcagaagatgagtttcatcatggaagtggaaaaagctgtatgtgcacaatcatgtgacccattggaagttaaaaattgtttgcagacaaagggcttttcatatagttgatgtagctgctctcttatcatgtgcacctttgttattatatatagaaagagagagggagaaggatttgcaaaagattggataagaagaagaggaacttttggatgtgtacttttgtagccacttgatttgtcaattttgtgctgtattttagattattctttgtattacatctctatgctactctgtcctgtaatgataaaatcacaccacaacttttggaaaagaaaatccaattaaaaaaatgctggaattttgaactgaaccgagattttgtttttggttcggtttcggttattttggtacaacaatcggcattattacaatttgtgtttggtacttaagaatttcagccagttccatgtaattgttgtcttaataactggctatctaaaatgagaccggtta

SEQ ID NO: 35031 - DNA, 518 bp, Arabidopsis thaliana columbia
gtgcatatacttttgatgccttgtttgttgtatttattttttagtatgcctcatgggaagatctcttttattattattgaaatcataagtgatgagaaagaaaaaacaaattgaatcctcccaaaattatatgaagtatgaaaatatgaaccaataaatttgaaatatgcgattgcacttggcatacgtatatttatttaacgaacaagacaacacactggtatacgaagttgttattatacagtgaaatgttgattaagaaacataaacaaaaatcaagctcactctgtatccttcttctttcatatgaatcaattgatgatatccgtatcaaatcatagaaaatgtaagatacggtccattatatatggatcatcatcaatcgaaaatataaatataaagtattaaacacatgtggaattaatgaacattttacatagaagccggagctagagcaggagatgagacttcttcggaggtggggcctggtgcaatttcggagacagggcctggtgcgg

SEQ ID NO: 35032 - DNA, 428 bp, Arabidopsis thaliana columbia
tttagtggaagacgtacattggtttttacatcttctatttctttcaattcaatcatcaaactatcaaagcatcaaactatcatagctttctcactagtcacttgtgggtttctcgaaaacaggcaaaaacataaataaaaccccccaaaaaaatgaattagccatttactattttcacatttcagtttttaaccttactttggcagctagtatgagcagttggtccacagtaaggcccatgagcccaaatttctctgtcgtggtctatataagtgcgcctaacccaaaccctaaagtctctcgaaaaaccatcaccggggaatctgacggcggcttagtaccggcggctacatcaaaaaggattgtgttcttcttaggcttgatacttgccttgggaagaatatagcaatcatttttgcggtagtaaa

SEQ ID NO: 35033 - DNA, 797 bp, Arabidopsis thaliana columbia
tatgatctatgcatacggacgaaccctattatacgtacgcatgattattgaatataccttcaaatataaacttgtgagcgtaaggttattatgttttcaatactgacgaatgacgattgtgattcatgttttgaaaaattaataaagtttaaaccatcgaatgcgtaaaccaattattcatcttttaccttaggaaaaagctggatatcattatcatatatttattaagcatattaaaccagaccaatgatttaagtcgaaaatgacagctttcaagctttgcttattggccaataaataacaaactaaaaaaagaagaaattttttaaaacgaactggtgaagtctcgtgttatcacgtgcatggagccagtcagacagagacatcatcaggtgcatgatggaccacggtagtccatttcttccctacaaccatacacgtggcctttttacatttaacagtcaaacatctggtcaacaacactctcatctgggcttccttacatcaaaccctactttttttttgtttatcaaaggcccaattgtatataagtgaaaagtttccaatgggcctttcaaggattattcccagcccaatatttctggagattaggtttatttatcatcgccaccaaagaaatttgagccgaagcttcataatcgtagtctgaggtatttttctcgatcctcaaacatttccaacacctaaaggcttattcgttacagatttctcaccaatcttcggatttattgtgctcgtacgataagcatatattagtaaatttagtggctacagag

SEQ ID NO: 35034 - DNA, 273 bp, Arabidopsis thaliana columbia
cattgttgaaaaggccataaatgtttggatgtaccaaaatgcgagcctaataaaatcggtggttgaatgtcaattaaagaaccataaacctaatccatctctcttctcctttatatatacgcacacaacttatcaaagttgtgccatcgatcagaactcttgtgcttaagcatggtggttaatcagaagacatccggccttgcatccgctatgaacgccaaaatcatcggttcaggagagagatcgatggtcatggcagacggtttcggaggc

SEQ ID NO: 35035 - DNA, 993 bp, Arabidopsis thaliana columbia
caaaaagccaaatactctattatcctaaattttggccccaaccagatcaagagtcaaatatcaaacagcattttcaatattatctctgttctctccatggaacacgatatagataaaattcacactcatagttttgaaaagggatgatagagttttaaaaacaaaccgtcagtaagattttctctctgatcctgtcactcagccaatacgcgttcttaacattgaagcgcatatctactttggtattcactgtaagggaaaagtataagtattgaaacatctaaaaactacaatgaaaagtaaggtaaaggcacaagaacaaggtcacacatttgttcacattctggcctccaggaccaccacttctagcaaagttaagtgtaacattgtctgcaaataccaaaaacagatacacatgaaactatgagcacatccaagtcaatatataggttattcatcaatctactacaaaattcaatccttcccttcctgaaatgagctttgtatcagataaagtgattgaatttgagattcatgtatacaatacagactatacagtgattaacgaatttgatttgagattcatgtatacagatgatcattggctctacttaaactcagttcatagaaagttcaagagacatcaaaaagtagaattctccataacctattccttaaaactaaactcagtttcttttttcaaatggatgaaagcaaaaaaaaaaaagcttgcctagagtgatttgaggagtaggctcattgccagcggaactagctctctcttcggcttcatgaagcatctgttgcacctgcgacaaccgtgaagagactttccgatcaccaccgcttccaccggaggtcgatgccgcacatcggacggatacgagccgggaattagagtgaattggagaaattaggggagtgagacggagacatggtaaaagagattgacacgatttcgatgaagagtgaaggagaagtggatgatggatg

SEQ ID NO: 35036 - DNA, 585 bp, Arabidopsis thaliana columbia
ttgtatttcgcgggaatcaaccgaataccgagaaattatgattgatgagtttgtttctaacaggaggagaaattgaacaatctgagtattgacagtcaaaatgccagagatttccagaggccatacaagttctcagcgaacgtcgaaggcgagaatatccagaagaattctcaggagaatcatacaggcaattcatcctctgaggaaacgcacaagtcctgagacgtactaatctaattgtaaatacagttttccctcgagagtcatacttgcgttccaagaaactggagattttctttgtagtagatcacacttacctaaatctatgtttttctctatttgctttaccatcagaaccaagtcataaagacaagagaaagctttatccttaaaccttcgtaactatcggtgttggtcaaggaaagagagaaaattgagtacttattagattgattttgacaacgaaacaaaggaaaaaagaaaaaaaaaaaagaaacaaaaacgatatgaaggtatctgaaaaacaaaacaaaaaggggatgaagagaatctttaggtacacagagcaattgacgaagaagaaag

SEQ ID NO: 35037 - DNA, 230 bp, Arabidopsis thaliana columbia
tcatccccgatttagtatccttatgatgcatgccaaaaagccatataatacaagtgccaaggataatggtctcaggctgccgtcagctctaaggatttatatactctgggcccaatggcgtctacaatcatttgatgatcattgtatatgatcggtttttgaaaggctgaaccgccaattcagactcatcattgatataacgacaacattgtacaacacacaattcgcca

SEQ ID NO: 35038 - DNA, 474 bp, Arabidopsis thaliana columbia
atgtgtttagcatcactatcttgttcaggtttttctgctaaacaaatcctctatatatgaattcatcattctccactagcaaatactttattcacttcgtcactttgatgagaattacataataaaattttatttttttagcaatgtacctattactagcaaattcatagcaaattttaaaatctcatatgaaaattcttctaacaaaagactgatcctaacaatttgacaaaaaataataattgaacctagatcattcatacacttcgacgagttgagaaatctgcccttgttatgagatttgacataccttggactcgcaatacgcgatattttgcgaagacgaacccagatcgaagaaacaccaaattagattgtgttgcaaatgttaggagtctaagttttgcatcacattctaatttgatgttcttcgatcgaccagaaaaaaataaaagcttttcccggtgacctgag

SEQ ID NO: 35039 - DNA, 580 bp, Arabidopsis thaliana columbia
gtttatttagttcttcccattctacaactcatttaaaaaaaagaaaaacaataacataatttttgaaataaacacacaaatttactaaacattttattttcggaaaaaatattattctttccgtttcacaatataaattattttaactaaaaacaaggcagaatttaagaatatttattttgaaaaaatttaactaattattatgtaataatcataaatataaaaataatatataaccaccatagaagtttaaaaacaatttgtattgtaaaaaaaaaattggttcaaaataatttatatggtgaacaataagaaagaagaaaaggttaaagaattttacgagtgaagcagagtgtgacacacgtgccaaacgaggggagcgcgtgatctccgcgagtaaaaaaggttgacaaattttcataaaatcaacggttcacacggcgagtaagataagatgacgtggagtttgctacagctgtcgagaaaaatgcttttatgctgttgttacattatcctcgcctcgtgatgttgatcctctttgtgttgtcaatcgtcggcttatacgaacacaatctttgta

SEQ ID NO: 35040 - DNA, 528 bp, Arabidopsis thaliana columbia
taacttagcctttctcccgccaatcacacactgggacagccacgtgtcaactcacagttctataaaaagtacccactccggtttatctattcaacccgaatcaggaaaaagaagccggttcgtttgataatttctgtatttaattaaaccggattgagccggatcaatccaatccgttcgttaagaagacacagacagagagaaggagaaaaagcttatccactatcaaatgaaagtctgaagacaaattcttccattagaagaagaagatggctcttctctgcttcaattctctcccttctctctcttctctttcttcttcttcttcctcgcgccttcttcaatctccgtctttcgcttctccaggtaatgtcttgtcactcgtttctagtcttgacatttcgcttttgcttcgttttgtcgtggaattgtatcgggaaaaaaaaaaaaacaatagagacccatggaaccaaattgaagctcctgggctagttcaatttcttgattgtccaaaaaagtgaagttttg

SEQ ID NO: 35041 - DNA, 576 bp, Arabidopsis thaliana columbia
taacattttttaactcctgacaacatttttgtcttctgttgcttatatttaatctcctatgcagagtagatcaaaagagatgaaaaacagaccaatgtgggctttgatgtttgtagacgcccagatgattattgttgtcttttggttttcatttttgatatataccaaaacaatttttaatcattttacactcatacaacgatataagattcacactttaagtctaattattaccaagtgaggacaaaaggatttgaagatattgaagatattgaagattccacatggtgatttcagtttcaaatctttgaaaagtattgattggaaaagttgttagaattttagaacttgcataatcatcgtttcttaaagtttttgtatgctgtgtctctgaaaccggatatgaaaaaccgtttttgagcttatgtggttcctctgttcttgaggatgtaagagctttagttctaataaaatctctcagagagtaaaaaaaaaaagattcacacttttcacataaaatcacatctgttaccgcatgtcgcatgattccatagaccacgacagatagagattttg

SEQ ID NO: 35042 - DNA, 242 bp, Arabidopsis thaliana columbia
  unsure (1)..(242): unsure at all n locations
gtgagatgtttagtaaaacagtgttgaggtttcaaaaagctgaatgatgtggcatgcaccgcanagtacacgcgcactgtgcttggttaattaatggcgtcaacntaacacgacgaagcaggtgagattagtgagataggcagcagatgtcagcgatccaaagacccaaattaataaggattgtgacaatttcaatagcgtatcttattactttctcagcacaaacagtaatacaaaaccat

SEQ ID NO: 35043 - DNA, 496 bp, Arabidopsis thaliana columbia
gtgtgattgaataatctgattgaagggtatgtttttttatcttcagggaactactttggccaagacatcgtctgggaaaacaaagaacaagaagaactaaagtagaatagcttccgccttccagttggtatagactcagcttcggcgttttgaaagagtttccaagtttaaagttcagtccttgaggaaatttagggttttaaacgagacttttattgttccagcattgtactctttagacaatctttacttcttgtcataaatattctcctcatgaaacaagttaacttataaatggtttagatcagtttttcgttgctaacatcagtaacttttttagcagtagattaacatctttatactaatgttttagttcatcaaaacaattacagaggaaagtattggactcgccacatagttaagttgaagatatgatcaggagcaaggtcaagagcagcacactccttgggcttgtgttgttcaggagagactgggc

SEQ ID NO: 35044 - DNA, 565 bp, Arabidopsis thaliana columbia
atcttcagcccgagatgaagctggaagaaataagagaaatgctatagacattggttcagagatctcttcgtgctatcaaactgatggaaatgaaagaaagcaggtcaattatgagcctcatgatctgagcctgatacccgaacgggaaacagagaagttatcagctgggtatgatcctgcattagagtttggatccaaagctttgaagaagaatagccaggcagctggaggtgctaagaagttagtaaaagatccaaaatcgagactttctaaagatgctgcagataagaggaaggctccggggccaatacggaaaggaagaccgacaaagatgagtcctttagatgaagcaagagcacgtgctgacaaacttagaaatttcaaagctgacctccagaaaatgaaaaaagagaaggtaaaatctcggcttaaacaatttgatgatagaattgctttttctactaatcatatagaaagcacaatcttaaaggatataaccaccttgtggttgaaaattcttatcataaactcttattacattctttcttgttttaggaagaggaag

SEQ ID NO: 35045 - DNA, 531 bp, Arabidopsis thaliana columbia
agtaaaggatgtgagtgtggtgtaaagaattatatcttacttggtctacttgtttcgtgtatatttgaaaagtagagcaaaagatgcgataaaagaagaaaaattataaaggagaaaactaaaatcatatacatttctctactcataacttctttatacattgttaactgcttaagttaaaagaaaaacaagaaaaaagagcggattaaacttaatttccccttaattttccaaagatatgacaaggaaataaaaaaacgtaatcaaaggggaaagtaagtcaaaaagtgccctttcgctgctgcaaaatcataggaagcctaaaatcaccaacactgatccgtctcccgatctccgggtcgtagcgtaaacccgccccgaccgacccatcgctccggcgtgtacccgtctccgtggtactctaagcgtcgagtcgtaaatcgctcatgtagtcggatccgcaagtgtcgcgtaacgtttgtgaatctccataaaatctcgaccgtccgattccgacgcatctggatgata

SEQ ID NO: 35046 - DNA, 561 bp, Arabidopsis thaliana columbia
tgattttagaaactaatctcttttttatgataaacagtcatttcatttttacttacagtagaaagcagacaaaagtagtcaatatttggcaatacaatcctacttttgttgttgtgaaatcaccaattgaccgattgtttaaatactgataaagaacaaaatcgaaaatcacaaaaactttgcttatgacatggaagctttggttagaggttctttctttctacctatgaatttaacaagtaaaggtaaggacataaacagaaatctgcttctctactattacatggcatctcaaataaattctgtttatactatgtacgattctttaatcattgtacgaactcttcatcccacaaaacacccgctccaattgtctctggagcgcttgcaggtagcgcgttcttgctggaggaaaaaaaaagtaccaagttttagattctgttaaaaaaaaacagagatatcgtgagcgtgaagtgaactttgttacctgtgacattggtgataacatctgacttttttgagcagcaagtgcttttaagttgtcccagtactagcaacaca

SEQ ID NO: 35047 - DNA, 565 bp, Arabidopsis thaliana columbia
gagccgttaactagataagtctgtctgagcgagcttttgttttcgatttcgtctctttgtgttttgtcgctatttcgagccgttgagcaggtaagcatgtctgagcgagcttttgttatcgatttcgtctctttgttttttgtggcttcaattgccaatggaaataaataaaatttgcttcagtttcttgatgtagttttaatggattaaaacgaataaactaatctacaattagaagagcaacggttgctttattatgcagatggtttctttgaaatgaaagctagaagaagactgaatcagtgtcagacaaaaatgtcttttatattggagattgaactgctaccattggcttaggcagctgagtacacaaccttgaattgaaacattgttcctttgtggaaatgcattacatttggcgccttgaaatcgtgagtcgagtttaagacgatatcacatttgtattttctacatttggtttgtaattatgttaccaaggaactgttttctattaatcccacatcaaaacaatggttattgtccttggagtgtagtacaaaagact

SEQ ID NO: 35048 - DNA, 524 bp, Arabidopsis thaliana columbia
tccgtctggtttatatggatagaagtcgaacatatgagacaataaggtaggtgagttttgtttgatttattttggttcttaataaataggtagaagaacttaagaactgaaaacaaataagaagaaattcttgtgaacacgaaaccaaccgaaaaaacagcagtaggtaagtaaacttagcttgtcacacaagaagcattgcactcttttacttcaaatatacgaatttaaagacatcttaattaacggtactactaaaagatgggactccatccagtctcagaggccaacgcctcaagcccctttggttccctctctgcggctgaattctactcccgccactccgtcacccactcctccgcttacgtcaccaaccccaccggtctcaaactctttacccaatggtggactccactcaaccgtccaccactcggcctcattgctgttgtcacggcttcaccggcgaatccagctggttcctcaactaacatcagtcctcttcgcaaaatccggatacctcactt

SEQ ID NO: 35049 - DNA, 422 bp, Arabidopsis thaliana columbia
ggtcgatctcccggttgtgagtttaaattcactctctcgtcttgttccggagagaagatcgagtagatccagattcactcgatgatgttttcttcaaggaaacgattgttgaagaggttgaaccaccgacttcttcagagcagcagacatgttctgttaaagctcccgcggcgcagttatcggcgtcaattttgaaaaccgccaccaagcttcgtgtgttcatgctcggaatgaagaaatcaaagctaatccaagcgaaatcagaagctaatttcggatctgaagacctcgataagcaaactcatcctcatccgccgttatcactttcgccggaatcgcaacagaaaagtacggtgacagtgaatttaaaagttgaagaagttccgataatttctctattctcaagagaaaacagctcgaag

SEQ ID NO: 35050 - DNA, 453 bp, Arabidopsis thaliana columbia
tcatagggcagagagcaaagagcaaaggtagtttctcatagaacagttttagatcagaatttttggataacttttttggcatcagtttttgactttctttaaacgcttggaattgactacacatcagacagacactcggtggagatttgttatatatactaaatatatactgcctcatttttctcttgtcaaccttacagtcttaattcactccaaaatatgcataatgaacatacaaaaactaatcattcaattcgatttaattgttctatatttcaatgataaatggtgcaaaaaccatcaagagaaagaaaattctaactgttaattgtattgatactcttaatatattaatctcgaaagattttatggtttgagtctgaaatgtaataaagtgttttacagttcatttcgtccaattttcaacttggggaggagtaagtgatatgtatg

SEQ ID NO: 35051 - DNA, 450 bp, Arabidopsis thaliana columbia
taaattattttaatgaattttgtaaagattttttaataatattttctcaaatttgaacgtaagaaaaaactacatagaaattctacatctttatgcatcaaaaaaaatatgatgttttagatgcaactgaatctgcatccaaatatcgcattcatacaaaagtactaaattggacaacgaacaacatcgtcatctagtacatttgcatttatatgttgcaattgcatcatacacaagtactacattggacaaatgaacaatatcatctagtacattttcatttatatgttgcatccggctatatatgtaactgatgtcttaatacatgtgaggctaaaacaaaaatacgcttaattatccttctctagagttggcatcaataaagttagggtctatagattagtatcatgtattatgacttggtggatggctcttttgacctcagcgatg

SEQ ID NO: 35052 - DNA, 527 bp, Arabidopsis thaliana columbia
attgcaggcatgatcttgaagttaacggaggaaaaggtctaatcgttgacccaagaacaaaatacgtttatcaacggccatgaaccaaaatcaaagaccgttactttattcagtacttgtatgtttgcttgtgaaatatttcttcattctttcatgcttatcttctcaagatgatcctgggagcaaataaagtcttcttcttcttctaatgtaatctaaagtttgaatctttttgtttataaatccattttctcagcacaaaaaaaaagccaaagtcttctctcttttctctgtttgtcaatgttcttgttcagctgaagatgacgcagtacatgccattgtttagatcatgctcgagcttacgattagtaagtcagcttcatgctcacctacttgtcaccggtcgtctccgtcgtgaccctcttccagtgacgaagctcattgaatcatacgctttcatgggttctccagattcgtctaggctcgtctttgaagcttttccttaccctgattccttcatgtacggt

SEQ ID NO: 35053 - DNA, 481 bp, Arabidopsis thaliana columbia
tattttcgccttcacgtacgttgaggatatcatatcatattcattcccaaaggcgagataattcactactaaaggaatgatatatgtgttatatattcttaacacatttcaacattattttgtttgcaacacatcttattctatgattacattttaattgttttaactcaaccaaaagggtttaggagaaaataattagaagaaaattgagagagagagaaattagctagacctgccacattgtctcccctgtgacctagaccactctcattggtttgtatgacacgtcaccaccattctctgaccagacaaacatagatagatactccttaattagctctcttgcctttctacttatatataaagctaatttaactacacaaatctctctgtcaaaacgaatatttttttagatgtatacataataaacacatttatgttaaaacctgtcctatttcgtgtgtgccatatagtttggcaa

SEQ ID NO: 35054 - DNA, 398 bp, Arabidopsis thaliana columbia
cgcgaatctcaagaagagagagtgaagtcaaacgagggaccttgaattgtggatttggtgttggaccatcacgtgctctcctccacggcctttcaggattttgcttcttctaccgcacgtgccacactcctcctcctacgtaccggtttccattattgcttttttcttctttgcattccaattcttcttcttattctttttgtcaaaggctctaaagtctctatatctatttgttcgtttagtgaacttttctatgtatatcaaatggattatttcataaacttgtaagagttatatttcaggaaatcatatccccagttttgaagatcgatcccccatgcctttttatatatacaaattcagttatgattgtttgacgcgactgcagataaatcatg

SEQ ID NO: 35055 - DNA, 421 bp, Arabidopsis thaliana columbia
ccacatcagcagttctcctgacaactcctatgtactcacatacaggtgaaccagctggtatgtactcccatgatctaactgcccaacccttctttgcagagcggaaaacctgtttgaggccacagaccaaaacacaagcttcagattgtgattaagctcagatttggaaggacatcaaatgacacacactggattatgcattttaattattaacagataaaggatagtggactatatgattaaatccaagtgtacttcgtttcaactttagtggcaagtggttcttccttacgaagtcttaaccaatacatacctcaagattgaatcttagacgcttctgagaagttcggttgacacattttggcccacacccacagtgaggaccacattcacatacaacatctcgagactcaattaatct

SEQ ID NO: 35056 - DNA, 583 bp, Arabidopsis thaliana columbia
tcaagcttgtcaagaacttggggcattctaagtgtaagtattatggaaagagccaagccaaatgtcttttgttgcatgggagacgcatggtccacctgcacgagtagatgcaagactaaagtgcgtcagataatgaaaaagaaacatgcatttcaacatgtagagcagtttgacaatgagatattgcttaggattcaagaaaaagaccatgtaaagacatgaaacaagttaatattccattatctgaaagttaatagtctagaaagctattcgaacaaccagtaatgttcaagatgtgttcttcactgaccttgtcgagccaaatgtcgatgaggcaaaggagtatattgtcttcgactgggacacctgcctgttggagtaacactgaaagagatgaatcagatgttagctgggccaggtaagtggtgttcatcaccagaatccttgcaaggatagctgctgaagacactttaactgcagtcttggatggatcacggtcatctccaccactcaagcaaataatcaccagtttctgcgagaatacgaacaaaccaactccatcagatgcattaaggaagaaaat

SEQ ID NO: 35057 - DNA, 588 bp, Arabidopsis thaliana columbia
caggtccaacatactaatgttgaactctgacaacttggatattctttgggaggccaaggatcattacccaaaagggtttcgagcagaggtatgtaccttaatatccatttcttttgatttcatatgaatgtaaaggatatgagaaaatatgggtgcggaaaggttcaaacacacacaaaatgactaaccttacattggtggataaagctagtcaatactcatgctaagctacacttgtgcttttttctaactccattctttttgcattcaggtcttgtttggagaagttgagaatgcatcgcctcagaaagttccaaccccaatagtaaatggtgatgagactggtggattgcccattgaagccttttctagagttcaagaactttttagcggtgtggatttggctgagaatggagatgatgctgctttgtggttgctgaaacaacttgctgccattaatgatgcaaaagagtttacaagatttcggcacaaagggagtttttattttaattctcctgactctgaagaggagacaaacacatctagtgcagctgatagttcagatgaaggctttgaagcattcagaga

SEQ ID NO: 35058 - DNA, 417 bp, Arabidopsis thaliana columbia
ttcaaattcgttctaaaaaaaactgacataataccatccctttaaaaacacagaattttttttatcatctctgaaacaaatcatttacagtagtaaatgtcaacacaacattaattctgtttgttgttggcatttacaattgcaaaatcattttctcatttattattcgtatttattctgtcaagaacccttgtctctaaaatattcatagacaaagataagagccattaattaatggcttgaagaaagattggtgtataagcgtctacgtgacctttaattaatttacttcacccacaaaagtcaacattcaacatgtgaataacaatcaatattggtttctaagtaagtaagtacgatattatgacattactcattatggtaaatacgcactcaatttgtctctcaacggtgtat

SEQ ID NO: 35059 - DNA, 964 bp, Arabidopsis thaliana columbia
ttccttcacaagtgtagctttcatgaaacgtgataataggatgttgaccaaacacatgtctatctatctatatatctattaaatataaacaatttaaagttgaaataaaataatatataagtagttttatgtatgggacaaggactagaaatgtaccaacctatccacttaatattttcatcatacctttcactttatgccttgcgtacgcagggcatgatacttaaaaaaacagggttaccgatttcaagaccaattaaataaactggagttgtttatgtctctctttcagtttattttgacctattcatcatagtcaaatcttatttacacattagttatatcataaacatctaaaatcgtatcaatgctcttaagttttcattttaaaatagattgataaatagtaaactaattcatgtatgttgtcaagaaagaaaatcatgtctagctagactttagtgttttacatttttcgatagaaaagttcaatcaaccaagagcgaaatctgagcaaacaagtggttgtttctcctcgagatcacatatcatccaatatggtattgtggtactagcaattgtaccggcactacacaaagcctactccatcttagagaccaacattctgagctccaagctgggaaagttgttctgatcagttttatcgtcaagttcttcaattagttctaaattttgaagactaggctccaactcacgttttcagagatcatataccaaatgactgcattcatgctgagaccaatcatttttgattttacctttcaccgaatcaaacttctgcacatggcctatgacggtttggccatcatgaccgtgaatagttgtagcatttggtacaagaggttgccttttttttttaaaactaatttattgaatttttacttcttcttaaaattagaaaaactttttttaatgcatttttcacaattgtttttctttttgg

SEQ ID NO: 35060 - DNA, 638 bp, Arabidopsis thaliana columbia
tgctttagctttttaggttatcattgtggggtttaagttagctttgaatcactctggcttgggtgttaaattgagaagaaacttcagagattggtgttgaatataggttatagttggggtcttaagtgtgtatgtagggattctaagttttgagctaagcatgcttcagtgttatttcacaaatttgagttaatttttgttgttgataattaactcaaacttggattaatgctaaccttgattcttgtttgttgtaaggttgaaacctatgaagataaggatggggcgtgggatgatgagattgcagcgcttggtggccagactgcgacagggacaaatgtgtttagtgaattttacgatcgtttgaaagaggtttgttctttatcctttgcaccttccttggtcttttttccctaaaacttgcctatggttctctataccaagacttggctttactttagtttctgtgggttgtatattagagattgagcagctaactttaccggactattagttaatctagacattgttatttagctgttgatcttttaaaaaaaaatagttttattgattgccttgaaccactgtgatggagaatcagaattatgtcaaaactcagtgaaagtgtattagtctgt

SEQ ID NO: 35061 - DNA, 605 bp, Arabidopsis thaliana columbia
  unsure (1)..(605): unsure at all n locations
cgatttattatacgtttttagaggttgattttatccacattaagcctcctcgcagatacaaactttgttgaatattagctgacaagatatgaggattagacggaaagagatcgtaaagaagaagaagaagaagacagtgggtttaagtttccgatcccgtttagcttggttttcatatcgcttcaggggatcactcaaagttgcagcactacaatatataatcaggactagtacataatacataatcactaattagttgacataacccaccaaattgcccgattaattttcacatacaaaagcagtaacatatcatgtctccgttcttcctaaatgtcaaaagatactacataactaacataaccactaatcagttaacataatccaccaaaatgccggccttgctttcaggtcttcttcttattactgcgaggagttgttttggctttggacttacctgctacattggttgggggcggtggcggtggcagaggaatgaccgggggaaacaatctcggaactccagaagcttccggccaagctgataactccggaacaggagaaaatgtggcagtgtaagtnttgtataccngtcaagagtgtac

SEQ ID NO: 35062 - DNA, 539 bp, Arabidopsis thaliana columbia
caacaaattatattaactttcctaaaataatcaaaatcatataaaaatttactaaaaattcaaatcatttggattttacgagatgaagtaaatttgattgcatgggacagatttggatatcaacgagatgaagtatatagcacgcaagaactaaggcacatttttttatcaaaaaaaaaagaaaaagatatgagataacccaaagcacactttatgtgacggttttaaagttcaatggcatgttggtgttttataatcttttattaatcatgtgtttgtttgaatatttttttatactaaaactgattaaaaatattggttaggtcaataatcttcgtcgatctgtaatttaactcagtaatattatttgatgtatatctgactaataacatataaaaatattattttatttgttctcacgccaaaacaaaagagtcatgtcacgtaacgtaagaactaagaaatccagttcgaaaagttggttaggattaaacgatgtataaaggatttatacttatttaatttaattaataaaataa

SEQ ID NO: 35063 - DNA, 515 bp, Arabidopsis thaliana columbia
tgtcacacctattcgaacaaaaataaaataaagtacaattgggccgaaagaagaaagcccgttttgagcccgtttataaactagcaaaacattcaatttcattcccgccaaaaattaactttcaatgtcccaatgatttaatattttgtttttaagaatcaatatatgcattagaattagaaaattggtaagtacgagttgtagaaaagaactagtttttgcaggatgatttttgtccacattaagcctttgcagataagaaacttgattaaacaagctaaaaacacacatacacatactatttgtatattacgagagaggcatggatgcgagagtaagagtaaaagaaagctacaataagattgggaaagagatcgtaaagaagaagaagaagaagacgtcacatttctaatccagtttagcttagttttcatatcggtttttaggggatcccaaaaagtgcttatgaacaagcataaacataacgtctccgttatataaccggaacctgactt

SEQ ID NO: 35064 - DNA, 403 bp, Arabidopsis thaliana columbia
gaggactagaggatcccccaagattataagtaatacaaatattcaaaacaaatgatataaaatgacttcttttttgtattgtacattctattgtgataaagtttatgcctatctcgtgatcgagattgtgattttagggatatccaaaatcaactaaataatatcttttatttagcggatatgaaaaataaattttatgatcgctgatcttgcgattggtcgttgaaccagcgataaccaaacaaacaacttttgattgatgtcgtttctgtcaccagcgccgatgaaaaccatagtctaaggctagatataaagactccagagcacattcagaaaagcttatccagtctacctactaatgtattggtttttatagcaaattgttttgtgactttagcagatg

SEQ ID NO: 35065 - DNA, 432 bp, Arabidopsis thaliana columbia
ctatacctgggttgtttattacgaccggtttgttagagaaatttcaatggtatatttttttaactattactcatttataaaggacatatttttaatattgtggtgaacaaatatggagtaaggaacaatttagggtaacccaatttatccttcagtttggagtagtggaatattttttgtttataatgtgatccttcaaatttcatgtttatctctccccctagccacacatctccctgtctccattttatatcaaaacacatcttatatatatatatattaaaaatatacaaaaaaaaaaaatgtatctttaaaactagtttaaaggctctcatttctcactttgccatatgatgtcgacccactatattgatgtttaaacacaaatgtatttactttttattttatttttatttacgtgatattgtaatg

SEQ ID NO: 35066 - DNA, 415 bp, Arabidopsis thaliana columbia
gtatattgatgttattagatatagtaaatttacaattgataaagtagtggatgcctttttctcttttggttccatatggtagatcatttatgtacatcataaaaatattcaccaaataataagtactttggatgaatacatatattaatatattatgaagtgcttttgaactctttggatcttatatttaattattatgcataggtctcaacggtagatcaaaagtttcaaccttttattaatggtgcatcagttttagttgtgagatgtaggaaaatcatatgggtggcagtaatgtttatacgttacagtaatgtgtaacaaaaatcagtagaatctggtatttttaaatagatatcaatagcgttgaaaactttgagtacaagagtcaaccatacgtctcaagagtgattat

SEQ ID NO: 35067 - DNA, 340 bp, Arabidopsis thaliana columbia
ttcataaatgagtttcatttccatgaggtccaccgtccaccgaacaacgttatcgaaaagactaaggaagttgcatgtataataaaagtgatcggcccataacgccgtcgtcactttgacctgctttcatttatgagtctctgactattaccaatcatattcataaccaaataaaattatttttaaacaatgataatggatgaacatggtaattgacaagtaatcacttgaatataatgcgagtaacttatattatcatcacgagaatttgaatataattattacgtacacaacttgttggtctccaaagtcgttccacaaatggccatggctaatgaat

SEQ ID NO: 35068 - DNA, 584 bp, Arabidopsis thaliana columbia
ttatattctattttttttgaaaaaatatataaagtcaatggtatttctgtgaattcttcgaagaacttgtgaactttgtggtccctctcgatacttctttcgatcttgtgatctctctttcttcttaatcacgcaagtcgcaaaaaacaaaaaggttcgactatgttcttttccttgtcgccaacgacaacttgcaacgactaaaaataacattgtatcttctttaattatgtcgatgggttgtggtgaaaagagaatttcttttctaaattttatgtcgctgattcgctgaaggtgatgctggtcgctgaaatttccggcgatcaataataccaacgcggcgactgaaaaatcattaattgatcaccgtctttaacctgttacttgtcgctcgtttcaaatttaattaaaagtaaagttgtttttgagtcgctaacatgagtcgctaacatgagtcgctagcgtcaaacaaacatcattaagatgaattatcgaaatggattttttggatagatcatttggatgaccatctcaatgaagatgaaaactgatgtttgttttcatagatcactaaatgatttagt

SEQ ID NO: 35069 - DNA, 501 bp, Arabidopsis thaliana columbia
cgttttgttttttttttctttcgccgatggagaaatttagtcgctccaaccaaaaaaaaaaaaaaaaaaaaaattcggtctaattttatatttattttctaagaaatgttaatatatatattagaaaaaagactaatacagtgtaattaattttgagaaaactataatgttaacttatttgggattcgaaaactgaatatatagaatgactttataagttactcatactcatagtgaggtttagttcagatttttacatggatggatttgattaaatccaattatgtatatttaagtatttaactaatgcagaatttagatcttatttttttttttgcttattattatgctgggccgcccctaagacagggccaaggaaaatagaaaatgatctggtcataaaaaattgggctataagagtaaaataaaacacacaaacaaaaacatccggctctttcacttacactttcacttcacgtttgcggctgtgtcgtcgtcaag

SEQ ID NO: 35070 - DNA, 526 bp, Arabidopsis thaliana columbia
ctctataaggtaaagttgtccccactcagtaactaatctttctgagtgttcttatcagttcctcacaaatccacaaaaagtatacacattcattttacatcaatcccaactacaactaacaagctattcacatgaattgaataaatttccccgtttgagctaacataacatgctttgatttataatacacagcaaagttatcaatgaaacttaatgtttacaagcaaatgaatgatttattcttcatctacggtcatacagcaaagttatataaaccactcagtttccaagtttttcttagtattcttatcaattccttacaaatctaaacataaactcatagaaaaactaagcacctgaaacatgaagtttcctcattttgaccttttacatcaattccaacaacaatcaacaagctattcacatgacttggcataagaagattatcacatccatattctatcaaatttgttatgatcctatacagcaaagtttacaagcagatgttctatatagcaaagttata

SEQ ID NO: 35071 - DNA, 418 bp, Arabidopsis thaliana columbia
ggtcaatgatagttgggaggtcaacagctaggattaggagtggcagagggcaacatggcggctgcaatgcgtggcagtagaggcgatggtttggccatgactctagatcaacatcagcatcagctccaacatcaagagccaaaccagagtcaagctagtgaaaatggtggtgatgacaaaaagtgatcaatccttttctctagttccacctcatgacattgtaatgaccacactcgagtttgaagattcgcaatctgcggtttggctattagcaactccatttgtaaaacatgttttggcgatggcggttgaatgctgccatgcttgaatgacaaatatggtgaaacagataatggttttaagcttttgaacagatttgtcacatcaactgtgggtctttgtgtgcctatgtgtgttt

SEQ ID NO: 35072 - DNA, 508 bp, Arabidopsis thaliana columbia
tagaggatcccgatgatgtttatgtattgatcttccattgtagtctgagatacatgagcttttggcgctggtctactatgacagccttcagagtgttgtgccgttttatgatcagcggtctgtgcttccctccaaggatgcaacatggacaagattttgtgagaactcaatgaagcatttcaacaaagccttttcacatcggtatagtttatttttcattcaaagtgtgttttactttggtcaattactaatgaggctgagaattgtttttcttaaaccatcctgtacagacaagattggtcacatgcattctacatgggaaaactcagtgagaagcttgggcactcgtatgaaatttctttatcctattataagcaagccatgacattgaatccgtcagccgtagatcctgtgtatagaatgcatgcttctcgtttgaagctgctaaatgcatgcgggaaacaaaacttagaagccttaaagggtcgtagttgacgctctactgtta

SEQ ID NO: 35073 - DNA, 417 bp, Arabidopsis thaliana columbia
gattcctgggccgatattgggctaatttatataataaagcctctttattaaagtcaaaagacaggtcagcattagtaatcactatattactaaaatcgcgctataccttttgtagacgttgcgatttcaaattcaaaagttgtggcaatatcgtgattaatactaaagcctaagcccaatatcgtcttttacccggagcctcctcgaatcccgacgtcacgttgtataaattatatcgcatcactccaaaaccctgattctcctgctccttcgtcttcttcatcttcctctgagaaatcaaaaactcgatcgatcaattcgttgttcgtctacatcgattccttcagaacctagtgatcctcagttttgatagaatcgattaggctacccatgtcttacaaaccaagcgcgaaaatt

SEQ ID NO: 35074 - DNA, 246 bp, Arabidopsis thaliana columbia
taagttaacagtatcaattgcaaagttatttatgcgactttaatagcgtgttaaaaatatttgacttctatgaaattagaaagagtcacaagacatagctgtgaaagttggcattataaaacaaaattggccattgaagaaacacatgcgatatacatcgcgtctagttttcaattgtataagcctatatattgttgaatgattcaatgacagtaatgtgtagaaatgttaagcattattgacccc

SEQ ID NO: 35075 - DNA, 609 bp, Arabidopsis thaliana columbia
cttttatgtaatgagggaaaagagtaattttgtagaattctcagctataattgcaattacgactaaatgtgaggtctaatttgtaattaatatttttggcaaaggtcgggcctggctatgagatcaataagcccatgtatggtccaggttagtaagaaaagtcaacataatacttgtagcccacgaatatttttgattggtattcctatattaccccgtgtaatctatgttactttataaaaacaccataaggttataacagtcattttgagtttaatcaacctttattataaggccttaaaccctacgcgtaacagcagccaaaacatttcttgttcatctctccgaccttaaaccctccgatccaaaaatctccaccgactctaatccaatcaaatggcctccgtcgcgcttctacggtcttttcgtcgccgtgaagtccaaatggcttccgtatctgcgtttaaatccgtatgtatcttcccttcattttcatttttacttgagaaatcacgtttcttcggatctgaaatcgttaacacttaataggattgaaattacccatcggttgaatctgggttattatgttgtacttgaattgatttaggg

SEQ ID NO: 35076 - DNA, 525 bp, Arabidopsis thaliana columbia
cagagttaatatctttgatttacttcttttataaatgatggctaatgacaagtaacttattattaacacaataaaatgtgatttacaataagagaatccattcaaaagattgtttaaagaaaagtgttaatcaccatgcaatcatttgacgaaaatgaaataaaaaccagtgctgttaaaaaaaaaaatattttccactatgagagtggccaaaatattttaaacttgccatcgtcctgtagtgataaccaataatagccataagccttgttcggttccccatggattttgggtcaccaaaaaatgcaatccactctttgggtttgaatgggagagcagaggagttacaaatataaagcagagcgggactaatgcaattgtatcttccattcaagataatagaattgatctgcggaattttattattaaaataacaagtgcagtacatccacaagcagttcaatcttgtgaagaaaatacacggatccgcatgttacagtaaagatccactattatgctgtgttt

SEQ ID NO: 35077 - DNA, 456 bp, Arabidopsis thaliana columbia
tattactaacataaagtaaccaaagcctaaacgaaccctttttcataattgttgtgttggtatatcactctctaaaaccagggtgtaaagttatggtgccgttttgtggggtgggtcgagattccactgaggttaaaatcatatggtctgtgttggcaaaacgtgacacgtgaatgggtggcgcgcgtgactaaccgacccgatccctccgacaaacgtatcgtcaccgtccaatccatctcagcatatagccgtttgtgcgctcaaccactcacataatgccacgtttgttgtccccaccaatcatttgcatcttctcttcatatccaaaatttcatatcttttgcgaaaattgctgacaattagactgaaaacgaagatataacagaacaatagatccctgtaaaaatgacaaattgtgacaccaaacaaaagacaggagatgcagtccatggt

SEQ ID NO: 35078 - DNA, 602 bp, Arabidopsis thaliana columbia
tgccaccatctttaaacattcttattttcctgattactcttttctcctttcgcggttgagattttatgatctttccgaacgaaatcaagcattccgacgtccgtacactatccggcgctgcttaaaccgtctctcgtcgcctgtctgatctgttatcttctctactctccggtgtcgttgagtaatcattcttttcttcttctgatagagttaattttctttgttatatgtttgaggctgctgcacgaaattttagctgtaatcctctgaaaacaagctctgctgataggcatgatagggtttctaaatcaggcttgtttctgttttgtatcgttccagtgtgttaatactgagcagaaatcgtgatttcgctgagtataactcttgttgatttggtcgctttagggttttgcttctcactcgttttttcagtgttgcaatttgtttgaattatagaattacttggaaatactagctgatttagatgtgatgtatgaacattgaaaattttggtgtagagattgattatcaacttctctgctttttggtaggagcttggtcaaaagacctcttgataagcaaaatatgggagaaatggtaaa

SEQ ID NO: 35079 - DNA, 1022 bp, Arabidopsis thaliana columbia
tttaggtgaatttaagaaagttgttatgatttattgttaaatcatctcaaattccacctaaaaccatgagatttaaaattctgtatttttaactaaagaaatccactaaaagggtgtattaaatattatattttaagtgatttgatttattttaagtttttatatgattttgaagaatttgggtaaatttaagaaagttgttatgatttattgtaaaatcctctcaaattctaccaaaaaccatgaaatttacaattctgtatttttaactaaaggaatccactaaaattcacttaagtctcttaaagtcactaaaaatccaatctttaaaatattttcaataaaaggggatttttaagtagattttagaatcactacttcaataacattagatttcatgagacttttaaaaatccattattgaataacataggatttgttattttaacacaaatcacttgacgtgtttgattgaatacaccaccctaaaattcacttaagtcactaaaaattcagtcattaaaatgttttcaataactgggaatttttaagtagattttagaatcactagttcaataacataagatttcatgaaacttttaaaaagctatgattgagtaacataggatttgttattttaacacaaatcacttaaaatatttgattgaatacacccctaagtaccagaaatgatttcaacttcacttctaaatcatttctctatatatataagtctcttcgaaatgattcaccaacaccaaacaaaaataaccaaaaagaaaacaaaaccccaaaaaattctaaatacatttaacatgaagacaacaaaagagctaagacgcatgttttgctttatcatcttcttctcattcttctccttcatcacaaagaacatggcatatcctctctctacaaactctcgttggatcatcaacgacaaaggggcaagagtgaactggcgtgtgtgaatggccatccattgcagctgtggtggcggaaggctgagcagcagagtgtagatg

SEQ ID NO: 35080 - DNA, 571 bp, Arabidopsis thaliana columbia
agtttggttttctagtgttaagtttcaggtgctactttctggttgatgaggtaaatgatgaaatcaattctttgaactctttcttgtgtttgtaggagatggatatatacactaaagagaataatttatagacctcaaagtctctggaatgtttaacgttgtagcaacaagttttcatagttttgatatttaacaagtggactagtgcacactaatgagtctcagtgtttcttcagaagctaaagttttagttacatattttgctcttctttggtcaacttttgctttccttctctgagttctcttctctttaagcaatacttgtaaatttttgcctaaatctgtttaatccaaatatcaagccgttccggtttatcgaaactaaagcggtgattttatagaacaggaagaaacaaaaccctatacagtattttgtttgcttgctggtagagcatcgaattcaagggactaagtaaacccaactctcttttcactgaaaccctaaatattaggtcttggataaagcttttgtacaaggtaggtttcgcaggtttactgatattttttgggg

SEQ ID NO: 35081 - DNA, 327 bp, Arabidopsis thaliana columbia
gaaatcaagacagctaggcgacaaaatctcctgatttctcggcgagaatcttggacttccggcgccaccaccaccgatcatgagtgtattaatcatgagactgttcttgaggttgttgttaaatccgccgtgtgatcttctctcgtaaagtttgttaccagaatgtttcttcggttgtgcggttttgatcggtggaatcacaaaattacccttgccggaagtagtcgtcggaggacgcggagagtctggagatcttggggaggagctcccggtgagcatctgaacgacttgtttgaaagaagaagagtcagctttgacaaaagttgt

SEQ ID NO: 35082 - DNA, 551 bp, Arabidopsis thaliana columbia
  unsure (1)..(551): unsure at all n locations
agatctagtaccgggacgtccacactgccattatatctatcaaaggaaaccctaagttcgctgaaggggctgttgttgacgccggcgtggaagcttccatatgcgaaggagggtttaccaaaggccaatctccgttgaccagtttgactcagagaatggaaaagatttgcgatgtgaccagagccatcatccgaatgttgctctaattaatttacatcttatttaatatgatctaaaataataataaagctcgtaaccaatatcgaccatgcctctttaatccgaatgaatgatgtggatcaaatttgtataacgttacattaaccgggactggctttaagaacgggttattgaacacgggcaaaaattcggcacgaagtttctagaaccgaatcacgggatatacaaaacattcacgagccagatatcgactgccgagagaaacagcccccacaatatttaattaagttaaggtattttgaaattatttggtcgacgtcgggtatagtgtggcntcatatataatggtattttttctgtcgtatatgtga

SEQ ID NO: 35083 - DNA, 589 bp, Arabidopsis thaliana columbia
cattctgcaaggtctctccttgagaatggtattgctcggtccctctacttctgtgtgcttgtttggtgttgttgatcccttcactagccaccacttgaaacttttccgccgcaccccgatgaagatgatgtgagccatttccattgacaagaggaggatcctgaccgttagttctaaggacagtagattttggtgttgctctgcgtgcttgtatggtgttgttgatcccttcactagccaccacttgaaacttctccgccaaaccccgatgaagatgaagtgagccatttccatcgacaagaggaggatcctgaccgttagttctaaggacagtagatttgacatatgtaaagaaagcagaggactctccgatcttcaatctacttttcttcggtgctgaagaaaattgcgctgcaaaacccctactatattagaattcactaaaacaaaggttcttttagagactagctattagaaagtgagacatcaaagagaaacaatcacctggattactatttcttttcattggctcatggtgagcccagcaagatgatcaatggaggctctatagagtacagaagagagaagt

SEQ ID NO: 35084 - DNA, 574 bp, Arabidopsis thaliana columbia
tctttcttctacttgtcatctcttttctgttagttcttcgataagtccatttcgtgcttatcaaattggtgctttcgttgagaggtatggcaaacacaccgaagcaatctgaactcgaggcgagggttggggccgacacgccgttggcgacatgagacggcggggcagacggaggctcgccgtgagcaggagataacggctctaagagagaacatactaagcatgaacgccatggtgcagcagatgtatagttgcatgttcggagattgtagtgtgactccacccatgtgtttctctagttcggtagctgtggcgaaccaacaaatgacgggaaggcctcagcgagctcagatccgacgagaacggaccgggttctcacctttgcaaaccctaaaccgatagagtttttactacctcctccaccactagctgaagaaaagacgctagagcttcaacaaacacaagaatcaaacgtcgatgttcttttgccgaagaaaactcaaaaatatctctcaggaatttcgtcgaacaagtggtgggtgctcggcacaaagacttcacgtgaatatgggat

SEQ ID NO: 35085 - DNA, 452 bp, Arabidopsis thaliana columbia
attaattaatgttaacccaaagtagatttgataggattcgtatattatcacattatcatgctgtgacagttcatgttaggttttggtctattcaattgtatttttttttttgaaatgtcgacttttttaaaaatgttctctttaatttttgtgcattttattattcagagtaagcctaaacttctgagttcttaacgcatttagatagagagtaactacttaaagcatattagttttaggctttaagctatgtagatacgtacacgattaatagattactagttaacgataacagaaaattagattagtagttaacatgttcgaatggtcaaacctgaaaaattatacgtcaaagtttctatgttaatcagcgatgcgttctatacatattaattaaaatttaatcagatttaagtctgccaaatcaattgaatgacgaattaaatggtttt

SEQ ID NO: 35086 - DNA, 472 bp, Arabidopsis thaliana columbia
caaaggagaccaattgaatagaatgtacttacatttgcaggtagcttcacatttgttagtgcagtcaatgaagcaacctttggtgttcttgttcttcgtgggcttcctcttgggacactcaccagggcaaacaagagtcttgtagtaacatgatccccgaccttggcacatggcctgctcttgtcctgtaggcaacggtgataatattctgtatctcgcagctgcttcactctcctctttgtctttcttctccttcgcctttctctctttctccttcctctccttcgtccttcctttccttatccttcttttccttttccagtttatccttcttctccttttccttcctttccttatccttcttctccttttcctccttatcctttttctccttctccttcttgtccttggctgccttctccttgtccttcttctcctgttctttatcctttggaccgttaccgttactttt

SEQ ID NO: 35087 - DNA, 430 bp, Arabidopsis thaliana columbia
gtttacattatgattgtgaaccactcttgtcttcttcctttttttttttctgtccttattaattactactagtaacaaataatgagtactccattttatcaactagaaaaaatagtaaactttaagattaaaacagaaaaagtgggtacaactatgtataaaggcttacggtgagattcgaattctgccgaaagtgagaatgtcccattaaaggaacagacagagacacacattctgtgtaccttgcttgatatctttgtattcacagccgccacatcgctgttccgaaatccacgcgcgcgtgatcttcacgtccggtgtttggatgatgtaaccactgtcgtcacagcataaggacacacttgccgtttgtgcttgaccggacttctggtgtttcgcgcacgtcataaatcatgtaattgcataacga

SEQ ID NO: 35088 - DNA, 592 bp, Arabidopsis thaliana columbia
tggaaatttacagccttgtaagcctaggagattatacgtaaagcctgctctggctattatttgaaaatctatgtcttagctgcatctgctaatattcctctccttggttgaagttctgcagacgatgataacggacattcgtgacaaaacgactggcatcagtctttatggggttgtaacagacatttcatgtgatccaaacgccacaggagtggtcttttctttgaagatcgaggacacaactggagcaatatgggctaagctccattttaccaattactggtataagcgtgtttcatgaatctcgaaacgacatctgaacagaaatttgaaggctttaacattctgtttaacagaaatttgaaccatatataatatatggtttccaggtcgttgggaaggttagggcttggtcatgtcgtgtacgtgtctgggttacctgcaaaatcacaaaagagaactggtaagccgtttctcttgctttgaaactgatagatatactacggatccatcgctattgggaaactgatttagctcaaacatgaactgaatacttatcaataagtaacagtaggtattggtttattgcttt

SEQ ID NO: 35089 - DNA, 604 bp, Arabidopsis thaliana columbia
caccatataataacagttcagagtttctcacttcttcttcttcatgacttcatcaatggaggaagacgactcgatttctcctgaatcaatctctctcgacactctagcttctattaggtcactcattatcaacgccgacacttccgactcggtgatttcctcggtgttcgatttccttactggtcttctgagccgagggaactcggcgattcttcaccatgtcctcaagctactctccgaccttgctttccggcgaaaggaattagcaccacaaatcttcgattcaatcctgtccaacttactccgccttcataacaccgtcgctgaggcgagccacgaacgcgccgccgtggaatcgcttgcggtgcttgcgtcattatccgaacgaacccctagcatcgccgccgcgctttccaaaatcgacgacgaggtatttgcgtcgatttgcctcggagcacctatatcttctcggctgtggctacttaggaacgcggataggttcaatgttccgtcgtctgtactattcaccttgtttttagggtttagtaaggatccgtacccatatatcagaaaagtagctctcgatggactgattaatatatgt

SEQ ID NO: 35090 - DNA, 563 bp, Arabidopsis thaliana columbia
cgtgaaataaagtactgagaaacttcacttaaagggacgattaatgttattggtagtggttttatacttatactacccaataattagagggataattaaagcactagcattgatatttacatgcacataattaaagattaatgttccaaagcagcgcgtgacgccacgagccaacaaaattgcgacattacacaaatttatggatttacaatttgactacaacaagtgtcaaatgtcggcaggtgattggggaaaatgactcacgagccctattttttattgtgtgggtctaatccaaccttagtgcatcttttgtggcgcatttattataacctctctatgtctattctatataaacatatattccattaacctatggacgaatatatccacaacacgagtagaaacacaaacccaatgttttatcttggtcacgtagagctcctttatcttccatgagcgaatacgtcttctacgttttgtgaaatccgtagattttgttttcgccgaggttaggatatttagtaacattaataattaagcgatggcagtatgaaagagtg

SEQ ID NO: 35091 - DNA, 705 bp, Arabidopsis thaliana columbia
ataatattaattttttgtttgtttgagaaactttgtgggtttctcatggataaaaaggcccttaacttgtcatagaagttacaacacaacatgaaagttaaacatcgccggccaaaacaaaaatatttctgtgaatttacacaaaattatttgcattaccgaccataatgttctcctcagtaccttcaacacaatacaacaatacattaacaaaattggtcttctagcattagcctcgtctctaaaatctaacatcttcttctactcctaatccaacaattgtttatgtatattcccaattatacccctctattactttgcttattacggaaaaggagttcaaagagcagaagaagaaaactcgtatatcccaaatctccaacttttcaggggaatgatgatgtactgtcccaacctcacggcttctctaacaatcccttcatatttaccattttgccactacactagacaatttcgtccttctcatttccgatcatctgataaaaacccgaatctcgtttctatcatccgagcaaaacccagaatttctcattcgcttaggtgctttgtatcatcttcaatggcgactcctcctccgacgcagagcagcgaaaccaaaccttactctgttctttttgtctgtctcggaaacatttgtcgcagcccagcgctgaaggtgtctttagagatatcgtgacgaagaga

SEQ ID NO: 35092 - DNA, 414 bp, Arabidopsis thaliana columbia
tgaggattcctgtaaaggttcaaacttgagattgtggtggatccagagctggcctcaaggttgaatcgccactcattgatcatcctagttataggtagaatgtgaaggctctccaaagcaagaacctgttgcctttcttactttggttgctttacttaggatttaaagtattctgttatgcccttaggtttctcagttgttctactgaagagtttgttattcttgaatcattgctttacatcaattaaaaattcttgtttgtatttgtttggtttacattgttgcttttttttttggttacaggttttggcagaagtaatattttcttgtttgtttcgactgttctaggcattggcagctaaattaacgtggagtgaatgcgattcttgctggctttgagatcacgttgaattg

SEQ ID NO: 35093 - DNA, 496 bp, Arabidopsis thaliana columbia
gatattgatccatccataaagcataaaatggttccacaaaaatcccagaagatgatggaagactcccgtgaagctggcaaaaacaagctgggagtaaaagaagcccgtgatgctggtaaaagcaagatttcactgggtgagaggttgtttagttatacccaggaacctaatccagtaaaacctgggcgcgtgattcctgttgatagcaagcacaataagactgactcaattgcctccaaggagccaggaagtgaaattcctacattagacaacgactctcaaaggaggtttgtatttttgttgtttggggcctattagtaaatttcttccattgtaatctacttttgtcaataggctcttggcagtgatgaaaaaagctacggaagaaataactatgggtactattttaaagaaattcaaaattcaatctactatgagtacacactccacaaggaatgttgtggacaagacaatcactatggggaaggtagaggga

SEQ ID NO: 35094 - DNA, 552 bp, Arabidopsis thaliana columbia
ttgaaatcatcaagctggaattccatttcatgtgaaatcacagtcaggtagctcacttggaagactgttttcaaacctgctgaagttgatatcattttcgagcaatgagtaatcatccagcagaatgttagagtcagtaaggaaacaatcaaagtctagctctgcaccatttgcattagaaaccatagaatcctcttctgctgctaagaatctcagatcaggtattttcacatccgaaaagtcgaaagtagtgaacacttctttggtggttgaatcaccagacgcagcaacatctttgttcagagacgtcttttctttagacaaatcatcagcacttacacaagaaacagaagcagaagtaggggaacgcaagcactggctagtcactgttacaaccgatgaggaaacagcagaacctgaagaagccagtgcatcatactcaaccttcttgtcaacataagccttctcagcttctgcaggagtttcataagtaccaaccatttcttagttttagtgaatgggttcaaaatctcagcagcaaatttgcctgat

SEQ ID NO: 35095 - DNA, 385 bp, Arabidopsis thaliana columbia
gattcccatatatatgatttatttccatatcccgtatggagttacgaatcaactaaaatgcatgaatcagttaagacttcttagtttcatagaattaattcgtttatacccgcaatttccatatacacgacaacaacactaatcacataacagaatgttaacctttttccatttggtgattccttgaatgatacaatttaacataactccgagagccaaaatcgtattgcttcgagctcaaaaccagtggtggactacgaatttggcaccgtgtgcgtatgtcttctaagagttatgcctgagtagaacatctgtactttgactttgtcatcggcccatcccaaccctcgccgtgcaattacaacccttctctcatgtttgttac

SEQ ID NO: 35096 - DNA, 533 bp, Arabidopsis thaliana columbia
aaattatctagttaatcaaaagttaacaaatatatttatatgtaagcttagaagaaaattggtaggtccataggttaaacagggagacagattttccaagttaaaaaaggaacactataatcatttttctcgtattttgtttgacgaaaatgacttatcattgaggaaaaataaatcactaggttaaatagttaatacaaaccgtacatcaaggaaaagcccacttttgtttttggaataacatgccactattctggtgatagacgaaaacaaacaaatatgttagattagtaactcattcaaattattaatagttctctccaatgaatttttaagatggcaaaacaaataattaacaagtcattagattaatgtttttggtttctgaagtttttcgtgaactttattggtatgaggtcatatccaatagcgagaaaaagaataacaatcttaccaaaaatcggtctcctacagcatatatgaaatagttgtagatcgtgcaaatggatttcgaaaagttctttatatttggt

SEQ ID NO: 35097 - DNA, 604 bp, Arabidopsis thaliana columbia
agcactcaaggctctgatagatctaatcggggagttggatgacttatcagctactcatgatgctctttgcgctgttatagacctctgttgtgatgaaagggagaactggaaaaaggcgatctcgttggggttggctcctgctgcaatcaaaaatatcaaagcaagaagaaatttgtttgaatccttagctgccttggcattgatttctccacacgaacgcgttatccaggaagtggctaatctaggggttatctatgatctgttaagtatcttgaggaaaacaagttgcatggtgacttgtgagaacgctgtagtgatcgtaggcaacatgtatgctaaaagcagagaaaggtctattaagaaaatcctggcagaagaggagaatcaacacaagacatttacaaagattgcaacgcaaggatcagttgttgcggtgatgaaagcacaagggattttacagtgtattaactattagggtattcctgctggtatggagccacagagggcatgacggaatcatagaactaaggtcttgttaataccttaatagtttcagcaaagttacatttgatacatatacagatgaaagtgtagaaagaaagaa

SEQ ID NO: 35098 - DNA, 814 bp, Arabidopsis thaliana columbia
cactagatgtgagaaacacatatcaaaacacagcgaacaatccagtaaaccgcagtggggatatggtcggtaaacgcggctgtgatgtggtttggcgggagttgatagatatcgatgatggtagtggtgagatcaaccatgtcttgcatcagaattcgggtcttgtcgagacgctggtgtagagcgttctgccgggagaagatgctagggagctgtttgatgagagccagagattttgtgagctgatttgttgcgtgtgtctccgcgaggaggagaaaaacgccgtatttcacggccaaagcagataggacaaggactagcttagcatcccaacggtatttggagaccaaagacagaacagagaacgtcgtcgtgttgcgactatccaaatgaagccctgatgtcatcataccgtgagactcaccgccatggagacacttgcagtcgatctgtgtcagagacattgatacttagatactgactcaaacgttacttaaaacaagaaagcttcatatatacctcgcaagagatttgatcaatgagatccgcaaaagtttcaaaggaggtatgatcagcgtagtccttgaagacgagtgatggctgcaaaaagttttaaatttaatacgcttgtaaaaatcagtatttgaaatggggattaattgttgcacaagtaaactaaaccttaggagcagaggagtcaatggatgggacatgagacttgaagatgtcattaacaacggagagaagtgatgtgacatcaaagaagatcatgtctggactgtgagtcttcaagactctatcagccatgactcgg

SEQ ID NO: 35099 - DNA, 532 bp, Arabidopsis thaliana columbia
gtctgtagaatgatgactaatggaggtgctttaagtgtaattaagtaagtaacaataataccgttgtaaaattttcgtagaaaaaattgataactgcacctacattttttactgtctagactggttacgagtattcatgacactagtacgtccatgcatattgcataacgtacgtctcatacaaaatttattttccaataaaaagtaggaagaacgatacatgacatgctacttgagaagggataaattgttgtttgttcaagctaccgctaatgtgaacatgtatatatacattttagataaaaagaccgattacatcgcgacattagagacgtaggtccgagtcatggaagttctagccaacttttaactgcggccgtgttgacgtacaaatcacacaaatacgatatggatctttagggaatatgaaaaatccgtcacttgatcaatgagcctatgaccgaacaagagtaagtatacgagacgaagcggagtgatatgaaggggacaggtagattctaaagacgacgag

SEQ ID NO: 35100 - DNA, 528 bp, Arabidopsis thaliana columbia
ggtcgtagaggttaaagttgacgactttcccatcgcaaggagattttccgacaagatcgctgccgaggagaagataaggtgtcgttgcctccgccgtgaccgtagagaattcggaccgtcggaaacagaggatcctgttccgggatgttgaaagcttcgagattcggcacaagagctgagacattgcgttacaaccctaatattcttttcaagacagaagagaacaaagacaatcaaacactgctcttttacttggggatcaatttattaagaggtgcaagaaaatataaagtttctttatccggaaaaagcttttgaagaaaattcagaagcaacccctctatgtctatgctgtttttagagttacctaagagcatcattaatggtagtctcttaggttagtcttaattcagtacttagaatcttgtattaattgattttaaaatttttaaaacaaaagctaagaatacttcaatttgtcgcttatataagagactctcttaacaaatatatgattaacagcactac

SEQ ID NO: 35101 - DNA, 560 bp, Arabidopsis thaliana columbia
tagaggatcccccctcttacaagatagaaaaatgagtatatgaaatttgtctgcagtcttctcttggtttagcttctacatgatactttgtatgatcctctcctgaacagatgcaatttgggactttgcggtggaaaactccgcaaaagataagaaattttgtagacaccaagaacctgtaacaacaatcaaatatgatcaagacctgcaaaagatgcagaacccaaacataaaagagaaactgctcattctacctaaaagcttgcacaggtaatatcttgtctagatcaaaaaacatcacaagactttcccaatgaggaaaccaaaaccaaaataacatgacactatcacttctgcaaaaagagtacacaagaaaatgtcgagccacatgacacatatgctctcttggatttgacataactcacagtgttagttacctagtcccgaagagaaaattaaacacatggttttcaaaaccaccatataattccgaagatgaatcaaacatgatctggattacattaagtctcaagtcacatgagagcaattttgatacttaa

SEQ ID NO: 35102 - DNA, 997 bp, Arabidopsis thaliana columbia
agaagcaataaatgtagtagttctctccttcgggtttcagaaaatgtatttgataaattaaaagattctacacttcacagaaatataaatagtagtaggaaccattatctcttctacgagctcaaatcaaaacgaaaaaaaaaaatgtaacttttctctactaaggtttttgagtaaaatgcatatttagtaaaaattcaacaccccttgtgtcaatgcttctcttctgcagcaccctgaaccagtgagtactaaactgagctgcggaatgaagaagatcagactttgccttcgagtttatcattattaacaagtggaagtaattccatcttgcttcttggggtacgaggagtcctaggagttcccggtgtttgctgtgaaagcatatgcctcacatatccataaaacgtgcagcccacaagcgtaattccgcatccaacagcattcatatatgatattgggttacggaatatcaaccatgagaccattacagccactgcaacctgcaaatcatattacaaacatgagagtgagtgtccaaggcaacaaacaaatcacaagttggtgatgacaaaaaccatagcaatgtgcctcgaaaatttgatattctagtggtgattaacttgtttaaaacaaacttatatggatacagtcatgccctgaccactacgaataagacgtataatggaatatgaagtacgcttaagacgtagatgcgaagaaactctagctgacaggctttctatttcttttaccatggtaagataggtaaattgataagaacttagtaatgccagtataatgaattaatagtgcttatccttttgttggtttggccatccagagcaatccgaaagaaaaatttagtaacgggtttagggttgtcttagttacattaaggttccagccacgttgaatgtgtctcagttgtggagtgaatgccatagagatggagaagttgagacagaagctagacaccagactgagtatatgatga

SEQ ID NO: 35103 - DNA, 286 bp, Arabidopsis thaliana columbia
ccgagcctctctccgagacagtgcccaaatcagtacgcaatgacgccaaactcgataataggtttttaagatcaatcagcacctaacagcacgcaagacgttgtagtatgttaagttgtcaatccaaatgggtgttatgccacaacacaagatgtgatcagaagtcagtaagtcaatccaagcattaacaggttatggtgtgttctagcagtcctgcgtagaccacgcggaaaacagaaatacaagctgaaacaatgtaacactcgacaaacacaactcgatgtag

SEQ ID NO: 35104 - DNA, 424 bp, Arabidopsis thaliana columbia
caccaatttccataagtgaaagagacggtcctaaagccaccagcgcgtaccgatacccgccgcgaccgtcatgccacaccggtctcagagactttcaaataggtcaaactctctctactccaaacgttgaaagaactcttgaatcgaatcaattgacaaaaaaggagtcttttattgtggttctggaaccaaaaaaatctgacgtttcacatccttcattgaaaaacttaaggattaacaccagaaaattaattaaataaaaacctgcaagcatcctaattaatacacatcgaccagttttcattatcaacattaccagcctcgaagctctaacagttttcttggatgcagagagaaactaatcatcaaatgattttcccccttgtgttactcggaattcaaaagtcttggacttcggatcatg

SEQ ID NO: 35105 - DNA, 547 bp, Arabidopsis thaliana columbia
ctccattcgcaccttgtgattgtgtctcttgaataactccatgagatgattccaaaatttgtcattctgcttgcctagcactattagtatctcgtgccactttcatagccatttgaggatttgttctctgaaaaccaaaacagaatactctccccaaatcaacacctttactctgagaccttggcaccacttgcgctcatgatctatccccatgactatctatcccaaccattctgttccaagtctgaagttcccatgccttggcagaattggtccaatccaatgacccatttcccactctaccatttctctccggcatcatcaaatcatcaacattgtgatagagtgtaatctctttagaattagcctttagccccacatttaaaacaagagattcatgttgcttaccactttgtttcattgatcgaatgtaaccctccttgttgtctcggacttggttaagtttccgtgaattccttctaatattagcaccaccactcaattcgtgagactgtgatcctcataatcagacgaaaatcctatatgt

SEQ ID NO: 35106 - DNA, 637 bp, Arabidopsis thaliana columbia
aacaaagccttcaaatttgactcaactgctccagcccgaatctcatagactcgtgttatgagatatacaagatagagtgtgtcatcaggtgatgtgaatgaagtaaaggcaagggtttcagtgcaatacctgtaaagagaaacagtaaagtaagtctgtattttaccagagagaatgtggagtgttttgtataccgaatactcacttcagaaacgatattactgagccattccaggttggattatcaaacttgcaaacaatcgaagtcataaatttgtttcgagaaacccggtttccacggataagcttgtagatcctagagactccaagtctagcttgggtgagagtactactagcatgatcatttttgcccaacatgtttgttgaacccttttgctgaagactttgatttggttctgaagtgacctggctgatggattgcatgaagataaacgacatttgaagtccgtcaccaagacggctctcaaaaaaagccggatacctggtgaaaatgtcggagtgtgttagtgcgctaatacttgatcaccgaataatgtaaaatcatgtgaaatcgaatcagaggattacttctcatgcatattcattagtaaatgatgggccagcttttggttggctc

SEQ ID NO: 35107 - DNA, 585 bp, Arabidopsis thaliana columbia
tcttattatcaaaaattaatatatgcatatttaactaaaataaaatttttgttgggcccttttaaaatgggagccccattggaatgtttcatcttcatgtgttatggtccggctctactgatagtcaattatacagttaggtgatcacgtaaacaatcattaagagtctactagctagtgattattgatgatgttgtgatttgcatggggacaccataccttgtgttttggacattgttgatataaagatcaaatgaaattggtgatgaaacaccaagggaaaagtgttacacgattatattctctctatagctacgggtctactcaacattttttttaagctatcaatcgcaaggctttggattgatgctaaaattagtggttttcataagtaaatttaattaattataatattatgacttttgatagtatgtaactaaacaatcgtgaaagtaatgtaccaactaaaaaaaatataaagacccatgacatcgttctcgaacgacttaaaatcacgccctcaaaacttcttaaaaaagttcaaaggaaagacactgaaactaccaagaaaggaaactgaaacta

SEQ ID NO: 35108 - DNA, 554 bp, Arabidopsis thaliana columbia
tgacatagtgtgacaaaacaaaaattttggtaatggtggtgactactgattaagtgattagtgacacagtactctcaatagcaaaattccacaatgcttatacagattatatactttatgaaaaacaatgacaaatagtatattttagtcatcgatcatctatatgacttaagtaataataactttttaattatgactcgtgaattttggaaacctttttttcttttgtcaaccaaagtaatctttaaattgtgtaaactcccccaaaaagaggtaataaagaggcacattgtcacatttaaagggaaaaacttgttaacagttgaaccaataaattgggaagaaagaagagaaaaagagacaattatttgttggcaccatgaaagagagacctgcgtggcccaaagtgggtccgacatagactgggtcgaagaggagacaagtggagggtccgaccataccctaaccacgtgcatcaccggcccagagcgatggtctcgtggtcacttctgcaccttaatccctatcctaacagttcccatctgcactagata

SEQ ID NO: 35109 - DNA, 470 bp, Arabidopsis thaliana columbia
tcactggatagaaagaatgcgaacgagagacattgtgatgtgattttttcttgttaatcgtagaactgaaattgatatgaaccacaacatgggaagaaagataccttccccaatcacctaagatgggtccaccaccagatgccctagcctccttgccatcttcatcaaagccataagctatacatcctgtaccagcgattagaacgcagccatggagctttcccatggttccactagctaaagccactatagcatcattctgaacatataccttgacatgactaggaaacatgtccctgcaaaacatttgggaagagggtaagctcgagatgatttacacctaaaattcctataacctaattcacaatggacatgactaccaccttatccaattttctatcttttcctggtctgagggatgattacacctgaaacacctaagcatacaccgcgaacatctgatttatcaa

SEQ ID NO: 35110 - DNA, 457 bp, Arabidopsis thaliana columbia
ttttgatgttgtggtgaaattttagtgtaacttttaaaatttatcgattcggtgaaatcaaaaatatttgatcaattggttagacgctaaatatttgatcaattggttagaccacaacaaaaatatttaattaattggttagacgattgtaagatattacatcagattaatagcgtctagagaatacacttcgacgaaaaaggaaaatcacttaaaaaaaaaaaaaaaaatacacttcgacgaaacatgtcaatagtcatatgagttgggccttatagtttattgggcctgagtagattattgggcttaaaggagtagtaaaaaacaagaagacgctaacactagacttccaaaaatcaaaactttagggtttcagagcaaactctgtcttcttcaagccgagagcgaaaaccctaagctcaattccgattttgcaactatgagtcgttcaggtcag

SEQ ID NO: 35111 - DNA, 1054 bp, Arabidopsis thaliana columbia
gtgcagttccagtggtagagcgggtactcggtggcatctgttccgaggacaccaccatttccaggaagcaacgctcggacccgagacagaatgcaggctcttcaagcctattaccaacagtcttctgcacagtcacaccagccggattcgcctatagtctctcgagggcctgtattcccatctggccggacgcgctagaggaatagcttcagggatgggatcaacgtcatcttcttcagatcaggcaggtgggagtggttttatccggtttaacatatgggagagagatccttatatgcaatcacaacaagcctactcggttaatcagatggacagagaaccaaacatttggacatcttcatttaatgaaggatcaggaagcttccatcagaggcacggtggcggaggaggatcatcttaagaactgagtcagtacccgttcgagattctcaccggtcgggcaattctcatgatggacaaaaaaccaaaaaaagaaaaaaaaaacattgggaatttgatatttgagaaaacctgaaaaactgcatgctcaagttatgtgatgaattgataatctaaaaacacaaaatggtatgtaatggtttggagagagactgcctcccccagtcggtggtgtgacccccgtgcggttcgaggtctgggtatgaatcgggggagcgaaagaggtctttgggtatttgttttttaatgtggcgacattgggtatccaagttattaccctaatgaaactttctttcttctatctggttttgttaaattttaactgtcgagtttttcttcatattactatcccaaattttgatggtctttcttttgttttgttttcctacaacataaaaattgacgtcaaatgaccaagactatagtctatacgtgacatcaaaatcgaacagtccaaaccaaagtcaaatgaccaagacctgtctatagtctataatgttacaacaaggccgccttttttcttctaattcagggtcgtaattgcaaaataataaaatagtctaatagtaaaattgagggttcaaaaacaaaaggt

SEQ ID NO: 35112 - DNA, 547 bp, Arabidopsis thaliana columbia
taaacgtaattaaattttaacttttatttttaaaattttccttctctataaattataaacgttttcaaaccgatcacgattctaagttaccgtctgtatataattgtgtacctttgttaagacttaaaaataagattttgagactatttatttttaaaaagtagtaactatgatatctggttacaaacgtgatgaacacaaaaaatctagaaagaagaacttttatgcgccttgttccacaaacaaacaaaaaaacctaaatcaaagataaaatcaattttattgatgtacacaaagagaggcctcaaatagccaggcatctatgtgtcaattgtcatgaagcatgccaatgttgtatatatctgaatgggactagtggttatccaaataagctgattttcccacgtggactcctccctggctgcaccgttgcaatggcttgtacacgtcatctaaattgagatgcaacgtggcacgtcactcaaagaagctctcactttttgacaccttctttatcttatttgtttctgtcgatctctacggtaat

SEQ ID NO: 35113 - DNA, 571 bp, Arabidopsis thaliana columbia
gtaacgcgtctccatcggacggtacccgtgatacgatgtttatttggaatatgttttctttataactgaaaaaaccttactctcgcggaaccagacgaaaccctagctctcccgtttctcccggttaaaaaagaaaaaaaaaagaagcaaattttgctttttttattttcggctaaattgaacgaatacttttgggaaattttcgattgtttgatttagggatccgattcgcagtccgatttaccgaaaccctaattttgattttgggattgtggcgactataaaggtccttaagagactcgatttcgtctgataaagtgatgcaggtaggcatgcaaatttctctctttttttttttaattttttgcagttaaattttgcttgattgttgaaaaaacaattgcttggatttcaatgcaaagttttttcctgaagtgggatttgatctgtttctttgggtgacttgtgtgttcttcttttatcatactttgggtactttttgtgattctgggtttggttttggtgtcacagatctgaaaaatgtttgcttgcgtatatgatggaatttgag

SEQ ID NO: 35114 - DNA, 537 bp, Arabidopsis thaliana columbia
gtgattgagattcccaaacagctacaaaaagattgacatgaaatgtgtcacaagaagaattaagagtaagtgcatacaagattctgaggtaaccaaagaagaaagagcattaagaaagcataataaaagaaacatgcacctggtggcaggcaaacatagcccaaaattccccattgaagacacctattaccgaaccttcatgcaggccatgatctgtagcatggcttctcgcaattgatgtaaggtatgttccctaatgcagtcaatacaatgtaatttaaggtcatgaaatccactatatatccgcatatatagcattaagagagaacaagagcatgtagtgtcacctgaccaacccatattattgaagctgctaatccaaggtataaagaggctggtaccatagtagacctagaaccaataaccatatgtcgcgacgagaagtgttaaggactatgagattcaaatagatggagacaggtggccgttagaagcaagagaacatatgataataccatgatggcttcagattagcag

SEQ ID NO: 35115 - DNA, 348 bp, Arabidopsis thaliana columbia
taataagtcgtcgtggcatcaagagagagaagggtctcgaaagtcactacagaggattttacataccaatggagataactggcaagctgttattgcagctttcgagaagatcagcaaggtatgtcatagttaacatcaatcacattatgatctgtttgttgacgtatcatgtggtcaatagacgcataatgtcaatagtcccaattatacagtgctcatactcagccatcgaggtcagagtcaggttggatggctgagttctgtggaagaacacgggctatgcatcagagcacgtgagacttttgagagaatgctcacgaagggtagcacaccaacatcacgtttata

SEQ ID NO: 35116 - DNA, 456 bp, Arabidopsis thaliana columbia
ggaacttacgcgttcataggcacatatgacatagaagaaaagcatcgaattttaaaatagttcaacttgtgactaatcattatgcatgttactgtgttttggtgaattggaaaaagcttgatctgaaagaataataataaaaggcagtttgtataatgataaaaatataacagtatataataaggtgggagcataagtaacgtgaaggcagtttgatctgtcgggaattttttttgtatactttatgctcctaattatggtaattagataagttaaagtatagttttaacttaactcgtgaactcatcattttttttaacaagaatcccgtttctgaactcaaacgcaatcacataaacaaataagtattgggattcataaatgccttaataaacgaaattatgtgtccatggtcttcagttattgtgaattatagtattgggctcacaacataat

SEQ ID NO: 35117 - DNA, 176 bp, Arabidopsis thaliana columbia
tagtaacgaccgccagtgtgctctaaagacacggccacaacgaaagtagttacacatggagacatcgagtgggagtattctgactgacgaagggtataagagatcaagagtgcaaagtcgttggtgggaaagaggtgagcatcttgagctttatgtgggtgtgaggagaaaagctc

SEQ ID NO: 35118 - DNA, 330 bp, Arabidopsis thaliana columbia
aacccaaacccacacaagtgtcaaggacgaatagctgcaagagactaagacagaatatacatacaacaggatcatccgaagatgaagtcacagcaaggtcaaaaacggacaggggaaacaaaagggaccggccagagacaacaacaccagttataacccgcaaggacgtaaataagagaacctgacggaagaggacaaaacggcaagtacagcacagcgtgagggaacccaggatactgggcacattcaactacaaaccaagacgggtgaaatacataacccaactcggtaaccaaaaagcatatccaatgaacgaccagacatcgccag

SEQ ID NO: 35119 - DNA, 417 bp, Arabidopsis thaliana columbia
ttagttaggaacgaagtcagtgtgctctaaagcgaagtttatgagggcatggtatagacaatcataagaatattagagattactgagaagtggattggagaagctcagtgccaggaggaaggtgacagtaactggttgtccatgctgggagcctcgtgagcgtgtgcttgtgagcgataggtgctatcaaactcgtgaaaatgaaagtcttagaccatagggtcagtaggagggatgtttgtgtgctctcggcgcgggagaaactgttataaaagttccaggtttgtaacttcctggtttttggggcatttgaagtagaattggatgtacaggttagagcgatcgtggtggtggtatgctggtatagactggcagttgataacattgatgagacttataattgcgttagtgtggtac

SEQ ID NO: 35120 - DNA, 518 bp, Arabidopsis thaliana columbia
ggtacatgtgaaaataaattgatgatattattactcatttttattttgagtaacgatttcattttttttttttttgtgatcgtcataaactatacacatagagataatttgaacaaaaaattcgttcactttccaaatagtttttcctgacttttaacaccactaatcattcaaaatattattattcttgaaaagccatcgccaatatagcaacgaaatcctaaacatatcaaatcaaaccgttttttggggattcaaaacaagtcatattgtaataaaagagtttggcggtttgttcaattctaacaagggttttgtcacgccagaatcttcgaattgaatttggtgcgtacgtcatgcggatatatattttggatatgaataaataatacacatttttcatcgtgatttcaagcgacataatttaaggcttacatgcctattcaaaatctactgaaattttttgaaacatcatcaaaagaaatttgggaaaatgtttacaacaaagtagaaacttt

SEQ ID NO: 35121 - DNA, 554 bp, Arabidopsis thaliana columbia
cctatactcttgatagggtttagatttcactaatcaaaacaaatttaatggggattcatatgggtttaattattttgtttgggttccttttgtactatccgttaggatatagattttattattattaggtgtgtgattaaaaacaaaaagaaataaaaaaacgaaactgaaattttttgggaatattaagaggagaaagaagcgatgaagaaagacaaaagaaggaaagaagaatataaaagaagaagatgaagaagaagaagaagaatgagggcaaaatcgttatttcttatagcagaatgtgtccatctccattagcccaacaaaaagtactctatgtagagtttttggacttagatgtaccccaaatacgtaaaagccccaacttattagagccacgactctgtttgatagttaagagttggtgagagagaagaatttgtatcatgcgaaaaggagaagacaaagagcgtgtgtctcaaacaggaataacgttgtcattattacagaaaatacaaacaatatcaagttactttttttggaatgttagtttt

SEQ ID NO: 35122 - DNA, 595 bp, Arabidopsis thaliana columbia
gacagtgattagtggttcagtgatccgtgagtaaatgactgatgatattagtccaatagtcaagaacatctttatgatagattcagaagtgattttcacctttatctcaataaaaagagtcccaacgcagaatctaagacaaaaaatcagaaaaccacatcaaaggaactgaaatctagagtttgtctagacaccttaaacactcccaaaccctcaaaccaaccaaagataagcctgctcctgcagctgttcaaacctctacttacacacatcatgtcacacaggtttagttaagttggcatagcattaggaaaaactctgaactctcctttccaccttctttaccaagagttatcacataccattcaatgaagcattggatacttagataagcaaaaacagaaattcctttcggttagaggtgttcacagactataactcttccattatgtttcaatcaatgagatggatgatgagacttacctgaattttgtcttggctcccatatgacaaacgtctcattacaggtatggtgtctatggtttccctcaatccacaggccgtatttcacgacatgaatggaacacacgatgcg

SEQ ID NO: 35123 - DNA, 631 bp, Arabidopsis thaliana columbia
  unsure (1)..(631): unsure at all n locations
gcaggtcgacacgatcccccaagtactgaccctgcagtagggtatctgtttgacagcatgattgtcctaagaagagataaaaagtaaaaagagtgagaaagatgcaatttgaccacataatttcagattttctgaaacttggaagatgataatttggaattatatacctctcaaaagtgtttttcaagaagacatatctcgttatggtcaagtctaactcagaagtccaagtcaacaacgctgggggacaaatttgaagtcttgtccgttgaagtttccgagctacagctgttacacaaaaatttaccaagaaagtgatgctgacaatgaccacaaactgaaagttgactctttcatgccaaaattacccaaaacaagacacataacagaaccagacgccatgttctcgagcaaaaccattgcactgcagcaacttggtttttatttttatcgaacaacttatttctgttgggagaatataacacccaagtaggatttaaaagggacttacctaagaaacagaaagcaaattgctcccaacaaaggaggagaaacagatttgtnttttttcttttcatgtagacaaaaagtcttcaccagattcataaatccccagatattaatataatta

SEQ ID NO: 35124 - DNA, 484 bp, Arabidopsis thaliana columbia
atattgcattgatgacaaaaaaaaaaaaatactatctctttattggtcccttagatttttagttaaaaactattaatccactgagatttttctttatactaaaggtaacacacacatgtcacattcatttggtaaactctcccgatcactcttctaaatacactaatttggggtttgcattgttatgaatactttgattaattatcttctaataacatgcaagtatgaacacactaaaggttatttttaagaaattcttccgtttaaatatatagaagatatcagataaaatatcaatttctatttggtcagaagaacgataataagtagttatcaaacaaaataaccataacaagtttcttaatatgctatttcaaaggtcaagttcaagttgacagaaaaaaagaaggtcaagtttaaattagaaaaatgaaaaatccacccggatttacattggttatatacatataacattgcccaaaaa

SEQ ID NO: 35125 - DNA, 370 bp, Arabidopsis thaliana columbia
gaaatggcgtctacccacaaatcatgtttggctgttttccacaaggtaacttaaccgctttctattcattgcttctatcatctttggtgttcttttgcttctatcattgttggtgttcttgcccatacttctctagctgaggttttgatatctttggacacattatcttaactattggtaagaatgtgctgatagaacctggttgatgcatttactggtccaaatccatagagtctcaacctttagaggtttttggtcctactaggaggaaatacatgcttatatgtttggatgcacacattgtccatagaagtttttattagacagcttgtcgtgaggaaaatgaaagttttaacaaaggtggttgcgt

SEQ ID NO: 35126 - DNA, 596 bp, Arabidopsis thaliana columbia
tctgaattagctgtaaatattctagtggaatggtacctggtcctattctatgaactagtttgaaaggtggggtccgtggggatgatacagaagatctcttttagaggagttatatcaataactgatttatcgttctgtttcttatgagttgatgcatgagttacatatggcttccatattgtgtttctacagataaatcttttggcggctagaaatgaaagagaaagttttcagatagccatgcgtcctaaagtttcttgggctgcttccagcgccttccgggattgttcaggttcagtgcagtgacttatgctcttctgctggagataggtgagctgttaaaccttgatcatgtttatcctcttctttggagaacatgtaaatgatatctttggtatcaaatgtaatattttcatattttgacatggttcctgtatcatcgcagattggttgttggccagtcactaaagttgcggcgagtggtgcctgtcttaggcgttcctgatgctttggtgcccttgatttgctgttcccaacttagcttattccagggtacgccactcactagtcaatttcttaatctggtatgtggtgca

SEQ ID NO: 35127 - DNA, 570 bp, Arabidopsis thaliana columbia
attctagaataggatgatattatcataatctttctttctggttgggtttctgctgaatcattgtgtctcttcctttcagaaaatcttatgttaatgacaaaggacaaccaaacagtgtctttgtaagttacatagtttcccttttccatataagtatctcatttttaaaaaaatacataaaacttatattctatatattctacccgaaaatgcagattataatggttgtgattctactggccatagtctttgcatatctcagagcaaactgagtgatccatgtaagcgagtctgattgtatcaccatcattcaagatgttcagagcaaatttgagtgatgaagtaatctaggttgattcttattcacgccactgaatcctaagcaagattgtttccagaacaaacagagtttaagcatggtttagtctaaaaccatggattctattttagttactaccttcgttatctaaacgtgcatttgttcatctatttttattccttgtgtttaaagttctttctttgtttagttgcgtttctctttcgtctcttttggcatgtttaagataattt

SEQ ID NO: 35128 - DNA, 588 bp, Arabidopsis thaliana columbia
ctcaatgtctttcactaccggaaaagttctttgcaaaagataattcaagcagaaactagcaaaagaacacaccttcattgacgcttgctattggtacatttgtgcttctcttgtcgtcgctgatcacagcctaagaatacagatgtttgtatcagacataataacacggggatagtcaatccattcactcaaaacatttatcttagcggattcaatccaaaatgaagctatcatgcaagcatttaaactcaaatacagttttgtttttcatacgaattgtctcctaaaatggtgaaaaaacttaaataaaacgccttaacaaatatagaaacccagaaatgcaaataaggaaatcgtccattgttctatgagtgtgaagactttaggcatcatcgtggacgcgaaaaaatatgacaaaaaaatctgaaaagtttcaaaattctacttcctaatgtaacacttgagacagaacaacaaacaaaatgatggcatgaacaaaaaacgttaattttccctcacacaaacaaggatcatagaaaaactcaatcaaagagcttattgatggtgaaatgaaagaagcaatagatg

SEQ ID NO: 35129 - DNA, 577 bp, Arabidopsis thaliana columbia
gagatgatagttaacttttttttattccaagagatgatcaaatattccaagtggaaaacaacaaatgccttcccatgcgtaccttaatagagaactttatgttgcatacttataaaatgactgttaaggaagtgaactatttacagagattttggtcttccatcactagtatttagtatgggcactaacaatttaatgcgtgtcatgtatgaattgttaacaatataaaaatctataatctaattgtatgaaattactacgtcggccataatactagtttcacaaaaaccaagtacagctcaaactattaaagccaaaatccggatttacttggagtttgattttgattctgtcaattcaagttctagttccatagtaatcttaaaccaaattgaccaatatttaagttagacctatcaaaccaaaacttttagttttgtcgacacaaaagaaaacagagttactacaacaagaaactatgatgggaccaaactactgtaaacggaaagtcggaaacacttacggagtacggttattatttgaaacgaatataaagcaaggggacttggaaatttta

SEQ ID NO: 35130 - DNA, 982 bp, Arabidopsis thaliana columbia
gattattatgatctaaactcaacggcgtagatctctccggtaagagctgtagcgtgacgatatcttcccgaccattctccggatctgttgagctagatctgaagccgttcgtctttgatcgacacgtggctttattattctttgaaaccctaacgtactttctcttcgtccttctcgtgctacttgtatctccgaccaatggttgaccagtagtcgtcggctttggagcgatcggacggtacttaagcatgagagtatcaacagaggtcttatcttgcgctttaccggcgcatcttagcgtccgccataactcatgatcttgatccatttctctctctctttttcctctatctctcttcagtctctctctcttttctatattctttctgtgtctctccggtggccgaagagattaacatttgggagtaggagaacgccacgtgtctagggcaaaaacatatacgagacacttgaatcagtgtgcgtctcatttatgtcatcgttactctagttttatgtctctttgcttctttgttttgtttgaactttttttattttccgataaaaggaggtatttaattaagcaagaaatttgtttgtcttcgcaaatcctacgtttttaaccaattacttgtgactattttttcaaacctaggatctgtttttcgtccattttatcagaataaaacgtcatttaccagtaaaataatgttcaattagagtaggtgttgatacgggatagatatacgggtcattgtagctcatcagattaattgtcggattagaattaaacatcttttagtccttaactgaagtagacgttctattaactgattaaggattacacaagccaacgattacaggtcatacgctgggtcataacattgacaaatataataaaacatttttgtcattgtgtgctatttatgggctgatatatattatgcatgtgtgtatatataagtttatataaattgaggag

SEQ ID NO: 35131 - DNA, 1366 bp, Arabidopsis thaliana columbia
cgaaacactacatcaaatcgatggatgtggttatataaaatccttagaaaatattcttctatagatctcacatatgtacatatatgtgtcatgtatatagactgactgactgacatatatattgacgtaccatcagccccccacgcgtaccatagacatagatgtatatggcgatacgtcgtaagacatggtatgattgatcaacatgatctgtatcggtgatcggctcaatactcatacattaaaaactttttacaaaatgaatcgttcaatatacgttttaaaaaaataaaattgttacccttatcttaaatctacaaaaaaaaaaaacataactattaaaaaaagagacactaatatggtgcaaaagatgacataggagatgcacagaaaccatccaatgatttaactgtatcttacgctaaccctaaagccacgtggcgcattaccattcctcctcatttgccccgaatgataatcttttcggctcaccggagagagacacacagaaagactatagagaaagagagagaaagaaagaaagaaaaagagtgagagtgtttgatgataagagagaaagataaaaaatggatcaagatgactggttgggaacgctaagatacgccggtaagcgcaggataaagtttccgttgacgctctcatgctccggtaccgtccgatcgctccaaagccgacgactggtcagccatgtggtgtggcagataacaacaacaatagctcatacggtatgagcaaacgaaccaaacgaaagtacgttagggtttcgaagaataataaaggcacgtgtcgaggtaagagcagatctgacttgtctgatgatcgggaacaaactgatgtcgtgacgttgcaactcttgccggaaaaatcagatatttccggtgagtactcgccgttggatcaagatagtctcgatccgtcggtgaaatcgataatcggagaggaaacacaagaaaccaacacgtggggtatgtttaacggcagcgtcacggcggagatggagacgtgggtgacggtggagtccgtcacaagcgtgtgtgagggtagtttgagttcccatgcggtggggattacggacgttgagatcgttgataatcttggtaaggacacgtgtccagcgttcgtatcggatggctcgaaccgtgtggtgtgggtcaacgaggcttaccggagaaatgtttccggtgatgattcaacggcgtcagtatcgccggaagttgtggtgtggttggtggcggaggaggcaacggcggcgatgcattgtaactaccaagctttcacgtgtagggtgaggatgcaatcacgtggaaggaaacaaagtataccaatacggtgccgtgtgatgtgt

SEQ ID NO: 35132 - DNA, 544 bp, Arabidopsis thaliana columbia
tcccgtgaacccgctaagtatccaatgtttacaaattgatcctatatgttttaaaatatagcacctgtgagctgacaaatgccacgtcaccttcatctccagtctctcactttcttatccaaaatggcaaaatccattaaccatcattaccttcaatctccgtggcttttttgctctaccgcgcaacaatggcggtttttagtggcgctactactttaggttctgtttcattcgcctctcatctcttcgaccaacaatccactttcctctcttgcccacttagactccttccttcctcgtcttcttcttcttccaatagaaactctctcgtctgcatagtcaaatccttctcaagctccgccacagcagataccgatagaaactccgatcaatcagcctcttcctcagtcctctccgcttctaattctcttctccgtgatacctccgacgaagcttcagctgcaggaccaagcgattggaaaacagcaaagcttattgtaaaagtggtgatacatttgaaggtgaagttcaaggctttaatggt

SEQ ID NO: 35133 - DNA, 611 bp, Arabidopsis thaliana columbia
tctgaatctatcgtatgccacataaaacaacaatcattaggataaataagcttctctaagtcaagaaagaactcaacttaataagaaaaacttataccatcatcattcttgctagtcttggtaggagcagcttgctgagaataacacacacacatacacaaaaagattgaaattatttcaaatatttcaaagagcatagttaaaacgaaagatgaacacagccattaccactttcaatttcttgagaatgttatcgaactgagttgtatcaaatgcccatggatttggcttatcaagaccaacacctgctccaacattttaaaaaaattcagacctataacataaacgatagatgcatatacaccacacaaatatacaaaaggcttaaagtagctctatcttgattccacaacttcacattcaccaaattacataaactaaactatgtaaacagacatttcctcctaaaaactgaaaataatgttgttgttttttagtgtaagtgaaaagtagctctattaaagtttccccaatctaaattccacgagaaaaatcaaatcactagttccattaaggagaagaagagaagaactaccagatgtacttgtttg

SEQ ID NO: 35134 - DNA, 443 bp, Arabidopsis thaliana columbia
cattaaccccacaaagattttagcgaatctattcccatccatctattgctattcacgttttgaaaccaaacaaaatgaaatccgaatgacgaaaatctccctacagattcccgccgaaatgttggaagaagactcacaaagaaggaaataataatgctgtgattggaacgatatagaaatgaaacgcatacattgcaacccatagtaatttgaaccttagctcatgagtcatgacttgtgtttgtaaagttatttgcgaattgctagtattatttttacacatggaagtcgaacccctcctaagtgtaacactcgatgatttttcaacgcttaatatacaattttagcctggacataaatcatgtgtaaatatgtactactgtagtgtgttgatatcaaatataaaaagacggaaatgaaaaccatagatatcaatcacaatg

SEQ ID NO: 35135 - DNA, 520 bp, Arabidopsis thaliana columbia
atgttgtcttccaaaaacggtcctttactctctctatccagtttcccaaaattccaggctacttaatcacctggaccaaaagagaaagagatagtggagcttttcaagaaagtccaagttcagctccgggctcgagctgctgctaagaaagaagaaaagaagactgaagaagcttctaaaggacagggaggaaaagagagtgagacagtggactcccttcttaagttactgaggaagcactcaggagaacaaagcaagaaacaagttagcaatttcaattctgagaagcagctccaaagagatgatgatgcttcagaaagacaaaatcacagttccagtcgtttcgattcgcgaaacaaagatcataatgcaacaccctttaccaggccagcatcaagcttcaaacgtaattctcctgtaccgagacataaatctcaagccagttattctagtgaggccatttttgatgaagcttcaagttacagtgtgacttggacccagaaaaaggatcaagtagagt

SEQ ID NO: 35136 - DNA, 588 bp, Arabidopsis thaliana columbia
aacctaagatcttctgcttttagactcgcacttgctacgattgtcatggagcaacaagactattgtgatgtccactgcttttaaaatgcattttttaaaattcaaattgttttttttttgtatcaattatttatctattttacttcatacaataaaaaatatagaaagtttagtgggaatttggaaaatttatcaccaacttatctgttttttttttttgggacaaaaaagtcaatgcttatggaatgtaaaaaaaaaaaaagtgctaaaaaattaattatattgtgtttagaaaagactagagaatgaaagatgagaatgattttgttatggtatcgaagtagaagaagaagaagagagaatgcatgagaatgaattatgatttctcagaagtcagaatgagtgatatgttggagattcaagtttttatttataagcattagggtttcttcaaagaaaaggaaactaagcgttgaagaaataaggaaacaatcgggggtggacaagaaataaagagaatctgtcaacgttcgagagatctggaccgtttatttcatcacgtagcatctgtgagatatcggacggtga

SEQ ID NO: 35137 - DNA, 474 bp, Arabidopsis thaliana columbia
tttttatgtaataaaatatatatatatatgtgtattaagaaaagaagtttacttatgcgaacggatggataggtaaatgcatatttgatagagaagttacttgtacaaacggatggatcggttaatgcgtacttgatagatgagtgtttttttttttggtaagataatagtggagtatttttaaactagagaagaatattgtatgatgtatttgtgaataacacatagaaaaaagtattatataatatagtttttctagtattttttaattataaaaaagttagtgtcaactatctacactcttcaaacacaagatgtacttttggtctatgtttgtcccgcacaagatgtgttgatctttttctctgatttttaatttaaaaaaaggaaagacagaaacagatctgtccctacaactgctcagccacgactcacttttttcacttatccggtgacgacctccatctctgatca

SEQ ID NO: 35138 - DNA, 554 bp, Arabidopsis thaliana columbia
atagataactgttggaaaaaattaatcaaagtctaagaatgttgttatgcttgtttatatatatatcaaaaccaatttatgaatagagtgaattacaatctttttgtactagattagatttcttaagtgtttgtgtcgatgattaaaaatccaatccgcactgatattttccaaaagcacattgttcatcaacccaaaaggccaaaacactcttctcaaatcaaaacgggctaaatggaccgggctgttttaattcaaatcggtgttaaatttatgttatatttgtaaaattgtttaaatatgtttaccatttggcaaacgtacatatttcttaagtttttactgattaatattttataatattggttattttaaaaacaactattttttttccaaattcgatcagactggttggaccggatcaacctcacatccactttgactcaggtttttgcttttagtacagtgatcgttgtaagattcctaaacaaaatcataaatggaagaatctctatgcaggacaattttggtggggctaggcggtcgctatggag

SEQ ID NO: 35139 - DNA, 174 bp, Arabidopsis thaliana columbia
caaaagtgttagcaattttttgtgaaagatttgttttctagttttagagaaaaattgaactattttcactatatattttagagttaaaccatgcggatacgtagaatattattgaaattgaactatatcattatccaatatcccataaatttttattacattaaatcttctttt

SEQ ID NO: 35140 - DNA, 551 bp, Arabidopsis thaliana columbia
acaatgttatggtgagaaaattgttctggtagttccttgctgaaattcaaggcatgtataatttataccagttaaattaatgttttgtgaacatagaatacattcatgtgtacctagcctgttcatgcatgatatctattgaaggatccaatttccttgcatcgaaatactgcgggcacaacatgcatcattggcctagcttattagatccattacatattgtactattcattttttttccccggacatcttaggttaaagatagcatcatttttctaaagtaactgacattagcaaacaccatgaattttgcgtgaagaaaaaaaatattgtagggccaaatctttatcattttctatagtatgaagattccaagactgaggttctcgctcgcacgagaagggcgagcttgaggtgtttatctgcaaggagatgggtgacgacgggtctaaagttgggtgggtttgtagatagaaggctgaggaagcttcggtaaccaccgctccatggagacgggtcattaaaccatgttttgatactgttaaaccatg

SEQ ID NO: 35141 - DNA, 473 bp, Arabidopsis thaliana columbia
taaattagcctatgatttgaatttgttttgatatttatgcttaattaaccagaaaaaaaactaagtctgaagttaattaactaatgctttcgtttttatcttcaatgaagtagaggtagatagaaaccgtgtaacaactcgtttgttataattacttaccattttaaaacccttattaacgccttacaaacatcacatttctcaatttatgaagaaattgtgacactctcctcccgccaaaaggcatgctattgtataccttgtattaaatacccaccaatactagctattttgatataaaacttctctgaaaacgtatatacatccaattttatgatacatgaatagaatgattttatatgccctcatgatcctaaacatccgtctagtcatagtgtctcttctaataacatcgtattttcgcccattttggctattgtatcttatatattaggaagtgtttggtgtgatat

SEQ ID NO: 35142 - DNA, 581 bp, Arabidopsis thaliana columbia
cttgttcttatgatataagaccacttgcacagatcatgagaccaatctcggtataattgtggacacagcaatcctcagtggcacgcgatcgatcccagagacgaggaaacataaacgataaaatcaaaagaagagatttacattaggtagagagctggaatctgccgctcggcttttttcttctccatccctgccaaaaaatacccaccaaaagcatgagtttaaagatctctgactaatgacacagaactatataatggaacagaaaaccgagaggatttaagggacttacaaaggcaatgtaatataaaaaggtcaatccagcgaggacaacaaacccgatctggaacacattgtacctgaaagataccgataagaaagggaagattatcatcagtcttatgtacacaagtgagacctttatttgcaaaaacccgatattacttacttgtagaggtacttaataccgcgaagggactgcaaagtgtggccaaatatctcctgagcggcggtggcttgagcataatatccaaatgcagtggcgcagaattgaatccactggaatttcagtgagcacaata

SEQ ID NO: 35143 - DNA, 502 bp, Arabidopsis thaliana columbia
atgcaatctaaatgcaattcattatgctatatacaatacatctaatgaagatattaatacatctaattcattgtggttttgggataacattttattcgtttatgtggttatcaaatttagcaataattaattattgcggatcacataatatttctccgtgcaataatatcatttaccagtctatatataatttataaaatgaggacttcttatttcggtcaatatatataagcgggtaataaatgatttagagattctacattatcattaattggagcattaattaattattggtgcaatggatatatttacgaaaatatgaaatggatattttttagaaattctttcacctaaagttttctttctaccattatattatctcgaaataaaattttcatgtccattaaattataattttgccattaccatttaccaaataaacttgcactaatatgttacctgatctcctatttagcttgcgctacgagtggatggtgcacat

SEQ ID NO: 35144 - DNA, 612 bp, Arabidopsis thaliana columbia
ctttgattgcaacaagtttggcatgtaagtattctaaactaacgactttatacatcttcagtttgtatcattccataagtaggtttcagttttggcgatcatctaagatataaacggcgtatgatagatataaaaaagccgtaaatacctaacaagagatgaatggtagtgtatagagcaatcatgcatatggagctgtctacacataccaaaatccaaaattaaaaaataaagtagaaccgaaagacatggagaaggaacagtaaactcaatcaatggacaaagaaacataaccaaaagaatcaagctataatactataacaattaatattaagtgggtccaattcctgttgagaggaaaattgattaaaccacatatacatgtaaacaatcatatgctcaataatgttcaaagctctaaagccaaaaatcatatcaatattcgtaacttactaaaagaaaaaaacttggtaagatgttatatgactttatattaagacaaaaacagtattttgtgggaaagataataatgcattcagatgctatagtttgagttaatatggaacagtagagtaaatagatgtaattgttttcagtatgtgcacagggaag

SEQ ID NO: 35145 - DNA, 482 bp, Arabidopsis thaliana columbia
  unsure (1)..(482): unsure at all n locations
ctgttctgttgnagcaagcacctaagcaacctccagtctccctctcaaagtgtggagagaagatatggccaggtaaactctctcagtgggctctataattctgattacctgtaagaggttatttcataaatgtgcgcttactatttatttttagacttctaagacaatattaaagaaagtattgtattcttcccaaacattttgacttccaaactccttaagcagaggtgttggatggcttatggtgttagggaatctacctaagatgggatcttaagcaaaggaactgtagcagtcagttaattgtttcaaagtactgttcttgccactagatcgatggaaattgttttctattggcttaaccagtgtttgattggttatctaatgtatacttaaagaatgtgaatgaaacggtggttgatgtgattgaggaacagaagaatagatcaagtatgcaattgtgtggatgacttaattttgga

SEQ ID NO: 35146 - DNA, 564 bp, Arabidopsis thaliana columbia
ccagtgtacatatcaaacagatgcatatttttccatcgagtgagttgattttatggcaatttcgagcctgttactacaagaaatgttctttatgacattgggttataacttcactcgggttaaaaaagtattagcatatcttaaaaagccttctctctcttatctctctcaaatcttctagagagagaagggcttagtttttcttccgccatccggtgaatccggcaaagccatctggttgttaaaccagcttcagtccaacagcctccgggtattatagaggaggttggttggcttttcactggcggtgttggctccctcagcaacgtcggccagttttctctccggcaacgatggctccgtagcaccgtttggctggctcctcttgtatgcggcatgttttcggctttctatgcgatggtgtccgcttttgtctctggtcattccaccgtcatctttccggtggttttggccagttatgtactggtgttagatcgggtttatttgtgtgtgttatacttttaataattctcattgagatgtgttggtgataatagtgatagc

SEQ ID NO: 35147 - DNA, 542 bp, Arabidopsis thaliana columbia
tgaattagtaagagattctggacctaggcctctgtacatcctcttagactggagaccagagcatttaatattatttcttcgcgagtgatactcgaaccagagaccattttgcctaagattttgtaacaaagcaggctagtggctaggctcttaagttcttaacaaagctagctaggctcttaatttcgttaagttcttagttcggttttggtggaacgactaatgttaagtgtctacgtattatctacaaattatataactaatcaaacccatgactgataatatattgaagaaacacaacccatttaatcgatggcaaaggctcgggcatgacaattgtattactaatacaagattatgatcattaatggtaatataacaacagtaaaatcagtcacatttgacatttgattcaagtactcaaaagagagaataatagactaagacggctgcggacgagggagacggtgcagcaacgaggaagaacatactgtgaagcgaggagatagttaggacaccatagttatggatagtctcatata

SEQ ID NO: 35148 - DNA, 528 bp, Arabidopsis thaliana columbia
atttcaaaggtaataatactcttcacttttcttcatgcttggattcctctgaactttgagagaacacaaagttgtaacctttgttctgctgttgtctaactttcaaaacttttgtcattactttctcattcttcaggaaagctttaaacttgttgcattatcttctacaagagaatgactcagactccgatattgctatagaattcgggcttcaccatttgatgatgcacctcgtgtctagcttcgatgctgatgtaagagaagctgctcttcgaggattgcttgagctcgtgaaagctagaaaagactgtagtacttgtggttctagcatagtgaaaggcgatgagagactcagacagattctaaaagatcggatcaaagcaatcagccgggtcaaagcaatgagcttgtttatgtcacaagaagatctatcagccgctaaagaggagaggcagctcttagattcactatggaccacaatcttcaacgaaccttcttctctttagagacaaagatacaaagagacaa

SEQ ID NO: 35149 - DNA, 549 bp, Arabidopsis thaliana columbia
gattgatgttacatagtataactcgggagttggtcgagttcatagcatcaaagcgtacttcaaacacacactgagttgtaacaagcatgtccaattgtttagacatgccacaaccgatatcttcatgtcaatatcaaatcaagatgagaaagatcggcttagttcttcctaatatcttttaacttcgtaacatcaatttatattagtagtttatccatagtatgtgaaaccaagttggaaagaccaaaatcagaagtatgataaactccacatacgacgtcaaaaatgtagatgtcgaaattcacatactaatatttttgtatttaggtttacgagggagctcaaatctttgatgggccgaacatccagagtaatgggccaaacttttgcactcactattctcgtcaataaaatggttggtaccacacttattttgataataagtgatgattattgtttttggaaatacagaacaaaaaagtatttattttatgaaaggagagaaagacatgtaaatacagatacattagcgtcgaggcaagaccatgt

SEQ ID NO: 35150 - DNA, 458 bp, Arabidopsis thaliana columbia
atctctttggaagcgaagagcgatatcagatcctcattctccataacactcgtcggactcttatcattgacgtcatcgcgattaaccgtacggttctgattctccacttcgtcggcgtcattacctccgatcgaaagattgctaagcatccgaagcggagatcgatgatcaaatcggttctggatcgaagatctgatgagactgttgagctcattcttgagacgaagattcatcgatcggagttcagtgttctctagacgaagcgcttctgcttcaagcgaagctcgatggagacgcgtgtaacacaacgcctcgcgattcaccatatcttgacgctgttgcattatgttgcgagtcgacttgtagagttgatcagagtagagagacgacgaaacgacgcctgcactggatgaatttccggcggacttccgctgtaactaaacggcgcgattttgttt

SEQ ID NO: 35151 - DNA, 461 bp, Arabidopsis thaliana columbia
cgactctagagtataacagacgatgaaaacggcaagatgcttttccctatgtttaacctcaaaattaaaaggaacgctgataatggtaaaatttaggccaatatatccatgcaatgtaagttaaaagattttatcaaagattctctgtctgagacataagacagttccgaaccaaatttggaaacacattcaacttctatttcacattattcaatatacgataatgataattatcggaactttttttttatggtttctatggattttatgactccattcttatcattttgtgcataaaagtctagtaattaacaaaactaaagaaagaggagagggaaatagtattaacaagtattaattatacgaacgtatacacatttgattcttggttgtgttcttctctagctccactatgaggttcaaattcaaaagttgtttttgatttagccaagactttaaag

SEQ ID NO: 35152 - DNA, 587 bp, Arabidopsis thaliana columbia
ccatcagatcttatgaggggatttctatcgcgaaatgtgtctgtggccataccttggctaggcaggggaaggaggacagtatcatagcagatttggaaaaaagttttgctcatttccctgttcccttggactatttctctccaatgaaaggagcaacaacatggccggaagagaagcttggagtagtagcaggtacggctgcagcagcggtttcagctacagtcagcagcagatctaagttgaggctcttaaaaagtgtgtgccagaacgttcatggctcgacgcctcacctgtgggggcttgtgattgtgactgcaacgtgggacggtagtatcagagtattccataactacggtttaccaattcgagtctaaagacagaataagcagcgcatgtagattttgaagggaattgtggcagtgtttagtgcagcattctttcattttgtttggaagtcacttagccttattcttatatacacataagaattgtgaactaagtgggtctctttgcatttggttttaattggtactatttgtaattgtatagtgtgagatctatttgtgtgtgtgtgtaaagttataaaa

SEQ ID NO: 35153 - DNA, 589 bp, Arabidopsis thaliana columbia
tgtttactgattaatttaatataattgtgtcgcattatccaagtctaattaaacattaatgtgtatattatacaccaagttacaattacagatctatctcttagtcgttttattatgtatagcctacaatgaaacatgacatcaacgtataggtgaagctgaagcctatacataaaagtaaggttttggagtttgtttcatgttttaaggttttagatattttgtgatcgatttgcatgtatagggttccaaatatctgagctttggcttggtctactttgagaaagcagctgtagagatcaactttagccgtttaggtgataaaatcacattagaactctataggtcgcgtacagcgtataagagccctggatactgaaatacaagaatctctccacgcgtagaaaaacgaaccaaccatgataaaacacgtgtcatatcgaataggtacagacaacgtgcacttgccaaccttctttccttgtagtttccttcttctttgcttctttttttcgttaaatattgatattgttcaaaaaacgcataacaacaaaaactgtggtcgacggaacatgtgggtggtggagtt

SEQ ID NO: 35154 - DNA, 1076 bp, Arabidopsis thaliana columbia
ctatggtaagatttgtttctttgtattaagaatattaaattgtaaaagtaacatccaaatttgaatgaacacctctttgattttacattagaaaaaaaaaaacaagtggttcttataactttttgttggattttttctcaattactaattgatgaacctgacataccttctaataaaaaagtaccaatagagtcacaactgtgaaaatctatcccaattttaaataatcttaaacatgcttcagatatagacatgtaaaacagaggaggctacgctcctcctacttctaagttacctcaatttcagttaattattatggggttaccgaacttcctctttgtcctcctcgctgtcctcagaatcctttcagtttccttctctgcgtcccattcgaagttagttcctgaagtaacaatacacagctttgtaatctagaatatgaacatcttcttactttagtctaccaaaagatggaattttgagctcttcactgtttcgactttagaaagtttcatacctctggtgttctcgttgatcaggcatgaaaaacctccatcaatatcttcttcatcggagtctatcacaacactgcattgctcaaactgcatgaattgaattgcacattccttagattttgatgaagttaaaacatttgttcttattatcgctgaccaatgcgaaaatgcaacccagtacctgcgtacgagtgctttcggatttcactggcttccttgttgctcttttcttgaaattgcttttttctggtttcaccgtcttccaacatcccacttgtatctttggggataaatatggttttacagctctggctgaggcgtcatttggactgtcaatgcaagataagcatttatataatctatctgtggtatatcaaaaaaagggtagaagtagcaaaccaatgtttgacctactttctcggaaattgtggttgtttggttttcagtgtagtatacaaaaggaattgctctgcaattgatttacacttgtgttagtgacagctgagctagtaagcaaaatggaattatgaggagatggatatcactgcagtagagtgagag

SEQ ID NO: 35155 - DNA, 567 bp, Arabidopsis thaliana columbia
taatgcgtaaagtgtatgcagcaatagcctgaagcagcagaggaggacccctcagggaatttactataacagttttcatctcatcagttatttctccatcatactcaaaacccagcttggcagtttccagctctggaagtgaacaaattccatttccttcgtatgcagggaaggagttacgtattctttcaatcatgcgtgatgcaagcaaatcacatactatcctgatatttcgttctcgggttgtttccatgagaatgacatcatctgcagacttagttcctttgacagtggaataaacagcttccctctcactgttagcactgaggctgcttaacacttcattcgatgaattgacagaccgttgtgcatcatttgcttgattaacatagacttgtagccttttgtgatactctgcaaatattcttgttgcttcatcacattgttgatcatacgcttccaacaatgcttgcttgtgtctaaaaaaggaaaaataaaactcactaaacaatttgaaagatctactgaacataactacaacaaatattttgatttgttgtatgacag

SEQ ID NO: 35156 - DNA, 766 bp, Arabidopsis thaliana columbia
tgccaaaatcaaagagaaataaatttcaattgtcaagcggggttgatcagttgtagaagtaaaatgcatgccaaaatcgaagatagaaacaaatcctatagtttataatttgcaaagtaaccccattgaccaaccttgctgttacttatggctatgagtcttttcttggcaaaactcgtcttcaagctgtctatattttctccggcgagcggtgctgataacctcgtagctccgaaacgccgccatggccgcagaatttgatgtaagttctgtcccctctctgaatatctctctttgtctacctgtgtttccttgtctgagatcaaatttttcgttactcacgatgaatcgctagatctgcgtttgactctgtctcaattctgctttcctacaatcgtttgctactctttcacgcgtggctcgtaatcttatgtgttgcttgagtctgatcttctggttttgatgcatgatgttccggtttaagatttgcgattgcgagctttttttgtttatgttcgagcattttggtcaatacgtgtatgattgttgtaacgcttcttaacgatggatgatcaaattctctgaaatttagcatgggttaggacctagcacaattggatcggtaaagttttgtttattctttagaatttcatacattttgagtttgaggactttggttaacttcatcactttcatcttgatcttgccatggaatgtcaagtttttccattttggctgttcagagtctaggtcatggtgaatacga

SEQ ID NO: 35157 - DNA, 632 bp, Arabidopsis thaliana columbia
tggttaaagattggaactcgaaatgcacaaagaaaataactacctgtaatatctgaaggagtatttgcatttgaggcaagccgagtagcaggtttacgatctttaactttttttgcaggtggacgcccatatttgctgtccagagagagagacaagttagaacaattggttcgtgtatttgagaagaagtggtaagtaaaagaactaattatgtataaatcaccttctattcttatctgaggcaatcttgatattgtgaaaaggcttctctactggtaaattctctgacttaaccatgataggatgaaagccaggagttgtcaacgacgagacactttcactctttccttgcttccatgcaccacctccatttatgactggtttgaatattgtctttcattgtcggaagtaatagcgaccctgatttaggagttgtgaacaagtcaccactcgcaaaagcacgctctcttgtgttattgtctccagctcctgagtcctcactttcagatacccatatggcgatgaagcatcctcaactccttttcatttttagaggctagtacaacaactgagagtggccagtggttcaggggatctctaggactaaatcagatgttcaaaacttgactgag

SEQ ID NO: 35158 - DNA, 407 bp, Arabidopsis thaliana columbia
tacggtaaaatgaatcgcttgaagtagattaagaggccctgatcttgcccatgtgtccaagtaacaaggggttctgctaatgtggcctctgtttgttatgtatggagctatcaaagtcgtagtaactggcctgatcactcatacagtcatactaaaagcaagtgattaggatgctcagtctatgcatatgcactgtctactctaaacagtatagccttcataagagatccatgtgactgcattcagacgacacatgcgactaatgactaagagctataatctggaatcaccatgtttcgcggttccaggtaaaaaagttggaaaatgatgagacgctcatgagcataacatctacaatagaggtttgcatcacccatgaatgaaagacgcgtcaacgtatacgatcg

SEQ ID NO: 35159 - DNA, 517 bp, Arabidopsis thaliana columbia
agtatcgtagacccaaaatttcttatactaaacttgttagttgttatattgctaattgacaccaaatattatttagctgcgtagttgtagttagtaaattcatataagaaaattaatttgatagagttgttacttttaaatgttaaactgaagttgacatttgatataactttgcatttcgatcaactatattcaaaagaatttatatgcctactcatcaaaagaattacacgtcagcaatactttacactttcacttccctggggcacgttaatattccactcaataattgccagctcagtaaacatctcacgtgcccgagttaatcccctcacgttgtggaccccactcgagacattcccggttaaccaattccgaaacagtccgaaaaattccagcctagcatccattcagacacagaatcctacatgtcgacttctcgttggcttaaaacccttgaccttctgtacgaccgatcatcgagcttcctccacaacgactcgagaatatgccacgt

SEQ ID NO: 35160 - DNA, 441 bp, Arabidopsis thaliana columbia
attaactatatattataagttataaattgaaaggaatctcttgagagtaactatttagggcctaattgtgaaactaaaaacgtgtagggctgaaactaataacaattcgtacgttgggtcactattaaatcatcaaagatctgtagaaaataatgaaaaagtggccccacacgctccaattaaattacagcagctccacaaagtagctcttaaagagcttccatcacggaccagatcccgaattcttcttctgaccaccgaacgattgagtttctccgatcagatctcagtttctgggaataattcgaagttagtatttctctacttcatctctatgaatctcattcattttatctttatgtttctctttacttgttttgcgattagaactcgtttgatcatttaggtggttctttgttttgtgagataagtggaactcgc

SEQ ID NO: 35161 - DNA, 507 bp, Arabidopsis thaliana columbia
gatcccctgtttactatacctagattattaatgtccaaagaatatatagtttctaggaattatcatttttatcatttgaataatttatatgttagatttatgtgtttttaaatcagataacttatgactaaaggttttgtctcattctcatacaatccatgaatcaaaatctctctccatgttgttcccttgattaacgtatcatataaatttatcattcatatgttgtcggatagtctcaatttgagatagaagaagcactacacatagaaaatgtttcgaccaaattactaaattagtaatttgttattacacattccacattacacataaatcaattccgaataatcaaataaaatgaaattcattttttgtttgataaaagatttgatgaaattcattgttgtattgtgaccttttaaaaattgtggtaaattatcaacaaatcgttgtattcggcgacgatcaatacatgatgagtgatgagcggtgtcaaattccgacaag

SEQ ID NO: 35162 - DNA, 554 bp, Arabidopsis thaliana columbia
gaagcttgcatgtggagatcaggtgaccgcaatacaatttaatgattgttgatagcagagtaatcaatatcagctggaatcaactcttgaaattgcacgaaagaaacaaaacaagaaaactacagtttccttgatgctaataattactaagaacagagggctgccaacaagaagaaataataagagaaaaaacttaatcacagaaacaatataaagctcattccacaacatgtgcaataatataattgatagtttaccacattgacattgcgcaaactgtttaccacagtgacattacacaaaacacttaaaattataatagtaaaatcttacccactctcaccaatctccaaaaaaaaaaaactcttttacaccactagcaaatacttgaaagttcattaaaaccccacaaatctccaatacaaaccctaaatctttttgttttttgtaataaagacaaaccctaaatcttagatgaagagaaaagttcggatgtcgacaggtggcaactcaacggagcaaacagggcatcgaggagtgtgcacaagtaacga

SEQ ID NO: 35163 - DNA, 579 bp, Arabidopsis thaliana columbia
  unsure (1)..(579): unsure at all n locations
tacatcaaggagggaatacaacatcagtcacgtcaccattcagattgaacgccaacgatgcttttgagggggcttgtatatgaatgaatgatcaaatatcaaaatcctatttctctacatatgtttttattgcttacctatttccacttttagtttttgtttgaatgagacttttattttattttagactttaacctaagaaaaattagattacgtattcactactctactgataaacaattaaaggtaaagaaatagtaaattcgtttttgttacaaaatggaaataactaaccaacaaggaaataaagaggaaaaattaagtaagagatgtgagaggaggagacgcaacaaaagaacttcccctgccgagaagaatggtgaacctacaaatgaacacctaggtcatttttacaaaacaaaaaaccatgaagctttcttgttttgtnttttcattttctggttccttaaaattaccatttcaaaggcatctacaagttcttttcttggtcagagataacacaagattaagatgggggagaagaaaaaagaggtgatcagattagagagagagctgtga

SEQ ID NO: 35164 - DNA, 607 bp, Arabidopsis thaliana columbia
tttttttgacttaattggtcatttgaatttcgtaggcaaatgctgtgttattaacatatccattatagtcacatactgtcaaagttaaattaccggctaatgagaaattcctaggaattgatttctacaaaaaaaaaagtagctaaaaatgaaaagcattttcaacaagtttttgatttgttcgtgcatttcttatttgtgtataatctatttatcttatatggttatgttatgactctttctggacgcagaagctacgaacccgtgtgatgaaaaagaatttgaatacagaatggaacgaagacttgacactttctgttactgatccaactcttcctgtcaagatcgtaagtgatttcgacattacaaccaaatcaaacacgatacattagattagaccacaatatggattctttatatttggaagtttgaaacaagacttaacaagaaaaattggtgttttttttttgttataaacagatggtgtacgatagggacaggttctcaagggatgataagatgggagatgcgattttcacattgatccgtccttgaaccatcagaatccaaacgactaggaggctactgagggactgtaatatgaaga

SEQ ID NO: 35165 - DNA, 431 bp, Arabidopsis thaliana columbia
tttttaaattactataattgtgaaactagagatataaatacaatctgtatagcataatctgtacagcgcaatcagcacggcgcaatctgtgcggttgtatctgtatagtgctatctgtacagcgttatctcaaagaaaaacaatttttttagagagaaaacaaattaaattagtatacataacaaataatacttggataatacataaaaagagttatgcattcatcagtaatacttgccactttgaaagaattttaggtaatctgcacaacgctatctttacatcgctaactgtacaccgctatctggaatgcgctatcaaatgatgcaatgcatctgtaaagaaggatatctgtttgaaaccaagtacgtttttaaaattttcttacattgagaccactgtacataagacgaccaatgtttagatattaa

SEQ ID NO: 35166 - DNA, 582 bp, Arabidopsis thaliana columbia
acaaactggtatcagagcacaaggttctttgttctgtgttcgtcgtgcgaatttcgtgcagtttcagatccgtgcaaaattcgtgtcagagcacaaggtttccttttatgcgtttcgtgcgatttttgggttaaagaaagttcgtgcagatctgtgtagaagaaggtttcgtgcaaaatccgtgcagaaaaagttttgtgtagaatcaggttctaggatttctgcgtttgtaatctggtgagaagatgtttgcgatgaatgtgaagatcgacaagttttctgggagaaacagtttcagtctctggcagattaagatgcaagccctgttaaagcaacaaggcttgtgggcgccgctgtctaatgacagtaaagggaagagtgacgctgctgggatggttgtcatggaagagaaggcacactccacaatcatgttgtgtcttgaagatgaagtcatcattgaggtttcaggagaaacacttctgccaatttgtggaagaagttagagaatttgtatatgacaaagtctctatagaacaagttgattctgaaacgacgtctgtttgcattaaggatgcaagaagg

SEQ ID NO: 35167 - DNA, 399 bp, Arabidopsis thaliana columbia
gatatttgttcgaaaccaaatatgtttttaaaattttcttacattttgaccactgtacagcgctgtacagattggggtgtacagatagcgatgtacagatagcgttttgaagattacctaaacttctttcaaagtggcaagtattactgatgaatgtataactctatgtatgtattattcaagtactattggttatgcattgtaatctaacttgtttacgctctataatgaattgtgtagctttgagatagcgttgtacagataatgctgtacagacaaggctgtacatgtaacactgctgagatacaaccgcacagcttacgctgtaagtactgcggtgtacagactatgctgtacgaattgtaattatatctctcgtctcaccagtacaatagaatt

SEQ ID NO: 35168 - DNA, 576 bp, Arabidopsis thaliana columbia
ctgctggtaatatccttgcttatattcgattaacgttattttgtgtttaaccgcaaatctctcctctcacaaccacaaatcacgagaaataaagaagcatacagtattagctagtatctaaaccaattgaataaagagaataagaaaactatattgttaaaataccataaacaaaaaagaacacaaagacaaaaagtaatttttgtatttatttggatagttgtttattcatctatattaatttgtatctatatatttaaatggcatatagagtggtttatttctatacagattgtatctgtacaccactgtacggatgtggtgtacagatacatccgtacaatagtgtacagatacatccgtacagtggtgtacatatgtggtgtacagatacatctgtacaaacatttttttttatgtataatggtttatgatataatttttaaaaaattatcaaacaaattacatatcaaatgatagagaaaaaaacatagatttttatgtatttgataaattttagaaaaacaaaattcattaacgagcattttaattatgagatattggaggaatatgaaa

SEQ ID NO: 35169 - DNA, 532 bp, Arabidopsis thaliana columbia
aaattattaaacaaaatgcatatcaaatgataaagaaaataacatagatttttatttatataatcaattttagaaaaataaaaatttacaaacgagtattttagttcttaaaattatagggaaaatgaaatgtaataaagaaaaaacaaaaccatgactcactctttctctctctctcacatgttttctctctctcccttaattacacctctctctcacgaaagaaaaacgtattattactatattacatattataaatagtatttgtactactttctaattaagttttgaaaacgtactagtttgcaaagacactcttatttttatgaccaatgggatggtcttagaacaaacaacatatattaccacattaacctccattttgggcaaagcttgagtatgaagtaattttctctaaatccagaagtccaatgtagagtctcatcatcccaaaatgttttatgataatattcatgttagatatgacttgaattggattgggccttaactttaggcataatcagtttagggt

SEQ ID NO: 35170 - DNA, 534 bp, Arabidopsis thaliana columbia
ccgaaataagctactgtacagatataagccatttaaatatatagatacaaattaatatagatgaataaacaagtgtcgagatagtacaaaatttacttttgtttttgtgttctttttgtttctggtatttcaacaaaatagttttcttattttctttattcaattggtttagagactagctaatattgtatgcttatttatttttcatgatttgtggttgtgagaggacaggtttgcggttaaatacgctaatcaaatataaacaaggatattaccagcagtgacaaacatcacataaaattttgagcctaaacgtgatcaattagtatgtacatgattcgaaaccaaccacaaaaatctgaattagcaaccctattaatgtatagatcaaaatcaaccaacgactaaattattgattgacgagcaaaaaaatataactcgaaggagagaaaaaaaaatgcatagtaacatctgtacgatggtatatatttgtacagtagtatatagtctatatctttacagtgttcagtaata

SEQ ID NO: 35171 - DNA, 1032 bp, Arabidopsis thaliana columbia
aaatacgtttttaaaattatcttacattttgaccactgtacagcgctgtacagatagcggtgtacagttagctatgtacagatagcgttgtgcaaattacctaaacttctttcaaagtgacaagtataactgatgatgtataactctttttatgtattattcaagtattattagttatttattttaatttaatttgttttctctctaaaaaaattatttttctttgagatagcggtgtacagacaacgttgtacagatagcgttgtgcagatacaaccgcacagattgcgccgtacagattgcgctgtacagattacgctgtacagattgtatttattctcttgtttaacaattacaatacaaacaatttcaaaattattaaacaaaacgcatatcaaatgatagagaaaaaacatagatttttatttatatgatcaattttagaaaaataaaatttacaaacgagtattttagtttttaaaatttgaggctaaatgtaataaaggaaaaaaataaaaaaaataaaaaaaaataaataaatcctgacccacctgacccacgctctctctcacacgctgactcattcccttatatctctctctctcaccaaacaaaaacaaaacgtactatgactattctactaattataaatagtagatatactacttttccaattaagtttgggaaacgtactattttccaacttattccaaattaaatcataattctgtttagggatttggttgagagggaagagaagaaaaattatgtcctgagttttttttcatttcgattgaattttttcctttttgtaatcttcaactattctacatatatgccttcaaatctcggtaatattatggcctatcgcccatgatttcataatcgggctatacatcaacaattgaaaagtgatttggttgaacatatattacaaaaatttggcgcgaatcaagctaacaactaatcgttattccgtttttgatttatatatgcttttgtgtcactatatttaaattgtagtatttgtat

SEQ ID NO: 35172 - DNA, 539 bp, Arabidopsis thaliana columbia
agtgtgctttaaaggttaaattcataaaatggtgatttttacaagttgaagtatagatactagataggttgttgggaagcaaaaatgactaaaatttgggtccaaaaaacaaggaaaatggcaaacaaggaaaacaaataggagtctatcccttgtttgccattttccttgtttttgggtttgatgctcatattcgagttaaatttgcgaatttgtacaccaactcctatttgtctccggttcgttgactcaacaaggagcctaaagatcgagtcttgaaaactcatccacttttgcttcaaacttgaaatagttttggagttggtccagccataacgaaattttcaattaaaaaaagtgacttgatagtctcctcccttcagcatgtatctcatggaggggattagtcaactcctcaattttctccatcaatagtcgtgagtccacgcttatttttgagatcagcttcttcggtgcgatactttcttgtcaagagaatccacaactccttctaagtcttgacattatgatacatattg

SEQ ID NO: 35173 - DNA, 440 bp, Arabidopsis thaliana columbia
acctgaagctctctggaatctaggaccacctgttctgcacttcttgaaggctgtcatcggaaaattagctgcttcacaaacttccaatagaacatcgaaacaaaaacagattgttcaatttggtacaagcttgagatggttaaacactagattcactaccattagagttccgaacataaaggcatacagtttgattcttcgtttgttaaaaacgacaagtacttggaagctgttatgtgagctgccgtgtatactgttgtcagtgcctccttgtatctgatcttaaacgcagtctgatagcaagatccccagatgttctatcatgtgaccctgtatagaccataaaatcggttatgaataccaccacaggagatagctttacgttaatccagacactgtaatcatcgagtcttcatctgcctccaaaattagacactttt

SEQ ID NO: 35174 - DNA, 504 bp, Arabidopsis thaliana columbia
tgtgatggagcattaacagtttccttatctttaatcttctgatcaacagcagtagacaaacgaggactagaatcaagccgcatcggaggcttcttttcggtaacagcccgaatcataaacaagccttcacttactgtagtaacctgtaagatatctggcatggataacagaaacttcgaaaacttcttatgtccatagaaatctttatcaatagccaagttgctcttactcagctcagcacgtagttctgtaatggcagcccccttgggatataaactcactatcgaacgaatcttatcaacaacttcttttggaataggacgaaggttaacaacagcattcgaattcacagactcggatagttcttcgattttcacactagacgaagattgctcagtagtggtagcaatagcaaatggatcaagaagaggaatcctatagtgaccataccaagagttataaggaccatcaggaggctgattaaaatgcttaccagtaacacac

SEQ ID NO: 35175 - DNA, 563 bp, Arabidopsis thaliana columbia
gggtaccgagctcgaatacatatcctaataaaaaaataatatattactatatgaaatttaaacacgttattttcttgtatttaaattatactaaattgatccttacagtatttctttgaatttttttatccttacaaatgttaccaaaaaatattaatttgtaagaagataattacaaacaaaagaaatgcaatgataaacaaaaaaaaaaaaaaggttaaaaagcgcaaacaaaaaaaatagaaattaattgtgaggataaatattacataattttatcttggaggatatgtaatttttattttttttattttgataagcatgatatatataatggagatgatggtaatgtttatgtttgaggaagttaagagctacatagagaggctccaagtatttattaaactcatctttctcacacgacctttcacctccaaagactcccaacaaaaatcataataaagaaatacaaaaacgtaaactttgccaaggtttttttttcttcctttctttaactctctcactcccacgaattcgtgagaagaaaccttaaaacgtttttt

SEQ ID NO: 35176 - DNA, 137 bp, Arabidopsis thaliana columbia
acacacgcgcacactcacgcacgctctcagactcacgcacacacactcacacgcactctcgcacgctcacacgtacactctcactcgctctcgcacacgcgctcgcgcacgcacgcgctcgcgctctcacacactcg

SEQ ID NO: 35177 - DNA, 377 bp, Arabidopsis thaliana columbia
gatgcattcccgtttatagcaaataaagaaaacgagggacttgacgttgtaatgcactaatgcttgtggacttgtggacggatgactctttctgcacacataatgtcttttcaaccatataattaaatcgatgtaaagtgttaactcctaaataaaatcaaatcaattggtcaatagatttcagataatttagtaatttacacttctttgtgtgattgtaaatataactattctataatatattataatttgaagaaaaatattaatccttaataataataaaaaactgtcatggcatttgtatatgagcatagagcatatatataaagacaacgtctgttaattttgcaatacacgatagacgtgtgtgtgagtgt

SEQ ID NO: 35178 - DNA, 452 bp, Arabidopsis thaliana columbia
cctttattctgtagctatatatgagcatttatatgataatacatagtttatgtaatgctctgttctctgttttatgttcttagccagaccttggggattaagtacacgtttagactttgctccatgttgaaataagctattttcctgttgttaagctcttaattctgctaagatatcaaatcttacatatccttttggtttatcttaaacttactgatgtatctttgttctgcagtccgcaaacactggttcgtgctttgaggtatgatcccccaccagagacattctttacctttgtctatggcatatattcccaaattattacgtttcagtaattttgttgcaaacaaatctattttaattagcaaggaagatagtgtatacctattttctggtgattagcatcaagatcagttcaaactggtgtagtaggacagcgaagtcattgtgtt

SEQ ID NO: 35179 - DNA, 543 bp, Arabidopsis thaliana columbia
gctctcttcctatccttgtctccttcctctttcgagaattcgtctctcttaccgccattcttttgcaacccattctccttcactgtctccttagcaataacctgaggagttacagtaacctcgttgatttgagaattggtatcagaaacgccattgtttggtaagcctccaccgttcttgatactatctaaaatgtgatcaatcccaccgaaaaaatcattgatgacgccgttttcatcagtggattcattgacagcaacagaggaaggatcaaattcagacacgagatcatcgataagatcacaagagatgtcctcgcaagcatctagccaataagaaggctttattgtggcttctctaggctcatcctccattaccataattctatataataatcaaatcaagaacataagaaagaggagaaaaactcactcaagaaaaccaaatccccagagaagaaaacagaaccaaaagcacgagaattgaataaacccagaaaaaggggtgagagaagagagtgttttgtgacagattaggggtaga

SEQ ID NO: 35180 - DNA, 463 bp, Arabidopsis thaliana columbia
cgttcataggagttgtataaggattggacaatatgtgagaaggcttttatggacttctacagaaatatgcatatgacccaacaaacaattattcgcttccatctattctggtggttgctaacttggcatgacgtttttttttctccttattcacccttatccatttttttttttttttgctatgaatgttaatatcatatgatatgaacagtttggtttttacatggacctcaacctaataaaagctaaaaacaagaaatcaatagatttcagagttgggaaagtgtcaatcttcagtgcaccaaagactcataagcaccgtgaaccgcttgtttgatctttctggcattgattagaattcttgatctatctttctggcattgattaaaattcttgatcgctctatcaatttttttgaagataattgatggccaaatgagaatctggttgggtaggacgtttt

SEQ ID NO: 35181 - DNA, 614 bp, Arabidopsis thaliana columbia
tgaatacagaaacagcaacagattagtgttgctaataagcaaaacgtgttgtttgtttgtttaaagttgaaaactaaaagtctaaaaccatctgtgtaaagaaagatgagacttgtttggtgtgtggatgtatctggtaaaattggagtcgtaataatcataagtttggttcatatattgaacaaaatgtgggtcgaaaaccctgccggttcgcctgaaccatgaaaagtcggatttggctgatccgcacgctcaattttcttcagctaaatcgcgaatacttgagcttgtagtaagtcgtggccactagtgggacacacaaaaccacaaaacatatattttgcaagctaaaacccaatggactaagatttgaggttcagggttggaccataaaatttggaatggataatcggatactttaggttgggttggtagttttcaatattgaaattgggtttttggacctttccttagtttttgatttaaaacaaaattgtaaaagaaaatgaaaatacgaaggtggcattctagctttatttccagagaaagtggctttcagccatttattaaaaacacaaagaccagggtgtttttttctgacaaacaaattgtac

SEQ ID NO: 35182 - DNA, 534 bp, Arabidopsis thaliana columbia
taatttaatgaagaggacccaacccatcttcatcttatctttaccatttatataaatccactgaaaatgggaatggacgtacgtgttctattgtgtttctaccaaatatttttgcgttttaatatctttcaactgtctctaccaaatctaaattggttagacttcaatatatattattcataaagttttgtcgtgtttcacgtgtttatgaaacgtacccgttcttgcatttagtcccacgcactatctttttttatccatacttgattactttctcaattcgtcgatctcacacatattatatccggccaagcggctaagtccaccataaaaacgaattatatcgataactggaatgttatcagaaatttacaatgtaatatttctggaatgactattaactttgacgttgttacgagtttaataatttttgaaaagactatataactctcaaaacgtacatgtaatttttagcaatgtccttggagaaaacaagtgtacaattacatgtacgtgtaaattaaaaataatgca

SEQ ID NO: 35183 - DNA, 596 bp, Arabidopsis thaliana columbia
tcaaactgttataatttgtactatatctcaatagtaaatattaaattctaatagaaatgagtgagtttaaaatattcatatcatatgctactcccgataataaagtagtaaattccaagtgaaacataaaaaataaaatctagttgaatcgaagaatcaaattcagagggatcagaactggaaagctgctgattcaacaagtctcggtccatttgaaaagacccaaaggcatcaaagtccattacttattctgtgtttgttaaaacgcactaaaagcccattaataaagtatgttctttttcctaatgtaattatgcaaaaaaatggttcatacataatacattcgtaaccatgacgacactgaataaaaatgttctttttgtatccaattcagtttttgacactaaaaagaactacaatagtattctctttgacgaatcaaagactgcaaaagtcgtgaacaaatatttaacgaaaaattttattataaattagaccaagtgatgatgataggaaagatgattgtggattgtaggacaatcagacggtgcagagatggcgagtgccggagaacaatggatgccgcgtagagacat

SEQ ID NO: 35184 - DNA, 557 bp, Arabidopsis thaliana columbia
tgtaagttcaactttctttatctccatttacattttataccccttaatcaatcaacagtttgattatgactatttcgattcgaaagcagagcctaccatattgaaggcaaaaaccatgttcacgtttggattgccatgaactagagatctcgggtgttggcaggcgcttggtggggttatattccttggacaagaacttgaaatgattcagattcaaaaccagaaattgtaaatagagaatggagatgccaataaatctcttttctttttgttctaaaaatgtcttccaagtaatcttgtttcatgttctgtttgtttcagtgaacaatacccaatcattaaagagttacttagttctttgctaactgttctgtaataagacaccaagtctgtttgccctttaatatactctttcaagcaatttgccgctctggtttgtcaaatgtttggatcataagctttcatctttcagtagataataatcttcgtacacattaagtgagatagcctattatacatgttttcgttacttgaaatcattaaagttaacggtagtg

SEQ ID NO: 35185 - DNA, 649 bp, Arabidopsis thaliana columbia
tccaaaatttgtcatagtgaatgattggattgagttgatggggtaaagtagaaacactaattcggtggcactgttcagatgatggctttattatgatttctcgttgaatggttttaaatgttcaaatgtatatggttttaaatgttcaaatgttgcttgatatgaattaaatgtaggaaaattataaaatctgccatatttttcccaatcgttatgtaatctgccatatttcttcgggcattacaactcataccacatttggttgtgaaatgtccattttgttcccacggtttactgagcagttttcgcgctcaacaactgcgtctttttacaataccttttatctctttttcattgtaaaccgtgcggaaaaacaacaacagttaactctctctctttcgtctatctctctcatactttccctttccttcaccgataactttcatcggattatgtctccggtaaggtcatttcaagtttctgcatgttgctatcttcaaacaaggcttcatagcttaatcagtgaagtatttatggaaaatcgttagcaaatcccttgttactggtctgttatgaaaaatcgagtttgtctcccattatgattttagatagttcgtcctctcctgtgcgattcatttacccagaaagt

SEQ ID NO: 35186 - DNA, 856 bp, Arabidopsis thaliana columbia
ttttgataaaatggttaagtttcgttgactttgctattttggacatgtcgttaaatttccgctaacaaaaaaataaaggggttaaatttttgttagcaattttcgttaaaagcgaaacaacgtcgtttcaaaataaaaataaattaaaaatgttgcgccaagaaggaatcgaacctgtgaccctccagaattattacaagcactcaacggatatgttatgataacattctgatatactgaaatatatatatttgaaagtaattaaaaataaccgaactaaaagaaacaatgaccaaacatgtaaaaatgttaaatacgcctaccattaatatatatttcaaaattataatgtaattttttttattaaacgtattgaattaaaaaaaaaaatatatatatatattcaagctaacaaccaaatatttatcttatatttatacgagaaggatcgcaataattttttttttggttgttagggtaaatatttgaaaaaattacatcatctgccatatttttcaaaatcgttatgcaatctgccatattttcccgggtcttacaactcatgccacatttggttgggaaatgtcaattttgtccccacagtttattgaacagttttcgcgctcaacaactgcgtcttttgacaatcccttttatctctctttcactgtaaaccgtgcggtaaaacaacaacagttaactctctctctttcgtctatctctctcatactttccctttctcttcgccgttaacttcatcggaatatatcttcggtaaggccatttcgagtttctgcatgttgctatcttcaatcctgtcttcatgttttgttcaatgaagcctttttggaaaatt

SEQ ID NO: 35187 - DNA, 1521 bp, Arabidopsis thaliana columbia
gaaaacgtattgagcttcgtatgttctctggtaattattctcgaatgtctcaaagaacttctggttgatcggaatagtgttggttgcatctagaggaaccagagtcactggaacacctgaatgaaacacctgtaataaaacacatgtcatgtcttgttttgaaagacctaagacaaatgtcatatttatttttataaaacattatttagacttaaaaaaaagatagtttataaaccaaacaaatccttgagagttgagagaagataaaagagtaggagaatgaacctggtaagcagcgaaaggatcagcgaagatgttgaattcagagtaaggattacttgtataatctgtgaacaagtttccacggttcccgcactgtcgtggttgacattccgccaccgtggagttcgccggacaacagccggtggggttttgtgatcggacaccaccgcccatgatgtagatgtgttggatgttgtgtttcaagtgaggatttgacatcaagaagagtgcaaaattggtgtgggatcgagaaggattacggtggttggacttcggaaattttgtcgacgatcactttttgtgccgttggttgttggagaggagtgtatcttctgttcccctgttttcccacaaaaacataaccaaccacaagaagtcaaaacccgtcttttaaatatttaattcgatataaaattacacttgtgaaatatataaaaacatcacaaactaaatcgattcttcgctactataccgatattttaagcatttttgctcttttttttgttatttgtttttttaattttgaactaacacggatttatattatttttatataaaaaaaaacagattcttaatcttagacgttcaaattatttgaaaagttttaagaaattgtgataacatttaaaaaacaaaaataaaaactggataaaggctagataaagatgttcagagaatccaattattatttttatgttttttgtatatggaatatcacgacaagaccaatcctaaagctccaattatatgtctcactactatatatcggaatcttataagttgccgacaagtgtttggatgtacaaagtcagctacttcaattggaatcccaccattacaatgattctaatttctcacgacacgtggagccgaagagataccaacacaaatgtctgtctacacaaaaccctccacaatgtataaaggattctaaatggtggttgcaattaaaagtagcttagttggtgcgatgggatcatgcgatctatatgatataaaatgaagctattatacttctttagataaccgacgcgattatagtaagtatatagttgttactacgataagtcaaaattttctgttttacgtatacataagtcaaaatttaataaatacctgaggaagaaactgtttacgaaatccataattggagtctatgtcgagaaggcctccaagacctttaggaatggcttgtctgtatctcatcccctgttgttgcatccctaagcacacaatttt

SEQ ID NO: 35188 - DNA, 596 bp, Arabidopsis thaliana columbia
aatattcatgtattattcatcgattcgtttggcctttccagcgtccttcttctgactcttaccaaaattttatcaatctctccctcgccgcgccttttcgccggaaggacataacttttaccgggatttgttgtctacaagggaacctcgagcgcaaggctgtttaatcggaagaatctggagtcacggagaagcaaaaatgaacaaaaagagagaccctttatgctgagacggtttaattttgtatctgtggttatagaaaggaatcgtttgcgatgaaatggagccttatagggttattctgatcggtggttgaagcgttgtcatttgcatttcgtgtcattctggttatagactctgtttcaattgcttctcgtcgtaaaggcgtttgcttttgtgagtaatttatctcgattcttctgaaagccgtagaaagagagaaggttgtgtatagatattggaaatggggaaggttttggtgatgttgacggcagctgcggctgtggtggcttgttcagtggcgactgtgatggtgagaaggaggatgaaagggaggaggaaatggaggagggtggtgggttacttaaggatttgga

SEQ ID NO: 35189 - DNA, 1032 bp, Arabidopsis thaliana columbia
acagaaataatatggcatcagtatatcatatggtgtttctacacaaatctcaagttattattgccttaaaaaagagtttgaattattgacacgaattgcactaaatttatagcatttgttaatgtttataattatatatgatgtgtataaagattaacataccggtgttagtagcaaaatttttgcaacatccactaagattgtcatccataaactacatttatttgagaatttacccttattatttgatttaatcatcgatcaaccacttaacaaaacgtattcactaattcgatgaattgccaaatacttaaatatctgaatggtatagttacagtgaagtagtcaaaagagcaagttgggccgccagggtcggctgagtggacaaatctactgattgcaaaggagaggcgggccttccttttcaaccacagccgcctatttctctatttacttttatcatcacaaactgctatttttagattttctttttaagagattttttcctttatttcaaatttttttttctaggattataaaacttaacgtactattgtataaaaatgaatttctcctactcccaaatgtagtatcttaaaaatcccattccaaaacgattggttgtaaattgtttgataaagaaatataaagatgtttgttatgaagaaaatgatgctttccataacattttttccaaaagcgtgcaattcattttctgctaacattttttctccttgtcttttatgcaacaattaatgcggactagagcgacagtcgtggattctatgaggtccagttacatttctttgtgtcagaagatttttttccaaaattttttccctaaaatctatttaaaataagaaaaaataaattgtgaaaacgttttaaaacatcattaacaatgcatttaacacttttataatccaattccggacgactcattttttcttgtcaaaacctctagtttagttggctaaaatcttaaaatgcagtccacgaaacatgtgttaatcgaaaaatcgaaattgtgtt

SEQ ID NO: 35190 - DNA, 326 bp, Arabidopsis thaliana columbia
atccaatatatatgtacatgtatgtttatatccatatgcttggtaagttttcaatttagatttcatatgcaaaaacaacaaggatagatatcttaggtcaatggttcagatccgttagagaaagtgggatcgccaactttgcttgattatatccattttctgctaaatatctagaaggtagtgttgaccaaaaaaatcttatattaattggttaccacacattaactgtttaaacaatcatacgacggagatatgttaaagacctctagaaacatttgaacaaccaaacaactatatagtaacactacatcattccttgaaagtat

SEQ ID NO: 35191 - DNA, 438 bp, Arabidopsis thaliana columbia
ttcaattacacatgaactcagatttttgtttttttgggattttcgtttttgtttacaactaaacactgtacatctattcactcctaactaagttgtgtgtacgcactctacatcgttacaaagttaaagggcattttcgtatgaatttgccttaatggctaaacattggaaggcccagcccactctgccaatacttgaaagaaaaactcaggacggtgatcacggtgaaaataacttttttttaatactattaatcatgattatctagtttttttgtttttttttttttttttttgtttacctaattggtttgttcaatatcttaccactaaccactaatctctttcaaactttgaaaataatagatagatgctatagaaaaataatcattaaaaaaagactagcaggccgacaatggaaaataataatcaaagtatt

SEQ ID NO: 35192 - DNA, 380 bp, Arabidopsis thaliana columbia
cagtagtcatcaaaaacaaattgtacaccgaattgtatagaataatatgaaaaataaaactatctttagtattcactttatttcattaatttaagtatacaaatatataattctaagcatttcaaattatatctgaacattacaaaacatggtaataaattcaaaacttatgtcattgataagtttgtaatgcttttagtcagttttgctttccagcttattagtcaataatttggtttcacaaaaaaaactgacggtgcctaacaaattagaatagtaaaaccacaatagagactgttttcacaggaaactatatacttacggctgatattaattaatgaacaagaggcggctacagagacaagagagtacacaaaaca

SEQ ID NO: 35193 - DNA, 551 bp, Arabidopsis thaliana columbia
cctcttgaatcctatcggcgatgtttccccacctaggttcagatagtttgcctgtgcgcgttctcgtgacgcaaaattgttattgggctgctagaaggcccattttaagtgagtctgtgagactatataaatgccctaagtctcggaaaagaaaaaaagtgtagccgtaatttgtaattgatcataatgaagccggaaactaagagaagcaccgccacaacaagacggcggaccaatgacggtggttctccgttcaatttcagctctctcaagcaagcgatcgaggccatagatgctgcaaaggatacttcaatcaatctatcgtcgttgtctgtggcgttatccgccgcgagtcgtgagatgaagcaaaggaaggagaaatctcaccgtaggcgagaaaccaggaagagggacaagaagaagaagaagaagaaggatagtaacaacaatacgaagctagtgatcggaacaaagccggaaacggatgcagaattgcgaagatggttttcatacttcgacaaatcctttaaactatcattgccgagaaaggt

SEQ ID NO: 35194 - DNA, 386 bp, Arabidopsis thaliana columbia
tttccaatatttttccattggagcttctctaattcctttattcgacagccacacatgttaatctggaagctaagctctctctaacacaatcttttgactgtcggaagtcgcagaaaacaaaccagaagactgatcataggcttttcatagctagtgtctgatatcagacaaacacagacatgtctgtgtctctaagctacacttgtcttcttagattacccaccttttcagttccaacgaaacccattagtttcaatggacctctccctttttatctaccaagatctcatatttcctcatcttgttttggtttcaaatcaaacccattcataagaactcagaccccaagattcttcaagtgtttgcctcagagagtgtctgatgaa

SEQ ID NO: 35195 - DNA, 583 bp, Arabidopsis thaliana columbia
gtgtatggtgccaatgttctggccgagaacctattctttgattcaactcctgtccagaacttctttttgtaatttcatcccttgccttctctaaaagcattttcatagcagccaggttattgaagccctgatgttgttgattaaatacataagaaatgacatcactccactgctgagtgaaacattcatcatcaagcaatgaaaataggagatcttgtctagctgcagtcgaagagtcatatccatccatacaccaaggaataaaaatttcttgaaaaactttaataagcttctccgggctcatattcttctctttttcaacagagagaagggtagaagtctctatatcatcaattagcactggaactacctttcttggtccaaacaccgatactgaaactgacaaaagcttcacaccatctaacaattcctgaaaagataaatacagccacacaggttagtcaagtaaaaacatcatatgatctactatgaaaaaacgggggtacaaaccgtggacgataacttacagatgatcttatccacgggaaagccttggacagcagtggcccataaattgatgcaa

SEQ ID NO: 35196 - DNA, 493 bp, Arabidopsis thaliana columbia
ggacaaggtaaggaatccaaccacttccttaacgcatggcaagattagcggatctcgattaggagtgcaccagccaccttaagcaccatgccttcctcaatctgctcatcaacacagccttaacttcaatattgatatggtgaaatatatgtcttaaacttgtacaaaacaccactcaccagtttctcgatagtctcttccggtatttcattgaaatagatctgttaggaatttacatcatcagctgatgctatatatttcccaaattgtaacaatcctaactttaatgaaacgcaagattatagtgttacctccactctatcgacgcctccttttctgactcctgttttgagatttgtcacagccacagaactcactgttgctgtatgcccttggaatagcctgtgttttgaatttagttctttaaccttaagccttgagttatagtaagcaaaacaaatcatgtgagcttacctcttatgtactcccttgc

SEQ ID NO: 35197 - DNA, 490 bp, Arabidopsis thaliana columbia
cattctacatgttgggctttatataacggcccaaaatagaattatgttcaattttaactgctatatatgtgtttgttcttattttccctcacctaacacgatcttcaaaactaagaaagtattgtcattgctttttgagtgagagagccaattatatctgtagtgaagtctaaattttataattatatcattttaactaatctttcaggataatatataacatataatgactatgggatcaaacttttcccaatctatgatgtagactatgacttcattcaagattttgaggatagtgcggtgggtaatttgatacgaatgtattttgaataaattattttatacttcatacgagactttgttattcaattttgagtagagactcttttcatataccaaaacatatttgtctgtgaggatactttcatatatatatgaatgttaagctcaagattgcttgagaagatgaagatttctttatgtaagttga

SEQ ID NO: 35198 - DNA, 585 bp, Arabidopsis thaliana columbia
atatataaatgtgacttatccaactttgttagttgagattttttaatttttggtgtgttctggaatgttaatgttaggctaatgtgtgtttcaactattgctaatattgtattaagggacaattattaaaaacaaaacttgaaaagagaggctaaataattagtgagtggggtttgtatgtaattacaaattaggctgcgtcatagaggattgcttccatcggatctcaaatgtggacctactaccgacacttctgactcatgcttagtctccgaacacaagacttcgaatcttaaaattaattttcttagatttgtctttttatttatttttcttgtatttttaaatataacaattccctccaactataagatccaacggctgatatcattctaaacctttacagctaaatctgaatctccaccgtccgattaatcatcttccttcatcttcttcttcactcactcagatctcaatccccaccgaaaaagataaaaactcacactttctctctctctctctagaaaaagaaagatagaagaaaaacttattgttatcccatttcgccctatcgaaaaatggttg

SEQ ID NO: 35199 - DNA, 515 bp, Arabidopsis thaliana columbia
gttgagggcagctctcttggctttaccttttctctaaagtatgtatgtgcgtagttcaagttttggggcttcaagttcttaggaagagccgtacgaggcagctcacgtacggttcgggagccgagaccctgcacagagtgagatggatacttttatgtcttcgtttaattatggtttggacataattgtatcacctctttagtggtgcttgcttgcaatttgtctttttgaaaaaaacaattgttgcaatattatgcacaacacattacacatatatgtcattgctcttggtcaagtaacgttttccatgcagaatttttaaatttgtcaaagttaccttatttatgtatgatctggatactaaaatttgatgcattagatacggctctgtcacccaatttttattgtttaacttcaaaagtgaggttaaaaagattttggaagaggatcagtagtctaattgtttgtccacaaacatacagtatcttgttaagatgatcttcttttatttaggt

SEQ ID NO: 35200 - DNA, 434 bp, Arabidopsis thaliana columbia
atccaacgtggactggggtttcagacaacaacaggctctgcttaaaaaagcttttcgtcctctgacggcttaacttcacttttccccaaacacaaaaatccaataaataatatcaacggctactttcatctccctatgaagaccaacacgtgtcacacacccacttgtcctaacgtatttggcgggaactaaaacagaacaacgacaatgttgaaaaccccacacatgtactattaagtattaaccccactgaccaaatcacggaacattgtctactaaagctcggtagatagtttacgcaatgcttaccataacggcgccatagggtctaaacctcaacgtcaacacactattttagtctacatgactaataataatatgctggacccgacacataatatattcgttataactatgattttttgttgaacgag

SEQ ID NO: 35201 - DNA, 957 bp, Arabidopsis thaliana columbia
gtttgtgtttctctgagctttaagtttgactgcaaaaacatgaatgaaacatttaaatatttaaactttggataagggaggtaaagagagtaagtaggtgttttgtaccgatttgtgatgaggttgtgaatctttcttcttgatggtgggaacactggtgaagttgatgagatgattaatggattaaaggagttttcttgctggaagatttgtctccttggataagaagtagatgaccattgttgttgttgttgctgttgtttattgctggtgatcgaacaaacggctcttcctgcattgattgtggcggcttcactaatctcgacttgaaattctctggtttcttgcatttctttgtagatttcctctgtttttctttctctgttccttgtggctcttcatgcactgttggtaacctggtcttgtcttgaaccttcattgctgttgtttccagaatcttggaagcgacattatttgtctgaagtgaggttggttttgttttggggacttccgttaatcccaatctcggggatgatgatacatcatgagtgatgattgtggtcttagaagaagctttcttggactcatgaacctctcttggttggtggtcctgtgttaggtatatcagttcccattcttcttcttcggctaacgttctccttcaactgcatcactatctgtctagcatactctcgtggactccgattctctttatcttcgtgtatctctttgaccctcgggagcctgacattgttaataccagattctctttcaggaaacacgttgatgttgttgtctctgagatgaagtgaagaacgttggtgttcgtaacagttgacatcaacggatctccttccaagtgaagtcctcggtggctcgggaagagaacgtttgcctccgtcgacagagtttccctggagagagtaaggtctgtgtttctttgcgtgagaagatctg

SEQ ID NO: 35202 - DNA, 438 bp, Arabidopsis thaliana columbia
tcaaaacataaaccaaaagaaaacaagatcgaataagaaaatctatcaaaaccctagcttaatcagacaaatcgacgaacagattctaagattcaatggctcgagaaaattatttatataagccgccgaagacaaaaccctactcttctgtttggttacagatatatcctttgagacgcaaactacctgccgttttctaaaaacaactacgcaccgttttgtctaaaacaaagtcgttttttagaccaccgagaatagtctctcatctttgtcgtgtaacctgaacctccacgtaacgaaagaatgctctgaaccacaaaaaccagaaacgtgtcaaactgcttctgtaaatttagtcataaagcaaataattaaccatgacgcgtctctgatttttcaaactaaaaaagccaaaaattcgatttgagtttatcatat

SEQ ID NO: 35203 - DNA, 618 bp, Arabidopsis thaliana columbia
aattaactacataataaactcataaacggtaaaacccacaaagtggcaaaaccaaatgcacttttagagacacaatcaaaaacctattataaagacaatactgtaaatcatgaagtcattgaatatgtagattgtggccaaaaaagagaaaactttaccatgatagatccacaacactttggccaaagaaatgcttggcgacaaaaagaggacgcgcacttccagttgtccatacggttatagtacggtcttgactccccattgcaataacattgtatgactgcaaatctttctcccctgactttgatgttccattgctccacccaacttgtttagtttcatgggtactagaggggattcttttgaacattgaatgattgaatctaacaacaatgattggagcacatatgacctaagaagtcatatgctacagaccattcccctctttctaaaacaggagcagaatgcttcggcttctgaaacccatgagtggtagtaaggaagtggccacagggtgaccaccaagtcgcctgaaaaatgtggatcaagctagaaaaaaacaatttagcagtaacatccagagaacagggaacaattgtaataaagagtttgaacagt

SEQ ID NO: 35204 - DNA, 735 bp, Arabidopsis thaliana columbia
gacaaagctggttgcaaaacgaatcaaaactccgaacaattgaaatcacggctaaaaggcatcttaaaatcgcgaatgaaatttctttcttttcttcaattttatttgcaaactatccttgaaatttcagtaatccgtatacccaacatgacgatccggagaaaagccaccaactaaaggttctaaatagatctaagtcaccataagatggttaagcttcgcttcaaatccaacaaacataaaaacacttgtataaactataaacatataagataggtgtgtcatctctcataaaactctgtaaagacagagacgaaagacaattcccctttattggaagcaaacaaacaacacctaacaaaagcgacgacataaaaacacggcaacggaaagccatgtctacggcaatgaaaaaatcatgttgacggcaagaacacggcaacggaatagccctgttaacggcgatgaaagataaaagcttctctctctagacagaaaagagagagagaggggtccttaacttattagatttttcattcacgagtttatctacaaatacagaatatatatgaaaaagataaatacataaataataataatttggaatttaaaaagaatatcaagttggttttacacaataccctcaagatcatgatttcgtttcagaagaaaagattgagaaaattggttccactaatattatgataattattagaactgtagcatagtagttga

SEQ ID NO: 35205 - DNA, 591 bp, Arabidopsis thaliana columbia
cgaagacacaaagcttgcaattcagggataatgggattatttgggagtcaattagacctttatgtcctatattgataatacttggaaactggtttgaaagtttatgcagttctcatggcgcttacattgtttctcaatactaaattgctgtttatttttcttccaacttttgacacctctaaactactgctggtgcgacaggtgctgcattgtccttcttaggaggaggtgtttttggttggacctttgggcaagaggtcgccaaccacacactgcaactctacaagttggacacaatggcagcccaagttaagttcatggaatggtgggaacgtaagtctcaataaaggtcctgaatctaaaacgaagacgtgtgctgctttctcgtccagagtatcttcttgggaacaacatgaaatgctgattatccatccatttccagactttcgcctttgaaactttttctattctcactcttggaacatgtttgccttgtcttaataatacaacatgcctcatgaatgttttgaagatttgagaaaatgaattcaaagaaaccaaatggtctcaaaagaatcagggaatgacgac

SEQ ID NO: 35206 - DNA, 510 bp, Arabidopsis thaliana columbia
ttcctcttcccatttcatcctctctacgaccacagatccaagacctatcttcttgtcgtctttctcatcccttaagacactaaaccaaacaactccatcacctgaatcctctctcaaattagtttcttgtccctcaagcttcaccgattctgtttctacatcaacatcaactacaacctcaaaatgttcattgccaatgttttcgcagaagacaacttcttcccatctctctcgacgtgtcacgctgtaccacgtcgatctgctcatctgacctttcacatctccttccatcacaaatatgacaggcacataccatttccctatctcaatactcttacctaaactagtaagttctgagtctaagcgaacgtttgtgttaatcccttttgcatcatctcttagaccaaagtcgtgcgaagtcgagtagctgacacaccaatctttcctcttaaggtaattaggtggtagacattagacagacagaagtggcagagtaatagcgagatgatg

SEQ ID NO: 35207 - DNA, 487 bp, Arabidopsis thaliana columbia
tgatcttacacaaacacatcaaaagaaaagcaaaagaaacaacagttgagttacacagaatcttgtacattagaaaaaagagaatcaatcgaagaaatttattttgagtgattcctaattttgacttgcctatcatcttcaatgacgccattgcgagagaaagtgaaacaatggcacaacacaatgaaacttttttttttcttacgctttgtatgactaatcggcttttcccacggcccaatatggttcgataaattatgggagtacgaagataaaagtatttatgaataattactgttagactcccataagaatttggtatcaatgaaaggcaacatttcagtgaaaaaaaaaaaaagactcccataagaataattgtctaaattatttatatagagaacagattaatctaggtttcagaatttaaaataaatgtaaatggaaataatactatagagataactgtaaataatctatgcttaagtat

SEQ ID NO: 35208 - DNA, 664 bp, Arabidopsis thaliana columbia
aatttaacttgactgcaaaaaaggataacgaggaaagtaattgattagtgaaatgaaattcaagcttgaagatgaatttaaggaagaggaaaaacagggagaagtaaaggtaagggtaaaatattaagactttataaacaagaacaactgtgaagagcgatgagttggcaaagatctaacctttgataacttgggtgagttaaaaagttactttaaaaacaaaatgatagtccaagggtaaattggtcactaaaatttgtcatgtaataatcatgaagtcgttataaggtagtttgtattgttgcggaaaattctcgggcatatttgtgacaagtgtaaaacatgtaagcattataatttctactagccgtgtgattatgtttttggtgttgcaatgtcaatctaatggttcgtatcagcatagggtccacaaattagttggtcccacaaggtccaactctaaaacattgaccaagaaatctaagatgatgaaaagtatatatataaattaatgatactacacatttagtttaatttatatcttcactttttagcaataggtagttactttaaaaaaaattaaagtatttaaaaataaatatcatttctctataaatttggtttggttttttgaaaattttaattaattaatgtatgttgagaa

SEQ ID NO: 35209 - DNA, 616 bp, Arabidopsis thaliana columbia
  unsure (1)..(616): unsure at all n locations
ccttagtaaacatttagtaacaggtccttacgagattcttttgatgtcaatgtctttttgcttttagttcgttataggagtctttgcgtgttggttaatgggagtttctgtgttggttaatggagtctttgtgtgttggttaatgggagtttctgattttttgtgttagatagtattaattagtttggtgtgtttcaggtaaagaatgtctactttacaacaggagaaccaacctcgccgcagtaagcgtgtgcaagggatagagttgagttctactgttggattaaagaaacatagaaaaagcaagaaaactctggcagagaaagcagccatagcccatcttcaaaggaggaagagactgaacaagtagctgatgttcttggttcagacttggctgcacaagaggaagagactgaacaagtagctgatgaagaaatccaaccagctgaaccagctgaagaagatcacaaccacctgaagaagaaggaattgaagaagaaatggctgtagaggaagctggaactgaagaagagggaactgagattctgtccactgaatcaactcaaagccaccaattcgcaaccaaganaaggaagacacgggaacaactaggatg

SEQ ID NO: 35210 - DNA, 396 bp, Arabidopsis thaliana columbia
gaatccagcaatatatcaaaacgtctatggactcatttttgaaagtaacttatctcatatttatagtcgtcttctacattagagtttcaagtaaaggtgcttatgcaatggcaaacctatctccacccgttcgagtatatttctctcttaccaccagaggtttttgcatctcctttaagagttttctaacgagtttttttttatgtgtaataactgtagacttgcgttctgagagttggaatcaagtgttgcaaaggctgccagacaaaagcaaagagaaagttgctaaatgtctctggtaatagatccactagtgaaatattgttaaagctatagtgttgttataaatattctagctaatattattttcgaaacaggggtgagtacagttgagta

SEQ ID NO: 35211 - DNA, 528 bp, Arabidopsis thaliana columbia
gcatcgactcatcatgatcccaacaaacctgccctaccgataaaattgcaatttgcaaacaaaagacatgagttttattattattatcatcatcatcataagactgtttttgacaatttccacaggtgggcttttacctgtataattcacaacatcacaataacctatgcttcgacccttttaatccataatctacaaagaccaatatgacacagactttggacccttttttttactctaagctaacctaaaactagatcaaccacagactctttcactctcacttgcccacacgcattgaattcaagactggaatcaaactgaagactacttacatccacctctttggcccaccggtagagccagagccatcatctctacccaacatcgccatcatcaaacttccaccatggactcttccttccggagctaaccccaatcctgcttcatactcattgagatcaacatcagtctctggagatccggtagcacttctcgctttcattgtatccatgttcatgtcttgag

SEQ ID NO: 35212 - DNA, 605 bp, Arabidopsis thaliana columbia
caaaaatatctaattgataaatggttactctagtgttatacagttgaatactatagaaaaaattagaaatagatactctttcacgagattgtttttttcttattgtcaacaagaagaagtaaatgcttttactattgtatccttctttaatttattatcgggccaaaccacggggacacgcgcttttaacaaaagttgaaaagtcatgttactcctcctctcaattcgtctcctccgccatgcgaactcaaactcaaagctctctctaactttttgcttttcttcgaatctgtgatagatcgagacttggatttatcagcttctccgtgctcctttagcttctgctcggttttgttttttttagtctgacgatgagtaacaactggaaatccgttcgattaaggcttcaaaatcgtactctcgtgtttcttctggtgattttgagcttcggttcttgctattcgttgaaatctcaaggtatttaccgtttttgtttctatttccctggtgtgcgatacatagaaggatagtcctcataattgtcagtatcgattatggctttcaggtgatggtttctggaacagtgcgaaagactatgggtacga

SEQ ID NO: 35213 - DNA, 500 bp, Arabidopsis thaliana columbia
cccccgagtttaaaatcaatcccagggttcgtcaaatgtaccgcagccaggaactttatgacaaatactacaacaacaggctcaaggctttcgagaataaggtacaatttgtttaattcttttcttgtaaccattggcatatctgtataagcctcttcttttctcttatcagttgctatttgttttgctgaatatagatgcaccaatagatttgtgtatgcctgcctttgttgtccaagttggttttttattaaatcagtaaaaaatatgaaaacaaatgtcttttgtttgttttagggttttctttctgatcatctgaatggaatctatgatgtttatctagacgaaaaaatggatggctacaacagtactagggatttcatggcagagcttgctaatgtgtgtgttaagaaacacaacgagaccaaggttcgtgagtcgaaagaattactttttattttttttgaagaatttcgtattttggtttatttggaatttta

SEQ ID NO: 35214 - DNA, 727 bp, Arabidopsis thaliana columbia
tcgaaaggtagacccgggaacagctccactcaaagccggtggattcatggacggaccaccgtacgccattgctttcactcagagtaagatataattgtagactatctatcactcggagtaacaggagctctctttaagtcattatacacacttgcgcttgtaatcgctcttcttcttcttaaaaacaaaagtataatcaagttaatctctgcaaacagaaaagaaaaatgcaaactttactagatttaaacagccaatcttgaccccggaattataaaagcacaacagagatcaatttcaaacaaccaatgtatcaaaattcatcactagagtaacaatcatatatatataagagaaagtaatagaacagcaacagagaaagaaaaacgagagccatcgatttctgtacccagaaatcgaaaaagagagaacgagagagcaaaaagaagacgaattaccaaaaaaagggtcaatggagggaagactgaaggcggcgaaagaatgaacggcgattctacggcgaggagaaacggacgtcggagattcgcaaacgtgtgtgtgtgtttgaggagaaacagtgaattcgacttacgaaatcaatttactttaggtttatatcgctgtaatttccattttttcgattaaggcaaaattggaaaccgaattaatcccggtttgagccgttaaccgacctgaacaaccttttcgatttttctactatacagtt

SEQ ID NO: 35215 - DNA, 565 bp, Arabidopsis thaliana columbia
ggattgtaaaacacaccaatcagcactctgtagctatctagaggtttgtaaaatggaccaatcagcactctgtaacatggaccaatcagcactctgtaaaatggaccagttggcaggacatgggtggggacaaataagggaataaaagctggcaactgcagccagcagcggcaatccggtggggtctccttgcacgctgtggaagctttgttcttttgttcttgctgctgctactcactctttgggtctgtgccgtctttaagaactgtaacactcactgcgaggtccacagctccattcttgaagtcagtgagaccacaaacccatcggaagtaacaaactccggatacagtaagagttatgcaattattggggcagaggttgtagatagtgattttggattgaataagaccactgatggacttgtttgtgctcaataaggtttaaaataaacagatttagtactacgtacacatggacacaaagaagggaataatagacaccaaggtcttcttgagaatggaggcaggaagagggtggaattgaaaacctactattgggtata

SEQ ID NO: 35216 - DNA, 575 bp, Arabidopsis thaliana columbia
catgatatagagattctaaaatgagctaattgacatggtacgctctgctcatcattttctaagacgaattcagtttcaaattcagagtctagtagagatgcttcaatcaggagactaaccctagtatgatgacgattcgctgctataggtctaacataaaaattattcccatacctagaatcactaagacaatgaaaaatacccttcagaaagtacgtcatggtaaacttcaaatcctctaaatcctaaaagattatcctagaacgctccttgacactctacatttcttattcgacaattcttaatttgttttcaataaatagttgagttaaattgaactgattggaggtgttgttctagtaaattaaaaaaaaaactaaacaatgttttgagcataaaaaattattacgttgataagatttaacatataacttctaattgtaaaaaatatagtacatgaaaactatacgaaatatctaaaaataataatttatgtcacgtttgtgattagtaattatcaaaagtaatatactttacacagtatcaatacgaggtttcattcaaaactagcattt

SEQ ID NO: 35217 - DNA, 570 bp, Arabidopsis thaliana columbia
tgcatttcttcttgagtgatcttctgattcgacgacaagtgtgtttgatttatgatctggttagtcttagactcttagctgttcttctcgcgatagagattgtctctgtggcggccatctgtgtgtgatggtcctttgaatccgtctctgtcgacgagaactgccaaattctcttgtcggattgtgtcacgttttaggtttttacataaattctcaacttgttctccaatgtgatcccatagcggagtggatatcgcgttagactccgaatctaaaggtcgtgggttcgattcccactgggatcatcccatttttttggtctttttttttgttggttattaattattactatcaatccgttcttttagcagtgatcaagcgaatttaggtctggctctgctctggctctagttgagtttagggagctgctccttgttgtttgcattatggtttcctactttggagcaactttgcaatgttacccttgtagctcttctgtggactttgtatttggtgaaatgaaaagtttagtagaatctggctgcgcaaagatgatagagctctaatggg

SEQ ID NO: 35218 - DNA, 541 bp, Arabidopsis thaliana columbia
tatgaaaatatattagataagaaaatgctagtaattagaaatattagtttattaataataattaatgttaatggtatttcttgtaaataaatttcaactctaagatttatttcacaaattactgcaaaaatatatatgtagattaaaaaaaattacccgaaaaccccatttattcaacacaaatcgaaccaaaccaaaagttttaggtaaccgaatccaaattaaaagaataccgatccctcagccgtaaaaacccgaaactgaaccacaaaacaaaaatctcggttcgggtcaaattcgcaggccttattagtagccgaagttgtgattcgtttgaacatatgccgcggataatatccagaaccagaagtttacttatcacactttttctctgtttcttcttcttcataatgcgaaccctaattcccttcttcaaatcttaatccacacactacctccactggatccgacattgacaatgacgtcatcactacctgttcgagctccttcctgggtctctcccggagaattttcgaagaga

SEQ ID NO: 35219 - DNA, 975 bp, Arabidopsis thaliana
  unsure (1)..(975): unsure at all n locations
catctaattaatgatagtgcttgtgatttatccaaaatccgtttgatttgaacttctgaagatcctcaaaagaaccacaccgacaagaatgaatgagatgcttcatttttgcctatatacagtgtatatatctttatagttcgaatttgttattttgccaggatttcaaagttatcaatataagctttgttgaaatcaaccgtgtctctcttctcttgaatacaaggcatatcatcccccactcaacgaaacagatacaaaatgagtcctgtagctgtaataagataaccaagagtggcccatattattatcgccttctgctccctcggtaatcttcctcgccctctttatccttcaatagacccaagaaggccagaaaaccaaagaagaagaacccacccgaccagttgcctccaccccctcctcctccaccaccatctccatcatctcgcggtgggaacccgtctcctccatcgtctaggcttggtgatttctccttagctgaaaaccaacacacaataagttcgaactcttggaccacatccaaaatagttcagataagataaacacctaacaagctctgacttgtagctaaaccctctttgtaagtaatgggagaatctcaattcatagttttagatacacatttggaaagcttcctatccctaaatctaaatctagcaggagtttggacaggccattattcattagaagaaagcaaaaatgaaacaaaggacactagaaaaagtgagagagcttacagtgtacaggagcctgtgttatagtcggtgactcccgagtaacggtctgtgtttgtccttcactgcatttcgcgttctgcaagggagataacaaagaagaacaagatgatcattttgcaattagagatagatgttacaatgaaaaagcaattgagtgaagcaaatcccaatccatagagacatgtgagngtaaagatgactacaatggctgagt

SEQ ID NO: 35220 - DNA, 933 bp, Arabidopsis thaliana columbia
gaactcattatagcacaactaagcagtcgtcctagacaaccaaaatgttttctcatttgtctaaaaatcaggcccattaaaaacacaagtaaggcccatatcttctccagttgaaagatttgaaggcgggtgctttcttccgcctccgccgcgtcgcctcttaggttactcactggtattgctccggcctcctaataagctctctcgtacacttagccgcttttcccggtatgatctttaatctgttttaccatattttctatttttcattcaagtgaagaaaataaagttcaaatttttattgtttctctgtatttcctcagctcactgaaacatgtctgcgaagtggcgagctctgcagcatcgtcatcgttatacttacagtgctgttctgtccccagctcgttcactgcttctttgagccaatctagtttgtctcagtcttgtcccaagttttactccaacattgaagaattggtttcgttgaattcaatctacgcgcaagttaatcacgccaagaaagttgttgcttcgttcggagagtttctcgccaaggccaatgagaatgaaggaggcgagagagagacagtttctgtaagggaagctattaggttttacttggagatactcttcatggagaattctttgcctcttcataagacccttgtttcagccttggctaaaaccactaagtttcattcagtgatcagttcatgttttaaggagctttgtgatgaatatggcggttttgaagatggtggtaatcgattctgtgtgtctagagttgctttatcagtgatgggcatgcaaagttgggatatttagttgatataattgaagattgcgcgcttctggttggttatgatatcgtttcagggttgaatggtatagtcttagacactgaagcttgtgataggcctctcctactgttat

SEQ ID NO: 35221 - DNA, 503 bp, Arabidopsis thaliana columbia
cccctacctcacgtttattgtttacaaaacggtctcaattttgtttatttttttctagttggcctcaatttttaaaatcttttgaaataaccttaaatatttttgggtgcatttggaccaaaattccaggggaagccctgctcttgaataccctgtttgaaaaaccttttggaatcataaaatgcagatactttcacacggagtatacaaatccacacttcatagaatgatcaataactctcatcaatactgtgtttgtgttgcatccttctatgaggtttaaaacttttaacactctggtgtgtttttccactgttggatttggaatcatgttttaatttgaatgaacagactaatttcgacgcggtagtggagccattgggtatatgtaaacagaagtaccctggagggagaagaggatgccaagttttcaaaagagctgtctatggagagcatctcgtgagtaaagtccagacaactttggtatgtgatggaagacagat

SEQ ID NO: 35222 - DNA, 581 bp, Arabidopsis thaliana columbia
ataaaatgcagatactttcaaacggagtatacgaatccacacttcatagagtgatcaataactctcctcaataccgtgtttgtgtcgcattcttctatgaggttatataaactttcaacactcttgtgtgttttccacatttggatttggaataatgttttatcttgaatgaacagactaacttcgacgcggtggtggagccattggatatatgtaaacagaagtacccgggatgatgcggaggatgccaagttttcaaaagagctgtgtatggagagcatctcgtaagtaaagtccagaccaactttgctatgtaatggaaggcagatctctctctccttctttgtacacaatacaccaacttcatcttaaagtttgatttgtaataatagtaaggtacttctttacttctgtgttatcattggatatacatgtatttgcttcaaaaaacaaaatgaaaaaggtaatttagtttgttgataatattagtttcatgtttgattatttgaaaagctaggaaaaataataatgaaacttcgaaaaagatgatttgcatctgtctcttcttttgtcatctggaa

SEQ ID NO: 35223 - DNA, 1186 bp, Arabidopsis thaliana columbia
agagctcaaggaagagccagagaagctgccggatacataccagtcagctggatatttggtcgaaatatcagggcttcagaagtttactacacaattctctttccaagtatcccaagtaagtcataaaggtcttcacgaaccatggcaccaatgaaggaccagttgttaagaccacgaaagttcatttgaatgtgttttgttttatacggaacattgtagataaagttatgtggttaggttatgtttcttgtttgaatcagtcaagaccaaagaaaatgtgtttgagtgttcttagatattgtatggtttaccaagaacaagacttaagattttcctttacctttttgattctctttttgttgtatcagtctaaagaatgttctctcttaaataaagagtggtttggcaataatgttctagagaacttgggtacacatattccttgaatatcatcaattaaaattttcttatgcaagacatatagaatcatcaacaaagtaatcaaccaattcaattcttcaatacatataaaccaaaccctgaaacacagatcaaactaacatttgatacaacctctcttctcttaaacaaaatcattacaagaagtgaatttttcttcaaacttggaacgcccatggggaatttttgagagtctcttcactctgaaccttaccagtccttttcatagcaactccattgttatcaccatcgacataagcgtagtacttcaagaaaaaggcgagaacaagaacgatccactcaaggcaaaagattacaacacagagcccaccagctagtttcaagatcatagacgcttctttctcacggacgtaagagttaaggctctcgaggaaattcgaagtgttggtaaagatgagaacagagactgagccttggaaaatggcggtaaggacagttgcgatcatgtgagctgcgtaccaccggttctcaccataagatgcggctgcacagcctgagacggcggctgccatcgtggtggcgtgaaggaggatgaggaagacaccgcagagtgaagggattagacggagagagagagtgaggaagatgcagcttgacgatgcaccgaggatgacttagtttgcagtgcagaagactctctgtgtgtagtaatgagcaccttggatcggctcttgtggttgaaggattccaccatgacgatgttgga

SEQ ID NO: 35224 - DNA, 760 bp, Arabidopsis thaliana columbia
gcttggaggaggagatgaaaactccttctcaagctcactctttacatctgctttaacatcacagaacattgtatctaccccctttcctgacaaaacattcgcttctccaagaacggcactttttgatgcacttgccagtgtagctaaatcatcaacctcgggatcctcatcaatatcaatttcgaagtcttcatccctttcaagatcattcacatcttctggacctgtaaatccattttcaaaagcccgtatcttcttcctggcatctgcgagtattgcctctccatccttaggatccttcacataaggagctcgtacacaataagtcgaaggagctattctttcaaagagtttcacatctcttgtcaatgcaacagaaatagaagcctctggtgtcttgcttgtggtcaagtcccgaagtccagatttctttcaatggaaaacataaagactatgtaaatgaaaaaaattcaaatacgatgaaaacagcatagcaaatatagattatagatttacctgaatcttgtcagcaagttctaatactgtcagtcccttgcttccttcaagagatagaacatgaaaggctgcaaatttgacggttccaggtgtcaaccggtgcctcgacttgcgaggagcgagcaaccctttctcccgcatcgatgcaaaagcactttcagctgctgtaccatttcggatagtagaaatgacatcttcacaacctttagcctgcatacacaaccaaaccaaaacaatgtgtaag

SEQ ID NO: 35225 - DNA, 680 bp, Arabidopsis thaliana columbia
tctgcacaaatatctcagacaaagggattctccatattggttccaaatgttcgaagcttctagaacttgatctataccggtacactttcttggggattcttgatgaaaaatgtgcaagacatgtttcgttttcttactgatttctggtttttgagtgcagctgtgccggttttggagatgatggtttagcagctttatctcgaggttgcaagagcttgaaccgactcattctatcatactgctgtgaactaactgacaccggggttgaacaaatccggcagctagaacttctaagtcacctcgaacttcgagggctaaagaatataaccggtgttggtttagcagccattgcgtccggctgcaagaaattgggttacttggacgttaaactctgcgagaatattgatgattcgggtttttgggcgctcgcttacttctcgaaaaacctacgacaggtacaaaaaataacatttatagatggagatctggaagcatctattggaaacatgtttgattcttgtgttgtgtgttttgtttggcagataaacttgtgcaattgctcggtgtctgatacggctctatgcatgttgatgagcaatctgagtcgggttcaagacgttgacttagttcatctgagccgtgtgactgtagaagggtttgagtttgctctaagagcctgg

SEQ ID NO: 35226 - DNA, 599 bp, Arabidopsis thaliana columbia
cattgttaatatcataagtatatattgctttagttcctcattccgttgcatctttttgcatgtcacatttagcactcttgatgacttggtttcatgtaatatccccttttcgtcaatgaaacacttccattttacatctgcagcactctggaattcctcatgtagcccttagctcctgggctctgcttacttttggaccaaaagtctgccgtgactatggattattcacgttttgtctcatttacattctcggaggagtctctggaaatttcatgagctttctgcatacagcagatcctacagttggaggaactgtaagtttcactaatctttcccatgtgatattaccaaactgcaccatacattctgttctcaatcgtcttcgtgtatatgggtgggtgcagggaccagcatttgcgttaataggagcttggcttgttgaccaaaatcagaacaaagagatgatcaaaagcaacgaatatgaggacttgtttcagaaggccattataatgacaggatttggtctcatattaagccatttcggtccaattgatgactggtaagtttccaatatccatcaatatgtcttcagctagttg

SEQ ID NO: 35227 - DNA, 589 bp, Arabidopsis thaliana columbia
aacatgtctcatctgtacattgcttacactagcttcctcttcttcttcttcaacaccacactcatcatcaagctcaagctcatcacaatgtctttcgttttcagatttcttatcatctttcaattctttatcatagcaatctgatgcatctcttctcgattccattctacgccgtgtaacacttccatgactcttcctcatccatccattacacacctgaagaaatcaaaactcatgaacttgacctaatttcagatttgaccaaaataaattaaatatcaaaaccagacctgttcatcattatcatcatcactgtaatgagaagtagaagatgaagcaagacaagaagagtgaagaccacaaaaaagactctttgatcttcttctccttccaccaccactagaagacgacggaggaggttgagccacgtcagaagcttctctcgccatcgccgacgagcctagacatgatttgctccggccagatcccatcttcttctcaaaagcaaacaactttctgctaaaattacatcattgacacaagacccacaagtcttttcccatcttcttcaaatccaccaatcgaagaa

SEQ ID NO: 35228 - DNA, 963 bp, Arabidopsis thaliana columbia
gtgaattatgatttgagaaagacaaacgaaataatgacaaaatgccgtattatataataatggatacaaattgtaagaaataaataactcacagttttttttacaaaaatgaaaaatagtagtataaaataaaaggagagcctgtgtttcagaggcccaaacatcaatgcacaaataatgaatgtatcgccgttcaagtgtatacctaataaactaaataaaagtttgtacatgcaacaaaaataaagagagagtacaaattcgataatcttgcaaaagatgtttccaatcttttatcgtcgacccaaaatgtagtatgttgttgttaaaatacacgacgacaaaaaaaagagagtacgatacacattcaatcatatccggtccctaatatgaataatggatcgaaaataattgagatctctatgtgttaataaatgtaaggggtaaatccgtaaagttgcatgcatttcttggttaaatctacaacgtcccgtctctcgagatcactctctctctctcgctctttggaaggaataaagaagagaggaaagagataagtgaaagcaacttttaatctgatttttgcgagtgaggagaggatcatcatttcataggagtgagagacccattaataccagaagcagtcagagtttctcaataattgtaccaaattctctctattcttcttctctttcattttagatattttctcttacgcagactcattgctttcctctctccatggaagctactgagttatgatccttaccctcaccggtctttaactatgcttagaaacaaacctagagcagccgtgacgactaagaaacaaacatctctgttaatggctgatcaacctccacctccaaagcctaacacttgccactgctcaccatctctctttagctctcccaagtttaggttttcacttctaagatgatgatgactccctttgactctgat

SEQ ID NO: 35229 - DNA, 986 bp, Arabidopsis thaliana columbia
atttagcttgcttaccaacttctccacctggtgctggtttaggtgcaggtttaggtttcggtgctggtgttggtgctggtgctggtgcaggcttaggtttaggaggtgtaggtgctggtgtgggcttaggattaggaggtgtaggtgctggtttgggcttaggtttaggaggtgtaggtgctgttgcgagcttaggtttaggaggtgtaggtgctggtgcaggcttaggtttaggaggtgtaggtgctggtttgggcttaggtttaggaggtgtaggtgctggtgtgggcttaggtttaggaggtgtaggtgctggtgcaggcttaggtttaggaggtttaggtgctggtgcactcgaaacaatggtaatagagatgaagataaggactaagacccatcctagtgatgatatcttcattttcttatgctactatgtcttgaggagagaaatgaaagaagattcaatgtcgtgattcttttggtaaataagtaaatatcttgcttcaatatttgtgctcctaatctaacaacgtggtctagatgacgaaagtagtgttgtacataaacaaactcaatgcatatgatgtgatttttatttatttaagtaacttgtggaaaatctatttttaatcgcctgaatcttatgtatatacatgttcataatgtaaaagtatcatccttctcaagaatagacatccaaagtagtttagccacaaaatgtaccaaacataaaagagagaaaacgttacagatatgagataattaaagaccctaaatgattaatgcggaagaatgaagatacaaacttcgatccatcaatacttcgatcaaaaaaacataaattttcatctagctttgtggcaattggaacactctcttcaaaccaaactagagcaaactgtttgtggaaagatagaaattccaaagagctaattatgaaaattcaagaaataataagttgtagtatagctgatctaaaactgacc

SEQ ID NO: 35230 - DNA, 764 bp, Arabidopsis thaliana columbia
tataattggaaccaaataatctcaaaaagaaaataaatttacagactaaacgaatggctaagcaacatgttactgcaaagcaagttttcagaaataaaaaataaaatagaaatattaactgatactaattgagttctcgaaatacataattcgatcggttatatgaaagaaaaaaaatatgaaaatagattgattcattcgaacttgggggtctttggtataaaaagaaatattataagaatagtttcatctttgatttatagggcttttgtgatgataacataactatacaccgaaattattatttttcattgttaacgaaaagtcaaaaacataaatagaaagctgagatatcaacttcgaaggtactccataatattaacaaacgttacgctgattcgccaacgtctttcagaaagttgcttacaagccttcttcttcgattctatatttctctaagcttgtcttaataatgttattttatgtgtgttttcacattattattttcatatccagagtgattcaccaaccttttcttatcatgatggctctatataagcatttgtaaccagcgactatttcttcacaacattttgtataaccaaaagcagtagaagattaagtacaaataaaatctcatcattgcatcaaaccggaaaattgaaccggagatgaagatgggttttctctttctattctgttatcttcttgcgtttcttggctattctccggtggatgcggcggtgaagaagtaccaattcgat

SEQ ID NO: 35231 - DNA, 507 bp, Arabidopsis thaliana columbia
cattaggaaaggctatgtctcactatcctatgagtccacgtcactcaagaatgcgtctaacagtcatccaaatgctaaaagagacccggaattactcacgcgcgaatctcatccttggatatgcggttgcagcagtagccgcgttgagcttaccaaaccctttgataatggagtttgaaggagagaagaaaaacgagtccaaagatgctgacaaaaccgtcaaacaagaagataaacaacggaaaaaggatcggaaagagaagattaaagctgctcgggacagattttccaacccgagcagcgatgctttgactgtagcttacgcattgcattcctttgaggtctcggagaatggcatgggcttctgcgaggcgaatgggttgcatttgaagaccatggacgagatgtctaagctcaaagatcagcttttgcgacttgttttcaactgttgtaagccctccgaaaccgaagacagcttttcatggactcatgggactatacaagacg

SEQ ID NO: 35232 - DNA, 1064 bp, Arabidopsis thaliana columbia
atccagctcccaacatctctctttctcaaaaggatcaaacgacaacaaagaacttccgatttcgttttaccgaataaacaaaacagcaacaacactcctctcactactcgtaattttaaccacctatctaaattacacgccggaaaaagtttatattcagacaagagattaaggaagcagcttaatcggagattctgggaacaggggaaatcgaccaaaagacaaaaacccaaaaccgaaaatctaacaaagtaggcgaagattagcgtgcgagtgaaaaatgaaggcaacgaggatagaaggaaacgtcaatggaagatgaagagaaacaagattactggttcatgacaaagagaaagaagagagagagagagaggacagtcaataaaaggggactctttaataaaaagattgaagcacctcttatttttgttttcttttgcataatttgacccttgtatttcatgttttattacttattgctcaactttttttcgtattcaacattacacccaaataattagttgaaaattgaaatcacccccttattggtgattttaaaaacaaaaaaggtacaattgggaaattcccgcataataaaagggtctaaaactaacggcggatagtagatgctgcgtaagaattttttaagcatattggaatcttaaaattggacttttaaacattctctctcagtttgttatacttgccaaaaattaagaatggttgttaatatctcatccttttgagagttgataaacgaaaacaaaaaaaagcatacatgaacgtctatagagatcgaggcaggagttgagaaatgagaacactatactaaaatggttctgaattttaatattcatctaaatcaggaaaccaaatatgtcagacgaatgcaaactatatcagaaaaatgaattcatgcacgtggactgtgttactgcattcttatttaagtgacattattattagaggttgaggatgtgcacatgatcgatactttttggtgcaatttttccccagtccaagaagggccttaaaacaattgatacgaatagtcaagagag

SEQ ID NO: 35233 - DNA, 498 bp, Arabidopsis thaliana columbia
ttcatattcttctgatttcttaaaactaaacctgcattttaagagagaatatatgtgtgtggtttgaattggttatgtgtaaattaacgtctagagaaatttacactgaatttataaattgacttctcaatgtataaattaagtatactaggtcatgaataaagagagattaaaaaatttaaatggtaaacgtgtgtaaaaaaaacatatacagtacagttgaccgatttatatattcttttatggttatttcttttattagtctgagtcgaagattctaattggaccatgaattgaaagttggtctgtcgttaacttcctccaaaaaaaactaacgaaacaaccactttcttggaagttgccatttttaaatattccaattctatcgagaacgtcccaaaccggaatgtagcttaggatgatgaaaccagttattggtaggccaattcattaaataaaccaggtgatttggtacttgttgcgaatcatatttattgg

SEQ ID NO: 35234 - DNA, 556 bp, Arabidopsis thaliana columbia
tagttatttcacctttttcttttgttctggttgtatggttgccattgtgtcaattaggggtggaagttcgctggttaagcgtaaatcagagttaaagttataattttacaagcccaacaaaaggtcgcagattaaaaccacatgatatttataaaaaaaattctaaggtttttattagttttattttcagtttactgagtactatttacttttttattttttgcaaataaatgtattttatcatatttatgttttttgttataaactccaaacatacaggtttcattaccaaaaaaaaagcagagtggttttgttaattttgtttcattaatctcgagattatttattttattttgttagtgattttaggtatcttatatcatttgtatagattttttttttcttttgtaggactcggcaccttgaatactacggtgaaatgcacctaacacttgtgtatgtgcttactcttaacacactcgattatcaattttctagatggataatgtcaaagttgacatcaaagtttcaaaactatgcatttataataacctga

SEQ ID NO: 35235 - DNA, 1574 bp, Arabidopsis thaliana columbia
tttgtcttggtgggttggatttgagaggaccaagaaacaaataaagaaaaaatggttttgttttgtaaaatttaaatgttcattatatgcatgaaaaatctatcaaacaagatatcaactactttggggggtttactagtaagaaacataaaattttgtttgatttggtaaaggtgaaagatacaatgtttctattttattattagagaaaattttgtttcactaaaattatattaaataaaataaattagaaatttaaaccggtaatgcaaagcatacattacatatatgtgaaaacggtcttgcgtttatgtgttaaaacacgaaaaacaaggttcataaaattttgattctcaaccaaaacatgtttgtaaaacatgtaggtttgacaacaacaaaatctattaaaatgttatgatttaaagcaattttcagataagattatgtaattttttttataaaaaacaacgtattattcgagtttgatttggatggtgatacaacgaaacaaaataacaataataataataataataatatatcctgatctaatttttagaaatatatgaatccaacatagtaagatgcaacgatattacaccaaatcttttgatcagaacactcctatcaaatgacgaaagtagaattatggtcatggacatgcaaatattactagaaacatggctagaactgaagatgataagcacaacgtcaacaagtataaggtgtattatttgtccgcaaaaaagtaccaatcaacatagttaatggcgtttacattattgtaccagttgggccgaaataaaatcttataatatatcagattagcatgattagacaatgacattttcaaagagtacttgaaagcattttgaagacttagcaaagagtttccagaaacaggtaatctctcaactttatatattctcgacttaaaaaaggcattgtgatttcaaatctaggtcgggttacgtcttaggttgcatggaaacccgttccgaggtccgtttcctgttttcgaaacgtttcggaaacacaaaaatcgtcacgggaacgcgtttacacaaaaatcgtcacgaaaacacaaaagattgttaaaacgtccataatagttagactattttctaactaccataatcagttttgcttgtttctttttggtttaatttaagtttacacatagttcttgattggatataacaaactttggtatgtctacacataaatgtaaaaagtatggacggtgagtgagtcagacaaaagtaggtaatgactaaatgagtaaggtaggcgtcggtcaacagaaacggatattttgctgctgatttcagacaaataagcttcgttacttattttatctcgcggttaaattgcataactcaacttggattccacttgcttactgtacaaatgagaatacgacacgttttaatgtaccacactctttgaacaagataacgttgagcatttttaaaatcgttggctttatgttttcgatatatactttatatttttgataatatcctaatatatactttttcctaagtttctatatattttaatttcaagtgtca

SEQ ID NO: 35236 - DNA, 614 bp, Arabidopsis thaliana columbia
agagaatgatagataggtttaaaacaataattcaacatgaaaaccataaggccttggagacaagaacaaccaaatgaattccaatccgggagctaactatcaacctcgatcgagatgaggttaagaatgcaaatttatcccccttcatagaaaatatttcatcgagcaatgaccggaatatatttgtgaacatgagaagccaaggagggcttaaaaccaggctaatgttgagaatgatacaaaaccagattaaagaacttgtcgaagcagagatggaatagagtccactttcaatccgttcaaactgcagacaattcaattttagtgggcttgtagaaaattttggagaaacaaacctgggccagtctggtaaaaaggttgagactttattttttaagttgggccgagactggagactttgtgggcctaaaagttgacttccaaattgtgggctaagccataagagaagagcacatctggattaggtttagggataacccttccacgccatcttcatcgccagttccgacgtggcagtcagagagttccggtgagggcagtgaacgacgagggtcgcgacgatctaaactccaaggatttagatgagaatttga

SEQ ID NO: 35237 - DNA, 585 bp, Arabidopsis thaliana columbia
gggcctgcatgtaacttatgtttgattaatatcatcaccaacctcatcatcttgagttcattttttatgatctacccctatttcttctacgtcattaacatataatttcctacgtcattactcagtctaaggaagttttctaggtactactaattccaacattcacatacgctagaaggatacgacattttcctagtagatgtctatactaatatacaattgcatgtttataattgtatatgtatgtcatatggagagagatttgaggggagaaaaagagagatagagagactgacttggtggtacccatattcagaattgtaggtgtacctgaaaacaaaagaatttaatgatgctaaaccaattagtctatgtatccaccaaaatacaaaaacctaattatcttacctagacaaatttagtgcatgcaaatttcacagagacatctacatgacatatttcactattattgttctattgcaatgctggtccggctaatgttcatgatattatgtatatactttttatatgacaactagctagtctataagtatttatattacgaatatgatatttacaggctga

SEQ ID NO: 35238 - DNA, 520 bp, Arabidopsis thaliana columbia
  unsure (1)..(520): unsure at all n locations
gtttgaaagataatggaacaaaacagcatcgttatcacaatcattttcaaaattcactagaagatattggtgttttaaaaatctaatacatgattacaacttatgcagtggttatggccatgttaaatcatcctgtgcaggtacatttctcgcctgatattaaaaaaatagattatatatagaagctgaagtcgtaactctacaatttgtttcagttttgacttttgataatggtaatattaattatcaattttatttagccaaaagaaaattatcattgttattaaaaccaaaagaaaatttcatgtgtattattgtagtctagtttccaagtcatttaagagtgcgcaataacaaaagaaacaacaaatattanaaatgcaataactcgaaattaacaanacaaaaactaatagtatctatataaaaataaccaagataagaattattaataacatgaaacgctcgtgcttgcatgctatgtttgtaattcgatttgacacatgggtaagactttggg

SEQ ID NO: 35239 - DNA, 1095 bp, Arabidopsis thaliana columbia
ccaaagtaagtcacttttcgaagcttcgacgttgcgtggttttgcaagctggtcaaattcttcaacccctggacgtggattccctggtaaaggtaagaacttggtttgtttccgtttcgtcagtttaagtgtacttgccctaattttgtttgcttgatttgagaagatgccgcaaagcctagtggtcgattgttcgcaccttattctatcttcaaaggaaaagctgctctctctgttgaacctgttcttcccagtttcactgaaatcgatgtaagcccaaaatccatttctttttagttttgtgtgttctctttaaaggcttcttttagattctcattacttactgtgagtacaattgtttagtcgggaaatcttcggatagatcgtcgtggatccttaatgatgacttttatgcctgctattggtgagcgtaagtacgactgggaaaagaaacaggtattgatctttttcacactctctatcttcttcacttgtctcttctttctcctctgataaatttggtttgtttcctacattattgcagaaatttgctttgtcacctactgaagttggatccttaattagcatgggttccaaagacagctccgagtttttccatgacccttccatgaaatcaaggtttgtctttttttgcttcaatacattatatttttatcgcagcattttcatgttctgacatagacttgtctttgactcctcagtaatgctggtcaagtcaggaagtcactgtcagttaagccccacgcagatggtagcggctacttcatctcattgagtaaggcttctatcaaattaacatggataatcagtactgaaatacttagttatgggagctttctgtttagtaaatttagaagcttgcacttgtattagttttgtaatatggcgataacagttttcgcacagaatagctgtcttataacaataggaatgctgaattcttaatgctgtataaacacttaccttctgcggttttgtgcaggcgttacaatagcatctcaaaccaaggctatttgtggttctgcacaaaactgaattgcagtgagaagacacttttagtgtagatagatttta

SEQ ID NO: 35240 - DNA, 591 bp, Arabidopsis thaliana
gatgagtttttctccggtggtgatggcggcgacgactgaggaggagaaggaggtgggggaggaggaggagagaatttgaaatccggggacgaaacatctttatcttcaagagagctcagagaagctgtaggagaagcttttgtgggttcagagaaaggattatcgggagatagaaccggttcataatccaagaacccctcgaagaaatcgggttgcttcttctccaagaaagaagcagaagttgatagatactttgaggcgtttattatgagtcgatcttcatgaaaattatttaaatcatcagctttggttatctccggttcatcaataggtattggaatcgggtcggaatccacaaacccgtcaaagaaaaccgggttactcaataagtaccttgaagaaccctgaggtgtgtcactgctaaaacaactaacctggtgacttaccaacatcactgtcacctttcttgctcttcctcttcgctaactgtttttgtcactactctcgagacctagtctagtcataagaggagtatgataagtagaagaagacgaagaagagggattaaggtttggagaaggtggaggagtg

SEQ ID NO: 35241 - DNA, 1075 bp, Arabidopsis thaliana
tcgagaagatagcatgggatgcatctggagaacgattggctgtgtcgtacaaaggaggcgatgaaaattacaaaggattgattgccatctacgacacacgaaggacacctattgtatcagcatcactagtgtaagtaactcttactgttatccattccatcggacttgacctccttttgtatatctttgcattgtctaaatggatagacaaaatctgatgcttttatgattacagcggtttcatcagaggacctggagaaaacccgaaagctctctccttttcattccatgacaagttcaagcaaggtccactcctttctgtggtaaggcatatgcttgattaagtctcttttcatgccaaagtattcatacaggtagaatcggttagttaattaatcttccaaataaaccttgttgcagtgttggagcaccggattctgttgcacctatcctctcatcttccgctcacatgttcttccttaatagccaaatggttcaaatttaatgcaagtttcaaactttttggttctattttgtagactgctcactctttgtatacaaatggtttctttaaagaactcagctttgaagttaaatccaaaaacaatggttgcatttgaagtacattaatggtctttgaacaccaaaaagaacattacaaaaaacgaatacgaaaagcagcaaacagttgagtcacttagacattcttgtttttcttcatcttggaaggtggccatcgacccttcttcctcatcttacgcttacgaaccagacgtttcctgcgtagcctaatctttttggccagcttcatcttcagcctcaattccaagagcagtttctctttagcttctttcgattccaacggtagtttatccactggaacagcagcaacaacagtctttggttcctccttgctctcaggctcagccccgtccacgccagaagcagccgccttcaccacaattcttccatggctagagttcaagctgtaagcactgagagagactctgttcttggactcgacagcgttgggtttaaggctcaaaactgaaacacacaaagattagagcattac

SEQ ID NO: 35242 - DNA, 556 bp, Arabidopsis thaliana columbia
aagcacgatcttttaatcataatgtagaaattaactccatgtaaaatcaataacatagttatgcatgtaattaagagtttataaaaacctgtcttaagagatttctttctcaacagagagtcccttcttttctttatctatttatccctagctctctctaaagatcgctgtgatgattacttcgagtttctcagaaaaatgtacatcagttattaacggagctccaagttgggcggtcttctttctttttgacctcctcgactattttctttgtatcgttttcagattcctcgacgaagttatggaagaaaaatcagagtcttgtcattgtaataaccctcgagagaaaacacattttgcagaatacgagttcctttcggagactctctatcggaggagaaacgttttcctgacaggccggttttctccggtttgcgaataaactccctgagataaccaagaaaataggtatcgttactttcctgagagaatttctttttcctcatacaatgaacaaagtctctcatgaggttgcaaacaggtggtctgattgtgg

SEQ ID NO: 35243 - DNA, 531 bp, Arabidopsis thaliana columbia
ccggttaaataagtttatcactatagcttacaataagtggaatatgaaagaaaaaaaaaaaacgatattagttatctttgggtactgcagtatacatgtctacgaagggtttcagcgggatcttcataaacttttcaaagaaaatctgaccgcgacttccgctggtgagagccttagagctcgaaaagagaaggaaaatgaaagagaatttgaaacgagccgatgaagagaagacgcaaagtgacactctcaaaatggccgagaattggatgaagaacacgggatgctggtctacgttgatgatctagaatcccaagagaactccgatcctaagacatatttacgagttttttccgatgattgttgtttcttattaataaattttactctatttccaattttagacatgattgtttcattttattggttaatcttagtggaataatcttatgctaaaaaaaaaaattacctttgtgttattcttaaaggtttgaaattatagttcatatgggtttcaaaaatcttgaagtt

SEQ ID NO: 35244 - DNA, 473 bp, Arabidopsis thaliana columbia
gacaagaaaaaaagaagcttctagcgggaataagaagaaaagtatggctgctaaagcaccaactggagctgaagaagctgaacttgccttgctcgcaagaaagaagctagtgacttgctcttgcgaagaaagttatgtacaggaaggtgaacaaggaagagtactgcagctttcatgcgtatgaaggggttataagcgggatctccagaaacttttcaaagaaaatgtgactgcggctcttgctggtgacaacccgaaaactcgaaaggagagggaaatgaaagagaatttgaaacgagccaaggaagagaagaggcaaagtgacactctcaaaatggccgagaaccggatgaagaacacgagaatcaagcctccatgatgatggtggtctggcaatgacaagttgatgatctagaatcttaagagaactccgatcctaaacatattttacgaggttttttccgatgaatatt

SEQ ID NO: 35245 - DNA, 779 bp, Arabidopsis thaliana columbia
gatatgaggttggtctctatttcaatgcaacctttgtatagaacaagactgggaccaggaagagccaagaacctgcagttttacggtaacagtggtgagaataaagtccatgtgtgactcaagggactggaggagtagtgactcacctcttgtatatcttcctcgcactgtgggccccttttgtttcaagaacaaatttcaccactgtggaagcaagagaaaacacatggtcgctcccatggcttttggttgctgataggatggacatctctacaagtttgtccaaataagttcgctgatgagcaaagaaattaaaagcctgcaatacaataagcattttattagtgtagtcttaacaaactagtgtattgtctagaaaatatattagtcacataccattagccacaagctctcagattctgagatcggtactttcctcaaagcatttgaaaggagctcaaagactgtctgaaaatctgctttactaggagatgagttctctgaaagtgatcgtatttccatgggaactcttgaaagccacaacttagctgatcgagcaaattgttcagagctagagcttgtctgctagcttctgagcttcatgagtcttttccagtttcaagtacagagaaacatattcatcagcaagctcttcagtcaaacagccagtttcatcagccttttggtacacgtttatgatatgtgaaatgatcggattagacaaagaggagatttcattctcgtcgccgtgtgactgtacaatagcctccatcagagaa

SEQ ID NO: 35246 - DNA, 929 bp, Arabidopsis thaliana columbia
caatcccggacgagaattaaattactgaatacggagttataaaaataaatgtttggaacttggtaagagcatatgccacgaaacagagcatctttcttgaagttagtaattcttggaatgtgcgtcggtcttcttacaatttgcaaatattcgaatttgataaatattatcccaacccattgaaataagatgtagtcttgggctcacgacaaatcctcattcaaaattgagcctcttgacccattaagcttcttcttttctttttttttggacaaactcttcttctggttacaagaactggtcacccaaatagttagcagattttagtctgaaaagtatgattggaagagatacagtgactgaagaaatggccttgacccattgggccttatgtttccttggatttaaaattataagcatatagacattgtgtcgttttgagcatcgataagaggacatcgtgtcggcgaaagagcgccatctacaacaaaaacccaaatcgacacagatttttgtttcgccagtctatcacacttttgctcgccgattttccagatctcagtagggttcttgctacaggtttcagatctttggataggccttggtggatttttatctatcaatcgataaaaggttcttacttttactctgtaaatcgtagtttgggttgtatgtactactttctcatccatgggtaggcacggtagttcctcgacgaagaagagagagttagaagaagggataggagaagacgagagagaagccctgatgttagaagatcgaggactgagacagatgatgttgctcgtcgtgttagggttctgatgatgaggaccgaagacacgcgacgagatcttgagattggtggtactgcgctgatggtgaggaagctgtggagataaggtcagaaaaagagcttctgatgatga

SEQ ID NO: 35247 - DNA, 588 bp, Arabidopsis thaliana columbia
agagaaaatcagattacgtagagaaagagatgaccaaacctggaaccggatttgacaaagcacgtgagaaccggatttggtagcacgtgagtggcacactttcctagtggcatgtctcagctttttcttatagctctctctctctcagcttcgtaacatgttcatgtttcctgcatgcaattgtttattacccctactggctactactactactactagtatttcgagcatcgaagctctcccactccacaattttatactgaaaactttaatctttacatttccaagtctccataatgtctatctgtaaagtgtaatctaaaaaaactgtactgtagtttatttctttcagtaacaatatacacagttactggtggatacgaataaacatttctatatgaaaatgaagtgacccaaatccatccgagtaacgtcgattccaacatcaactatactctgtttctgtttacgttttatagatttttcaagtcatgggactttataaagaaaacataatcaataaatataaccataattttataatgtttgcttcattactttcgaattgtgtttttttaaattacagat

SEQ ID NO: 35248 - DNA, 588 bp, Arabidopsis thaliana columbia
atagtaatacacagttaaatctctataaagtaataatggtcgaaccctgaaattctattaattagtaaagatattaatttatcgagagtttaagctaattttataatttttttaaaaaattatgtctgaataaaacaaatttctttataatcattatctctctagaaccaattacacataataaataaatactatgtatagaaaacaacaaaaacaaagttttgaatgtagtaaaaatactaaaaatgaattttactaataagtagataaggtccacttaaatagcgggtatgaaaaataaatttaaattttactattttaaattttatcgatgatatttgaattctaaatagtaattcacaaacttaatatttaatttaataatgttcttattccatctaatcacgaccgctggattaatgtcatatgttaattgaacattcacatgaatttattaggtaggacaatcctaattttatatttgatgaaatgaccctcgatcttctatcacgatctcccatattaaaatatgtttatttgttagtactctggattttgactttcacttggtagagaaaaattatgaga

SEQ ID NO: 35249 - DNA, 612 bp, Arabidopsis thaliana columbia
cttactatgtgtggaaattaggggttaaactatttcaatcctcatgtgcatcagttgggaagtaaagacttcacctttttggtattgctctgcagaatcttatcgttagtagatcaagagagctttcttttcttaggttatgttgcttgtcattgttttggcaaatgggctactttgtaaagagtgtgtgagtgtgttagaagaaagagctttcttttcttgtgttatgttgttgcttgcttgtctttgtttggcaaattggctcttttctagagagtgtctgtgttttctatcttactctgtgggagattgagaatatatcctacaaatgttccatttgatccctatgtggttgtgtttttttttttgtaaagaaggttttagagaatcatgtttgatgtgtaataactgggaagtaaaggcttaatcttcttaggttttgctctgcattttcccatcattagtaaggaaatgagtactctattagtctctatttttcaatgcacaccattgggatttgtttcttcagggggaatgagaaaaaagtgatcttactgctaacaaattgagtcttcgcgctgcaggaggtaacgaaatgtgggcaggtttggg

SEQ ID NO: 35250 - DNA, 425 bp, Arabidopsis thaliana columbia
gacctaataaaaatttttgttttgttatttgtcatctctcacagtctcgaaattttagagtatctccatccataaaacacctaaatattttctcaaacaaaaaacattaaatccccattttaatgaaaaaattaaaccaattgaaagaagagaaatgtcataattgcatgtaaatagtatctcctagtttcttaaatgagaaacttaagggcatctccatcaaggaaaaacccaaaaagtttatcaaacaaaaaaaatattagtattttattacctccccatcatatgattaaatttctattttcatgaaaaaattgaaccaattgagaggagagacatataatgatggcttgtcgagagtatctcacactttctcacttgagacactttctacactctctctcttctctttattattttccttc

SEQ ID NO: 35251 - DNA, 545 bp, Arabidopsis thaliana columbia
gaaccttttataaaatacttagatcatctccattgggtaatctctcaaaagagtttctcactactaatataataaaaataataaaaagagaagagagagagagtgtagaaagtttctcaagtgagaaactatgagatactctctacaagccatcattatattttctcttatctcaattggttcaattttttcattaaaataaaaatttaattatataataccccccccctacaaccctaatcccccccccgtttgagaaaccaaaaggtttctccttgatggagatgcctttaggtttactttatattattattcatgtttttaactaaatttttccaaccacatggcgccacgtgatgacgtgtggtggtgcaggctaaaagaatcagggtgtggcgcagtggattaactctatggtggtggggtattttgggtaatttaaaaattggcggctgagagagcttcgtgaacgtgaacaacacaaaggtttttggacaacaaagcaagtttacttggcaatatctccatgaaacttatcaatatat

SEQ ID NO: 35252 - DNA, 533 bp, Arabidopsis thaliana columbia
ggtcgattgttgcagcagaagagtgttcagaaacaggagcaggagctttggattcacgagcagcactcggctttgtaacaggcttagacttaggctttgcaggagaagctttggcattgaatgtagcaccgttttgagccaaatcttggacctaagggtaagttgcaaaatatttagattatatgagcaaagattaggctatagaataggatttcacacaaaaaagaggactcacaatatgtgcaaatgatttcttgggagcatcaacaccattgcttttatcgttcacaacattatcctcctgtgttttgggatgtccatttgctacagctctttctggtttcttcactgtattttcggttgtctgtttcgcctcgggttgttgggtagggatagtaaccggctctgcaacttcatctacctgctctgttggttggaccacttgaggaatacctcctcgacttctttcttgttagcttctggttcaaaatctcatcagcaacatacctaaagacatcgttgagaacgaaata

SEQ ID NO: 35253 - DNA, 551 bp, Arabidopsis thaliana columbia
aattgaaactcatataccttttcaagatattagaatcattgcaacacattttctttcaaactttttttttggtgtaatctacgcattgccaattatttcagaagttttggtctaaacaggtttgttagaaaaaataatgtctctgtactaaggaaaaaaagtaacaatattggcagattcttaaatatcataagtttaggggcgtttccgaagtttatattataattaaattttctgtttaaaataacggggaacccacatggtagcaaatgaccaacgaaacaagtagttagctaagttttgctctgaacaccaaacaattgccacctaactcctcaacacagcttggttcagtttaccgcctaaaccggtttggtttcaattcatggctcatctcaaatcaagttctccaaaaccagtgtaccaaaactcaaaaagcaagagattgttctgcaaagccaataaggaccaccaaaaaagaaaaaaccagaaatgaactatacacaaatgtggaactactagaactaggtcctggtttaaagctactacgg

SEQ ID NO: 35254 - DNA, 585 bp, Arabidopsis thaliana columbia
ggggcgggggaggaggggtggatgcaaggcgcccgtgtaacgagctgatggggaagaagactcaagaggccaccaatttgcaccgtacggtcaaattgagtcaaaccgaaccgaagagccccctgatgtacttgaagacttgctgctgattatattcaccctcatgaaaagactacacgacgtttagaagctgcgactttaacttagctctcgacgccatcaccgaagatcctccattatagcctaacggctagaatcatcacgctcctctctttatttcgcattattcggtttccttttctaagttttagaccattgttgtacttttcaatttaagctctttgattctctactttgtattcacgctttgatcaattgaaattcagtttgtttcttgcttcaatactttgtatcttgaatcaaatctgttcttgcgagttctaggttgtttgtagaatcaaatacttctcatctaaaagcttccatcgctcgcttctaagcattggacccgtgagccttgtcttggtggaatcaggacgtgtagtcgtgtacacatgagatgaatggaataagatttgattatat

SEQ ID NO: 35255 - DNA, 285 bp, Arabidopsis thaliana
catagaatctaccgacgccggagaggcagcgccggtcggaggagagaaccgccggtgttggtttgaagaaaactgttttcaagtatcgcctctgttcgttgtacaatgtgagtcacacatatagttatctaatagtatatatatatatatatatatatatatatatatatatatatatatatatatatatatatctaattctatcaaaaacgatttttaagagtgccgatagctatttatatttatattacatctattttcactatatatcggtttgacactttc

SEQ ID NO: 35256 - DNA, 1362 bp, Arabidopsis thaliana columbia
gaccgggtccaaatatctaaaagtagaggaaaagctattaaacaaaaaggatgttcttttgataaatgttataaaatcctaaaagtcgtattagagtttttttagctgtgtatttaaattgaatgaactaccatagtaattttaaaattgaagaaatttaaattattaacaataaatagacaaatgattgacaaacaaacaataaatagacaactacaaaaaagaaattcaacatttcaataaataatattaatcacattaaaatacatatttcaataaaaattggcgtaggtgattatgctctcacatctcacatattctttactaacgacatgacgaatgacaaagtttatgctttggtggtgctggaagagagagcagtttgagatcctaaaaaatacataaatacgaacataaacaaatttagtagctatttgataacaacaaatattttatgtaacaagtaattaggatgctaaataattaatcttaaacttaatgtaacacacacaaactaatgttgcaagcaatccaatatctttttggttttagctgaaatttaactaccaacttcaaaaactgagtaaaaactctgaaacggaggacgatctatgaaagtgcttaccaaccagccttccttaagaagcaaatgtccttatcaacattgagttgtgttatatactacaagaaaacacggtattagcgacttattcggcgacggattaagtagtcgttaactttggcaactaaatagtgacgtattagcgaccaattagtttatattatacattagtctctaatcaatcttgaatgtgagactgattaatttagtcgctaataggtcgctagttacagttaccatttatcgactcatatattctatttaggcaattaattgggcttttaccggcttgatccagtaacgagagcccattacccagactatataaacgattttatcgccctaatccccttctcttcactctctcactctcgacgaaccctaacctaaccctaatccctttttgatcccaattctacatcaatgcatcttcaatcttctcaatctcttgtttcttagcttcaagtgatgaagactcgtggtggaggcaagagaggaaaaggaagggtatagaagattcccccaaatagacccacttcttcccaccaaatcgagttgaaatgaagaccaaggagttgaatcgacaggccaggggcttcccagccaatacgagttcacgccggcgaatcgtcaagtcctgcttcaagattctgaacgagatctgattgcacatcctccaacaagtcaaaccgtgagggactatcctcctctgacgcaactttccagtcaggcgaaggatc

SEQ ID NO: 35257 - DNA, 606 bp, Arabidopsis thaliana columbia
ggtcatataaggtaaacaaaaagtggagcataaagtttcataagctcatatatacagattcacggtttatatacacatgacttttatcaccataaaaaacaaaaaaagctttctctcactctctaaacaaggatcttccaaaaacaaaacgaaacgaaacaacaataaaaaaaagttcaaagcaaccaaaaaaaaacagagaaattgaaagaagacatatcacctgcacaaactagtgtaaatgagatcaaattcatataagtttagtgtaatttgttggatcgatatatacatcgagaaacaaaccttgatcgattttggatctgtgaatcatcatcactgagtctgaacaacgttaacggatctcccttttccactaagtggcgaacaaggcaaattctgacgcgagatcaggaacagattaaaacgacgtggacgaagatatcgtcgatcctctggattcgtcactttgtcttcaacaagaacacagagatcctcttccctaactcttcaatacctggttatgtacttcctctttagccgtgatccaacgtccgacggatctcggacactctgtctcagcttccgatgatccgctactctctg

SEQ ID NO: 35258 - DNA, 511 bp, Arabidopsis thaliana columbia
gttataccaaataaagaaaggggtctcgctttcaaatttcattttataaaataaagtgaaaaacccaaaaagaatctacgccttactcaagttctcagtgcaaaccaaccaacatttcattgattcaattaattcttctttgatttctatttaaattctttagtgaattaaaaattacgacagaaaaaaatgtcaaattcttgagtagtctacttcccttcgaatgccggaatactctttaccttaagtgaaaggaatgccttaaaattcatacgggatttatttgtctatgtattgttccattcgatcttttaggtcctgcgtcacctcgatggttatgccacaatattcttaaagcttatatgcgatgtatagacttctgcaaccatgacatatttgtttactttatataaaaataaaataatataaaactataaaaaaccaaatttattttcttttagaaagataagggaatgcgtaattcgacaaaacaaggtcttcttttcacgag

SEQ ID NO: 35259 - DNA, 319 bp, Arabidopsis thaliana columbia
atgaagcctaaactcattggtaatgagttgtgttgaattgggttaaccattttgacatccttagtgagaagagtatgcaacaacaaaccttaagagagaaaaccagtgaagataacgaataattctcggtttactccggttttgtgtctaccaaaatatgtttgtttcgtactctaagcattccgatgtcaatgagtatctttaagaaacaaatctttaaatagtaagaaatgcataaatattctgtttattgattttattgaatttgaatatatatatatatatatatatatatattcaacatcgcaggagtacacac

SEQ ID NO: 35260 - DNA, 550 bp, Arabidopsis thaliana columbia
gtgtaagaagatgacaacaaataaaaggttaagaaacagacaagtttgttgaatgtcatatctttatttattttcaactatattttaataacagttttaacaatacatatatttatatgataagcttgaacatctgcaaaattttattcaacaaactttagggaaatggttgtatatatgattaatgtgaagtaatgcaatttatttgcgttcattaagttgcgttaagatcttgaatttgacaataaattatgacaatataaagatatatatgaccatgtgatcaagaattctacaacaacaccctccttatactgatatcttttcatctgtatgatattcagttttatatcttttcatctatttggtcttattttttcgggttgtaatagattagtccattttactgaggtacaatatatatttaacaatataagagaattactgagatagaacacaattgtatgtttatcctagaatagcatacatcttgtttttattactcacatgtttttagtacttgtggaattacagttacacccttgattag

SEQ ID NO: 35261 - DNA, 510 bp, Arabidopsis thaliana columbia
tgaaaaactataaacaagttggagaaatgatgatttcgatcatccctataaacaagcatgcttgtctttttgttaagtcttctatctctgacatgacgtcagattgttgtttagtagactataaggcctattacaatttggcccaactaaacgaacaaaaccggcccatatatatcactgccgaaaatatcaaattttctttagttcctaatgccttattgttttgggtagtcctggacattcggttatccattcggttatcagttttttcggttttaaaatttagtatccattctgttaatttgaaagtttggtttggtttcggttcagttttaaaatttaatatccattcggttattttattttgaatattttcggatttttggttatttttggatatttttgaatattttcgcttaatttcgaataatttaaccattttgtatatattttcaactttttttaattatttactatagaaataactaatattttgaaaatatatttata

SEQ ID NO: 35262 - DNA, 528 bp, Arabidopsis thaliana columbia
agaggataggataagtcttcatacaaagtgggccccacatcctctttcggatgtttagggatgttaatcgggcctctggtccgcaggcctggcccgcctatataatggagaaaaaaaatagcgggtctcgcgggaatggtccgtttggattgcggattaattcatggatgcccattaaagaccgcggttttgcgggcgacccggaaaaaagttagagaaaaaaaaaacctttgcatcttttatgaagaatcttcgttaaggaaggaaaaaaactttaaagataatttaagcaaaagaaaatgacgatcattcctttcaaagagaaaagtgacacagcagatttaaaactgtaattgttgatacaatagaatattgtagcaggaaaagatgatttaaggggacaatcgttccaatcgttctctcttctctctcctcaagagaaaaaaaaaacagatctactttccggtttcatttcttgttttagatcttcattgcaggtttggtttttattcaataaagtgggggtga

SEQ ID NO: 35263 - DNA, 310 bp, Arabidopsis thaliana columbia
acggatccccaatctaatgtgttactttttattttttcatcgtagaaaggttaaacttttttttgaaactttgatatctaaaatttttttttttttttttttaataaaatttaaaatttattcgaaaaacttttgtacaacaagtgcatcgtttgagtagaaagtttgtatttaaaacatagaaatcaaaagaatagagactaatgagctacgactctattatgatttatcttgaggagaaccatacgctcatgcatgcatcgtaggtgcgattccttgctctcttattgatgagatgcgggtttgaact

SEQ ID NO: 35264 - DNA, 545 bp, Arabidopsis thaliana columbia
tcgtaaaactgtatttttgtcataaacagttgtgtctgttaaaatattgacggttactttttcacatttgtgtatttttatcataaacagttgtgtctgttaaattgttgacggttactattttacattcgtgtcttttcattgtaaacacttgtgtttgttaaaaaattgacgattactttttttacatttctgtcttttcattgacggttattttttacattcttgtctattcatcataaacagttttatctgttaaaatattgacggtaactttttgcatttgtatctttttatagtaacttttggttaacattgacggtaattttttccgttagtatctgtgttatcgcaattattcgtaaaactgtatttttattgtaaatagttgtgtctgttaaaatattgacggttacttttgtatatttgtgtctttttatcgtgactttatgcgttggacaaatatatcaaattgttgtcgtagctcagcggtatagagccccttaagtgtcatgaggtcacagtcaatatcggtggatgcattt

SEQ ID NO: 35265 - DNA, 1048 bp, Arabidopsis thaliana columbia
cacacaaatcacaaactgaaatctcaaaatcgaaactaaaagcttctcagatctctaactatagctcaaggcggaggagactgagatcgatcatctgaatcgccgaaacatgtcgagcgatagagatgatcttgacgaagatgagcttcttcaaatggcgttgaaagagcaggctaagagagatctcacctatcagaaacctccttcatcttctgctcgtaagcctgttgccaatttagtgcagcagcctcgacagcagaagcctgtggctgcggctgccgctccgccgaagaagtctgctgcggcggttaggaagccttccatggatgaggatgaggagtcggaggtggaattgcttagcatttcgagcggggatgatgatttggagagggaaagggaaataggtggttctagtggtggtgcggggagaggaagaggtagcgatgtacgagagaagggaagagcgaggaaggaagatgatggtgcttgggatggaggagagcctgattgttggaaacgggttaatgaagctgaggtatgtatttgtggcgagattcatcagtgaatgcttatggctttgcttgttcgatcaagttcaagagtttgaattcgatatattgatctatttgttgaattgtacgacactgaacaataccattcgtgggatacggtgaatgctatccatagtttctggtgttgagttgatatagagagcttgataattagcatgccattagtgattttagaaccatagcatcatatggatgtataagtggaaagatgaccattttcactgaaattccggtggcattttggcagcttgctcgtagggttcgtgatatgagggaatcgagaacagcacccgtggttcagaaagtagaaggtaaagcacctgcacctgggaagaaagtggctctgactagtttgcagtcacttcctcgtggaatggaatgtattgatccactaaaattagggtaattgctctcgtttcgttttgcttaccatggaagccagtcagatgctttgtactctgtctaaatttttctga

SEQ ID NO: 35266 - DNA, 631 bp, Arabidopsis thaliana columbia
cgtgtagaatgtattttgctgatttgtggagagtatagtcttgtgctgtgaacaaatacattcatattaccctgcaacttgcaagtaaaaagaagttatgaagtgacagctaatcaggagataagaataactcgatcataaatacggaacaccgcaacaagcggaccaaagagcatgcaagtagccactagccaagtaggagaaagaaaaatatacaactacataataaatattccaaattaaaaacttattgatttagtctcagcatttatacaaatgtaaaatgtttatacaaatgttgtctattttttttattgttaacgaattttctaattttgaaataatagtgatcaattatgttgcttttgtgactaaaaagtaagtgaatttacaaataaaatgatacgtcaaaattatggttagctaagcctaagtctaagagcttgaatgatatatggatttttggtcgatccaacccaaaaacatctaaatattctatcaacatttatactcaaataacaattgtacatcactaagttacatgttttttataacttaattttaagaataagtcgtgatcaatcaaattaccattgatgttgacttttgattgaaaaaatgacaaaagaag

SEQ ID NO: 35267 - DNA, 442 bp, Arabidopsis thaliana columbia
atccggagaaacacaatagcacagaaccgacaagtatatatagaaaccctcgaaaagccctagaaaactcaatcgaattcagaagagaaacgctaaaatctaaccccaaagatacaaacttggagagatgtgaacagaaatacctaacgactggtaatatttggaacccctctgagcacaatttcagatgcggtgtgaatctctgagcttaattttgcagaaatttaagagaatcaatgtctcttgaccaagataaataaatttgcttgatttgtaccgtgttatctgacggagaagaaagggggctgtggagttcacgaggaatagaaattgctactttgcccagatttcagtatttttattaacagcccttctttataacttatatatgaactttacccatttaaagccttacaataatttgtacccacccaaaatgtca

SEQ ID NO: 35268 - DNA, 482 bp, Arabidopsis thaliana columbia
ccgggtaccataagaacgtttgaatcctgcctaattgagattctttaatcgaattatataattacatgttcaaaaatatgttaaattaattttataaatttattaacaattttatattgtatattatactatatttgtaattaaaatatttatcaataaatcatttcatttgcaccgtatgatccatttttatcattcaatacatattttgaagcgttctaactgcttgatccgctttagttcggcttaaaacacctaatcctcttgatcggctttaattctgcttgaaacaccttatccgcttgatccgctccaccaaatacgctttgtccattcggagctttcgcctggttattaattacatactttcaaattttagccatagatatgacatctatcttgtcacatagatctccctaagtacacggtttccaattaatgtaccgaaacgcttcatatccctacgtaaataagctttagga

SEQ ID NO: 35269 - DNA, 532 bp, Arabidopsis thaliana columbia
gagaagagcatcatttatagtccacccaaggtcagctatgcagaagtctctgcgattgggatcctggagggccttatgagcagtgggaagacactgggattttgttccagcatccatgggaagccttctgaggattttgaacaggggagtttcatgatgtgattgtatgattgtaaaggaccctctaggctgctgtggggagaagcggctctagctaagcaagtatggaagtgaagagggtggcatgggaggtggtgagccatggtcagatccaggggacactctgaaggagtcgctaatggatgaggtgtgcagagccatgccagggcattggcctgggtgagcaggtagacagcagttctgtttcctgagatggggaagatgagggaatgaagtaagcttgggtaacagagtgtgggagagtgatgagggggagaaacatattctgtttcaggcacgagaagccaaataacagactgtagtaatcaatgggagctgttattactgtttccacacacacacttatgtacga

SEQ ID NO: 35270 - DNA, 507 bp, Arabidopsis thaliana columbia
tatatgtgtggagtcgaatggaaacaacggctaggagctggtggttgcattcatagcaaagcagagatttattttatcattatttgttttgcagtcttgtttggagtgaacttttgtttctttttgattgttactttaatcaattgggttgtgaatttaatcaagtgatttacccagagacttgtaaacgggacataaaaagaaataaaacctttcatttctatgtcttatgattgcatgagtagcccaaacatctatggtctagtggtaggagaagatttagggaatagtgaaacttgtagatccgagttcgatcctccctgaaaacaaaaatcatatttgttttgagaagtctctcagttaggccttgggtcaattggtttacctggtagttagaaatgcagccggtctgactatcccctttcattagtcggaaaacatttcaaattcagaacagacagtatggtagtcttcggtgagaagtcactctaaaatatttcggtgcgt

SEQ ID NO: 35271 - DNA, 522 bp, Arabidopsis thaliana columbia
  unsure (1)..(522): unsure at all n locations
aatgagataatgatattagagtacacattgcttaattgctaatgaccaatgacataaatctaaaccccgatctaagctgcttgctggtcccgactgctttcccggaacattattacatcatacagcatctgaaaccggtgaaagattagagaaccgcacgcagtgtcccgnggtattaagatctggttcagctgtgaccaaaaacggtttggctcctaaatcctctgtttaaggacatgctttaactgaaccttttggctttcgattcgtgcttcaatgagttttgacttcaaactactcttctgtgcacctctaggccattctatgcaacctttcattcctcctcggtttacatgaggatgatttgcagattccggtgaagagttccattgtccaaccaaatccatcatcgggctaaatccgcctttgctcgagactctgtctggtgaaacattcccgcgcttgactttctccatttgaaaccttcctcattcataccttccattgatattacttgtagtt

SEQ ID NO: 35272 - DNA, 567 bp, Arabidopsis thaliana columbia
ctatgaatttaataaaacattatcaacttctgaatctaaacttatagatataaagtgtctataagctagataaagcaatagaattattaaaaaaatacaaaacattaggcagatatgaaacaaattaaacaataatcaaatttttattcataagtgttttagatataacttgcatgaaagaaaaatagagcagtagaattcaacacaaataacaaataatccaaacaaagtgataaaggaaaaacagaaacataaaacataaaacttgcgtaacaccaacagccttccaccacacccaataaacactttagatcactacttattctctaccttgaccttcacagctcccttcttgatggccccttcctttttcactatgtttgctccaacaccaacatttctgtcaacaattgcgtgcccaacagctcgagaatcaataacagcaatgctggtcttcaatcatttgaaatcacaccttctttaggctcatattcttccaccttagttgtagacattgataacactgtattttactcattttaggtgtatgtttacatcatttagatg

SEQ ID NO: 35273 - DNA, 303 bp, Arabidopsis thaliana columbia
aggattgccagtagctacagacgtcgggcaatgacctggctccaaaccttcgtaagccataatatgacggagtttcacgtaccgtacaacagacggatggagtagcatggtacacctaacaatagttaacccccaattgctatacatcattacatattatcacaagcatctgaggtccgacagcatagcggttacactagcacacggatagcattacgattacacaatgcttaagccagacttcataaccgatcaatcacccatgtattgctgattatgacagatgagctcgtattaacaaga

SEQ ID NO: 35274 - DNA, 536 bp, Arabidopsis thaliana columbia
tttaagcctcgtttatttaaagctgatacagttacaaacatcggtaacacgtcacaaacaagccagacacatgctatttttttctctgaaattttaataaaatgtatttgtgacgtgattttaaatcatacaaaattccacaaatacggatatgtaatcttcatctacttgcactaatacagtaatacttttcatcttcaatataccaaccatcctactatctacaagagataatttgtcaactccttttaccatagttaatttcatatattacataattttgtatatgagatatttctgctttgcactaaagaataaaataaatgagtaaaaaaaccttgcactcagcgtggtggatagagaacagagtgatttactttcacatgtagatcttgtgaactaactagaccatgtgaccatgccaaacgtctcctcaactcatctaattaatcactcgacatatacactcaaaacattatatggatgatgaatctaaacatatgatatcatatacatagagctacatcagatatcta

SEQ ID NO: 35275 - DNA, 1435 bp, Arabidopsis thaliana columbia
gaatggaactgataaagatttgtgaggacttacacttggacgcccatttttgtcataatgaatcgcataacgctctacctccccaatctcagagaagagttcctagatcccatgaagatacattttagtgtctggctcccctctaagaaaccaaatgcacaaattatagaagtctgattatacccttatatcttcatttgtcacaccctggtccagatttgtaacatggagcctggttccaacttcaactcctgatgccccggcagctcttaggccatcttcaaacaaaccgctttgccatggcaagctcctgaccctacggacaggctattcaatagaacagaatcatttcagtacaagatgtctgtcgaacttcaaaaacagcgtcaatgaaaaacaattccaaagaagtgaccacccatatgcctggaagagggaaacccagtcaaagcaaagagctccaccgagtagtcaagaaccacccaatgagaaaaccaaatgaaatggaggaacaatgagtttgaccgactatgctccggttccaaaacaaattctttgtaccaaggctatgatgataaaagaaaaaccgacgctcatagcatgctgaagaaattccaaatgcagcaggacgttcatcaataacttcatgcatgatacagttaagactgtgtaggggttaggagggtaagtcactatatttactacaacaccacacatcttttgaggatttgaaactgtgtgacggaaatgcacaacatgtctaattgtactggaagaacaaattttgatcttcatcttactgaagctcctcaggttctaagtactgtcgcaaaagcaaccaataacttgtctgccaaagtcctcacaattaacaacataaaccacaaagtacactgaaactgcaggggtaagaggcattcctaaatgaaaacatctccatgaactagaaagaagcatgttcctaggcgatgttctcaatgctaaagaatgtcaaactatcatcagaagtaaggctttccgcatggacaggaaaacctgcttctcccatcgtttagatatagtatgatgaagtaaatgcttcacagaaactcagatttccaaatcatacacatagaagatcccagattttgagcttgccttgttaatggtgaaagatgatggacgagcattcacagcaagaggacctcttctagcaggtccagctcctcttccaccaccaccacgtccacgaccacgcccacgagaaatccctcttcccccagaccttgcagttttacccctcttaacaatctcatcaagagtcatattcaatgctccagacatcttaacttcaatagtcttatgaaacacagtaacaagactcaatcttgaacctgcataaattagagaaggagtgtttagttacccctaaaaacatgaacaagaaaacatatca

SEQ ID NO: 35276 - DNA, 635 bp, Arabidopsis thaliana columbia
  unsure (1)..(635): unsure at all n locations
gttattttctgaacctattgttcactaaaagataaaacatgcagatttttttatagagaaaattgagtgatgattatgaaaaaatgttgtaaaagataagaatttagctcgaaaaatcagaatcatattattttgttaatgagaaaagggtctttataaagtattcttgtccaatactactatactagtccgcaagatattgcaatctctagaaattataacgagtgattatgtagcatcctagtgatcatgtaagaaaacatgttttttacatctttatgagtggaggatcgtgttgatcaaagtcatatccacagatgtcttgagccactaataacctcacatttcttcgttttgttggtacgctataaacccaaaccgacctaaatcaatcaaagatcacaatggtaaagacactgaagagtaaaacccaaggcattggcccatgaatgaatctatgtcgacaagctctgcacgtggcaccgaggtgtagaatttaaagctctaacaaccgttggatcatcaatctaacggtgtactttttctggattatgcaggaggtacaatcanaatggcaacagagtctctacaagaatcacagtggttataaaatgaggatggttcagacgtgatgg

SEQ ID NO: 35277 - DNA, 356 bp, Arabidopsis thaliana columbia
taactgccgccagtgtgctttaaagtcaaggccagcctaggtacttgagacgcagtatcgcacagcctcctatcaatactgagcacgcgtctcactaccattaggagtaatgcataattgtgtcactcaagagctcatgagatgaaatgcgattttcacatttaggtagagatttaatcgacgggctcgatagatggctcagcactcaacagcaccgtctgcactactgtaggccctgagtgcaaatcccagcaaccactttatgattcgcgaccatctgtaatgaggtctggtgccctcttctggagctgttgatgacagctacagtgtacttacatatcagccatacatacatc

SEQ ID NO: 35278 - DNA, 563 bp, Arabidopsis thaliana columbia
tacgtatattacctcaaataattggtaaaatatggttacttaacatattaatcattctagattcttatattgcaatttctcaaagagtggctaaaacgaggcaaaacagccacaactttaaaactcttttgtgacaattgtgaaacttcaaaaaaaaacaaattgtatttctactacgttgcaaatgaatcgtacaaacgtcgcttatttatgaccattcttcgactatataatggagtcgtacatttgcgacgattttgcgttgatgtcgtgtcggtcgttatatagtcacaaagtagtatttacaacgtcgcaaatagttgccgccataaaaagagtcacaaaaaagagtctcaaattgcatgtttacttgtaataaaaaaaatggatgtcggattcacacactcaaatatttacttaatttttgagaagggttaatcttgaggacaaaaatcggatgtaaagagcttttggattgatataaaaaatggctatagtataattgctaggagaattgcgtgtgtatattcatggtcaagacctcattatttatcaagaatgtg

SEQ ID NO: 35279 - DNA, 255 bp, Arabidopsis thaliana columbia
cccctgcttgcaaaatgaataaaaggaaactttaccaaaatataaaggaaagtaggagaaatgaaatacttattctttttagttgtaaccaatggaaaaatcaacaatatctttagtaaaacaaaaacagaagttgggaatgacgtgggcaagagagtcagcgagaccacctgaaaaaatgtcaaccaaacattaatcggatgtcttcactcttcataaatagttcacgaaaaccctaccaggaaaaaatatcca

SEQ ID NO: 35280 - DNA, 186 bp, Arabidopsis thaliana columbia
tctagtctaatataagatcttgctctagagctgagtatcatgtccctagtctagtctagctatactctgtctcgctcttgggactacagccatttctccttttctaaaccgtgtgcttgctatcacccggatgaggtacgtgagtgttgttcactgtcatctcatagaattgcgttttagaacact

SEQ ID NO: 35281 - DNA, 559 bp, Arabidopsis thaliana columbia
ttattttattttaacatacaatgctaatcaaaattttagtttaagtaattaagagagtcctttaagaataataaaaaaatgttggtttataacagagagtcctttaagaataataaacccctgttggtttataacagagagtcctcaatgcaaatcagattgttttacacctgcacacaatccaacaaaatcatctcttcttgctaaagctaatcatctcaattatctcacaaggttcaacaatcgtatgaatgtgaagtatatagccatacacccccatctgtaattaacgtgtccgaacggattgtacattagagcacctccaatgtataggattcatatagtttctaaaaaaacaaaaagtattaatatttcacctttatatcgaaaaaacaaaaaaaaacaacctatatgaataatagaaacgcatctcgcaattttagagattctctctcatctcttttttaatttataattcacaccctgtaattgtatgagttttactaaaaaactacggttggagttggttttcgttggtaaaatatagtaggaaatgtgt

SEQ ID NO: 35282 - DNA, 437 bp, Arabidopsis thaliana
  unsure (1)..(437): unsure at all n locations
nnnnnnnnnnnnnnnnnnnnctaaaggttgcttgagttgagttagaaaaacaagaattagttgtagttgttgagttcttaaaatatctatatcgattctcaatactctgagctcgtatttcatcagttgttctttttgatgtacctccggtgacaggtatgacgtagcctgctaatgcatgtcgcagtagaagcatgtgttccagtctctagtatctcaggctctgactctgtataaatttttgtctgagtctgagctagtcgtgttcgcgctttgttctgaggatgtcatataatcagcaccagttatcatcattatcgttgaatttgatgctgatgttctgctacgtggagtcggtctcggcgtaggtaatgacgtacgcgtacaaactctgaacctatctttgtattgagatggatgtctctgagggttatgaa

SEQ ID NO: 35283 - DNA, 342 bp, Arabidopsis thaliana columbia
gccagtgtgctctaaaggttgcaggatgatttctgtgagatctccagagccgacagtatagtctggatgagagaagacaagagtacacatgtgcataatgcgtgctctgatatgatcactcgtcattgcacaccatgtttgcaaatcgcttcagctgtctcacgtatgccttgagtagtcccctcacctaagtacattttgtgggcatagtctggtgggcgactctaaacatgttacaatggcgattcaactggcactcgaagcggctggttatgtcaccccgatcctatggccggcgcagttatcgtaaatgatagtcccatcagcggacaaggttatcgt

SEQ ID NO: 35284 - DNA, 249 bp, Arabidopsis thaliana columbia
  unsure (1)..(249): unsure at all n locations
nnnnnnnnnnnctaaagcatgatttggtgacattccacagccgacagtacagtctggatgaaagaagatgaaagtatatgcgtgctgcgtgcgcgctctggaatgattaccagtccagtccgagcatgtttgtcactcgcgtaagctttcgtatgcatgccgtgagcagccacccatgcaaggtatattggatggaggtagtgagacgagcgattctatatgtatgaagctagcaatctggctggcaca

SEQ ID NO: 35285 - DNA, 983 bp, Arabidopsis thaliana columbia
cagtccagtttcattgtgttcatataactttgttattcattttcacataaaagtaaatgaatagatatatcaaacattttagaaatatatcaatacacatatactatctaatcaattaataaagaaattttaaaagaaagttaaaagtggatgttcataaatcaaaggaagaaataagtgattaaattgataaaattgggggaaaaaatgagcaaagtcaaaaaaagaaaaaagttacttcaactagtctcgaacctgggtaaggatggacgaatattgaaaacacttaaccagttgtgctgaatcatttaaactgcataagtttacaagctaatacttataatttaatgtagggcacgtgccccacatcccatacacctagatccgcccctggtacaatctgagcacgactctgctattggcacatggattacgcatcctcccactcgaagaattgaagaagccatcacgagccgtgacattagaagctctacgagaactgattggaatggaacaaggtaacagggaacgaaccaatcaacggccaggaaaccctaacttccataagaaatttctcgtcgtttaacaaatcagaattaggcggaacaacggtagaatcgtgaaccccggttggacatttatacaataaccggtttggttatacataatcagattatataaccggtttagtacattggtaggaaccgatttgctaaacaacttcaagctcatgagcgtgtcgcactgaaagagtgtgtttgctagtagtgagcattagtgcggtaactcaacggagcaaggagaaacaattgaatgtgattcccaaagttttagaaaatttttctttacaaaataggccctcaattattttttttcttctataaataggccccaagttttaagattacaacaaaaccctttaccaaagctccctcctacaactggaccacatatgctaaaccatagagttggatgcataaaac

SEQ ID NO: 35286 - DNA, 381 bp, Arabidopsis thaliana columbia
tattttaccaattatttgaggtaatatacgtatagattctttctatttataaaaaaaaaaaaaagtataaaagcaaatctatatgaacaccaaatcatatacaagaaatgttacataagcatttcaaagaaaggttaataccttatatatgtaggaaaacaaacttatgaaataatctttgtatctcctacaaagaatgatatacatcataattggactgtaactgattcaaaatactcattattaatgtaattagatcttaacattccgacctcttaaatcttggcttgtgactcctgtgcttacgtcgcaacgcagtggctcttttgcgtcgactttgccattctttcgcgactcctcgagatttaactctccccgttt

SEQ ID NO: 35287 - DNA, 549 bp, Arabidopsis thaliana columbia
cggttgtccttttcttctcacatttccaaacattttctctactctctccaacataagtcttgacaagaatacctgagataacaatcaataatctcaatgaagaatatgaaacatttcagttattgtgatcgcaatgttttattgaaatgtgagtgtaccaaccatatcagagcccggtgcttgcgggtatttgctcattgcgttactagtgtagtctcggttattcaatttccgcgcactgatcttatagactctgctaattttatgacctgctgcgatattttgctctctgagtcagcagtgtccttttcaggactggacaattcttggaagtgtgagttgtgttgttttgagttgctccttgcaattgcgatggcttctgataaagatacttcactgtagatggcaaggcagaaggaagctactaccgtgggatcccgaggctgatcgactaatgctttgtggaatgctaagatcccaatcctgaggttaatagtcccaaaatttgttaccaggcaaaccaattctaagatagatgtattaagaaga

SEQ ID NO: 35288 - DNA, 536 bp, Arabidopsis thaliana columbia
tttcatcatcatacaaacttggtacttgtctcttttgcaagtaaacttacttcaacacaatttccaggttctaaggccataggaaagcgtcctgatcatcggttctcaacccttgtctgtgattcgtaagaaagttttctaggctcatgattctcttgatcatccgtttctctttttttttttttttttttttttttttttttttttacgggtgtgattttttgccttcactctcatcttgagggtccgagaccgtcctcaaaagttattaccttgtaatcaaggatggtgttcttggcttaattattactctatatggcaagtatcgtttgttggctttattctttattactaaatgttgcaatacgttgatatgaagaatacgtagatacattaaaaaaaagacaaattactgaaggaagtatgattctcgtttgaaacatggcaagaaccatcgggctctagagcggggaaaggaagaggtaacagatcggtgcggttgtcaacggtgttggaatcgaggtcgaatatgaaga

SEQ ID NO: 35289 - DNA, 235 bp, Arabidopsis thaliana columbia
atgaagatggatcgaagaagaggctcagtgacaccgtagggaggaattgtcaggctcatggtgtgaagaacgtgggaaaggcggcaccatggcggacatcaatggcgaaagagggccatgtaatgatggataaagggctattactaatagaacctctgggacagcgagagacacgacacagtgttgagaagagagaatgatgctacgaacaagccggatgctctggactcgagag

SEQ ID NO: 35290 - DNA, 523 bp, Arabidopsis thaliana
tgacacaatcttatgagttactaactttgaaaaccatactttatataataagatatcaattaattaagtaaattaaagggtatgtaaaatgatcaaaggaggtggtcgtacttccggcgaccgcggcagtcctgacgacggtaggggttatgacgactgcggcggcccaacaacggcaacaacggtagcgctgaagatggtggtggtccggcaacaggggcggatccagtgatggtagtggcatggcgactgcggctactctgacaatggcggtagacccaaaacagtgcggctgctctgatagcggtggcagtggatccgatggtggtgatagttccagcagcggtagttgtggtggtggttagtggtaatagttccggcagcggtggttgtggtggtggttagtggtgatagtggtaaaggtaaaattgtaataatatatattatatatctgttgtattcgaaggttttttttataggttagtctgttaatttataaaaaaattgtaggttataaatcaaa

SEQ ID NO: 35291 - DNA, 316 bp, Arabidopsis thaliana columbia
  unsure (1)..(316): unsure at all n locations
tgcattgttgtaaaagctttctaattttatataggaaattatgagacgtttctactcataatttaagtaaggagcgaaaacatttatggaggagaaataacacaaggacgtgaaaacctaatgcactaaaaaaaattggatggataaaatggcnagatttgagagaagttcttcttatttgatgagatggacaccttaactgatcttaaagaattcattttatcagtagtagattgtacgatataaaatcctagttaagaatccgcgctatgtcgatataaaacgaataaattattatgtgtgaaattattatgtg

SEQ ID NO: 35292 - DNA, 461 bp, Arabidopsis thaliana columbia
tgaagagtcgcagctgttttccggttatatgtctctatctaaatctaagatcttaattttctatgttcggagatatcaaagtcgcactttttctgtgaatctagaaacacataacatttccaataagaatattctattgagattcgtagtcaactattaagtgtgtattacgattaaaaaactactataatcaatgattaatgtaatttattatcttacgatctcaattatacaattcgtctgacggtttgggccgtcgtaaggccgaagtcatgcttttccttaaataacactacgagttagcaaattacccctcagctaatttgctgagaatccacgctattaaggggtagaattaagattagccaacattgccaattagagatcaacggctgaaaaagctatttcttggggaacatgcaaagatctgacccttaattaatattttcaccaaccaatag

SEQ ID NO: 35293 - DNA, 561 bp, Arabidopsis thaliana columbia
  unsure (1)..(561): unsure at all n locations
ccacaacatatctgttttgtatacaaaccaattagaataaaactagtaatggagttgaaaaatctccaccttattaattggtcatcattcaccaagttctccttatcttttgatattaaattttgtgagcaaaaaaaagatgagtctttgtaaacgttatatcaacgaatggaaaacaaaccaaagtcatcgaaaaaaggaaacaaccaatcgaaatttccttattggttagattgaaattagtaaatggaaatcggatctaatttagatctcttattattagaaatagtgaaaaatcccaacgggtagattaatatcaaatcatcatttagtgaagcaaagatactctgtttaagaaaaaaggaaataacccaagagaaccttgtttgcttataaatatatatcacgctcttcttcttcttcttcttcttcttcttcttcttcttcttcttcttctaacatgaggaagaaatccaatcaaagaatccatctacgagaaagaaaaccccaatcaaagaaccaactacgagangacaagagatgagagacgatccacttttg

SEQ ID NO: 35294 - DNA, 531 bp, Arabidopsis thaliana columbia
attatcatatattagtccgtcaccgtaacgccgtcagatcgtcggcgggagagaaggaggagcgacgtggcatttcgctggctgtttttttgtcgttttccgtccgatttgttcggcgctctagatcttctgtttgttgacggcgctcgtagactggtagttggtagtggcgtttgactgttatatttataaatggtgaattagtgtataattgtgaattaaataattactcgaatcaattaactctttcgctaatttattttaatgattcacaagacaacactaatcatatttagaaactttcttcatgttcaacaatagatagtcagactagttttcaatctttgagtctctctggtccgaaagaattatagacataggtccaaaactatagtactaggcgcaaaactttttggaaaactaaaataacacaaaggagcacacgttcagcatgaacatgatgttagagagactgaccatgaaatgtgttggcttactcccaaagcaaaagaaaaactttagattgaaact

SEQ ID NO: 35295 - DNA, 365 bp, Arabidopsis thaliana columbia
tagtagcttgatccaaagtagctcagtgataagcttcatacatctctgtctcgaatcgttagaccaagttcatgcgttagatatcgatagaggatttatacgacatgcggcgatatagatcaacgacgtcaaactcagagatctagagctatgcaagaccgatctaacttccgaagtccaggccgagagcgtacctgaaagtaatgcggaaaggtctacaatcccgtcaagtcaccagcgcagctcaaatctctaaagaaagcatcgttgccagtacagagccagttgagtctgcagaatcagaagacagctgatagtatcatatacgtagctgagcagcgtcctccgccgcgttatggtagaga

SEQ ID NO: 35296 - DNA, 728 bp, Arabidopsis thaliana columbia
tgtcacaagagtcaatgtttgataattttcgaaaacgaagataaaaacaatgtttgtttctttaatttctgaaaatgaaatagccggcaaataaaaataaacttttgaaaatgaaaataaaagcaaatatacagagtggcttatgctcaactattgtgatttgtgaactgtgtgatattgtagcaaaattagaaaaagaaccgccctaaagattattggtcaaagaaacacgtccagttctcgacgatcacgcaacaacacccagaaaagtcaatgaaaccataaatacatcaaagagttgaaaacattaatctatgttttatacatacgagttgatattttttttaatacatataactatataatatttaaccatgttgtattcatatgtacgagttaatttggactcaccattttactggagaaacgaggatgtctgatcaaagtttgctttaatccttcgatgatcacatctggatcgatcttcttcttgattccaataacagagatgacgtagcagttaaactccggtgcgtgaaacacacgcgccgccggactaagcggttgctcctcctcaacttcttcctcgtcgtctttcctcacggatgtttctgatgtatctcgtcgtgtcttaatctccatggtttgctgcttagtctttctcttttattttctttctctctttcttagacttttaatattcgctttcttgatatatagctccaatt

SEQ ID NO: 35297 - DNA, 837 bp, Arabidopsis thaliana columbia
gaaaacaataatgaagttatgatgtagatgttgacatttttttgttttgtaaacaaggatatactgtatgttggagatggtgagttatttcttgtaacgaaaatattcaagacactctctgcatgtagttttatttcaagtaacttggtatataatatagaccttttagtttcttttaaattctttgtccaacaaaaaaagtttctttaaaattctttgtacccccacgctatggtggtttagtgagatggaaatcattttggtctacaaagtagaatgggaacagagataacactgtacgtgttttgtctgtccttatgagaaattataactatcaaatctagtatttcctgtcttcctgataaagataataatcatataatatttggctatttgcgtgcctgatcctttatctacatggtacgtaaactagcacttaacgaacacatgttggtttcatacgatctagttaattaaggtgactacatgcacttacacaaaacttgaatttaagtatttttatactagtgtcatagaaatatctgtattagtttggtggtacaaagttaacattaaatatgttaatgcttggctattcacgaacattttaagattatatcgtattattcttttggtgactttctacattacattatagtattgactgtttgactccaagtgagtatttaaatatgaccaaaatatccatacgttagaaagttatacttttgtttaatttctttgtttccatataattttgactcttatattagtaacagttatgtttcttcagttattatatatatgaacaatgatataaagaattcagtttttttt

SEQ ID NO: 35298 - DNA, 290 bp, Arabidopsis thaliana columbia
ctgtattatgaaacattgtacaaaaggatagagagaaactaaccgttgagaatcagcaagtgctttgcgtatcctctcagccagagcttcatactcaggtcgtacaaacgtgtttaggacacgtccagcttcaaagtcatcttcgtcttctgactcagctccctcatcatcagtcatcactatcatcctcatcatcaactaccagaccttcaacatcactgtataagtctttatcagcataattagtatcaccaccaagtacatgcttgtcacattccatatagcgtcga

SEQ ID NO: 35299 - DNA, 285 bp, Arabidopsis thaliana columbia
cgccagtgtgctctaaaggtaatcggagtctaatttggcagaaaaagctgcatcagcgactaatgctacagatgatatcaagtcatgaagcatacactgcgtgttgcgtacctgaaaccacgctctcgtggcaggtctccccgcgttgtaatcgcggatcgatctccatcgactgcggggaccctaggtatgcatgtcagctgtcagcatgtcaggcatagtggcaaaatccaagcagcgagcaagctacagcaggaacacaaaaagcttgtgtacgggagaagt

SEQ ID NO: 35300 - DNA, 494 bp, Arabidopsis thaliana columbia
gtatggtatatatataagcgagaaaggaattaattaaacgtatcgagtgataaatgctttaatggattcgagatttagtattcttaaatttttgtttcattatcattgattataaaactaagttatgttgatctcaaatccttaattatgttctcctaagaagagtacaagtggtgggaacgaaagatgagtaaaatactaaaaatcttttctcaaaagtcaaatcgcattagttaacaaaaacaaaccatgtgttaccgtcaaatcaatgtgtttaaaagatgttaaccactaatcaagcatttacgtgtaaccggatcaaccggatttgggttttgaatatgttgtggagatgtatataaatgataaattaattgaatatcttaattaatctgtgaaagaaactacatcacacactttgttatttcccctagcttttagttttttttatcatgcgaaacttatgaagtaactagatcaagatccataaaaaa

SEQ ID NO: 35301 - DNA, 184 bp, Arabidopsis thaliana
cacacatacacacacacaacacacatagagatacacagacacacatacacagacacagacacacatagacacagacacatacatacagacatatatacacacagatacacacacacacacacacacatacatacacatacatcaatacatacacacatacacacagacacacacacatacatat

SEQ ID NO: 35302 - DNA, 667 bp, Arabidopsis thaliana columbia
tataaacgttgtaaaacgtcaaaaatgtaaattatgttgataactaataaattattgttggtcaaagataaatagaaaaatgttacttttactaataaaaagttactaaataacaatgttatgaacattttagactataaatacatgcagaaatcctcattggtaaaataaaaaaaaactaactaactaagaataaaagatcaaaatattttaaaatggagaataaaacaatgttcataatattttcttcgatcatggttttgctatcgttttctcatccaactttggccaaagaaggagataatgacgagccactactcatatcagacgacgagaaggtgaagagtgaagagtgatatttgttcataatgaacccctgagccacaagagaaggacgagccaaaggaggaggtgggaaaagagaagaaaccaaagccacaaaagaagggcaagaaggaaagtaaagaaaggaaccagaaccaaaacagaaggtggaaacgaagaagaaaccaacgccacaaaagaaggacgagaacaaaaggaaaaatgggccgaaagagaagggtaggaaggaacacataaattcgtaaggtgggctgaccagtaggagagctaataaaaagaggcgtttcactagaatgttgacacgcaaccgccaatttgagag

SEQ ID NO: 35303 - DNA, 547 bp, Arabidopsis thaliana columbia
catttatataaatactattgattatttctctcaggaaagaattgagtttacaagtttttttgtggaaatggttttaataaagaatttcgttttgcttctactgtcacattttcttattaaatatcaaactcgatcggactcgtgattattttagagttaaggtgtagtgatggtcttgatggagcgacttttcctttttgattttcatcttcagagttatctatgcatccttattagccttctccatctctgttacatcacccgtcctttttttatcgtttactttatcttctagttgatcctcttcttccaaaccttatatattgtcctctcttttgtcattttccaggtcttcttcaacatgttctgactcattcaacaccaaaaatcttaagttaattaaaattgaaacttgaccaaactccaactgtttttttcttgttcgggatacgtcaagactttctcggggcaatcgtcaacaactttccccttcctctttctcctcaattgatttttacagctgcatcatcctgaattgtagtacagg

SEQ ID NO: 35304 - DNA, 435 bp, Arabidopsis thaliana columbia
tggttagttttataatatattaatcttctatatagttaacctttggttaatagattaacatttttactcaattttactatatattaattcgtttctaatgattatcgaaggactttttgaaccaaaactcatatgtcttctcttagtcgagatctttcaaaacccttgaccaaactcatatatatatatatatatatatatatatatatgtgaatattacgggttttgacacttggatatatatactaactttgttgttgtttgccgatatacgaactttgatatccgagttatttagagttagacagtgtatcaaaaacgaaatctatacagtttttacatgtaatgtatatatagtggagaaagtttgtactccatccatttgtgagtgatgtattcatatattaaatatcattacaagttctaaccaatttc

SEQ ID NO: 35305 - DNA, 574 bp, Arabidopsis thaliana columbia
gttacctatttaaggaggtaaagagagacctctgcaagatatggctcccgattcatcgatctcaggtacaaacgcatccaaaggcaagctgttaatagcgtgatggaagtctcgaagacagaagtttccagtaggagtgtacgcaaatttcaactgctggatccgtaaaaaaaacatgaaaaccacacacaaaccaccgaaaatagaaggaaacaacgattgatgacgaatataacctgatcgtttccagaaattcgatctttcaagatataacacaaaccgatccgatcagtgagagaatctaccggagacgaaattgcgtgtaagttgctgagcttcagaaacgactacaaccaaattcgcaagcaacaatcaaattcaatattcataaacgaagacgaaattcgcagcaacaatcaaatcctagattcagaaatgaagatgaaattcgtagtagtaacaatcaaattcgagcttcagagagacgaaattcgcagcaacaatcaaattcgatcaacagatagattcaacgatatacgagcagaaattcgtactgagaatggaaatagagaga

SEQ ID NO: 35306 - DNA, 126 bp, Arabidopsis thaliana
aaaaaaaaaaaaaaaaaaaaaaaaaaaaaaaaaaaaaaaaaaaaaaaaaaaaaaaaaaaaaaaaaaaaaaaagaaaaaaaaaaaaaaaaataaataaacaaaaaataaaaaaacacacataaataa

SEQ ID NO: 35307 - DNA, 709 bp, Arabidopsis thaliana columbia
ttgtcaactatagttagcaacatgctagttacgatgccagcagatttacaggcgctcacaaataattttatgattgtatatgtaccaacatgtgaatcgtacgtgtctataagactacagtagtggcccaacgattccaagccagattctctggattccaatagattattgaactaaattcgatgatgtcatcttaattatattattttatcatcgagtccatcttaagttgaaagttttaaactattatatagtactataaatcaattatagaattaatttactgtttttcacttaaaacgttaaaaaaaagaatgaaaaatagaaccaaccttaagaaagtgacatgaatcagattaactctaatattatatttgtttgcaaacgctcaattatatagaaatttaaactggagtcttagatgttaatattgaagtatttacatttgaggtcgaagaaaagaaaagccttaaatcaaaaaagaaaagaaaacgaagcactttataaacccccaaatttgtgcaagttaagactattcacacagtcacacatacacacacagaaaacttaaactaaagaccagaaccagaatactttatcaagaaataaaaaaaagactacaccagagaaatatcaaactaaagtataagatcatggcctcatggggcaccaagagaatcgcatacccaaacccgacccatgtttgcca

SEQ ID NO: 35308 - DNA, 500 bp, Arabidopsis thaliana columbia
tcaaaatataattatacaattgtaaacactaaacaaaacaaataatattaacacaacaaatacaatttaaaattaaatattatttttagttataaatattgtcacaaggtgtatcatacattgaaaaaacaatagcctatatatataaatcattttaaagacaaaaatcaatattttatttaataaaattatagacccgtaatgtatctcttgaatatgttatttatatataaataatattaaaaaaactcctaggttgactttttaaagaaaatatcaacccgcggtgtatcacgggtcaatatctagtggatattaattctgtattttaaaaccagctgttcaatgatattcgcatatttagttgactttaattctgtaagactctataatatcatacatttccaagtatttgaagtttaagactacatgtaatggagcataaggaagagtattttcatacgatacatgggtctacggcccgcttagcttatattcac

SEQ ID NO: 35309 - DNA, 912 bp, Arabidopsis thaliana columbia
tcatatttgttttatcgcttatgtacccctactgtaagtgacgaatcggtgcggagattaacttttgaaccgatcaatcacatcctcatatttggtctactatcactgttaatagtttactttcttggtcaatgatatattttataatcaaattgtttcattataataaagaaagaacttatcttagtcttctacaataatgagtccaatatattcactaaacaaacagttctttcttaacaacaactagagaaaacaatttcaaggaaaaattttacttagaaaaaatcaactagacacgattttttcttcagcattttatacatgaattgttatatttttttggatataactttatcttagaagaaaatatacttataccattgtaaaaataagggaatttggtcaaaaattccaaaaaaaaacttatactattgtaaaaataaaaataaatgacatcgaaataattaataaaaacatctggtccccatgaaactcgtatattaatacttcagatccaaaatttatgaaaaaatatcaagctcaatgtattaaattaaaaaatataaatcattaaaagctagattttattcttgtttggtacaaccaataataataagtggggaaaagtattaattagagtttgcttcacgtttgagtttcacaaaaagtgtaacgacgccaggagaattttatcgggtcgcaagtgtcacctttgtggattttgtcttccctgcaacttttgaccttttcgcactcagcgaatcagatcgctatagtacggtgcaccctaccgtctctgatcatccccactgtcttaattagatccgacccgaaacgtatccttctctgaaacttcgtttgagattcgcattcctctgttcttccaccatttaacaattatcctctttt

SEQ ID NO: 35310 - DNA, 565 bp, Arabidopsis thaliana columbia
ggatataacgttctattgctgaaatgtttcaagatatctgtatttcttatgtaactacagaagagttcacagtcgttcttttttaatttcttcttcgaatctatatagtaatgtggtcgatactttctggtaaaaatgggacttgccttgctactgcaggtatgttgatgtctcaaccgttgatgtggcctcatcaatactaatcagcaagcaaataaaggataccggagccttgttcttggaggtaaaggctcttagttaatctatatctagaatcactaaaaaaccttgtaacagatctggtggcttaagtcatttctatttttgatattcataggcaccagtttcaggttccaaaaagcctgccgaagatgggcagttaatatttctcactgcaggttcgtaacagcttactcctcattgagcttgtattaataatcgatcatcacttttgcatatcagattattttgtcttcgcgggtgacttgcctgtattttctaacatggttgaatcatgaatgaaatggagatttatgactatctggcacttgacattttaggtgac

SEQ ID NO: 35311 - DNA, 551 bp, Arabidopsis thaliana columbia
caattgtattttagtttgtcaaacagatttttgttttaaatagttgccaaaataagatttagtgaattgataagaaatgtatttagatgcgttttgctcattttaaaggattgcaattgtattttggtttgtcaaacattttttgttttatatagttgtcaaaatctagttcaaatgttggaaaaacatgcgtgatatatgggattggaaaatatttagaatgtttttcgtttgttaatcaatttattgccaaaaaaaccatcaattaaaagctaatggcaaccattgtaaataagtttgaactccacgatttatttcacaaaatcgctgcaaaaatgtatatatagattttatatatcagttattatgttctaacataagacattgtatatattaggtaaatactgttatttatcttagttaatttatatgttaatggctttttatcaccttttatggtttttttattttattttatggttctaaaaataagcaactatcattatgtaaatactggttttcaatagttgataatatattactcaaaattt

SEQ ID NO: 35312 - DNA, 351 bp, Arabidopsis thaliana columbia
ctagaggaaaccccaaaacaacatgcacggtgagtggaattggtccacatatgtcacaatgaattcaagaccagaattcaagtatttcattcccaattaaaattggtgatgggcttgtaaaaagttttccttgtgaacctgcgttacctgaccactcatccgatttgaatatttttaggcttttcgatggatggttattagcactttgccgatacttttgcgtcatggctgacctcggatgtccgctctttcctatcatgtcttccctgtactcgcgtttcctatgacatttgttgtgattctcttgctttttgtgccatactgtccgttgggctacgttggcaattcttc

SEQ ID NO: 35313 - DNA, 532 bp, Arabidopsis thaliana columbia
taaaacgaagtagcagcatgagctgttacaacttacaagacttccccaatttggattgatcactctcgttaccattattgttttgtccatttgcatttggagcattccagaatttcaaacattcgtttcccttttcctcaacacacacttcgaggcttccccatgtttttgcttctctttttgttttcaatatcaaaatattcttcattttatatcaaattgtaaaaataatctgctttccattactaaaattgtcaaaatttaaaatccgaaactccaaattctacacctaaactaaactctaaaaactaaaccataaatcctaaacccttataactcttattttttttaaccataaaatgtaatatggtctacataagtttgaaataaatattattaacaaaaagcttcaattatccgttttttcttatgagaaaaaacaaaagacttgcacttctcgtggtgtctttcgcgacattacacacatgacacatccttggcattttcgttataaattattacatgatcacag

SEQ ID NO: 35314 - DNA, 447 bp, Arabidopsis thaliana columbia
tatgccttcaccttgagagagctgcacttgtaagcccatccttctagtagagttgttgactcatttcattgggttatgaactgaatttgagtgcatcttgtggaaaattttacaggagagatcagaaaggattgaaaatgttagggatgaagacatagctaaagctcttctagccgcttgcaaaggcgcactggaacctgtgctcaacgcttatgaccgattattatccaatgcagctgttgtgccatccccaaatctaagaatccgcctccttcgttcagttctagtggtactccgtgaatgggcaatgtctgtattgtcagacagaatggggtcgagtccaaccaggtcttctctgatactaggcggctcgtttgcgctagagaacaaagctgctcttaaccaaggggcacgtgataagattgcaaacgctgcaaacaggcaagt

SEQ ID NO: 35315 - DNA, 535 bp, Arabidopsis thaliana columbia
ttatttgcaaaaagaaaagaaaaaaatacatagtcaattacctaatttaatctcctcatactaccaatctaccgacctcaccatttttattgaatttctacttgtatacactttgtaaatatagattagatgatcaaactcgttagtccaatgttgagacttaaaatgtgtaataccaatctacgtacctagtgttctacaatatttaacattttaatagaaatgtatatatcttcatttcagaataattattctaaaaatgtcaaattaatatgtaaatcatatatatatatatatatagaaaaacttaacgatagcataatgggattcattttgcattaaatcatataaccataattaatggtctatgtagaagaaaatgggtaaatgaagatcaacatcacattcacagttgttgacatccttaggatactcacagcgaaagagaccttattttgtccatatatgtgaactccaatttttttttttgaataatccaaaacgtatattaattgggagaccataaaaaacaaaa

SEQ ID NO: 35316 - DNA, 570 bp, Arabidopsis thaliana columbia
gctcagtgatttaaaacaatttttgtttgctaaattcaagactatgattatcacagattccttttttctaatcctcttgatatgtggctgtatgatatgatacgtaccctgtaatataactatataatgattttctaaacttctggaaaagagaaaaattgacagcaacatgcatatataatggtaacaacatatcatagccaaatgagttggccaaccaaagatttgccaaacttttagcattaattcgtgaagatgacatatacatacattcatacactaacgtctcttactaaattcaaaagccaaattgcagggatttaggttttcattgttcaagtataattaaaaaatttgcttcttctttttctgattaattattttgcaagttttatgatcatccaattgaaaataaaataattaattaacatttggatattaatgttatttatgctgagaaatttttaacatattcagtttgaaatcaaacttttccaaattagacatgttcatttcactgttgaagttaatttgttgaatcaacttacaaatggatgttagcgtaacact

SEQ ID NO: 35317 - DNA, 341 bp, Arabidopsis thaliana columbia
  unsure (1)..(341): unsure at all n locations
gttaacatgagcttaccgtgtcgggatgaattgcgtgaactattaagaattgaacgaaggtagacatatgcttagagaacgagatggcaggtccaccaataccaggtccggtggtttctgtcgtgaatcttagatgagtgattcgtgtgcgagaaatcagaggaccantactcttgaatttgtgcggggtgtgtngtacatgccgccnattagcagtgaactgcccggcgnaaagcttacgaacatctagcaaacacggacggctgtagttatggtcatcttgggatcttcaggaggtgttttttgttgacggtctacagtatcatctaatctgggtttca

SEQ ID NO: 35318 - DNA, 459 bp, Arabidopsis thaliana columbia
tctaacgaatattttgtccaaccctaatattttttttaacaaaaatgttagttgtttaattatattactaaaatcatgaaaatataataaatgttgtaaatgatagaaaaaaaaattgaaagaacgttttcctgcagagtttatataccatgtatatccaacatcttttagtacttgagacgaataactcatattaatggtgacatagactgcacccagaaccgcagcgcaacagtgctgtaacagtattaaaatctttacatctacatatgtatctatgtatttttgttactattcgaaccgtatcgcactttttcgtacaacgcagttactagtcagacattaaaaatatgctaactttaaatgagggccaaaacttatcgtagagtttacacttcaccgtcaaaacacagccacttatgtcagtgactcttcttctatcaccacgtacacgacacc

SEQ ID NO: 35319 - DNA, 291 bp, Arabidopsis thaliana columbia
gaaaaacccagaaaaaaacgaaaaaaaaaaaaaaaaaaagaaaataaaaaaaaaaaaaacactggaaaaaccataaaggataaaaaaacgatcaaagcatctatactctaattgaacaagatcttctagaaaataaacttcgttttgcaattgatcgtctcgcattaagaggcttgcagatccgtagctctctttctgtgcttttgcagggtttagggttagggaaataatttcggattcggttgtccaattatgatggcttcgactgctgattacctcctggatgatcaa

SEQ ID NO: 35320 - DNA, 521 bp, Arabidopsis thaliana columbia
taggtcaaaagaaacaattgagaggagacagagctgaaactaaagctgaattcatttatttatttaccaaaaccaacaaaagcaaaacactcttacgtcatcctaaggctgtgaattgaatcatcaaactcaagaactgaaattttggcgtcgcgaaatgtcaatataatcgaatctcttcccttagaagaattaccacctcccataggaagaaccgcaattgactcaacattaccgtgcaacctacaatccaataccaatcacatcgtcacttcaaagtcaaagtaccaaaattggagtaatttaggaggtaattgtcaacaaacacgtacctataatggcacacgagctcgagagaaacaccatagacaccatccataactccaccacgcttagcaagcttcggattcctcagctcctgagtattccttcctcttgagccctaacgatgtacacctcaaggatatttgcggcggttataacgacgttgggcaaaggaccaatacctcgtttaggattag

SEQ ID NO: 35321 - DNA, 496 bp, Arabidopsis thaliana columbia
tcgactcatcccctcacactatcaaaatatataaagaataaaaagaaataccaagagtaatacatctcgaaaactatcataacgagaattttagacaacagttccatgcaaaatcgataattttaaaacctaaatcgctattgtttttcggtcttaattaaatcgttctcttggggaccctatgttgcgtgttgtggctttatgacgctgagacttgatgatcgtgctgctagtcccatccggatgctggctcattgggtttcaatgttttactgaggtgtatgcttatgtgtccatgttgatactgcttctggggccgctgctcggggaaccggcgtctttgaccgctaggtgtccgttctcgttcgtcctctggtgctcccgattggttaccgcggtctatgtcttgcttcggtgatggcgctcctatgagctgtgcctgcggcccagtgccaggcgcggctgctttcggtcattgccttggttcctcttgttg

SEQ ID NO: 35322 - DNA, 560 bp, Arabidopsis thaliana columbia
ttctcaaaatccagtctaattctgtttttttttggataaaatgtccaatctttcacttaaattatatatttaaccaacctttaaaataatgccacacttgacaagtgacatatcgatttagtctggtcatcaacttttcacaagccaaactcttgaggtcagcatcgactaattttagagtgagtaagtacgttaatagcagttccatatatccaccacaaataaaacatcgtaccgatgttcagagtctaagtgtttgggctccctaaagcaaaaaatattattgacccaccaataaaatattacacaaacggctacactgtaaggagatttcttaaatttgatgccctaaaatcataatatatttataatgcctaaagcatttgcttgttgagcttccgttttaggcacaatacatcgagtttgatcataattaatggcacatagatgcgcatttgatgacttcataagaattaatagcttctggaaaaattaagcaattttatatttctgaacacaattgtcgatcatacagaaggaaaagagggggggggggggga

SEQ ID NO: 35323 - DNA, 591 bp, Arabidopsis thaliana columbia
aaactttctattcgaggggaaacaggaataaaactttgattttatagagatatagaccggaatcaaagaatgggctctatctggtatgatgtaatacttctcatggagaaatagaccgttttccggataaacacactaaaacaatagttacattggagacgaccaaatttaagaaggaaatgagctactttcattttttttactaactaaaaaaagttttacaaaaaagtttcttaaaaagcccaatcccaagcccaaataccatctcttttttttttttactaaacccgattccgtgggaacgaacccatccgttggtgaatctggacagtcccctcaaataaaagttgtgagagctgtttcgtcgctttgatcgaaatggcgtcgtcttctccaactcagctagctcacgtcccgattcctccagaaccaggtcccttcttctctttctgtttgcttctctatccctcaatttgctttgtgatcgtttcaccaacgttcgctactagttattatcttccttcattccattgcgatcgcttacgtcgctgtttttgatgttaccatattcgatctactaaaatccctcag

SEQ ID NO: 35324 - DNA, 624 bp, Arabidopsis thaliana columbia
gaattttctggactttgtcagactggactagtccaattgacatgtctaaactattataataaattatttgtatgtaagaaaatatatccaagtaaaatgatgggttacaagacagatggtttagaaataacctgatatcatattacccgactcttacacatactttgttttcttaaaacggataagagttggataacatactgtatattgtttggtcagccttactgttttcatttccaaactgacttttcaaataaagaactaaaaaaaagtcatcaccatcattttgagcatgtttctataactcaagcggaacacttttagaattcgtcaaatcaaatatattttgactcattttaaatcaaatattcacttttacgagaataattaacgaattctatcatcattgagctatgatttcatacgtataccttataatttagattatactctaaattagtgtgatgttaaaaattcaacaaatatttaaccctcaaacacttaccgaggtactgtgtaaatgacttcttacatactattgagcgttcgaattaattgatcaaatagagatttgcttttcagctattttttttttttttgaattactaagaggtttttgggatt

SEQ ID NO: 35325 - DNA, 529 bp, Arabidopsis thaliana columbia
taaaaacatagaaacaaataacaatgaatctatcgacatcaacaaaagcaattaaactttccgaatcaatgaagcgataaccggtagtatcttcgagacttcatatacgatcaaaatgctaaagtaactattcataatcttttattaataatgaattatcaaagcttctataattcatacgacaaagacaaaggaatagcaacaagttatgttcatttcgctgtcgtttaattcaacaatgaaacgttaacgaaacgattttgtcgagatttttaaacgtctttttcaggttctacggctaaaattcctaacatttcatcacctgtcgttatcgttaatatcgtccttgtcagcagaaaaaaattgaaatcaggataagttgataacttctatgaaaaaaacattatcttacgaaaatccaaatactccgacttaaccgggtcggatcctggtgagtactagtatctatctcattacaattcatatccttccttcaacattcgatcatcacgaagccaaagaacaattt

SEQ ID NO: 35326 - DNA, 436 bp, Arabidopsis thaliana columbia
cgaggttagatgatttgtaccattgtgaggtatatagctaccactttttcggacagcatgtgatttgtatagtatagctaatacggaggctctttatatgaaagaaaaagtagatgtatttcttatgattttctcaattttcaaataaccaaattataagaatcaaaatttaattgaacaatgaaagaaggacgaaaaaagacatgtgcacatggataacgattttttaactccaagcaaagatgaaagatagatcgatcgagagaagtcgaaggttttgggaccagatgaagttaggaaagtgagtaaacgatcaagcattgcgttcttctttatacaaaagatccgatctttctcggagaaatttcagtgattagattcatactaaattcccaaaagaagttgaaagacgatgaaagagagagaagggtcgtcg

SEQ ID NO: 35327 - DNA, 578 bp, Arabidopsis thaliana columbia
acgatgtgggttttgtcttgcttttcttttcggggtttgcgatgattttttgttcgttttgttcttgggttaacacagaccttagcggcgttgaagagagcctacgccgatacgatactgaacacgacgaaggaagcggcggcacgtgtgatggtttctgagaagaaggcgcgtaggtatcagcaagaacttgtgacggttagaaatgaagcacttcatacgttggttaggcttaaacagatgcttgattccaaggtactatcactttgttcttattttcatttgtttatgggttcttggtttgttttatttggtttctgcctgattatgtttttggggtcttagaggcatttcttttttcttgcttcatatgaagatggcttttgaaattaagtttttcagccttgctttcatggttttaagcattgttaatgttgtgtgtgtgtgtgtgactctgagttttgtttattcagtctttgacatttgaagtgactaaaatcttccatcattcaaatgatatgcttcgagactatcatttttgctatgtttttcactacattcacttcattgaacgttga

SEQ ID NO: 35328 - DNA, 591 bp, Arabidopsis thaliana columbia
ccgttgataatataaccgacggaattttttaaaaagaagattctgagtaaaataataaatgagaaaacatgatgagctcacgtttgcttgaatggatcggatctggtcatcgattagagcttgttttgattgaaaagggatcgttactggttttgtatcaatctttgtcatgattttctccaccggtaccgttgccggagttagtggcggcgatggttcacgggaagggcctattggactgcttaatcctgaagcaaatggtgaccagagagtcgattgcggcgagccagagccactaccacaagactgaatcaaaaaagaataaagattgataagaattttagattgagagaaaaaaaagagagaatcgaatcttgcaagagagttggtggtaccttttgatgcttttcatcgtcttgaagcatatagttagtcatctggcgagtcaactcggtgatgtactcgtcttcttcgtcttcgttttttgcctttggtgaatccggttcgtcggatacgaagtcgggtcggagagagcttgtggttggagtgaagaaagttggttcagaaaaggaggtaaaaggatttgaaatg

SEQ ID NO: 35329 - DNA, 516 bp, Arabidopsis thaliana columbia
tttttacattcatttgcagtaaattaattcttagctttcaattaaaatctatttccgttttgttcaagtatgatttacctcagcggcatttctgaatttaatcaaattatggaaagactctaacaaaaacttaccatatatgatcaattttttgtaaaaaaataaaaataataatgattttaaaggtgcagatttattttcaaaatttcatatccactatataaattttattgttgcatatcgatgaccacaactagcctaaatcgtaatcgaataatacatagctcaaattattgttaagttctttctttttgtctttataggatagtatagaagagaagcatgaggcgtgaacagaaattataagattaatagaaaatgtttaataattagaaccgaccacataaaatattaatacttgtctcccaacatatgaatattattattaaaacttgtaccaacgataacttttgaatagtttaatttctcagtcaatactcgccaaacatattgtag

SEQ ID NO: 35330 - DNA, 629 bp, Arabidopsis thaliana columbia
ctaattgttcctgtcttcttgtctgtacggaacgtttgcggtttgtcagtcaaaaacacgtgtttaagatttcgcaagaaagagagatgtcttttgtagtagtaaatctaatcaatgaataaatgacgtaagcagaaacagagtataaggacaaaagaaagagacaaaataaagttcaactataatggctattggctaagcttagagctcctcctataaggaatccttattagttgttagtaacttagtatttcctttgttacaaaaacaaaaaccaccaaatcagaatgtgaaaaaactttattgaacggggacaaaagaatacgaaactgaattatcaaaacaataatttaagtccaacgtccataaaaaccactaagcttttcttgcatatctgtcaaatgttgcgtcgtatttgtcgtattgttgttgtgattctcactttttcacatcattaaaataagttgaattagattctttaacatgttcccatcacgtggccagtttaaaagctacaacagtaattctctttactttgcataatgtacattaatttcggatattgaagaaaagcatgagaaataacgatattacaagacctagccccaagtgcgtatgacataattatg

SEQ ID NO: 35331 - DNA, 790 bp, Arabidopsis thaliana columbia
tgaggtgatcttagaacaaatgtaacccattattaccataagacttattttttctttttcagttttgacttgtgcctttatgtttaagacactagtagccacatttattacgctttttcaccgcaaaatttaacacgcactctctttgtcgatcccacaaactccatctacctaaccatggttaaaaatcatcataccttggttcccttgattaaaatatccctaaatccaagtctctttattatttcatttaaaatcataaatttagtttaatacaattgtcctttttcaaaatattatttccttatttgcttcagaacagtcgtcatagtcatcatatcattttcttcttttcctcctctaaacgaatattaccaataaaaaatcaagtggaaaatatgtaatattaaaaaatctccaacagcttaagaagttagaacctttttacttatctttatttcttcttcttcttcatttttctattcacattctctgaaactcataccatattttcaaagctcttaacccaaaaaccctaagtcttttttttcttcaaattattggttatattaatgttttaagctatgatggatatgactcctacaataacaacaacaacaacaccaactcctaaatcacccgaacccgaatccgaaactccgacccggatccaaccggcgaaacccatttcctttagcaacggcatcatcaaacgccaccaccaccaccatcatcctctcctctttacttacgaagaatgtctcaaaaaccacgcggcggctttaggtgg

SEQ ID NO: 35332 - DNA, 216 bp, Arabidopsis thaliana
ccccatttttttttattctaacaattaattttgtttttcatatgttattttttcaaagtttatatgtctatctttacatatatatatatatatatatatatatatatatatatatatatatatggtctgtatgtttctgtcgcgtacgccagaaactgtttcgcgagcgtctccgccggcatctcagacggcacacgcgccacataaatcttcatc

SEQ ID NO: 35333 - DNA, 474 bp, Arabidopsis thaliana columbia
tcctactcagttcctacaacaagctttttttgtttgctctctttttagtattcatcaaattcagatgagctttaatgataaggtcatattcgtttgattgaatctgcctgaaaatgtgaactctttatgttagaatttcaaaatactcttgaatttggaatattcttttatgtatgtatgtatgttaagatgtacagttttctctattaaaaaaaaaaaagatgtacattttgttgaaattcgaattgggtggtttgttcgaattacaggaaatatcacagtttcagaaagtcgagagtcaacagactctcgaattattcacctagttttgaaaattttgtctttattagttccataatcagaggaatttataacttattctcgttagcacaaagaagctgatgcctatgtatgcaaactttacacaattgattttcaaatcatagaagtcaaggtcttcgacggctgtgggga

SEQ ID NO: 35334 - DNA, 500 bp, Arabidopsis thaliana columbia
  unsure (1)..(500): unsure at all n locations
aaaatttcttttatttatatatatatatatatatatatatatatatatatatatcttatccatcgtaaattcgtaataatgggattatgattatatatcacaaaaacactctatanaaatataggtatactccagtatatatagtactctctcagctcttgaagataataaacttatgatgaagaagaacaacttaaggttgtgttcttgacacatagacgtatacgtttactcactttgatacagagcgttgcactaatttacaacctgaaatgtataacgtaattaatgaagttagtctcatatgcatgggccatcaataatcatataaacaaaagcttacacatactctcacacgtgccttatctctctctccatctgttagattcctcgccaccatcttcatctacatttctacgacaagttccattcttcgtttgctgttaaatacacagcaacatcaataattatttacttaaaacgcatttcaagaaaattac

SEQ ID NO: 35335 - DNA, 447 bp, Arabidopsis thaliana columbia
cgccagtgtgctctaaaggctgatcaagcaaggttttgttgcatgtaaccgattgatggagctaggctcagagatccttcttggtttgtgttttgcgtaagtcagtttctctctggttatggaattgcctttatgtcctttgctctgctgctttgctgggtcctcttgggcgtttggtggttttgtatttggctaggttacgggttgtgcttgtcttttggatggtgtttcgttgcagcgtcatctacaagctcctttctagcttctttgaggtttgaagttgggctacaggcgtcacagtggaacgatcacatgttcttctcttgcgaggaggttaccagttttttgttggtagatggctgaaagtgggtcgacgagtgtccgtgtgtaagagctgttggtcttctttgacttgtctcaagccgaatcacaaggttgtctccttgt

SEQ ID NO: 35336 - DNA, 499 bp, Arabidopsis thaliana columbia
tgaagtgtacgagaatactgtacaataaaatggagagtaaaattttttgtaatgattttaataaagtttttgtaaatgataactttcaaaactgtaaactgtataaattgtaacggtttgataatgggttaccattcaaagccaataatttaaaatggattagtggtccattaattgcataatttaaatcaaagatgcaaaatgttagttttttaattcgtaatctttaacggtaatatatgtactatctcaatggttactatttctaaaaacaatagtttgaaaaaacaagaataatggaaaaggaattcaaaataaataaataactacatgtcacaattcagaccattataacatcgaaccagaccaatatacaaaccggtttggttcaaacgcgacgattagggacagttaatgaaggagatgccacatgatgtaggatccactttgatcacgtgtcggtcgagataaggtcagtgaatggattacagctggattt

SEQ ID NO: 35337 - DNA, 292 bp, Arabidopsis thaliana columbia
ccctaaatatagaaaataaaaaaaaaaaaaataaaaaaaaaacaaaataaaaaaaaaaaaaaaaaaaaaaaaaaaactaattaaaaagagtataaatttaattcatatttagtcagaataaaaaaatcaataacgtacatccataaaaaagttatttcactatcgcaataacgtaacaatttccccccctttcttgatagctagccttggattccttacctacctccttcacccgatgatcttacaatacctaatagttttcccttttcttgttacagctacgtgcccggct

SEQ ID NO: 35338 - DNA, 607 bp, Arabidopsis thaliana columbia
cttccatagatctgccttgtcaacaaaatgaattcccattctgaatcgtgtttctataaaacgagccgcgcgaaagattacttgtgaaaatttgattcagttagaaagaccgacggacgaaacttctatagtcgaaattttgaccgggaaagaaaaagctcaccaagagagtgagaagatcgtggagatgagagaaagagagcaagtgtcgggaggtttacgtgccaagggtttggagtgctaacgtgaacggcggtgacttgtgtgcataatagctattgggattaaagtttcggatcagcgcgacatgggcccatagtttcttgaaaaagcaaatctcaagtctgcttctctcaccgctgttaataacgctaacgattatcaaacatgatgacatacctcgtcaataaaaaaggttcacaaacttgttatagatatcagtaatatctgcatatcacaatacatacgagttgcatatgtctgcatatatacaaactgataattaaatcctaccgacaacaatattcatctcttgataaaaattctcggtccattttctgaggatataaatatgtaatactatgatgtatcctcaatagggcgataa

SEQ ID NO: 35339 - DNA, 863 bp, Arabidopsis thaliana
  unsure (1)..(863): unsure at all n locations
acgcttatactcctcccaaaatagtatagttggagatattaccaaatcaaaccgtcttacggatgaatcttactaccatggctcaaaccggcaacttccaccgttgaaacaccaccaccaccaccgccaccagaccgaccatttccgcttccgtaaccatatccaccaccacgtgctccaccacctccagaaccatatccatacccggtacctgatcccgatccagatccataaccgtatccggatcctcttccccatcctgttggtgatctacctgagcctgccccgtaaccccatccagatcctggagcagagccccaaccccaattgtactcccaattcggcccacggcccgacccactttcgcctggcatgttacctctcgaccatgcaaacggacgtgaaacagaagtctttgcagtgattaaaaagaaaaaaaccaacaagagccctttgatcattttcgatatattcttagggtttattttcttttatgttttacttcaaaatcttgttttgttatgaagttattgtaagaaagcttctgccaccatttataggcaacaacggtccgtaacaagttggtttgatagtgtgagatgggccagnacacacccttttgttaagtcgtatctcgaaactaaagaaattttgttaggaaaaaagattaaacaccatttttttataattgtttacttagacataattatcaactgaaaataagcacctaacacctaacaatataattacaagttcaatcatgaagtcactagctacgaaccccttttatcatatagatactaattaccatgacttagtgcccaaattttttttactatgattataagattattgttaattat

SEQ ID NO: 35340 - DNA, 610 bp, Arabidopsis thaliana columbia
tatatttggtgatgcagacaatgggaatggctactatgcttgatgagataattaattacgtccagtccttacaaaatcaagtcgaggtataacaataacaattaatttctcttaagttataggtcatctaaccaattccattcgtttcaataattatactaatttactttcttttttatgtgaactcagtttttatctatgaagcttacagcagcaagttcgtattatgactttaactcggagactgatgctgtggaatccatgcaggtacagaatctagaattataacttttaattaaaattttctcgtaagactggtgatgtttgctatgatttatttatttcttaatttaactatatggtttgatgtgattataattagatgatttaaatatcgatttttaattggaatattaaaatgcgcagaaggcaaaggcacgtgaggcagtggagatgggtcaagggagggatgggagttctgtcttccattcatcatcgtggaccctttgacttttgttttttgctccctttttttgctttctaattttcttctttttttggatttaaaagatcttttaagattaatcaagaaactcgatccatatgatat

SEQ ID NO: 35341 - DNA, 256 bp, Arabidopsis thaliana columbia
aataccaaatgtagtgattacacgggattgtatagctagtcaacgatcaaaatcgaatcccttagttacaataagaaatcaaaactataaataaaatataaaacttttgaagcacgggaaaaggaattcaaacttacaagtatcagaaaaagaagttactcttctccccaattttgcttctaacataaagtagttgtaaaattgaaaacccatctagttaggtcgtgaaacgcatatgcaccttttcgctgcataa

SEQ ID NO: 35342 - DNA, 543 bp, Arabidopsis thaliana columbia
aaaaaactataaaaccgaaaaaaccaaaccaaaaccaaaccgaaaaaacaaacgccgagccctataaaaaacagtggatataaaattctaaagactgaaatctgattatagtacagtttcgtaatttcgtatacgttataatagaaaacatgtaattgctttatgttcgtcaaatatcacaattttaactatactatatataatattaaaatctcacacttttctgaattgccaaagtatatatacatgtgtaattatcactcaataaatttgaaatctaatttacatttaaatcttcatagttaaaatctctaaaacaaagcttcattcaaactaaactattgtaacgcccgtgaaccggaaaatcggttagggtttgtttttaaatcatctggtttaattggttgggttaattggaaaccctaaagtgtgcctataaaagaaggaaactcgaaattagggcagaatcgttaaccacttttcgttttataaaagagaaaaaaagagaaaaggagaaggagcagaatcgttagggtttggaag

SEQ ID NO: 35343 - DNA, 513 bp, Arabidopsis thaliana columbia
caagtcactgagatatgaaaattgcataccttagaagcttctctagaagctctccgatcatcactttttgatctcatttcacctgtccaagaacagtgtttttcggtgattgtagtattcgatctataaaagctacaagctttttttatcatcctttctttgttgtctcggacttttggcaacacgctgtcttttgtcatccttcaactttccctcttcttcttccctctgtctcttcttctcagctattgctgcctccatcttctgcttcaaagtcatttctgactcctttttctttcggtctaaacggaaccgcttttgactagggtttcatttccctgtcctctcaaaccaaagggtgatacacaactagctccaacacatgacaaacggtcagaattttctgatacaacttggtgatcttcatcaatttgactcctctctacacttggctgttctggtttgaaggagcacgagccatgactcatcgatccagtttcctttgacaaactt

SEQ ID NO: 35344 - DNA, 560 bp, Arabidopsis thaliana columbia
cgtctccggcttgtataacagccgggtacgaatactccattcccggagattcctccaacgttaaaatatcggtccatgaatcaccgtcgtctaaagaaactcctaatttgagcacacctcttgagtctgtgttgtaagcaagcactagcctaccatccttaagcttgactccatcaatacctgtcaacattttcttcaataaaatcgcgctaaaacgaagactagttatacaatgtgtttagtttcgatttcaagaaacctgaatttgggtttgggagaaccgttggtactgcaaaactccagttctcaccgccatccaaagactctgagatacagattctgtcaatgccagtaaaggatctgagtaaaatccgtaagttcccagctgcggtttggtatggaactggttggatcacgctaagactcttgccttgaatgtatattggccctttctttctccatgttctacccgcatctgaagtgacctgaatcaaccaacacatttcagtgtaaaatcattgtagcatactctagatatagaaacaaactaaatagtttta

SEQ ID NO: 35345 - DNA, 512 bp, Arabidopsis thaliana
tgtgctttggctggactgattgatggaagagctaacattgttttttcttctcttttgtgagatgcacttttggttatcctcataccaaaatgcagattttcagttgctttttctatccaaatggactgcaagaagttcatccagatggtcgaggagaagaaacgaagagttcttgagaagcaagaagctcctttgaaatgggagcagaagctagaggcggctgcgaatgccaaagcagacacagaaactaaagtgaagagatcaaagggccctaagagaaaacaaatggctgcgtctgaatctagctcagaaagtgatagtagctctgaggtgagaagaaagtctagaagatctcacaataagcaccgaagacatgcacactctgattcagatgacagtgataggaggaaagagaagaaatccaggaggcagaaaagaaggtccttgagtccaagcgatgatagcactggtgattatgaaagtgggtcagaggatgagctgaggatgaagat

SEQ ID NO: 35346 - DNA, 501 bp, Arabidopsis thaliana columbia
gtcatgttcgataaactgtagaaattagggtttaagaacagagaacccgtcgccggaatcttctgcatcgcacagtcaccagaaaagctgaagaggatgacgtcgccggagtcgtcttcttcaacaaacagtaatttgcagtttttactggatttaggtttttacacgattctgaaaaagtcttttaaagtcaaataaggtaactgcaaattcatctggtgcttaaaccgacgagtggtttggttaatgcgggtttggtttgaagacaatcggttagggtaaaatagtaactttgacaagggaaagtgcctaatgtttttttaagtgttgaaacacgtataatgttttgaaaaagtgccttagagggcaatattctctaaaattttaaggttttttacggttgtgtctttttatcgcatctttccaataaaatattaacggctatttcttatttacaattatatttgttcttctacagtcttatatttttggttttgaaag

SEQ ID NO: 35347 - DNA, 551 bp, Arabidopsis thaliana columbia
ctctagaggatatcgttttggagcatgaaaatcttgaggttttgagtgatttaatttgttactatcgtttagttaagttatccttgtgaatggcgtctgtctgaaacacatcaaccattgctattagtctgtttgaatatagtttctttgtaggcattgctttggcgcttaaattatgtagtctactactaagggagatatatcggctggaaataaccgtctcttgtttgtaattaactttgttggactgaaggtgcataacgacgagccttgtaacacggatggtgaacatgaaattgaattgttattcccattcatgaaagatactcgtgctgagggtatgtttttctcactctaatttagacacagtgatttggtttgctatgaggcttgtctttggacgattgtatctaatattacggtgtaatgttgagaagcatcaactgcaaagaacgttactggaattctactcttcactggttctgtattctcttacgcctacttgaacgtgaaagaaccagttcacaagctattgctgatattaaggtact

SEQ ID NO: 35348 - DNA, 227 bp, Arabidopsis thaliana
atgtagagttaaaaaattatgtgtttggagttagattgacttccttatataccgccagacacacgaagccacacacccccgcccaccccccccccaaccccccgccacccccccacaccccccacaccccacccgcctcctcccaacacactccaccccccccccccccactccccctccccccccccccctccccccccccccccctccgcacctcattctcgccc

SEQ ID NO: 35349 - DNA, 573 bp, Arabidopsis thaliana columbia
aggtacttaaagtaaagatgatgaaatgtttgtagatggaattgccgaacttgtttgctgagttcaagtattacatcaagtaatcttcgaccttgtgactttaagctgggaaaggtgttaagttctctacagaggtttaggtgcagctacaactttagtttcaggtatgtcattgcatttagatttagcttatgttcatgttttagaagcattcaggcgcattcatctgagtcttctgaatgcagtatctatgaactcttttttctttctttttttgtatttatacctgacctcattctattgattgtattcttcacttttacacaagtagattaccaatttacggtgagggtgggtcaagtgcacaaacgtttactgataccatccgtaaagaacttgcaattcatgcaaaggagctaaatagtgcaaatgcaatgattgatggagacttggtgaggagacagtaatccctatgcttttatatatgtttctgtgttacaaaattactagatgttgaatttttgaatcgttttggagcatgaacacattgaggttttgagtgatttaatttgt

SEQ ID NO: 35350 - DNA, 432 bp, Arabidopsis thaliana columbia
  unsure (1)..(432): unsure at all n locations
tccccaattaaagtagaggcgtgacacttgtcagcttcattaagctccaactcaaatgtttttcattatctactttcgtcatgattataaaacataggggatgtttaagaaacgaatcaataataaagggtctattttacaatttcgaaagtttcccccgaccaaaagaaaacatcagaccaaataccgatctacggctacgaatcaatgtgaaaaaagcatatatagatgctttcgctanacatatattttttaaaaattaaacttttttttttgcacggttttgggttctctaaaaggctgaacctataaaagaatatatagaaatagaacagagaatatgtaaaaggatctgaaaaataccaactttttcttacttcgtttcaaaatacaaatttgtgtcctcaaaagctgctattgctgcaataaagt

SEQ ID NO: 35351 - DNA, 389 bp, Arabidopsis thaliana columbia
tagtaacgtccgccagtgtgctctaaagccattatctaaaagcctaattactttgaaactcatgcatactttcaaaccttttaccacaacacacaaccgctgtaccattcacttctctgtgtgagtatgcatatcggcgtcagtttctacgcacacgtagacttagatgtgtcctacgatattgacatatatggattttatacacctccgttgacatagagcacttagaattaatctggtatgttttgacctctcgaggctgaaatcacagatcctttttaggcttcatatggttgtgctcataatcatcttgcaatcgacaacttagcgatctggcaatattccatagttgagatatccttggactgcaccacctagttcaagttctt

SEQ ID NO: 35352 - DNA, 617 bp, Arabidopsis thaliana columbia
tgaagattttcgaatttgggaattttagggcatgagaattgaaattggggattttagggattgagaatcgaattgggaattttgttggtttcgattaaacacaaaacgacgtcgttttgtgtttaaacggattaattaacgcctgttatcgactctgttaacgactgctaacgtcgcagggtttttgggcggatcaacgtttttgaatgtataaaatggccggtcaacgcttttactaagttttatttgaccatatatggaattcatggtttaaatggccactttttgaaagttggtgtattaaacaacatttttcccgatcgcattctatatttttaaaacaatttttaagtcacatattttaaaatgattagcaccagtcgacaaaacagaaatcaatcaaacgtgagaaagattaattgaatagaaaagaatgtagacagtttataatccgagcaactcattggataaagcaaaccacaacaaaacattgttgtcattgtaataaaccttagtccggtcttacctcctattagactataacaaacaagagtaccagtagacttaggcaagagagaagaaagtccgtgaaggataagagagagaaaacgagagag

SEQ ID NO: 35353 - DNA, 1223 bp, Arabidopsis thaliana columbia
caaaagttaacccctcccttcattaatagtaaacttcattattagtaaagtttatgatttttcttttcaagtgttggaaaaaatgtttttttcttctattgcttttattatgtgtctttttttgtttagaatttcgatttttttcttcaaatgttaaatgacattttatagcttaatcgaataaacagtttcctgatttttctcgtttctttaggtccctttcatcacgctcttcctgtcgtccatattaggaatattcaatttgacctctcgctatttttggtgaaactttttttctaaaaaaaaaatttctaagttttttttgagaattttgctaattttggagaatagttgttgagtctagtcatatattatacatgattcatgatactaactcgaacgactaaactttattttttcttatataaaccaatttggttatgatttgatctcatatcaaataattgacttgtacatcaaatgacttatagtagcacgatagtcaaatgatagaataaaaataaaatgatgggcttggaagattaatgacgtttcagtttttctataaatatttctgactcgtccattataacaacttcttttgcaaacatgaaaacatgagatatgtagaataataaaaagaaataacagataaaaacgtttaaagtgataccattgcgtatcaataaagtttaagcgtttaaagatgatgcaattttcaattatatgcactcgaaaatagttatacaattgagtgacttattaaatttgacatgagaaagtacggaaattttagactaaaaattactacaaataaaccaagctatcgagacaaagaataatctcagaattagaatactccatcgcaaaatataattatcacaactatttctatattgggttagcatgtcaaagctaattcttatgacgtgagatattcatttatcgagtttagagataatttttatttggtcatagttttgtcatgacatttattttcgggaaacattcttctgacgtagaaaccacatattaacatctttagtgacatttccaatattagaatacgatgtgagttgtattcattcaaagttctggaatcttaaaaccataaagagatacaggtagaaatctatttgttgtcacatttatcttatatagaaaatgaattagagatgaagcgtagaaattggtgacgttacgttatagaagaagttatgttt

SEQ ID NO: 35354 - DNA, 563 bp, Arabidopsis thaliana columbia
taacgtccgccagtgtgctctaaagaaaataccatacttgatcatcagatcctttgtcaacggtgcagagtgctcaatcatgtgtttgcggtaagcttcctcactcatgccttgtttgcggtaccgaggatagtgaggcagaggagacgatcctcggaggtggtggagtttgttgctgggggattgggagtggacattttctttgaattgatgcgggtgaattctgagctggtcgatgtggttgatgagtgaggatgggcgagtggaggctccctatataatgcaaaatgacccgagacgagatccggacagcggcgggaaattaagcacagatcgggtcattaagctgttatctacgacgatagatcacatcgaggcttacttcgtcgcgtcaaggatagtgaaatatgcatagaccagtgttttcatctgtacctatataccataactctaacaaccgaaagcaacagcgcacgcctttcactaccggttaacatactgcctaattatagtactctaatagccagcttcgcagatcgccgatggtaggatacccaggaaca

SEQ ID NO: 35355 - DNA, 575 bp, Arabidopsis thaliana columbia
catccaaaaaccctctttctacaagcatcaacctgtcatttagctctcttctcttcgccgctgctgctacatcatttttgctatatgattttccctttaacttctgcaaatcaatcaccaaaacatgtataggtgagacaaagaagcaaaagattgaggttatacgttaattagcaaaaccattagaaacctttgcttcatctgcggcttctttggcaaccaaagagaactcttgtatcgccatgcttaagggatttacagagactttcccttctaagagcttgctcagtttatctctatgtgcctgaatcattacacaaaacataaactcagttttcctactattctacgtataaaaggtgtgagtaaaagaaatctacctgcaattggtctgcataagagatgtaatcgaatggtatgagtggctcatcagccaagagaattcctaaaagtccccaaattccagccactgataaatatagaaagcaaagaagagagagtgaattttcttcataacatccgatgaaaacagaacaaataactagaagataataatagatcaaaagagagaagtg

SEQ ID NO: 35356 - DNA, 496 bp, Arabidopsis thaliana columbia
acgacttggaagacacattcaatccagctttacagacttaagtgtttaacaaaaaaaatactaaatctaacaagtgtatttcatattttaaaattatattaaaattatttgacatatatattgaattaagagagtcaatcctcaacaaagccatcgtcttctctctcagttacaactatcgaggcagctccccttcaacctttttccgacgccagtgtagcttgttctcaccggcgtcgggatcctattctcttcttctttcttcgacaaatcttctcatctttagttttctgttttaattttccccttttgaagtttttccctcttttgttccttaatctaacccatctcgaacacttttactcaatctgtttcttccaccttggatctgggccgctctctcccattaatcgaagaaggaaagaggagggatttgacaaagcccttctatgacctctgcatctcagcttctttgacagatctatatgcccagaaa

SEQ ID NO: 35357 - DNA, 378 bp, Arabidopsis thaliana
tggatagatacacatggatagagacacatggatagatacatatgtatacaaaaccaaaacggctagaaattgaaatgatagacgatgataatgcaaatttagacatttattagtgatatacacatatatctagtgtattgtagacacaaatagaaagatgatgatggacgttcagtcggttggcttttgagctaattagtagctaaatgttttcttttggcagagagctaagtaggtaaagttactgacatagttggcgatgattgaattggtttatacagttcaatacaacacgttaaatatatatatatatatatatatatatatatatatatataagtttgtatatgggtgtagactcaagggtgacaactaaac

SEQ ID NO: 35358 - DNA, 573 bp, Arabidopsis thaliana columbia
cccccccgtactcaagatcggatcaacctggctagtcattccatgtgcagaataaacaaacgaattaattaatgtaattagtcaagtattttacttttgaaatataatagtaatttatatacagagtgttttgacgatagatccaaatgaccaggaaccggattaggattcattaggtataaaataatatagggatttgttaagctttaagcatgagttaacgtgacctttcacacaagttaaaggacaatatggctcttgatacttatttaaagagcagtaattatgattaaaacaagggaaaatacaattcattaactaagttcaatgcttttattggtctgtatatgtctaacattaacaaatcagatacatgggatattcgaattgacctaattaagtcgctatactaaactaataagaactaagaagagatagtacatttttttttatacgaccatacctttatcaccttctgtaccacacatacatgtcttaagtacgtgctaatcttgtcttaaccttagcaaaatgtttgacattgtgaaattaatttttgactttataatatga

SEQ ID NO: 35359 - DNA, 441 bp, Arabidopsis thaliana columbia
actcatcccctacagaaatcaaaaccattggttcttaatcagatccaattttctccaattctagttggatacactcaattcaaaatctggaaaactgtaattagaactctagaattaggtcaatgactcagaatcaggaattcgaatgtcggtgattcacgaaactaagatttcaggaagagtgaatctggagattgtgtagagatctagatcaaattcgatcgagagcagaatcaatatcatttgttaaacattgatgaatctacataaaaacaggattcgaatgcagaggaagagatcaatagatcaaaccttcgaaagttcatttgattcgtcttcgagtctactctcttacgaaggattcaacataacagacgaatttagagcattgtaaaggaaattctcgatttggattcaattccagaagcgtaagttttcgtg

SEQ ID NO: 35360 - DNA, 801 bp, Arabidopsis thaliana columbia
taaattttaaggattgttatttgttaaatatggatgtcatgtacagtgaaaaagctagcacaagaatcattgctttgacttgtcttcttatttgtacaaatggtatttcgaacttggaacaagcatgacacacttcacgtagtacacaagacacacattatacagtattagtttgtatttcacgcttaattcaacaaaggcatagatacaacaaatggttatcataattggcttaattaactcatatcagtaattgtattttctatttttcgtagttcccatcatcatgaaatacttatattaatttcaaaaataaactaatttacattgcaatttctaaaactatagtctcgaacgagtacgaaagggtcaatgttttgatcttgacctatatttattggaaacgaagacaagaagaaaagaaacggtccgacaccgatcaacttacatcacacgacaaattaaatgctccattctagacgcatatacacgttgtcgctaatcacttcactttcataatcttttcattaaccactcttaaatcttaataacatcaccacccaccaatttagcatgtaattttaattttaagttaatattcaagtaactatgaattattcaagtgaccatgaattattcaagaatgccaataatcaaggaaactataaaaaaattgtaacaaatataacaccaacaataacacgataataaagcatcatataaaacactataaactacataattaaatagtacaaaagggacaacaatgacccaaaaataatcctagtgaatctatcgatg

SEQ ID NO: 35361 - DNA, 600 bp, Arabidopsis thaliana columbia
ccaagtattgttatatgattctctttttgtttacttttctttatgatcaatcaaatcacacaactcagaattttcatggaaacatctggtttttttactgcagttgaacgcttgacattccgagagttcttcaatcacatgttccttcgagagccaaggtaaagtctgtagattttgactaaaacaaccttcatcatccaaaagctataatttttctccccttaattatgtcatactaaatgttgttagacaaattccggatgttgagcattctggttttagtacctgtacggggaaatcactgttgccctccgcacaaccgagtactagtacaaaccgttttaaatcaagtgcagagaatgttcacaaacatgggagttcctctagtgcctcaaattctcaaatttcaatgccacatacctcttttgagaagactagaaaagatactgagggacaatgctcatcaaaccaatctggaggtttgttattcgcaattttatgtctgatctctgttgctctgtataagatcgtattactcacatactcttgctatgtcattcgtgcagttgttgattcctcgagctcatagagagagagtat

SEQ ID NO: 35362 - DNA, 581 bp, Arabidopsis thaliana columbia
tatgtatcggttgagaaaagcatcactttaatcaacataccatttgaatgatatttaaagagatagatgagtgaaattttggagatagattgattccaagcagtcttctcttcttcgtgtttctaatagtttctgtgaaacacacaatacaagttgtcaaaaaaaaattagggtacactaaacggagttcgacacttgtatcctataagatagacatttaagaaattacgtacactacaatagctacaaatctctgtcttatgagattgttataagcaaagtctctttcatcctacaaattgttgctagctagttgattgaaagaaaccgtcaaattagttttgtttatatttttaatttcattacttagttaatcaagtttccattacgtgtgattgatgtcctcttatagtttcataacattgtcactttggaattatttaatagaactattaatttgttacgagtattgtgtacaagcaagcaacctttgatctatattttgagagttcaagttcttatataaatggtttgaaggcattacgctcctcaatgcttattagcaacaatgacagtaatgg

SEQ ID NO: 35363 - DNA, 483 bp, Arabidopsis thaliana columbia
ctcgaagaattgcaattgttagagcttataaaaagtgcttacgctgatgatcaagtaatcctcgggttgaatcaaaagttttcttgatatgatcaaccatttgctccctatttgcagagttattggtctgaagaacttcttaacatccgacaaggaactgcatattatcgaaacaaataactcttcagagatatgatctttctttcaccacagaaatcaatatggttttacaaaagatcaaattttctcaaattacctaaacgggaagttagttttggctcgccagcagataggcagtgtttcgtctgaatcatcgcgtgttagttctaaaccagaaacttcttgaagctttcaccaacaaaaatagtaaaacaccattgacccgaagaacttcatctaaaaaaggctgattttagtttctgaatttgaatacttactgatgtgaccaattgggagtaagcctggttagggaagtatgtatag

SEQ ID NO: 35364 - DNA, 381 bp, Arabidopsis thaliana columbia
  unsure (1)..(381): unsure at all n locations
gcagtgtgctgtaaagtgagaatgcaaaaggagaatatacgtacagtctaaagaatgtaagcgagtgtaaacacacaggtgattagagtcgattcaaatgaccagacggttgattattgtgaagacctgagacggggaatacactacgaagacagttaaaagatgggtggaattagtgtagatantaggtnacggtactgacagaagtgagtngagattgcttancgtgtgaagtnntggtctctcaaaagggactaggcggattttaggtgaaaatgaaaatggggagagcacgtaggctggctttaattctagtggaattgagcattaaaaagggacatgcaatagtatcgacatcagtctgtgtnnaggaatgaagga

SEQ ID NO: 35365 - DNA, 553 bp, Arabidopsis thaliana
caccaccaccaccatactactcaccttcccctaaggttgactacaaatctcctccaccaccatactactcaccttcccctaaggttgactacaaatctcctccaccaccatatgtctacagttctccaccaccaccatcatactcaccttctccaaaaactgagtactaagcttcacattcaccttcgtattacttgaaattgtaatgagattcttatataagctaccaagttttatttcatttcatctttgcttttgttcttcatgatattcatatctaataaattttaattctgcctatttgattaaatattttgcttcaaaatcttcaaatggtttaatgcttttacttttatttgttttaagtttgcttgcaatctatatgaagttctttgcaaatttgaattacgtagttcacattcttgactttgtagctttagataattatgtaatcttataacatgggacatgtttatggactgcatacctaaattgcatggatttttttaaatcattgcatcctcaaggttttttcacttaaggaagttttttt

SEQ ID NO: 35366 - DNA, 422 bp, Arabidopsis thaliana
tatacagaacaacaagttcgagattaagagtggtctgatagatagaagagctagaagactatctgcatctctattcctatgtgctctctatgcttctgtcatcacctttctttctctatttctctctacatattacatactcacgtatcttacttatacacgatgatatgtctttatatatatatatatatatatatatatgtatattatcttatatattttcttgttttggtgtgagaaaagtgacttctttcttccaataatcaagtttttgtttctcgggtttgcataggttcatcagttcatgttatatttgggcattagcatgtattatataccattatacgcatccctagctagacatttgaaatatgtacaagaacacataatctagtactctttaagaaatatcatatataata

SEQ ID NO: 35367 - DNA, 522 bp, Arabidopsis thaliana columbia
  unsure (1)..(522): unsure at all n locations
cccacataattatagtgttatctttaactaaaaagtgcatcaggcttttattatttatagccaatatatatatatatatatatatataaatatataattgtatatttcattgttatatatatatataattgtatatgtcattgttatgtaattgtgatagttaccaagaaggaaatatctaattgttataaaaaaaacnanatantcatgantgttgacgtagcnatgcaatatatatagttttgttaattaaattattttctatagataatttcttacaaaagatattattaaccaacaactgttgataaaatgatagatatacgaataaaaataaacaaattatatcaacacatacgaaatgtattcaatagttttaaatcaaatcttaattaattaagattttcatttcagttgcacaactatagacatattaataacaaatttgatttcttacatagttttcaaaagtgtgtcgcaaataaacccganaagggatgactaagcaaggggtttaggtga

SEQ ID NO: 35368 - DNA, 109 bp, Arabidopsis thaliana columbia
ataaggtctgaacgttgattcagacatccttttaaagacggaggtttctatggaagcagcgaatttcaccatgtgggttggatttggcttgatcgctgtcgcagttatt

SEQ ID NO: 35369 - DNA, 475 bp, Arabidopsis thaliana columbia
ctttgtttgactctgtgaaatgtgattgcatcttgattgctagcatcacatttacaccaatttagattgacaccttaaatactgcaatgacataatagtaatagtaatgtgatcagaagttatatactcaagttatagatacttgattaccgtaatagttatatacgcatttgtttggtaaacgataactatttacacttgtttgcatatcacgttagtgtactaactatttatacatccaaaatactgtagaaattatgtttaaaggaacatcaaagattttgttttttggtctgccaaatatttcattaaaaacaaaagtttttagaaatttaatccaacccaattttcaaatatacttctcttttaatagtatagggatttattatacctttttggttgcattttagaagttttttaaagatatttgtgtgccagtttctatataagatttatatttagaaacattgattga

SEQ ID NO: 35370 - DNA, 511 bp, Arabidopsis thaliana columbia
taatgaaaaaaaggaccgtcaatattaaccaaaaataaagataaaaagacacgaatgtaaaaaaaaaaaaaccgtaaatattctaatcgacacaactgtttacgataaaaagatatgaatgaaaaaaaagtaaccgtcaatattttaacaaacacaactgtttacgaatgaaaatcagttttacgagaagttgcgataaaaagacattaacgaaaaaaataactttcaatgttaaccaaaagttacgataaaaatatacgaatgtaaaaaaagtaaccgtcaatcttttaacagacaactatttatgatgaaaagacacgaatgtagaaagtaactgttaatattttaatagacacaactgtttatgatgaaaagacacggttgtaaaacaaataatcgtcaatattttaacagacacaactgtttatgatgaaaaaatacgaatgtaataaagtaaccatcaatattttaacagacacaactgtttatgattaacaaaatacgaatgtaa

SEQ ID NO: 35371 - DNA, 398 bp, Arabidopsis thaliana columbia
  unsure (1)..(398): unsure at all n locations
ggccaagaccaaggcgccggcagcgggaggaagcgcggcaaaaggcgcgccagccggcaaaggaaggagaagacgcgngaaggccgcagcggaaagcgaagcagacgcgagaagagcgnaggcgaacgggggaagcggcggcgcaggcaggggaaacacacacacacacacacacacacacacacacaaaagcgaagngagacgaaacaagtgtgagccaggaaaaaaggcgactatccggaaacggggcacaaacccgaggcaagagagagnncacgcgcgcagaggcggcgccaagaagcggcacaaccgagacagggagcaacaccaccagaggaatgatcagatntaggaccaaggggatgcgaangagggaacgaaaaaaagagaacagagag

SEQ ID NO: 35372 - DNA, 607 bp, Arabidopsis thaliana columbia
cttcatcccataaaagagagacattttaagttcgacgaattattgattatttctggatccgtgacccgatccagttacttcttgacccgaacgtcagacgcgagtcgcgacgcgatcgcagaatggtacataacgtcgtggaatgtagaagcttcggcggttttcctccgcagctgcttagccttctcctccgtgagacaacatcgcagagacctcttttcagctttatccagatctgattccagattcacggttttgttgacgtaatcaggttccgatgacatgccaaaaagaggagcccaccatgaaaccgacgaaacaggtttcttacgggctggatccgattcggaagatgctcggatcgaggaaagagcggacgaggagatgattgtagccattgttaggtaaaatgtggttatctgagagaaagctcaaagctgtttttaggaagaagagaaagattaaggatttgtaaatttttggattaagaaaagaaaatggatatgtagatatttaggtggaatcactgctatgcggtgtggttttttatagtgtggaatgttcgtttcctggtttttatcacgtaagggtattttcggaaagagtg

SEQ ID NO: 35373 - DNA, 523 bp, Arabidopsis thaliana columbia
tagtaacagtgtgctctaaagtctaaagtagccccatcgatctctgaggatctttagatcattgggatccttagggctttgggagagttgaaagtacactcgggtctgtttcttcttagttttgttcattgattgctgttgtaatcgcttattctaggtctatcaaaataacaaaagtcagagtcatctatgataacgtacactggtttttatatattgttttgtgaaatatagaataatcaacataactaaatgagtcaatctatagcaaaggttcaacgttgattaccatatacgaatctgagttaaacatggctgattatgttaatggttcgcaatattcctactatggtaatcagtatgttaatgtaaaccaaaatggctaatcgctattttgattccgtctcaacaagtaaggatgacaggtcaagggaacttattgttggtttgttgtgttattgtgttgcaggtcccgagcaactccatacacagaagctgagattaaggtaagcgtggcaagagt

SEQ ID NO: 35374 - DNA, 575 bp, Arabidopsis thaliana columbia
tatgataaagcttttatttattataatcaggctcgactcattagggtggagcgaaagtgcgacggtccaaaccttatgcctatttaaaaaaatttacataagaaaaagttttttattttttggaaaaaaaagttgtcaaaatataattgataaaatccccaaatttctttaaaatatatattaaaaggccctgattttatttctaaatgacttttatataccaaagagccaatatttttgtaaaatgttaaaacactcaagatatacttcaaaataattgcaaaagatgcccaaaaaaagttttacctaacaaaaggtccaaaaaaaagcaaacatttaccctaagactcaaatttatgttgggccgggtctggttattattaaaacgatcaaagctagtgttttgttaaaccgcaattttgtagcatttcatatgttaagatttgatggttgaaaggaaaacaaaaattgtgaataataatggttatgagatctaaaacatcaaaggaaaatcaagaagagaaaggtataaaatattgaataaataatatgaatgtggcagttatagtttgatg

SEQ ID NO: 35375 - DNA, 558 bp, Arabidopsis thaliana columbia
ataaaaatctaaaacacacgcacacactaaaaaagctgccattactctctcaaactaattcactgccctaggaggcaatgatatggctataaatgtgattgccaaaaaagttatcagctttctaaagaaaatagttagatatccaaaatagatcaatgacatttccctttaatcaatcgttttacttagtaattacaggaattacctgatatggtattaatcttattaaatagtaaaaaaaattaacgcagaaacagaaacatatttcaaacagtagttcagaacattaagatgagtttttttcttcttcttaaaatagcatttttatttccattttaaaagaataataattaacagacaaatttggcaaaaaaaactgttgacaattggggactagtataagctacgtacgaacactatacactattgaactttattactataatatcgtgaaagagtttgtatttacctaaataaataatagttttgatcaattaagtaactacaattgataaagcaattaacttcagtgtgagggttcaagtggtatttgcacga

SEQ ID NO: 35376 - DNA, 567 bp, Arabidopsis thaliana columbia
  unsure (1)..(567): unsure at all n locations
ttaagttatgtgagcaaaatggtgtgtgatgaagttatcccaacagctaaagatttaaaacacttaaacttaaaggctgcaaagtcatgaatggaacctaccagcgcagagttacatgcaaagactggtcttttattcttagagacgacaactggttgcactgcatcctggagagaagggaatttactttggctccaaggctggcgttgcatagaaacgcttgtaggataacgcctttgagagtttcctattacagacagcaagtagaagaagagctttagaattccattgttcattcaataaaagcaagctcgaacgatgggactaaagcaagaatcaatgctacaacaacactcactaaagctctgagatatcaataacaacaacaagtctagtttcttcaatttgtcaagagcaatccaaactcaatttcaaagaattttccaaagaagcaattgtaaacttaagagccaacaagtgttgagatttagaagagacataccattactcgtaaaagatttccacgaggagcgaggtacacgatgtttgtgtacaatcacnatgatg

SEQ ID NO: 35377 - DNA, 635 bp, Arabidopsis thaliana columbia
ctcatggttctcgacctcgtctcttctctagctctctctctcctgctcttcaccgtcacagctcgacgctctcctcgcctccattttcctctccaagtcccaggttcatcgttccgctccttctcctttttcgttttcctttctgggttcctggatattcggcgaaatataagaaagtagcttcgtattcttggttcagtactttggcttgagttattgaaattgccaagctctctaatttcgtgttaagtttccgataaaatggcctagaaattggaaatttatacttggagtctcttgattctagccttttcataaagtatctgtgtttggagacttatgggtttaggttattttagagaaattgctgtgaaattttgcgttttgagtgttatcttaatcagtggttttcatgcggttctgaattcttttggtttaaagtgaatattctgtttgcattcctcaattggttgtttaattgagttatctttcagtttcaggttaaagtttcagttaaccagtgttttgagtcaaagactgatacaacggaatgccatttcatcgaggttcttgtctactgaggcttcccaagagactaccacatctaagggttacagttctgaacagattcaagt

SEQ ID NO: 35378 - DNA, 641 bp, Arabidopsis thaliana columbia
ttgattcagctcgttctactgtacgttaaaaatcgatgctttatgagtcataagaaatattcaagttttgtttgatagataactatgtttttcttatgcagcttgagaaaactagagttgaacaagtggagaagtattttcctaatttgatatgtactcagagccttggtcatgtaaggagctatatcttttttgggattggtttgacgttgtgatgtgtagtgtaaagaagttgagttttgtgaattgcagatggcgatttcgtctgagcgtcttcataagcagtcagttgttgtgaaacagatatgcaaattgtttcctttacgtcgagtatgtgtattagtttgataatctgtttctgtttatcatctttgagtactgtttatattagttgctctgtactgtatccaggttagttttgatggagagagtcagaacggttcagttcgtcaatatgatgtaatttgcaattcacgtcttccgagtggtttggatcctcattctatcccatcagaagagcttgctgtctcgttggggtaatgttttgaccccctttcttaaggctatgcatttgggtttgagtccgtggtatatatcgggtttcataagacaaaattttgacatgtggagtaggtatatgg

SEQ ID NO: 35379 - DNA, 622 bp, Arabidopsis thaliana columbia
aagtaaatttgctggctagcaggatcctcatgagccctcagagcgtatcgaagactagcaaatcccttgagggtgtccatggggttcatgttgtatctcattctcatttcggatttgaaagtattggccaagtctctggctttgagtctgcggatcaggaacaaagcagagacttttcattgagtaagttcattggttagggtgatgtctagttcaaagatgtatttggaaattagatgtttaattaagtgctctttcttttatcttctgtagacgtgtttggcaacaaagacctccatgcctaagacccatccattgcagcatccatggtactaatgctactgtgtgccttccatcttgttttcatctcagtgtgttgtttcgatcttttggtattcattacgatatctgactttgttgacaggtgatcagagtatcttagaaacagctgctaatgtgatcacatcgatccctttcattttcctcggtatgcaggcaccgaggtaatcatccttttcttgtctatctgatcgtatatatacagttttatgttctgtgaaacagataattgaatatggaagatatatttgcgactgtaggaaaacctgaacatgaaggtata

SEQ ID NO: 35380 - DNA, 512 bp, Arabidopsis thaliana columbia
gaaagtataagaaaataaaaaaagtgagagaaggtggatctttcgttgtatacgtgcacgttcccaagatttatggttcgatctcgtgaccgagacgcagatacagtaattgaaagtgaagttctgaatacggcgtcgtttgaggagtttgactctcaacgatcccgcccaagacagcttaacgaactcttaaattaatatcatttcaaaaatacttaaagtttctgctgacgtttaatatgataaccaccattttagtagttttgcaaataaataattgaattcctaggagctacgatgctactccatttcggtaaattttgtatgacaattatttttcctcgtattaaaacgaccaaaatatactaataataattgtggctttattatgagcaaaatgatttagttgtcactcttataaaaagtcgacgatactttttcatattacctgcgatatattaataatcagatttcttaaaaaaatcttagccaggttatttcttgttgaaaaa

SEQ ID NO: 35381 - DNA, 533 bp, Arabidopsis thaliana columbia
tttcgtcactatgggaagatgttatagtatatcattacattgattctcacgtaggtttttttttctatatttttgtagggaaatgcaaattaacaaagcattttagtacgttcatttagtgaaagggatgtggtcctctcctagcgtgcgacacctgttccaagatatgtaagaataaacaaatgttattgtaacgtattattgtgaaaagcatccaatagtggataaccacttgcttatgccaaagattataagatatttaaatcgaggaaacgaataaagtaaaaaagctagaaggtggtggttataaattacaagaaacgtatcaaacaagaggcgaagatgacatatattgacatgtgaaattgaaaacatatacaagtacgtgttactgttttatttgtgcgaaggtcgttgttataataaatttttattgtacggacgggttatttatcacacgattaaagttctcttcttttatttatcgcataaagttctgcttcttctgtggaaaatataaaacgagttttgtt

SEQ ID NO: 35382 - DNA, 580 bp, Arabidopsis thaliana columbia
tggagaagaaaggatcaaagaaggccaagaaaagataaaacaaaacaaaaaacttgacatattccatacatagcacaccaagcaaaagaattccatttagatataatcaaaagagtcaaaccttgacggaattgtggacaagctgaatagctttgcgacaatcctcttcaaccttagtccaatcccctaaatttgatgcaagcaaagaagccaaacatgaaccataaagtatttgggcattaggattgcctaatcagaagtatgtataaaatttgcttgacagaacaatactcactttcgcttcatgtggcaaagtgctcgattggtccaataagcaggaacatttggagacaaagctattgcctactcaattacacaaaaaaaaaatgataagaaaaaccactacaattgaataagcctgaagtttcttgatgacttataacgatgagcacataaaagattcataaattccatcaaatgtctattctcgaattgtacactccatcaaaacctaatttggatgcaattaagttctgattcacaacgaattgccaatttcgagattataatcaagggttta

SEQ ID NO: 35383 - DNA, 440 bp, Arabidopsis thaliana columbia
ttctttaactacattcttagttgttgaaatctagttatagggaaaactcgaaactgaaatagggcttaagttgttctacataaaccccaccaaggtaggattgttaactaagctagggttaaagttaaagtacgttaatatgttgcagaccatatctttttcttttataaaacggtatgccgcaaacttactcacttcactattaactacattattcttaaatttcaactataccatcttaaacttttgattaacaattagaaagtttgtgtcactaagcttttgatgcattgaagaaagagagagagaagaatgagaagggaaccaataatactcaatagaatggcctccacactcttccccttcctttgactgctctctctgccccctttgaccactttctctctcacttaaatgcttccccacgcacctctctcttg

SEQ ID NO: 35384 - DNA, 566 bp, Arabidopsis thaliana columbia
ttcgacattcttcttttaattatagttttatgctactatgaaattaacgtaccacgaaaaaaatgaatgttgaatctcttcgacagtacaagaggatgactgaaatttaatttcacgaatgctttggagaggatgactgaaatttaatttcaattattttcaattttaaacagaaacgtaaatatctctacaagtacaagaacaagagcatgaatttttttcgtacgatcaagtttttcttatggaataaagatctgacacatgttcctgaatcctggataaagaagtacaattctggtataaaaagacaaagttgtacctttttgttgacgaaagaaaaaagttaagacctttaattcccacttagatgaattatcaatgactctttcattcttgtttactctttaatacaattaatacaagtggcttgttcaacaaaaagtcgtaactccatcatccaataaacgataattagggtttgaagataaagataaaaaacagagaattgttctctatttcatcaaaatcttctcaatggaaacagcaaagcgtagaaccatgtcaac

SEQ ID NO: 35385 - DNA, 710 bp, Arabidopsis thaliana columbia
aattcagaattttcagatgtactaacaagtgcatcttagaaactgttgagattcccactaaaacagattaaaagcaagcgaatctgatctttcaaattcaccactgtattatatcatagatgatctttgcaaaaatctagaatttgatatcgctagaactcacatcagttgtgactttttcagtgcctagagaaaaatgggaagcgaaaaagtccaaattttggcgcataaattttacaatatagttgtggttaacagaatcatgaaatatttgtgatttttaccgctatgtaaatatttatttaaccgcatcgcatttttcgacaatcgcacgctagtctcaaccgcgtctgtttggcagtggaagcgttttgtccttttatcataagtccgtcagaccaaacgtttgtccaaattgtagagagcgtggaacccaaaacatccataagaaacgagacgcctcaaaaaatatcacttccatctccggcaaacattccggcgatatataaagtcagcaatggccgttctctcctctgtatcttctctcatacccttctcttgtacgttattcttctccccaacccagtttcgttatattgttcaagtcgattcttgtctctgttctactctaaatcgtcgaatccaatttccgattggggttttccggacaattagtaaaatttagatccaagtgtgaaacttttgaaagc

SEQ ID NO: 35386 - DNA, 838 bp, Arabidopsis thaliana columbia
gtaacagagacaagagcttgatgcaacaacaaaaatatgagcattgatagcacataacgataacttattttcggtaactgctaataaaaataaaagttggaattcggttaatatattatagcatttagaaaatgctaagcaacgaaatgactaactggaagctaaaattcatttcgggaccatatgactgccaatatttagtcaaaaaaattcacatagcgcccaataaaaaaaacaattaacaaaaaaaagaactaaaattacttagtgaaaatcttattcgtgtcacttagacaaaatcacttttctctcgttattctctcctccgtctttctcttttcctcttggttgcatctccttctccgagaaggatctgtaatatcaattgttgccgattctcgtctcagagctactgttgctatgcctgctaaacgagggagtataccaccaaccacaaaccctaaaagattcaatcagaaaatggcgtacacttctctttcctctttaaatctaagcagttactctctgactcgattcttctaattaatttaagtccgaaagtgagattttcatatccattgttttcattctctttttcaaatctgtttgatttcttttgtttgtttccgactctggattttatggtttgacgcagatacatggataagaagctccaaagtaagctaaacaaaaaattccacaatttttctccagatctacgattttcaaataagacgatagtaagggttattttttctcttcaagtattacagaatcgttcaaaatcttcactaaccttaatagacgaccaatctggtttgaattgaattagaggagt

SEQ ID NO: 35387 - DNA, 497 bp, Arabidopsis thaliana columbia
tatttagatatatagtatatacaacaacactaaatttcttttaaagaaaaagaataataattaaataaagaagtcatcacacgtgacttttagtcatgagaatgacaaatttgctaagtcttgacgtcgttgattctcttgctgggtccagacgccggaactgacccttttggaagagcgttcaacaccaacgacccaaattttccggtgatatacgacgaatatccagccgtcaagtgatcatcctcgccttcgcaccctaccaccgtcaccttcttggagacagcagagatctctccggagaagatgacgccatcgattaccgacggaattcctaccggaaatttcctagctgttgagaacgaagcaagctgagagatggagatgaataaaactagaatcaaagctccaattctagccattttcgttgtgtgtgtttgtttcttaaccttcttcgtcactatgtgatttggtgaagaagatctgtgaaagtatat

SEQ ID NO: 35388 - DNA, 527 bp, Arabidopsis thaliana columbia
cctcgaaattgataaccgcattataactaaattaatacgcaacgtcgaaaaaaaaaaaaaaagtatttaagaggcaagggacagttcactgtatcattatcattatgaagacacaaataaccattggagtagaattcagactgctcgagtgtttttagtggcgcttgcaaaaataaatgcgtatagttgtggtttactccactataactttgaaaaattatggttactagttcagtgtccaaatgcaaagtatacgactagtgggtcgctactcgctagcctactaaaacgtaggttacgagataagtgattaaatttagggtcattgtttctaaacaattgatgtatgaccgattagctaaagtatgcacataatctaataacgaatatgaggaaacagagtccttaaaaacgtgcatgtgattttcttaatgaaaaatggcccgcacgatgcaattgtattttatattaattgatgtttcaaattattgcaatgtatgtcgttagagaaaccgacgtatgaagaa

SEQ ID NO: 35389 - DNA, 381 bp, Arabidopsis thaliana columbia
tttcatgaatcatgacgtagataaactatggattacctaaaatcagattacataattttataaatattgattaggatacgatattacgtttatctgtgtcgatttgatatgttgtgtttaacgcattaattgtgtttccctcttgttagaacttaagttttcaaattcaataatcattaacttgtgaaatataaaccccacatttcgcatatactaatgttttcattttcaaaaatactactatagtttggtcttttcggttccaccgccgacggtgatagaagagttaatgactactaatgtataacacaatttaaaatccataagagacacattcctaaaattgaatttggataacataaaaacattattacttattta

SEQ ID NO: 35390 - DNA, 557 bp, Arabidopsis thaliana columbia
cagacgagatatgataatctatctaatgatctaatacaccaagacaaaagttaatgcacgctaaatactatccagcagtacgcacatcgagatttggtaattataatatgttttgaattagtgggcctaaacaaaagtaaatgtataactagaccaacaaaatttgacaccttacaaatagtgtgccttgatgggccgagcaaacaaaaaggtgtatgttatgtttatacaaaggctcattgctttcattgtttaaaatgttagttatctttgattttcatatgcaagatttaaagatgttttatttgggttgtaaactggaaaataattttccatggaaaccactttggcccattgattgattaagaattcattaatgcttttacaccaagaagtttggggttcaagtcccacatacagaaatcagtaatcaaaagaaaatgtttcttcctcgtcttgagttttcttacatggtatacattgtctagtactactaatttattttcatattatagaagacaaattgttacaactattgattaattttctatatgatt

SEQ ID NO: 35391 - DNA, 303 bp, Arabidopsis thaliana columbia
agagtatacgttgcattgggactaacatcagctttaggaggctcagccaagtccgtcgaatgcgaatcagaggggatctccgcgagaatcggaatggtttccttgatgaaactctgattaacagagtcggcgttggagcttccaaggttcccaacacggattgtgccaagtaggatgagaatggtcacgaagcagcagagaatcatgaacttgatgttgttaaataaggtattctggatctgccaaccgcgcaaaaacccacgggttctccatccaccatttgatacagccgttgtcgacagt

SEQ ID NO: 35392 - DNA, 540 bp, Arabidopsis thaliana columbia
ctatgataatgcgctgaagttaaatttagagttgaaagatggactcacatgaaagggacaataagaaggcaacaaacacaattttcctgaacactattttctccattcctgatagtattgattatcattatacaaacgtgtatatatacataagttaagctgatttgttgccaagaacattattgattctcatcaattttctgatttgtttaataaattgcaacggcaagtttaaggcaggagatttggaagatcctcatagatattggacatgaaatccctatagttatgacttatgaaagaaaaaatctcggatcaacacgtttgacaatatttagtaaagatattctaagcatgagtttttacctaaatatataatcctgaacttatgtttttaaagctttctaaaatcaacatacgatatgtatttatcctcaagatttggacaatcctacattcaatgttttagtaaccgcgcaagaagtgaggtcatctagaacaaaagacagaaatgttggacctcaacttttgctatgagta

SEQ ID NO: 35393 - DNA, 533 bp, Arabidopsis thaliana columbia
tgctaaaatagtggtggataaaagtctaatcacggagatcaataaaggaaacgatgatcatatttgtgaaaggcgagaaatagaagagacaacaaataacagttttattaagtgattaattgggtatatctagtaataatacctcgtggacagtatcacgcttttttatcccatcacttgccatcatatacctacagcaccaattcaattcaactactaattaacaagcaataatggcggaaacaaaatgagttaggattactgttgcaccaaaaatcatggagaatatagtaaaaaaaaaatccgataaacatacggaatgcgagcttcatcatcatttctgggagctagttgtgtcaccattggagataaatcattctgagatgaataagttaccagataaaatcgatcaataagtaaacaacataatgcatcagacaactcaaaatgtagatagtacctacctggatacctccatggtggctccctatggctactgtcgagaaaacctgcatcaagaaattaagatgtgt

SEQ ID NO: 35394 - DNA, 460 bp, Arabidopsis thaliana columbia
gatcagaggatcagaggatcccagtaacctttacccttattcataaccattagtgaatcgaatcaaactgcactttctgtctcagaccaaattcgagcaagaataaaccctagaaatgcgaaatcacaaggcgaaggaatcaagaacctgttgctgatattgaccaagcttgcgcctttgggttttgagagagagaatcgctcgatcaacctccgtgatcttcggtttcttcacgaataaattccccatcgagttttgtcaagggttcggcgatttcaaaccaagtccaaatctttttgttttcacctttcccaagcaaaaaagctcccgcgttttctcaaattcgcgtttataaaaaagcgttccgaatcaaaacaactgtcacagttctaattttatcacacgctctgcaacagcgcgtggtcggtgaacacattagcatgaatacgcgagaagagac

SEQ ID NO: 35395 - DNA, 533 bp, Arabidopsis thaliana columbia
ctttagagtaagattcaagtagattcttaatatcttccttatcgaattcgaaatcagaatcagactcaatggtaacaatcgggaccgtaacaggctttgaatcgacgatctcttcggattcatctgatgatctcttatgtttcttcttactctccttcgatttcttaggagatggagatggagatggagatttctcctcttcttctacttcttcgtatttcttcgatttcttctttgatttctctggtttctcttcctctttggatttcgatttatgtttttttgagattttcttctctcttacagcgagttcttcagcttcgcgacgcttcctctccttcctctccttcttctctttcttctccttcttacgttcttctccttctttcgccattgttgacggcagtggctaccaaaaaaaacactctgaatagagtaactcatctaaaatagggtgcaccagagaacactagattatttaagtatatttataataaagtaaagagtctaacaagaacgtctgggtggtgtag

SEQ ID NO: 35396 - DNA, 556 bp, Arabidopsis thaliana columbia
gactttatcttctcgacatcttttgtaatctttacttttggatataactgccatgtgtttgcaatctatttagccttaattatatatcccctcgcctaggcctaattaaaatcaaaaggaatggttttatttatatgaatgttgttctgttaattaaaataccgggaatatcctctttttctttttattattacaatactttgcataaatgaagtaaaatccggtaggtgtcaaagagacaaccatatgaagagttaggtatttccggcagcttatgtacgacgaagtaataaaacaaaccaaaccatgtggtcaatatgaaaaagatagttcgcatttggtaccaacccattgatgactggagatgtgatcgttttattttaggtttcagtccttgagaagctctaatttcttcagggcatcacgaacatccgaatctggtgatgcgtgaaccacgttgttgctctcaaaggagatcacgtcggtgagaggatagctccggttagcgtgcaagcatgcactgcacgacacatccctttagaacaacgctcttgtg

SEQ ID NO: 35397 - DNA, 224 bp, Arabidopsis thaliana columbia
tgacctaaaaccaaatcgagagaagatcaaaaacccttcatattctttttcttttggtcgaatcttcatatccattaaaaacaagaaaccagttattgaaatcttaatgagatcgatcgtgaagccgatgtttgcagaaaacctaacgaggattggatcaaacgtggcgggtctgttcttcgtctggtcaactctcaagagatacttccctcgacagattcagc

SEQ ID NO: 35398 - DNA, 561 bp, Arabidopsis thaliana columbia
aaggagcctgaagagacgaccactaactaggaatgttggatgatgatgaagctaatcatccaattgcacctgctcctgcaagtggtaagtttggacaaagatccttaatgcttttgagtctgatttcgatgttaatgcttttgtaagttgtgtgtcttttttgtagttcatgtggctccagcaacagatggatgggacatagctgtgttgccccaagctgctccagcttcttctggttggaacttaaaactaaaattataaaccattactctctagacaatgtttcttttgttcctgttgggacctagctatctcttctttctcgttaagaccctttgatttttctctctagcctttttgtatcaaatataattacacaatgtccacaataacttctactttaagttgcacacattatctgtgtttttttttttttttttttcctcgcacacattatctgttttataagatacatcatggttgatatgacaaacaaacgatcgcttccaacattgcagtaaatttgtttcatgttttgaattcatagatagtatgagaaga

SEQ ID NO: 35399 - DNA, 444 bp, Arabidopsis thaliana columbia
gatccctgttttgatagatagaagattcaaatcacatcaatgaagcttaagtttctatgattctcaagcctgcaagtctaactctcaatatattctattccacaaaggccattgtgtacagcgatggcccagacttcaacgtgtgagcataaccatatccagtaccggtgaccacttgctgcgtaatccattcatagaccctctggagggtgcatattgctcttcaaacacacagacattcagctgagattaattccagtagcgtttaccgagaataatttagtacgcctagtactagaaaccccccgaattcgactgagtaagactacatgataattagtcatgggccatggacactatgccagtgactggcttaactacagacaataactaccccatacacagggaggatagtctaactgggtctccggtctagagtggtta

SEQ ID NO: 35400 - DNA, 528 bp, Arabidopsis thaliana columbia
gcattgaaatatcttttactcaaatgtattaaacgaaacaacaaaaaccatatcttttactttcctaaatgaaatttcacacctgcagaatgcttggtcaggtggttatatcgcaggcacaaacatcggcgaattagcaagtagtagcagaataagttcgaaagaaagaaaagttactataggattgtagtttgcttataagaaaagtactgtcaacattttttttctttttgtcaaaatacagtttctatttatctatgtaggagcattatcggacattattattgtagctatgatatggttgcaacacgcacaagctgaaaaggtgtcaactttgtatcataaaccactgaaagcagagtctaagcatttcaacaaaccatttcaatcaatcatggcatcacacagaaggtcttacattagcagagagtatagaacatcacattccccataaacataccatttattattgagttacacaagactattggttaaggcgttaacaatgctcattatgctctgagtttg

SEQ ID NO: 35401 - DNA, 495 bp, Arabidopsis thaliana columbia
ttgccattcagagacaacagcagcaattttctcatcaggtgcctgtagcagatcaatccattactcaaaactgtctccaagatattccactccagcttgtcgacaaaactaatctccaagggctaactgcaatgccttcctttgatcctagttcatctttggaacaagatgattctggcaaatttgctgctgctgttgataattcagcagaattcgcagttctttatcggcttcaggatgttgtagcaaaggtactcaaatggttgattgacttgttatgtttgtgttgggagtaaactaatactctttattgacctgcagttggatatgggaacacggacttgtatacgggatagcttattccggttggctggtagtgcagctcagagacattacactagtgatacatcccacagtaacaagactagccaggatgaccaggaagtcattcccagagaagaatccagatataggtaagcaaatttatgcgtatta

SEQ ID NO: 35402 - DNA, 557 bp, Arabidopsis thaliana columbia
caaataaattaatgctcatggttcaaaaaaaatacatgaatatatagatattatagaatctatatcataagtttttaagaatctaaggatttacgggtgggtcctccatgaatttttacaactgtagatattaacgaatatatgaaaaacggtaaaatatgtttaacgcaactaattaattagaacataaaggaaatataacaatttaaaagcatgatataatagctagactgtgaccaaaacctaacggaatatataaagattgacgatgtccctttgaactactggttgagtgtttctaatttaattatgatccccccaacaagttgaaacctaaagatttgtagcattacgtaactaatattattgtccaaaacatggatttgcaggtagattgactgattcgtataacccatatatatattggaaaggaaaaataactaaatatgtaagagaatgagtaagttctgttgcatttctgttaagtatagaattacgaaaatatggagatgtttcgactacgaagttggaaattttgtgggggaaaaaaatgaaag

SEQ ID NO: 35403 - DNA, 468 bp, Arabidopsis thaliana columbia
ccccacgatgtattccggtttaatcctcagtttccaaaccagcgtccaagtccaccacagtctcggttcccagaccaagctccaaatcagcaaccctctgggccatctccaaatcgccacccagaccggcaaggtcctccacctcgatttcaaaaccaagctccgaatcaacaacctaccggccggtttgaacctcaaccaccaaacccgccccgagctccaccacgaccacaaacccggttgccaaacgaaacttcaaacgaacaacctacggcccctggaaggtctagtggcccggcttcaggttatggaattttcagcaccccaaaaacgaagtaaaacaaccaatttttttaacccgtagagttgcaaaattttgtgatacttttcttgggagatttgttgatggctcattattttatatgtaactaataatagtccaatgcatacacatacttgtaaccatta

SEQ ID NO: 35404 - DNA, 606 bp, Arabidopsis thaliana columbia
tgtttttcaataataacttccgaataaagtgaactgaaaaatgaggacagcgaaaattgaaagagataaacaataatttttagaaaatcaagagagaaatagtagtaacaacaatgagtcaagtgattaaatttggaatctaattagggacatggacatgaacgtgagaaagaaagattattcaataaattaaatttagcttttgtgttttgaaaaaatcataagaaaaaaagaagagaattaaagcactaaggttaatctcataatatttccaaaagctaaagatgtggtaatgtttcttctctcgcactccaacaagttaagtcatatattcaggtaggggatatctccatgtcttgtaccatatcagtatcatcatcaccttgagggatctctgtgtggtgactatcgccattgtaggtgaagtgatgcatctgtgttatgtgaccctgttgaactgctgtggtcttgtggcttctactcaaatcccttcggctccaaaggtatagaggtggcgttatattgtccactgctctatcgttttatcattcacatctactgacccaggcaagtagaacgactgcagaacaaaaagtacagagattg

SEQ ID NO: 35405 - DNA, 555 bp, Arabidopsis thaliana columbia
cagtaaatcgagagatagatcataattttacgaactaaaggtgatcgtgactctagatctcaaatctttattaacgggacaaggtcgatgatctcatgtccaaagaggaattttgtgccaatgaagttaggccacctcttttatgaaagggaaagaaggaacattggatggcgtataaataaaaatcatgagggagtgacggtatcatggagccatcttaaatataatcatacaattgattcggaaaaagtatatatggacatgagagtcaaaatcttattaaaaatccaatatagtaacatacacataaagtagattcggaaggcagttcgagatggcatcaagaaaaatctgatgggtttgtgttgcgttgtacgttgcacgcaagaggacacgtagagatatgtaattagcttatcaacttacaactataatttacacaaacaatctcattatttaattaaccaaggcttaataattagtccatatatatttatacattcatgaatgtggacgaaactgatgactgatgttgagacttgagagttaggtttg

SEQ ID NO: 35406 - DNA, 529 bp, Arabidopsis thaliana columbia
  unsure (1)..(529): unsure at all n locations
taaattgagtaaaattagagttcaatttttaaaataacctgacccatttcccattttatatgtttgtaaatattttttcttcttctcttttaataaatactagtatatgacctgcggtacacctgttncttatttttattttttaattattgatgttttgtgttttgacaatgtagtttatctttagcatggttgttgtatttttccttacttctaaattatatatttggctgtgtgtataattaaaggacacgtaataaaggttacgataacattggttattatatgggggtttgaaattagttgatataatgtgtatattcttgaaagcataaatatgatttggaagggttgtcgaattttaatttttatgaacctatagctactgttgtgtgtataagtatgtggaagtttagtaatctaatggtaattagtattagtattcgtatttattttaatcatggaatgcaatgttttaatggctaacatgtatttttatttggatttatgtaattaaatttcatttata

SEQ ID NO: 35407 - DNA, 168 bp, Arabidopsis thaliana columbia
actgtggcagtggctctcatatctgagacatgagcattcatgaaatgagaagacagctggggcctggactgcagttgcatgcaaagagactatggctccagggcctgcagtgcagtctagctcactgtggatgtggctaagatgctcaaggcataggtgcttatgtag

SEQ ID NO: 35408 - DNA, 486 bp, Arabidopsis thaliana columbia
cggagcaaacgccaacccaaattttgacacctcaaaatgaaacaatgatcaactaaactatgacaaaaatgattagccaaaacataactaaactaaggtgatactacgatactagtatgaaaaagatgattttatcacgtctttcacgtttgtaccaaaaaggtgatgcgattaattttttcaacaacttcaaagtgataaatagagaggcattgaacaaacgaaaacgctattcattaaatacattgaagctagacgttcttaggttataagcctgcttcttatttccgcgtctgaagataataccaaaaatctggaaaaaaaaccaagataaccacatattatcacgtgacaatcacatgttaaccttgagtcacttgttatctggcacgtgttctcacgcgccggcacaattagactaaacacgcaaggtctttagtacacgtcagcaactgataaccgataattactatgacgtggacgttg

SEQ ID NO: 35409 - DNA, 576 bp, Arabidopsis thaliana columbia
ttgggttctccaaaaaatatccattattatcaacaacagaaggaaaaatgaaaatacaacataggcgacacttcaggatcaaaatttaccaaactgattcaatatgtctgtcttaaccacatatggctgaaactgcatagacatctgaaaacccaagtcatgcgaagttacactacttgctggtagagatggctttctcggcttgtggggctgagggaaacacaaagacacttgaagcaaccgcagatggctgaaactcagcagcatatcgcgctgatgtcaaagttatctttgggagttgctgttcaccgcaagtcagaggcactagcttataacttaagacgtgttctgacttgggaaggactgaaaccgtattgctgtgagacccagacaggacaaaactctgtgcatcagccagaccaaactttgcttcttgcagcaactgtgtctggttgcagattctaacagcgtaagtgaagggttcccaagaatggcatatggaggagagtcaaactcattaccagtggtgatgcctcacatttacttcaggaagtttgtgctttgttgaaacatatg

SEQ ID NO: 35410 - DNA, 475 bp, Arabidopsis thaliana columbia
tgaagctaaagtgtttaatttgagagtacgcaaagaactggttttggctaaaccctaattgagaaacccacatacagaaacagaatcaaaatgtgaagcaatagatattgaaaatattccagaaaaaataatgttgaaactctaaaagtaatgaactttaagaccgacattgcgtgtataagagtctcaaaaatggaaaagtagcagagccaaacttactctttggagaagataaatctggaagggaagctcaaaagaagtgaagccattgggcgtggtagcagtattagcggtgggaaaagggttaaaccctaagactaaaaaagagagagagagggagagagaattaagagttaagagtgtatttaagtaaaagtaatgatctttggtgagcggcgtgcttacagttctgcacagagcacatttatcaatgaatgtgagagacagagtgagacttttttttgtttttggtttc

SEQ ID NO: 35411 - DNA, 636 bp, Arabidopsis thaliana columbia
  unsure (1)..(636): unsure at all n locations
cagataaacaaaatgttttttcgaaaaatagccccatattttgaaacttctataaatatcaccccagagtttttaattggatattaataaataattaaaatgaaaactagaaaatagaaaccctaattctaattcttcttcgactcgacgattctcgatctccactttgacgatcgtcagaaaattcgatcgcctcggccagaatcttgttaccatttcgtgcatgtatgattcctcgactcaacccaatcgacccaatccaatcgacttaacccaatctcgattccttgttgtttccccttcttcaacctaattgactcaatgtaagcttggctccgcggatcctcctcgattcctcgctgaaacttagttaaaatttaaagactaatctaaaaacatttctcaacaaaaaaaagacgataaaaattgtaatatgttgccttctcctcaaaagaggtgagaccaaactattttttgatcatggattggtgtaaaaggtcccgttaacttcctacgataacccatcttgacctaccaatggaaaagaaagcacaggttgcccaaaattagcgaaatggtacatcaaaatttaatgggaggtttatcaaaacaanaattaataattgctggtttttg

SEQ ID NO: 35412 - DNA, 366 bp, Arabidopsis thaliana columbia
tttttaagttagttttgttcacttacatgtaatgtggactattacatattcaactcagaactaaaacaaaattcttttcatgtgatgtgaactattatatatacaactcataactaaacaaatttgaggacagaaaatattattttctactttagttattagcattgagttttaaggactaaaccataaataaaataaaatttaatatatatatatataaatatcgttcttactaaaatcttatataccatacaccacacaaaattcttaattaaggtggtcaataagattttgtcttgcctatatacattgtatgcaatgataagattttgtcatgcctctatagaaaattgtcctttctcattc

SEQ ID NO: 35413 - DNA, 427 bp, Arabidopsis thaliana columbia
cgctagacatggagtctccaaacgaattcaaggagagttggttgtacaccttcacgaaacccctcaaagtttttgtctttttcggtttcggattacatgatctgctagactagcatcagcatcagattgtctgcatccgtatagatctcgttgcggtttttgtcggaattgtatcgaggtgtatgtggttgtctataagctctcggttgtgatagatagaccggtatcgcgtgtgaaatagttaccggtgaggattgtggatcgtagagttcgccttttatggcgttcacgtggggatctgctcgtcgagatttctgttctcctgatcgttgtagctgcaattgtcgtagcggtgttattttatccgtgttgagaaggttcgtaattggtctaattagggttctcaatgtgggtattctgacatggg

SEQ ID NO: 35414 - DNA, 614 bp, Arabidopsis thaliana columbia
gttgagcaacttaacaatcggtatgctcttttccctctaattacgcttgtgatattactgactttatctttcttgagctgatttttgcctctgttttgtcctgcagtgttgtactttttgaagttcccttgagctaaactgctaagagcatgcctctggataagaggcaacgggatttgcctctgggcttaagtcctcaagcttgcttcaaggatatagtaggtcggtctgtccttcctagaattcctctccctgagcttgggaaactatatgcagctaagcttcaggctcgctgtttgcagccaccaccattccagtctttgctgtgcagtcatgataaggagtcttatggaaaaagattctcacggtctgacatgcggtcttggtgcgctgctgctactactactactactccacttggagcattagagtcttctcagaaaagacttttgatattcgatcagtcaggagaccagactcgtctattacaatgtccatttccactacggtttccatctcatgcggctgcagaaccagtgaaactctctgagttacaaggtatagagaaagctttcaaagaagatggtgaagagttcacaagagtgatggacaga

SEQ ID NO: 35415 - DNA, 556 bp, Arabidopsis thaliana columbia
ataatgtaacaatgaataagtaaaataaagaaccgctaggctttgctagtcttactactattattaaataaggatacttcaatctcgttaagatcgatctcgtagaagatcaatccctttctctcttttagccatctgaaaacaaatcaagtactgcagatttgatttgacggatagaagtatataacgttgtattgataaatgataaacccaaaacaactaggtataatgcgataatttaaataaacgtataaacgacatatgagtttgtgataagtgttggatgagcaaccaaaaataaatcaagatccattaagagatttcatcgtaaagataagtgtttttttttttttttgatgcaattttatctcttactatacattacctaattatggcgtcggcttcaactttgtgttgaaactgtaaacccaaacaaaaaaaaacaaaaaaatatgaggttagatgcgacttcgctttccgtaattatgatctttattgttacagatgaacaagacatttttattataaaatacagaaatgacgaagaaattaatgg

SEQ ID NO: 35416 - DNA, 372 bp, Arabidopsis thaliana columbia
tgattgctttatcttcaataagtttgcattgctagtggaacacaaagttcactgtagtttcttgtaaactcgtccatgtctattggttttaactacacagggctcttgctctcgtatttggcaacgagattcatattgggacggacgtacttctactcgaaggtacaatctttttttccctttttggaaacttcattctacatacctgtgctttgtaagatgatataataaagaaactacagaaacgcattgttctgttgcagcaatgagtatcctctcttcatacctcgccggaattattgttcaaccagcgttgaaaactcatggacagataaaaactccagcaatttcggtgttgcatccatggagtcc

SEQ ID NO: 35417 - DNA, 1022 bp, Arabidopsis thaliana columbia
tcactctctctcttctctatcgtcttcttctctgccgcttctctacctttacttctccatgatctctcgcctaactcatcatcctcagttatcatcagatcaatacctcgacaagcttctctgttcttttccaacatcgattcctctatatctctatgatcatcgatgagcattcctgtctcaacaactctctgggctttgtcatcatatggaggaggcgacttcaaggggctgcagctgatttctatcatttcatgaagcaatggaagatttggaggacaagatgggtatgatgcatcttcagccaagaatttatctgcatagcttgaagttgacatgttgagatcagacttcagtacgtaagctgaggaagatgatgcatcaaacaaacccattatccgccagttgaagatcctctggaagataccaatccatctcggggtgatatggtagcggcttgagttatggagttcgagtctagtgtttctttctagcatcactcctgtttctttagtagctaatgagactcccataagattgcttctctgtgttaagtactcaattaagcatccctcaagcctttgcgtgtggttctctatctcagcaccagaagcacatcctacggttagccatgtcaaatcatcttcaaaatctgggagcttacaattctctagcacggaactgagtagttcgacgttctctgcactgctccagtccaggttgggaagataccgcttgaccattaaacattcttttctattatccgcgagcaacattgtctcagggcaaggccaaccgatgggatttgcttcagcagcagaagtgatgtttcttcgtgatgtttccaatgcgtcgttgaaggctgatatgcagatgttaggaccaacctcctgatctggcatctgcttaagcaactccaaggaaaaactgaaatgggtcagaaacagttcccggagtttaacatgatgaagatttggttgcagaggtgaatatgcttgctagccatttaaacccatctctta

SEQ ID NO: 35418 - DNA, 340 bp, Arabidopsis thaliana columbia
ttttgtcattaccataaaagtctccatcaacccttttcctcatgaaaccctcctatcaaaatttagattctttactttttcttttctttaaaaaatgtctgaaactccacctacatcttcatcttcttcctctgttttaactcagaatgttacaaaaccagtttcagacaaacttcttcagaagtacattgacgtgtctgagtttcagtttgattaccagacaagcggtatctggtctccaccgtttcaacggactgcttttcttacaccacaaggcagaattctcacagacagagatatggcagagaaatttcagactcttgtggaagaacctccacgg

SEQ ID NO: 35419 - DNA, 141 bp, Arabidopsis thaliana columbia
tttaaactaaataaacttttgaacagcatatatgtatatgtgttacgcatagtcattttagcatatccggcaatgcgtgacaatgatttcttcaacttagagtagagcaattaaaccaccgattgtcgggtactcggcgtg

SEQ ID NO: 35420 - DNA, 481 bp, Arabidopsis thaliana columbia
gaaatgagaatggatacatgcatattcatcttggcaatatgaaaatttcaactttattcaagacataaaatctctaacatttagaaaggaaagcaaagttccgaataacaaaaaattgaacaaaaaatcacaagagagaccaatataaccatgtttccttgcaagtggactcactggttaccaaacttaaacaagtgatatcaagatacgaggtccaacataataacgcagacagttaaccagttgctaaacacagatcaagcactcttaatcgttcttcaacccagaggatgagctggaagagttcgcactcggaaagaccgagctggaatagtccgaactcgaagagaccgagccggaatagtccaaactcgaagagaccgagcttggatagtccggacttgaagagttctccgacttgaagagaacagactcgaagagacaagactggaagagtctggactcgaagagaacgagctgt

SEQ ID NO: 35421 - DNA, 516 bp, Arabidopsis thaliana columbia
cacaaatttcacaaattctgattgcagctgtttcaccttctttggatgtttcctcccaacctcggttccatccccaagctgaccatattcattagcacctgaaacgaggacataaaaatgtaagaatcatcccgtcttcaggaagttacggattgcctaagattcaatcacaagatccaacaattataaccaaacaactaattggtaactacttagattgctttctatcacacttgatacataatcaaagccaagaattacataaagaaaagaactttataacacaagaagaaagacaatctagtaacaacacaaaggaaaagaaaactgagagactgaccccaagcaaagagagaaccatctgatgcaaccgcagctgtatgttcccgaccacaagaaatatcgagccaacgcgaattggcaccagcggggcaaccaaaaagctcaggaggaagctgttttgggatacgcaaagcttctcttgttcattcctaccagtttgtctgctttgattgt

SEQ ID NO: 35422 - DNA, 541 bp, Arabidopsis thaliana columbia
tgcaggtcgaccgagtttcacttgttttttaattagattatatatagtcgacgcccatctaattcccattttagatgcatgagttcaacgctagttagatgtgttttgttcttatttggtctttttctccttaatatgctaaagtatcattttgtggaggtataaatccgattgagaaatggcatttagttactattggaatattgttcaaagcttgatggagaagaaaaggttgaggttcttttgcaataattagcatttaacacatagtaagaacttttttgtgcccattatgattgataggggttggcaaaaaaccttaaaacaagctctgatcaaaagagaagaaccttgttgaggccaaaaccatattgggaatggtattactatttatcatattatggagaggaatggtagaagaggatcatcaacggctgatactaaagatttttgcctagtaaagaaaaagttgcatgaaacttggaactagttcattacacaccataaaaattaatacatatgatacaaggaattcagaaca

SEQ ID NO: 35423 - DNA, 348 bp, Arabidopsis thaliana columbia
tctagtaaccgtaagtgcatgcttttcggggatgaataagtatcggtggatccggagctatacgaaccgtctcgaaggctgtcggttacggacaagagatgagtaagagtctgagggtgggactcatttgcggaggtccgtcggcggacgccgggatttctctcaactctgccagatcagttctcgatcatactcaggttatgttccgctttcccatgatcaattgagctttggatttgtgtagcttctggctccatttaatccgtctggcttgaaattgagtttcaattgtgttggatggttcttcatcagggtgactggtataacgtgagctgctattatatagat

SEQ ID NO: 35424 - DNA, 848 bp, Arabidopsis thaliana columbia
tacattttacattcatcactggttcttaacctacattatttcttacataacttacattgctgttacgtataatagggtacattacatagatagcaaactaaagttacagaattttaaaatttgtaaagattttacgaaattattatatagattctgcaattgccattttagtgataggaacaaaaatcttctatagaaactagcttacgaaacttccacaaatcttggaaactgtcacatgtgtttcacatttcagtttttttttcccttggtatttccttatattatccttactattatcatccgtgtttgacttttggtctttagcgtggtactgaaagaattacccaaattaacaagaatcaaactaaagttgcttaattagtgaatcacaagcaagggaagagttcattttcaatccttattctatacagatcttcaaactacttgcttcgacatctagtgaagttaaaaacaaatcacctcgaaatattaaaagcgttgtctcattcctacccaagatccgacatttttgaaattttgagagttagaacgtacgtaggatccacgtgataaaagaaaagttgctagtagtagcttcaacaaaaacgattcatgaaactgagacgtgtgtgtatgcacatgtaccatatgagagcgtgtggagcatagtggtgattaagtcgccatctatatttattcattcaacctaccgatttggttcctactagcgaaaataaaatcataatataaaagactataaaattgtactttatcgtataatgaagttctgaacaggttgattgtagttcaacatttaaacacgtcatgactcgctctctacttaa

SEQ ID NO: 35425 - DNA, 564 bp, Arabidopsis thaliana columbia
atggccgtcgctgttaatcgacgattttttcaaacggagaatttcatgatcaaaattacccaaagacttcagaaaatggtaaaagcttgctagtcttaaaagtgttaatcttgatttccactctgttattcagagagcagagtaatttaaaccttgctagtcttgagagtgttattctttatcacattctcaatgttgtcattgtaagactcttgttcttttgtaactcgtaaatgtgataagagacgttgagaagcaagttgataaagttagtggtagaatcaaatacattagggaaacttcataaccatagacaagcgtgtttctataactgtcatttgtcttaagttgcatgtttcatattgccaatgtccatagttcaatagttgcttggcttgatgtctgaacactacaattctttattctttgggattagttacatctgagtagcacaaaactataggtcttacaatgaaaccacaacattgtctcttgcttgcttagctagtgcctctaacgctatatcaaccgcatcttggtaaatcatagctagtagagtttggg

SEQ ID NO: 35426 - DNA, 484 bp, Arabidopsis thaliana columbia
aggatcccgtttgcaaaattatctatttaacaataaggtattagaagtttagaagtgtccagtcaactcaaaaatcgagataaattcaaaatttaacatatatgattaataagttaaaataaagacgaaaagaaaaatatctatgaatgaagcaattaacagtaatgattcttttaaaaaatatttatctgtatcgatgggtacattaatacacctatgctttcaacacaaaaagtcattaatcataaactcacaaattaggatcaattcaatagagtaatcttcatctttctctcttcacgtcgacaatgacatacttacgcagttaaaaaaaacagaacagacaaaaacaaagacaaaaacgaaaaagtaaaagaaaaagactgcccaaaaaagaaagacatttgaattatttttgtcttaataatcatgctatagcttccatttagagaatcccaaaacctcttataaattttctgcgaaa

SEQ ID NO: 35427 - DNA, 571 bp, Arabidopsis thaliana columbia
gatagaaaatcttgcatttaattagatttatttctatcttatattagtttgaataatttcaatgtttctatatgcattttgtatattccaaggcaaataaatgacttgccataaacaaggcccaacatattaattacaaaagatgtggtcctttcatctttatatatatattacatgatgagagcttccatagactatacataaaacttttaaagcaaaagaaatcgattaagaagagagaaatggagaacaagtactcgagtgttgtgatgattttggttttggtggtgatggctgccattggaggagaagcatcagatctttcatgtgaacagaaatgtagatcagcatgcgctggcggcaagggtttcgtacaccttccggagtgctacattgactgtgtacgaaaatgcaaggacattccacctacgtatgtatataatacttgtgtgtgtgtgtttctatgactatatgtgtatgtgtgtttatagtgaaactgacatggtttctctggtaattatattgcaggattgagacttcgagggatggaagaatgaaagcatagagatag

SEQ ID NO: 35428 - DNA, 562 bp, Arabidopsis thaliana columbia
gaagaagtacatctgtagttgttaaataaggaaccaataaaaacaccaaacaaaaaccccaacaaaaccggagtaaaaaaatatgatcatgtctctgtaaattaaaaccccaacaaaatcggagtaaaaaaatatgattatgtctctgtaaattaaaaccccagcggaatcagagtgagtcctacacgacgtgtcagcaatttactcgactatctctcctcgagactttacacggcctgccccccaaaaaaatcaaaagcttaagatttcgtgacatcaacttttctggacaaaaactccaattcatatttttatagttaccaagagaagaagatgacttaagcaatatgaggaagaaaaacgtgtacttcacaccaaggccaaacctgtctttattacacaaaatatagataatatcttcttcctttttttgatgtgttagtttcttaatttataaaaaaaatttggttatagagtcaaatttcccttattttttctttgaggcacttatcctccaagtttttctctcctaaatatatctatgttgttttattataaaatg

SEQ ID NO: 35429 - DNA, 329 bp, Arabidopsis thaliana columbia
tagtaacgtccgccagtttgaatacagaactgagagttgctggatcaatgtctgaatttgatctccagtcagcttgttaatatcaacgttgtcaacttctgtagctggttgtggaatgtatagactaggagcattagccatgatatttgcaactgaatgaggtctagacgcagcagtttgcagatctatgctctcggctgacatgtttatcgagcaggagatctctgacatggacagtgacagatagcgctttacccttggacgataccctgtgggatacatcaggatcctggaacatgaccgaactacgggtccagacagaccacatg

SEQ ID NO: 35430 - DNA, 521 bp, Arabidopsis thaliana columbia
tagaggatccccttgtcttttttgaaacataattttgacatcaaaatgcatatatggttttaaactaatttatcacttaatctttttgttcttcatagttacagactcacaacatatctacaataaattagggatcattcttaaatgttgataaattagggatcattcttagatctagaagcgataaatggtttacgatggtagaaattctaaaggaaaatagccaataaatcgattttgtttttggaagatttttgacagatactattctattttgtgaatatactatttacgtataccttgtactatatacattttaaaatgaattgtttgttttgattaaggatgttaagtgatttgattagtgttttatattaaaagtcttgggttccctatatattatcttagggtttagtattcttccatcaaaaagtatttaattgattatttggattcatcagaagaaacatttctatttgaacaaatatatactattctattttgttatgatgatatgtata

SEQ ID NO: 35431 - DNA, 808 bp, Arabidopsis thaliana columbia
tgtttttttataagtaaaaaaaaattataaattaagaaactaacacatcaaaaaaaggaagaagatattatctatattttatgtaataaagacaggattggccttggtgtgaagtacacgctcttcttcctcatattgcttaactcatcttcttctctttgtagctataaaaatatgaattggagtttttgtccagaaaagctaatgtcacaaaatcttaagcttttgactttattatggtggtaggccgtgtaaagtctcgaggagagatagtcgagtaaattgccgacacgtcgtgtaggactcactctgattccgttggggttttaatttacagagacatgatcatatttttttactctgatttcgttggggttttaatttacagagacatgattatatttttttactccgatttcgttggggttttcgtttgttgtttttattgggttccttatttaacaactggatgttacttcttctctaatttggatttggatagatgaagtgtggcgacgaaatgccaatccataaatgttggagtgagatatcagaactatatcgggaaccaataaatcgattttgattttgagaaatgtttgagagatactattatattttgtgaatatactatttacgtataccttgtactatatacgttttaaaatgaattgtttgttttgattaaggatgttaagtgatttgattagtgttttatattaaaagccttgggttccctatatattatcttagggtttagtatcattccatcaaaaagtatttaattgattatttggattcatcggaa

SEQ ID NO: 35432 - DNA, 880 bp, Arabidopsis thaliana columbia
  unsure (1)..(880): unsure at all n locations
taacttttggctcggtaacggaaaagatctttttctatttcgaataatgcgtggacttgttattatcaaactataacgccacgtcagcttagatccttccgcgttctctgccacgtcggtagtttgggatattaatctattatttatttctttttttttttttctgagcaacgatattaatatattaattattatacaatcttactaaatacaagatacaaggaaatttagtagctcagattttgtgttttctattttttgtctgatttaccatctgacggctgatcgatgagtttggaacgttaagatcgtgaaatcgtttatttctgaaaaatagtgaagcacagatctcagtggtttggtatcgtagagatttaaaaagtagctactttttgttttatcaagttaattgttttccttttattcttataacgttattttattgtttgcttctttttattaaattgaaatgtttattaaatgttaacaatctggttgttattcagtaaaatcaggattctcgttaacaaattctttaaccactgtttaaacattaataacgagttaacgacattaaaacccaaaataacacaaatatttttcaagcccaaactctatccacaaacccataaaacaagaaaatggatcaagtccacaagcctagaagagagaaacgataagaaatttaagaacccatatagagccaaccgctaaaagataaactgagtagcaagtagtaacacaactctaaaactctgaaaaagcctttttgtactttgagacatttctctactcagcagcagagttccctgaagaagcncaccctgatctgtgaacaatgtcctaacagcgcctggaccgtgcggtatgacactgagtt

SEQ ID NO: 35433 - DNA, 1098 bp, Arabidopsis thaliana columbia
tgaaatagggttccgttgttgcgcttggtgtattggtgatgaaattgagttccgttgttgcattttgagagatactattctattttgtaaatagtatactatttacgtataccttgttctatatacgttttaaaatgaattgtttgttttgattaaagatgttaagtgatttcattaatgttttagatttaaacccttgggttccctatatattatccctttagggtttagtatacttccatcaaaaaatattgtcaatttatatagaacgttatgttattcattgacaacactattcacatctaaattattttgtgtctattttcaaaaatttaagtcatgatatttgtagaaaactatacaactttttaatagatatatcatgaacttgaattaaattttttaagatcagataatatgagttacaattgaaaaggagtaaagaaaaaagaaagagaaaagagaatttctctcctaccacctatttctcttctcacctcaacaccaataataaagtcacgtcagctcacactaatcattctccttcttcgctgacgaagcgtaacaccaggacagtgatgtcttttcacaccccttgaaggttatttactacatttacaaatttatggtgttagttggttaattatttagtaaaaaagtgttatatctgcaaatcacccaaatcaaaatactgtcataagaaaatgggatcaagaacattcattctctcaacccatttacgatcctacgtacttaggtaatacgtaccatggctataaaacaaatatttctatcacgcaaccacacttaagtacaaaactagcgattattataatgtctgtttctctttgtttagttgagcatttatataatgtttagtacaacttttactgtttggcttatgcaacattgcatgtccacatctaataaaatctaaaaagggtaaaagtataaaagaggaagatgtgtctcctttttcatttgtttgatagaagtattatagttttcacggtttacatttttccatttaagttagctactattagtaataagtcttaatgtctcacttcattagaaacaatcataataacttaatat

SEQ ID NO: 35434 - DNA, 594 bp, Arabidopsis thaliana columbia
cgcaatgcattcaattacaacggtggcacatcattctaagcaattaaagcctttttaatacacacatccaaaatttattctcagactagttttatgaaaaatttacaaaataaatcacaatcatttatttatgtagttagttatcaacactgatttagtgaaaaaaaaatattgatctctttcaattacttagaaaggcaatattctttatcggaaaaactaaaaagaagatgcaaatacaaaaaaaaaaagtatgtattttagaccatgcgtgatcataaatgaggtcgtttttagtcaccactttttaacttttgtgatctgccactttgccaataaattgtgttatcaggataatcctcatccttctctcggcatttatgattcctagctacattttcccataatgcattattcatgtagtattttatatcaaatgggcaaacaaaaaatttagtatattaaaatggtctttgattaatcttgtagtatatatacaactgttgttgttacgtaggagttttctatcaaagaagaagacaacgtaaccaaagaacacaaagagatgatgcaagcaaacaactactcgtggtt

SEQ ID NO: 35435 - DNA, 569 bp, Arabidopsis thaliana columbia
ctggcttaaatattttaaaattttattcaaccaaatcaacatattgtaaatatagtaaaagaaacaaggagaaatggatataaatttattaaaataaaaagcagcactacgtggaacgtacggctgttattttatataccatcggaaaaagtcacatttgagaatgtcgtaagtcccgacacgtgactagcacggcaggtctaccgtagataagcgtagacctcagcacaccgtaccacataataaaccacactcaaactcagtccgaggttgacccatttaccaaacaaaacagagaatcgcagagcaaactatagactacacaaaacacttccgtcaccggcgaatttactcaggcggtaatctcaccggacatgtaattctctctttccctttctcgcaatttattattctgtttgtcaccgagagagtctacgcaaagtcttctgcggaggatttgcttacgggatttagagtttttctgtagtctgattcatgtacttgtgttgtcgcagatccagaaaagagggtttttttatttcatggaggtaataatatatgaagaggaa

SEQ ID NO: 35436 - DNA, 574 bp, Arabidopsis thaliana columbia
ctatttttttgccttcgtgtcgccttcttcgttgtgtctgacattgcctttggacatttctacggaggttttgtgtttaccagcgaattgattccagaagtcgaagatggacccgtcgtttttacaggaattgttgtggatatgggccgggggaagccgaaacgccaattaaagaattttaaagaaaaaaaccttttaatacaaaaaacccctcgactttttacaaaaacccctcaactaaaaaagtcgaatgaaaatttctcttcattggtcaatataaaaattctaactaaattattaatgaaaatcaccttttaggtacgaaattttattaaaaatactcctttatttataattaggtaaaactcgcctaaataggagggtgaaaatattaaactattaaatatttttaaatcgcaaatttcaatcttacaatttccattttgttatatattttaatcttacaattttcattttggtgaggttttttgagcattttccattaaactttgagcataagctttatgtgttagtatcgctatgacaactttgttccatatccattcaaggtttt

SEQ ID NO: 35437 - DNA, 534 bp, Arabidopsis thaliana columbia
ctaaagttgccttcacgcgttccgtcgatcacttccgtcgccgccgaagctttccgtccgtggaaaataatcatcacaggcgtcatcagcgcataataacattagcactgcctggctcctgttttcactctcctattatttcggttctgggtatccatgtttgcccgtaccggtctctcatgatttgaaacagtcgctcgggagaagtacaaaaaggagatgccgtggactgtaacaaattcattcaagcggtgcgatactcactcattgcccctctctgtcgcgttttcccgcttctaacagttttccacagaggtctcatgatgaaaacatacgggcggtcttcatggcgcgtctacgatgatgaccaacgtccagcggccaagaaacgacgcgttttgtcggattgcgagtcggacgcggctgaaaagagccttgagtacgccatccgggagtccacggctaacgtacgatcgagtccgtcgcgtcgaaactctctggcactttccgatggttctcaggacactgatttgt

SEQ ID NO: 35438 - DNA, 554 bp, Arabidopsis thaliana columbia
caatcttacttctcctggtccaaaatacaactccgagtgccttcgaaggtcgagtccttggataccagcttgtaacaccgataagttgtctgaatcaggcgaaacaatcacgattgtgtcttctgagtattgagtctcgagaatagacatgagttgcgtcacacgcacaaatacatctgatacactctcgttgggggtacgtcgcttataggaggaggttttgtcttcatcgataatgagtctaatgcatacacctgcacagaaagtgtgaacttttcatacttcaacccgagtttttgtttgtatgttttaatgtgaaaaatgctaaaatcttacttctgatatagattcaagcttcttgccttcgtaagctcctaaaccacgagcatcaaggaagctatactccggaactatatagctgcgaaaaccaagtgaacataaaacattcagcgtaccatcacaaagattagattccacagctaaaacctcactaaagagtaagaagactaatggacgattttacctgcgactaattccattgatggcggcgatga

SEQ ID NO: 35439 - DNA, 333 bp, Arabidopsis thaliana columbia
atagaggaacccctaaaaaaaaaaaaaaaagaaaaaaaaaaataaggaatagataagcgctcccccccccaacaggaaataaaataaaatgtggaccttacacccattatgtgtgtagtaatactccttgaatgcctctagaaagcaagtcttggagggtcttaggaccggtagtaaacaagtcttactttgtgtggttggttttggttggagtacgaccctcggtcttgatttaatttgtttcgtgttcctggtctttcctcgtttagcgtgttgtctttgatcccttgctattccggtttcctttcggtctgtggctagcttggtggttgt

SEQ ID NO: 35440 - DNA, 496 bp, Arabidopsis thaliana columbia
gatggaacttttgataagaaacttctgcacccatatctgacatgtattttccaatgagcttttggacttcactagaaagaaaaatcacacaaatggagaaacattaagttacttgggctaggaccaaaacagaaggacaagtaaaattcttcataacgtaggagaaagctctatttcatgcgaaaactgagggaagaaaagacatacacaccctggccttcatgattcaacctaaagttctttatgtccttcaccagtttgcttccatcagaaacatctcgattagagagcatagaccgtgcagagcctgaggattagagtcaaaatagaaagtgtaaaacaccaaacaacaacgcattcaaagttggcaagccataaactcacatgactcaacagttttaaaccttctacagattccaatcgtatagaacactaattccaggttaacatgtacagtatccaaatgtggactttaattgaattctaaggtatgtac

SEQ ID NO: 35441 - DNA, 567 bp, Arabidopsis thaliana columbia
gatatatatgcttttattaaacattttgattattttaaccaaaaaaaagtagaacacacacattttctagatctcatcattttaatagttctagttgcaaatgttaaacttcaatatttttcgtatatatatgaatcagcttcttctttctttaattttctcggcgaattagtatattttaatccataagagatgcatgcataaattttattgaattaagtgaagacccaatggtcaaaagaaaaaaaaaatatagatatgcaccgacgaagccgccgcgagtagccgcgtcacagccaggtcagcaaaaagtcgccatccaattaaagaagagaaggatagcaacttctgcaacgtgttctgctgagtctgacttagattcggaatctggttcttacgatttaatgaccatccgattttcaacggctaagattgtttagaaccattagtacaatattgtcacatccgcagagaatccacgcccctaaatgagctttacttccatgtttttcgcatctcctcgtgataacatcgacgatcaatttgttttctttcaagttttgttga

SEQ ID NO: 35442 - DNA, 499 bp, Arabidopsis thaliana columbia
gcattttttctaaatatattaaaatatatacgggagatagagatgaatcaatttctaaatgtattcccagaccaaatggtccaaattagagtaaaaaaaaatcgagaaaaaaaaatctttgagcctccaaaattcttaaaagacttctgtttggaagtttgttatgttgacattttaataaaattaaatcggaaaaaaaaaaactagtctactcgactgattacaaaagctataattcattctagtgtgttcagttcaataaacatcttgggagcattaatacaaagaaaaaaaaaacaatttgaaaaagtaggattcacatttattttcccgcaacaaacaaatgctgatttaactcagataaacatttattaatatacaaaacgaacataattataagtagatacaacatgatcactcatttgcgatcaagaacccaaacggctggccagtaaacagacccaaaccacaactttccatcatctctttcataagcctc

SEQ ID NO: 35443 - DNA, 502 bp, Arabidopsis thaliana columbia
caccagtggaaaagtgcaaattgtacaccgcatgattgaagcacacaaatcaatgttgtgatactgtgatgtcttcctactttgtttctgataagtacatattacatcactcctttcgcccaacacaatccgtatactaaaccaaaatgggccttaacttgattgaaacccaatacaaaaaaatgttatgggcatttttgttcacgggtctttaaactggttgatctggtgaattatcacagcacacaataaatttaggaattcacaattgaataatgtacatgtgataccaaaagttgaatgaaacgtttttatacaagtgccgagtttctaagtgacaagattgacaaaataagtaggctatttatgacatttgggcattcctacatttagaaactttttcctcgatttttttatttggctaattgtgcttataaatttctatcgtcgtgatagttgtgcatgtaatttctatgatttgacaaaaaaaaaaaataataat

SEQ ID NO: 35444 - DNA, 488 bp, Arabidopsis thaliana columbia
gaaattttattttgtgctttgttcatttgatgctgtagaatattaaggattttgaaaaggttactgatgctctcataaatttctaggttggcctgcttttcaccagtcaaatgtgcactcgagtcctcttctatttgatatcgacaaagatggtgttagagaaattgctctggctacctacaatgccgaagtgctctttttcaggtaattctttctctcagatgatggatattcttttgtctgttatcatcgatccttagagttttgtgggttttgcatatgatactttcttgtttccagggtatcaggctttttgatgtcagataagctagaagtgccacgtagaaaagtgcacaagaactggcatgtgggacttaatcctgatcctgttgaccgttcacatcctgatgttcatgatgatgtgcttgaggaggaagctatggcaatgaagtcatcgaccactcgtaagtttctttatcatattggat

SEQ ID NO: 35445 - DNA, 527 bp, Arabidopsis thaliana columbia
tgtacttttttgttgtcttgaaaagataatcaagtgcaaacacaagtgtagtcttgccacatccttgaggagcgctaaatccaatctgcatcgtcaaaacacatgtatcagattgatccacccatcagtgatttgagattatcataagggaagaaaaaaaacaatatttagtaccactaaaggaggtacatcatctccatctttaaacttggaattatgcaaagcaatctgatcttcgcaccaaataaaaacgggtatgtagtagtggtatagcctagctttctgaggaattgtaagcttaagctcattaagctgaaacagtctacaaagttgtgagccgtagagtaaccatttgtcaatagactggccaactctttgaggagtgataccaatcttgtttacgagaggacccgagcatatgaattcaaaaagatctgacaccgaagagacatccactgtgtttgttgttggtacgccgagcacgcttggacgtccattagttgttgtagcaaatcatgaacattgat

SEQ ID NO: 35446 - DNA, 430 bp, Arabidopsis thaliana columbia
gagaatatgaacaagacagatggtaagaatgttcctttctgcagccgagttggttgtactgcaaaggtaacttctaccaagagatctcggattggctctacggataacaatacaaaagttggtctgcctccggttccatctaccttaaatagaaaggaaattgttgggagctcatctcgtactcctggtggatttggatacttgagaaagccagccaaagttactgcaagaagacagccgtcatctagtttagacactgaatcttcggaaacgagttgtattcatgatgatccagctgcaacagagcccacacttccacgccaaaagactaaaagagtcacaatcaatgttcatcctcaaagcgctgtctctagagaagttgtcaatacaaaggcaggaagctcaagtagaggaccagcagaattagtca

SEQ ID NO: 35447 - DNA, 622 bp, Arabidopsis thaliana columbia
gatgtatcgtctattcggcttgctaatgtagcataagtcgcatcacgacaagtacacagagtaatgttattagtctctgcacctatgagattacgaaggtaagtgatgccagagttcaaacactttctgcattggtgtcccggcgaaaatgggagtctgcagtttcttgaaacatgtccaaatcccggagactgatgcatttgtgtaacagtggttcgaccgtcacagtcatacttaacaaggatcttggttcccaaaccgcagaaactagtggcgtttctcgagactccgtagccctccatggctctagagatggaagcaatgcaggtttcagataaatctgatgtgactccaagattagttgacaagttcgcgtaacgagccacggacaccgcaacaaaagcgttcatgtagcggcaacatttgcctctgttggttatgttggagcacacagtagctactagagtgaaatttgatccactgaaatctaatggacaatctgcaaacacacatgacaatgcagcattagtgtctggtacctataaagattggtcgcaagttcaagcttttaactttctaccacaatagcttgaaaagacaaacaaagtttgaattttatggt

SEQ ID NO: 35448 - DNA, 368 bp, Arabidopsis thaliana columbia
aatataaatctaggcaggacaagtaatcaagtagagacaagttgggtaaaactctctctctctctcacactctctctcttctcactgacatttgtgaaaactaagcaactttacccaaattccaaagaggtaggattaaggacaaacgagctaaccttctggcgcccagcagcaagcggatcagcacggttcttaatcttgtccattcgattcactgtgaactagttcccacaatgacactacgtggatcaacaccaagtttagataaccatggttcgtgacacctgaatgacgcagaatccaatctcaacatagaaaacagagctaaatttcagaaacttatatgatacacgcacaaatatagtggc

SEQ ID NO: 35449 - DNA, 477 bp, Arabidopsis thaliana columbia
acatcatacatgcattacacgataagattagaaataaataatactaatccatatgaccaagacgaagaatcttgttccacatggaaacataggggcaggtcaactgtagtgagaaccaatacaattttgaagtcaaaacaatttccttggatcaagcaatcaagtttcgtctagataaatacaagaattaataattatttctgcttcaataatatcttgttctatcaccggttgaccaaaacataactcacggcgtcatgataaacttgctgcaaatctcacgaatttagagaaattgacacttttgggaatagtaaaacactcttttaattcagtaagataccaaaccgggaaacgtctttctactttcaagtttcaactatataccaaaccggaacgttctttttatttgcaataccacccagagttgataagtaagagcaaggagatttttagtcagggtttttagcctttatg

SEQ ID NO: 35450 - DNA, 570 bp, Arabidopsis thaliana columbia
  unsure (1)..(570): unsure at all n locations
tatatatcttttccacaaaataattgttcttaaaataagtaatgatttttagaagactatttgactcattttccacaaatggcctacttaatacgaactttaaatttgaaagatgcacatgagaatctgttaatcaaatctgtatagtttataactatctatagaaacacgaaactttgtttaagaaagggtaataaaacttccacaaagttttcatgcattatagaaaagaagtctcatttcgttttgaccaaaaattcctctataaatttgttcgtaacataatcaagaaagtaaaattcggtcgacactgcaagagaaaagttgttttatgtgataggacagcacgataagggactgtgttgagcacgcgtcagganacaatttcatgtcttcttttgtagttttctagtttcaaatataaccatataagagcctatgacccctatggtacaatttgattattgaagtgtccattttgcaaataacatcatgacgactgtctccactttccccatttcacttcaaagcagctccatatttatatagtttcctataaatatttgattg

SEQ ID NO: 35451 - DNA, 556 bp, Arabidopsis thaliana columbia
ggttatcaaacggctttacccaacttttggtggcaaatggttgctttgaagttgaaggctgtcgagttttgtgtgttttggtaaaagattatttcttttactttatgctcttagtatttatccaaggagttaacacttgtagaaaactgaacaagcttactgaatttatattgatgatgagtgttttagtttatcatactagtaactccaattattacacggaaagcgtattacaacaacaatactaaatcgtctcctatgatccacatagtattcgacagtggaaacactaagttacaagatctccgcttcatgatgtctgatcctaacttcagcttactcggattgtcctttggcttttttattaccttttatttgctcaatcttctagttctgccattgggtcatcactgttattgttgtcattattgtttctaccgcttccattagcgttcacaacttcgacccaaacactctggcttctctctgctcctccattgatatctcccaagtctgtgcttgtcttccgtttgtctcagctccaccgtctgagaat

SEQ ID NO: 35452 - DNA, 318 bp, Arabidopsis thaliana columbia
aatcatagatttcactcatatccgaaccaaacttccaaaagccacatgggtactaagattaaatgtctaaatgattatgcatagcgtcaaagacaagaatagctctcatagcattagcatctttgtgaatactttacgcctggatatctgattagcacaagaggattaccttatagatactcaaaactataaatgtctgtctgagatagtactaactgacccctcctacctaaatgactgcctccgacactgctacttgggcccatgtctgtctgggatagttcagacacatgtgagtattaacctgagtggttatga

SEQ ID NO: 35453 - DNA, 547 bp, Arabidopsis thaliana columbia
ttcttttgatgttatcgactaggcctggaataataacccgaaccgatttatccgaaccgaaccgaaccaagatttgagcaaatcggttcgggttcggttattagcatataaccgattggaagctttaataaataagaatcggttatcggttatacataaccgaatggttagccaacatttaatcctaaaccagactaacctagtagactcacatccaaccctaattttctaattgtttcactcgcactctctcactttctcccaccaaacgagatcatgaacgctctcagcctctcaccattcaacatccatcttcttcgttgaatttctctcaccctcacacaaagtcaatccttctcttgatctcttttcgtctctgtttgttcgttctcttttttttgttttaagttagttttcttctcttctttcatcctttcttcatattctcatctctactcttcaattaattcttcttctacacaaaattttctcttttcttttcctttaattagctttaaacaacggattatgatgatgaatttgtttg

SEQ ID NO: 35454 - DNA, 447 bp, Arabidopsis thaliana columbia
gcgaacttcgccataaaaccctcgaaaactaaatctacccatgtaaatgagccaacacagaggagaagactataaacttgagaagaaagcgaggaacctttaagtgctagcgctccccccgtggcttctctttgatcgaaatcatcagagactattcaatttgtcaacatacagtacaaaatcagatcaaaatgacgggttttcaatttaacaaatgattcaactagcaaaggtggacgtgccggagtggttatcgggcatgactagaaatcatgtgggcattgcggcgcaggttcgaatcctgcagttcacgcttttcattaccaattattagctttgactctttcattcgcgttattactcttctgccctctcatcgctttcattggacatcaacatgtctgcccgttcaggagatctaaagtttcaaatttacgggtggagggg

SEQ ID NO: 35455 - DNA, 443 bp, Arabidopsis thaliana columbia
cgggtacgagctcgaattcgtagacatttttccttaaatcacccctaaaaattctacacaattagaaacatcaaaatattcaataactttctaataatgacacattatagcatacattattctccaatctttgattgaagaatgtaagaatcagtattaacattataagtttgtttctaataacatccaaaaatgagtattttcaaaatctaccgttggttatactaattcaaaaataacaaaaactacgtgacatctggtaaattatgtacctttagtatttaagatatatagttaagaaagaattaaatctgcatattacatagcaatattaaatatatatacatcagaagaacgtcgttataattaaaaagaagatttctgaataaaaagttgtggaggagctataatgttaaaacctggcaaattagacagcgaagaca

SEQ ID NO: 35456 - DNA, 564 bp, Arabidopsis thaliana columbia
tttcaagagattctattaaataaacatataaatagaaagatcttcttcttctttttttcaaaatataatcatattaaaagaagaaaccgagaatgaattgaaccacaaatcataaacataacatcaagttgaatatatacttccaaactttgtaaactagagatagaactccttgaaaaaataaattcgttaaaccaagaaacatgccgaagctgaaatccaacagaaaacatagtgcccaatcttaaacaaatatgtttcaccgacaagcttattcttacataaaagactaaaacatgaggagcacttgtagttaaatacatccttggtattttaatgtgaagatttataatccccctttgtgcctcgcacgtaagttgttagaggtctattcaaatgattatatttttccttcgtctttatatggaccctccaactccaacatctacaaaccaaacataactaacgcgaaacttcaaaagaatacaaagagaaattagaaaagagggacggaggatacaaatatgtcctctccttacggcaaagtcgacgagcgtgaacatg

SEQ ID NO: 35457 - DNA, 502 bp, Arabidopsis thaliana columbia
tgtcgagattgcatggcaacgctatatgtcaaatagggtttctgatctaactctttttaaatatatatttatcgttgactttaaaattgtgaagtaaaaaaatcctgattccaaacaacttaattgcgtgattagtaaaactctgtttcaactcggaataataccttgactttacggataatctgccataatcactatattattagaaaacattaaagaaggtattttaatggaggaaaaaaagaaaagttgtggaagagctataatgttaaaacctggcaagttatagccagcgaagacatactcagtgcttgccttgtcactcttcttacaaaaccccaaagaaaatctaattccttcttacattaacttaccaagtctctctctatccatctctaagagtagggtcagaggcaaaatacggcatcgtttaagagttcaatttgcaaccataaaatataatgagaggaaatgaaaaagtcgtatctttggcatttgacga

SEQ ID NO: 35458 - DNA, 563 bp, Arabidopsis thaliana columbia
cagatcccagatcttggttagtttttgtgtatgttttacatctaaaaaactgcaaaaattgatgtcaaaaaaaaagatgtcaaaaaaaaaactgcaaagaaaaagccatatttttaaagtatttatatttttagtttttcataaaatatgttcttaaatttcaaacgcctaatgggaaaaatgttttatttgctgcaaaagtttattcataaaataagtagcagaaaatatatgctgaaaatgttaaatgttgttggttaatattttaaaaaaattacacaccaaaagcatcatcagcgaaattagacattcacttacttgaagcgtcaaagggttaaatgttcgaacccttcttccttcatatcacttgattttaatttggtctttgtttcttgcttgtaacccattagaaccagggccactatgttctggcttaatgtcttgggtaagatctgtctagttgtacgggccataaaatccagtatcacacgcttttgatggccatgacccatgaggccggtgatcgggttaccttgtgccgtccgtttgactttgattgatga

SEQ ID NO: 35459 - DNA, 466 bp, Arabidopsis thaliana columbia
tatagtatattaaaaggaaaagtaaaaaggggtagagtgaaataggaaagaagaaaagacatgagtaagaagaaatggtgtttggacaaattagggtttgaaaaaaaaagattaaggagcgagagagagggatgtaataatgaagaaggagggaagagagagagagaagggggcccataatgtggcagggcatgtggctgggcttccaacttgaccttgtcggttgttctctgcactgcccttctctgcaacccacacacctctctctctcttttttctttcattttaaaatgaatatatctcattatttcatcttaattaaggaaatttagctaattcaaatcatgtagttactttgtttgtgctaaattatgtctacagataagagtattatccaacagtttcaaggtatatagtgacaaaaacacaatctatatagaaaaatagtagaatacagaaacaaaga

SEQ ID NO: 35460 - DNA, 552 bp, Arabidopsis thaliana columbia
tagcataaagatgcttatttgaacattaaaaactaaccattttgcgatcatttaacttacaaaaaatctggtttaagttgttagataaacacatcatcagttacacttattccgttgtagatattcagaatgttacataattttaatataatttacttagaaaacaaggacaagttgggatccataaaagagtaattaaagaaaaagtatgggctccaaatgataatctggtgcacgcgataacacaaacaccggtttagtgggtcctttgtggcagagaagcacacgtcgagtaaggaaggatcaccctctttctatgtctttgatcggctcaatccccaccgtacattctaatctctacgatttggctttgcttcgaacaagtttattccttaaggaagttaacggaccttagctcagtttgatcacagataacaaaaattcaggtcgagctcaatcatccaaaccgtataatactaactcacacttgaaatctgtacttgattattagactacatacaagacattagagacttgtaaaacaatatattg

SEQ ID NO: 35461 - DNA, 586 bp, Arabidopsis thaliana columbia
tgcaaatggtattgctatcaaggttagcaacgcaccaagaatggtaaaaacaaaacacgcgaacatgcgagaacaaacctcgtcagtcctttcagaaacaggtgaaagccccaaatttctttggccaggcaagtcctctggaactgtggaagttgaaggctctgttctataagattctgtctcccaatttccagactgagtggtgaagtcatcggttctaaaaggtgaagatcttggaggtggtgacggcatgtacaccgggaaaccaccatcccttaaatgttctattcccatgtcatcgttatcaaatgtccgaggagattgtgcttctgttgctacagactctgcatgcgcgggtcgaggacctgcagagtctaggacatcttcagtttgctgcgctggagatagctgaactgtactgtctggattagtagaatctggaattggagagaccggattaatttctacttcagcttctcgagtaggagatacagatgcaggttctggtaaagtttcatcagaaacagcaagatgtggctttgaagctacatagtccttttcaaagacattgcgtaaatcatctgag

SEQ ID NO: 35462 - DNA, 543 bp, Arabidopsis thaliana columbia
ttctctgcaatctcaatgtcaatcacaattcatcaattccaaacacaaatctttttcttctcctaactatcacaaaattagatgagtgtttatgattagtacccttgggttccatatatactatctcattagggtttagattttgcttgtattctcttaattttgtttgattaaaatcgatttcaaggtttctgtaaataaataaatacaaattgaagaagaagaacgatggagaagaagcatgaacaatgaaacaggggcaaatcgtaagttggcatatctgaaagtttcttttttcaaatcccatctcaaaaatggttaccgagaggaagcaaatgtttttggtcgacggagtaacgtggtggtggtggtcgagaaagaagaaagaaggagatgatacagatgacaggggtaaaacagtctttttccctagcacaaagtactctttttcaaaatccaacacagataaacctaaattcaaagatttggcaaaaaaaagccctgttttgacaataaccctttaattagttgaacaattataga

SEQ ID NO: 35463 - DNA, 463 bp, Arabidopsis thaliana columbia
cctgcccgcgaccgaacggactgaccgcaaattgcccgcttctcttctgatccgcaacggaccagtccgccaacgaccgcggactacagaactcagtcctagcctcccctcaaagcccagcggatagcggaccggcctgcggtctttagaagcagaaattgtgtgtggttgattgacgaagctgtatcttgtttctttgtagttcctcaagtggatattaactaaagagacaaacaaaactatcttgctgggtcgtcgttgtctcttttgttacttgttagaaaagatactgaaaaatagtcatcagattgttgattaactaaatgatctgtcccatttgttttattgaaacaaaaactcaaatagtgaaactgaaatctaaaacataaacacaatctgaactgaaactaaaacataaacttaactgaaactaaaacgtaacacttgaactgaaactaaatca

SEQ ID NO: 35464 - DNA, 494 bp, Arabidopsis thaliana columbia
actctagcgattactataagaatcatttcatcatgttatatatataatgtcgaaattcttgaccgggactggtttgtctttttctaactttgtataggcttattgatattttggccacattttctatttttgttctcaaaagtctttcgtcaagtttaagaaacaatggctatattagagcagtcgcttttggggaagtttctcggaagcttagttacattgtaaaaatgactattcacaattcacaaactaactaccgcactaagtatcatcacattctcacatgtcttatataataaaagaatatataaataaatatctacatatggatattcttgtatgcgatcggcactaacctcattaatcaccaaatcatgtatatatggattcaagaaataatctcattaagcttaaccaaagtatacatagtcaaattgaagaagaaaccatatagtaaaatttaagaaacaatctttaatgtatatcaaactgtt

SEQ ID NO: 35465 - DNA, 499 bp, Arabidopsis thaliana columbia
aagacatgaaagttattaatacacttaaaaccgaaatgttttaacaacctaaacctaaacataaacaagacctgcaaaataaatccaaaattcggtttaattatcttatatctcaaaatcgaaactaaactagacccacacatatataaacaaacctagttttattgttttatcataaaaaccaaaactcaatataatttattgtaaaaagtatttttgaataaaaacacataataaactaagcagaacatataataaaatattttttcctagtttgcaatataatctgagtttaaatccttacaatacatattgtcgataaacgacaacatgtaataaatttgtaatatataacgacctcgatcgtaaaaattaaaaatattttcattttggatttggtttcttgtatatattccctaaaccacaacccaaacaaaaacagtcaataaaaatctgattaaacaccaaatataaagatcgatgttttttgtttaataag

SEQ ID NO: 35466 - DNA, 535 bp, Arabidopsis thaliana columbia
gtaacccatatattcatatgaagccgtatatgtttgttagcttgatttgttttttcggtttacataatcattctatgcaaacataaccgtaatgtcatcataatcatattattatgtccatgaaatgagatttctcttggcttttatttttttcatctcaacctaatgaataaatttgtgtatagaagaggtaattaattatgagtcaaattatgagtcaaattatgtaagtcttgggggagttaagagattaatcacctatggtatcgccgacagagaaggtctttccagtggtgagcggagtgtagtcggtgccaagggaccagttcaccgtaagactggcggatgaggcctgtgcgaccatagagaatatgaggacaagacaaccaagaagtgtgctcatatttttttctttatgttttatatatactatttttattaagggaattactattttatgaaacttcttgtgacttatgcagatatatatatagataaggggtgtgttgatttagtcgagttacatcttaggata

SEQ ID NO: 35467 - DNA, 468 bp, Arabidopsis thaliana columbia
tcaagattttcagatgatgtcgccggacggacggaggacatgggatcagaaccaaacacatatcatgatttggttctctactcgctagtcgctttcactgtccatgtcttctagatatcctcttttccgctttcgcatccttcgtcgtctggtgctccttcgccgtcctcgtcagaatccaccgccgagatcgttgatcgagtgaaattatgggagactttgagacatgaaatcgatctggattgacttaagatgtattcacaacagaggatggagataattcacgaaaagatatgctttctctgctccgatcaatcttacggatgaagtcaatcttacggtttacttcatagttctagaagagaactagagaaggaaaaagatgaattttgttatttctggattagggtttcgaagaacaagagagaatgggtgtatttataagtaaagtttgtctgatgaaaaaag

SEQ ID NO: 35468 - DNA, 543 bp, Arabidopsis thaliana columbia
tcaagattgtgacacgtatcgcaatctgtacgacgcactagcaacagtatcgtgtgaatcgcgtttttcccactttcctatagaaagaaaaaaggaaaaatcttaagatcacctaatcagtttggtcaaaaataaaattgatggatcaattgaccgaactgcccctttcacggatgcccataataatcaatacgttcgttggttgcttcaaaactacgactcgttcaaaaaaacgtgttcggggaaaatgataccaaagatataaaaagtttagatgtgacttagtttaataagtgttgttgatgggactaaatgaagcaagattagagcaaaccgagtgatcggccaattgatcgaaccagattgtcaaaccggtttggtaactcgttacccctagctacgccactacactacttgcattgttgcaaagaccaagtggctgttgtgttttggaaaaaaaaaaaacgttctggggtttagaaaaattgggtagcgaatgggtccttttgaaagtgatatctttttttgtagaagaggggggcg

SEQ ID NO: 35469 - DNA, 517 bp, Arabidopsis thaliana columbia
taataaattatgtttttatcgaaaaaataaaaattaaataatttcttaatttattcgcaaaaacatatgcacatatatcacattaagtagtgaaaaaaaatatcccagtttgtgtggggttgtagttgtaaccataaaattcaaattaacccaagtatttcgggttgtacccattttcgtattccacgtcagcacatccgcattatctccagaaccaaagattctcaaccttacactggaatcgatcacagagttcacgatattttggttcacaaaaaacagagcagagagattgtgatgacgacagtgaccaccagcttcgtctctttctcgccggcattgatgatttttcagaagaaatcacgacgatcctctccaaatttccgcaatcgatccacgtctcttcccatagtttcagcaacattaagccacatagaagaagcagccacaacaacaaatctcattcgacagacgaattccatttcggaatcgttgcgtaacatttctctagcagatt

SEQ ID NO: 35470 - DNA, 577 bp, Arabidopsis thaliana columbia
ctctttcctctgtttcgccctctcttcgtcgatgagagaagagatcctgacaacgttttctccgacggcggcgtctacggcggcatctacggttcgagtaggagagatatcagatcacgagcaagaagagagtcgctgctcgccgcattcggagcatacgagattgactaatctgtcgttgagacagtacggacaaataccaacgccggaggaaacagatggatgtttccggcaagtgaattccgacggagtactgtaatataacgaaacgtcgtcgtttcttcgttccattgctgttctctttcctctttctttcattgcttaacaaaatcaagaaacagagcaacgcaaagaaaaaaaagtttcgaaatttgggattgtatgtatagttttgtttgtttgggttttttgaagatccagagaattggagatgacgatcggatcttaaactagggtttctttcaaactttatcttttttttttgctcggattttgatagatgagaggatttttgacagagtgagaaagtgtagtgaagcttagctatagacttcaaccttcaagagtgttgtttgct

SEQ ID NO: 35471 - DNA, 564 bp, Arabidopsis thaliana columbia
catgaatctattttattacctcttatatattatattacaaaactacaaattaaccaacccaaaagaaacatgcacttgcctttctatggctaatctttatatatataatatatgagcgagatatattgtggaaatctgagatatttatctacaaggggttttaagatgaaatatttttctgtgttgtaggcgccatgtgtatacagctacttggacgcgcaagatttgaatccagatcaatggtggaggttagatgatgtggtctttccgatatcttctgactatgaagttttaaagccagacattatggcatcgttcatggaactgttgctggcacacacaagaccgctagagacattggttgtagagttgggaagttgcgtcgctagatcaagatttaacgagctgtttcagatcgcactcgcgctttctcactacaataaagtctcaattatgctcatgtgacgattcggctgatctcattcatcagctttatgtataggtggatcccaccttaattatagggggattctcacgaagactgattttattcgcgagagaatg

SEQ ID NO: 35472 - DNA, 559 bp, Arabidopsis thaliana columbia
tttgctttagtttatatcgattttattttgtgactaaatactagttttgcaaattactattcattatgttaatttaaaatattttcaaatagaaataaaataattattaatattttaaaaaaagatataaacgaaatcgattacaaacaatgatataacgagaaaaggatagcattaaaaattcattcctaacaattttgtactcaattattttccatttttagaaaaacaactgcttcccaaatatttgatcttagaatatttttccaagcttttaagatctttttgacagataggtggcacataaaactaggtggtgacatagatatcgacgtgtgtaacgtttcttgtgtcctaaatcgattaaaaaagcctcacatctctttgtacactacaaagacaagatcattgattcactcacaactttcatctatttatagtctttaacccatttcagtatcattgattcactcacaaagaagagatcattgattcacacacgttttccttttttgttgttagatattccacacactttttctccatagaaagacagatg

SEQ ID NO: 35473 - DNA, 539 bp, Arabidopsis thaliana columbia
tattgtcgactctcgctgatatctcgtgaccgtgaaattgatgatccggatacatcgctgaacggtaccaacggcgttgccgcgttggtccaacgccatgtcgagagatgtctctcgtgtatgatcaatttttgacgatcacgggctaattatacaggaagattactttgagttctagaaacgagtctgacgtgacgcaaaatctggatgcatctatttcgggcaaagagaatcgcgagtgaacgtgacgacgagatctggggtttcggtggttcagagtttcagacctgaaaagcgagatcttcttcatcatcaaaaattgcagtttccgcccaagtcaaagacgaagagatgggcttcagattacaacgaatgggctttagtaaacaacaatccatgagtcatgccgagagagtcataattagtccaccatgagtcaggttcgttgattcttaatttccttttcttttataatttttttaataaagattttgatttattttatgtctgttactttaaaagtttttactgttttggat

SEQ ID NO: 35474 - DNA, 533 bp, Arabidopsis thaliana columbia
ctgaaatttgaaaacaatggtgagtactgagtggcttatatatgcttagcaattagaaagttttaatttgttttgtttttgttttggcctctcaaaggagctttacttctttatatataacaagaaccctcgttcccatataacgattatctttacgggaattttttttgtttcaaattatggttttacatttttttaattttattttgagttgacatttttcgatttcatgttaatgagaaggacatgaaaactaaataaaaagagtactgcagcagagcggcacgatatgtcacgtgtcttgtgaatgtaaaaagattcggctgcgtttgaacgcaactatttttctaatctaagtttttcatgttacaaaactaactatattcaactaactattttatccttagtaaaatagtttgtgggtcatgtgaagggattaaatttagtcgctgagtcaacatttcggatcattgttgagtcccatttggccgttcatgttactcaccaattaccgttagttattctacaaaatt

SEQ ID NO: 35475 - DNA, 438 bp, Arabidopsis thaliana columbia
agtaggtgattcaacttccaaaactccaggaagttctgacgtagcagctgtttctgaaatagactctgggactaagttgacatctaggaaactcaaaatttcaagtaaggcaaaacctaaagcatcgaaggttgaatctgacagtcctttccattcattgatgcctgcatatagtagagagagaggggagagcgagcttcacaatccttctgtttctggacaactcttaccaagtacagagacagatcaggctgcctcaagtaggtacactacttcagttccgcagccatctttaagcctagatatagatcaagctgaatcttgtaggtctcatcgcgttatatggccgccaacaggatgagaacattctgcagaagacacttgttattaaacgtttcgcagagatggctgatcatgacagcggtagtcttgatcgag

SEQ ID NO: 35476 - DNA, 607 bp, Arabidopsis thaliana columbia
ttttgtcctttttcttttccagcatctaatccaggatcccccactgcatttggtggctgtgtcttcttcgttccctccaatccaggacccttcctccatctgttcttgtctttcatgaccataacacctctggcaagcactggtcagctgttttggagaatatatcttaatttgcattttttctgaaatttcctccattatataatgacattacgctttttgggcaaaaataatacagaagtgatgttgtgttctttggtgtacatgatctcaatatgtctcattaccttagtgttgtccttgataacttggttaagtgatgtccatccgatttcattactgtagagttaccattttttccttttgtgattgataaacattatgagaaagaaactttgaaaccatcttaatatcctgtttttcctcagattttcactcattgattcgagcatacttaggaggatgttgcatgctattactttggtgtatttctaatggtgatttcttcaccgtttcccatccactgtaggaaaaggaatccttattctgtaaaggcagaaagtttaacagaatttttgtggaaaacagaatgtgtcatgctgaatat

SEQ ID NO: 35477 - DNA, 565 bp, Arabidopsis thaliana columbia
acgtttatcaaaaaaagaggtgtgagactatcatacttttattaatagccaggaagagaaagaagaaaacgttcaacgtactaacactattcagtatccacacatgtgcgggaatatatgaataaataatagtatcatttaccattttttataacaagatcatcttactttagctctaacccctttttgtttctagattgtctacgaatataaaataaaaatatagtattaaaattttatacgtggctaaacttacattttattgtattatatcacgttaaagctaagtgactaacgaattatatatacgatataataataataattcgtggttaattttaaaattttgttaataaatgttctataaaaattaatatatattgccacacatgacacccattaacacaaatttatcaaaaatttcatggttacgtacaaaaaatatataatcagcaattcaccattttgtttatatatgttcttattagattttgatattttgataggtaaaaaataaataaatactggggtaataatttacgaaaagtttttgagtgttagatag

SEQ ID NO: 35478 - DNA, 489 bp, Arabidopsis thaliana columbia
tgacctgaaaactattttctctctcagcaaaagtctggttccccgtgaataaattaaaccgcgtcccattaccacgaacacctctcatttctcccaccgacacatccgtatcagttagatacacaactctcttaaccggagagcctgaatctttacgctctaagatatcaagatgctcaagctcctcaggtggtaaaagcttcaaacaacctaccacaatccatacaatactttcaatatcaacatatccttccacaacacacacaactcataaaacacaacaatactcaaatttcatcacagatgtctcttttttcccacattcagacataaaaacagctcaaaaattcagatcctttttccacaatccatacacacttgaactattaacttaaccattccacaacatacaacacataaaatcaaacaataccaaagttttaaccaatcaataacaaattaaagcaactctcttttcccacattcatg

SEQ ID NO: 35479 - DNA, 623 bp, Arabidopsis thaliana columbia
taagaaataatagtcttaaaaagaaaattaaatttcttaaatatgtgcttttaactaaactctgcgatctgaattctgattaatctgaatttgagaaggtttttttgcttaataaaatatgtactttcaacttctgagttctgataaaattaaatgcaaaaaatgaaatgaaactgcacctgatttggtcgctacttacatgtccatatcatcactattgcttgagacttgaatatttcgaaagagagagatgtgcaggcgagaatcactacacaccaaattaaagtggacacaaaccggattcaaccataacttccctctgggctctggctacatctcacgcacgtattctaaatctagagccagcagtttactaaacgacaacgatttagccttagcgcgctgttggaaaaaacactaccatgcaatgttatgtcccacatgctactcccatcattgctggtgaacatatttacgggcttgccttggcggggacagacgaagttggattagtatcggacggtggagatggtttgatcgctttaattagttgaccagacccgttgacgtgaagttgttggtcttaaatgctgaaacggtgggccgtttagatgaaaacaatg

SEQ ID NO: 35480 - DNA, 507 bp, Arabidopsis thaliana columbia
gctataggtattgggtgacttttggattagtctgcatatctattgaaccatgtacaactttaacaaacttataaggcgaaattttatttatatatcttctcgttaaatagtatacttatagtaaaattctatatttcatatagagtttgtcatccactgttctattagatactttcagaacaaaaatccactcgtaacgctattgtcttgttttctcgcagagctgataattttgaaataccactccataaatgctctaaaattttcaaaacccttatatgattcttttatatttaagttgccaaatatatatgttcaaccagtgcataatcgaagaaattacagagacttatttgtctaaaaaaccacaaaaacataaaaatttatagaatccggtacttttaagatggcttacgaaatcaggtacttttacttatttgaaatgacgctattacccttgattcatcatgtagagaaaacaaatagaaattgtatgattttgttgtg

SEQ ID NO: 35481 - DNA, 547 bp, Arabidopsis thaliana columbia
gtaggtggttacgataatgttgaagagtgtgtttttttcttagggaaaatgagcaactgtcgaaatatggtgatactaaatctgcaaggtctataatgtatactgagttgaagaaattgattgaggcgaatcctctgtttcgagagaagctagccttccccagtttcaaagcttctcgcctgcgaactttgatcaatcaaaggtgaactaggaggagtcataattctttcctttttttatagagattagttaaagtgtatgacaagtgtgtttgggacattgcagcttaaactggcagcatcagctatgtaaaaatccaaggcctaatcctgacatcaagacattgttcttggatcactcttgctcagcatcaaacggtgctcgtgcactcactcctgtcaatcttccagttgctgctgttgcaagaccttcaaactttgttcctcttggagtgcatggtggagtaggatcacttacttaacttccacccattctattatataacttaatgttcatattttgagggttgatgaacaactgtatctgt

SEQ ID NO: 35482 - DNA, 495 bp, Arabidopsis thaliana columbia
tatccccatgaccaatctaaattatctaataaccacacggtccacaccgactgatttctaatagttctcgacttactcaacatagttataaccatatatctatattgcttctccttaatttggtcacttatcaacaatcaaaattgtgacagtcaactccaaaaacaaaccaacaatgcagctttaagaaacaaaatccctacctcaaagagtgaaacttagacagaaaagaagattgtagtaatagactatttgtaaccaacccaactaataatcaatcaatggtgctgcaggaataatggcaaatgagaaagtgttggatgagaccaagaacaaagaacacatctctcactagccataacgtttgagcacagttcggtagtgtaacttatgttaaatctctataataagtgcaaaaatcatgatgctatgaaccaatgactggaaaatgtaacaaaatctatcacttcccataaacacaagaaactaccaagt

SEQ ID NO: 35483 - DNA, 545 bp, Arabidopsis thaliana columbia
cgattttgtagtctaaagtcgatgtgaattaaattaattatcattcaattttaaaaagtttatgcacgtcttaaagagtattaggaatattgtatcaactattaagagaataaactagcatgcatgtagaaacatgaaaatattttattttgttgaaatgtgaaattcatttttgaagataataatatgtagttatttacaaaaaatgcaaagaaaatatggaagataggataagatatcaaaatattgagatatttatgaaattaaacattctctaatgaaatttgttatactaattagtattgcaaagggaaagagggggacaaacttgtatggttaaacgttaggaaacatattgcctaatggtgtagtcaatatgagaatgcacttctcaagcgagagtcatgagtattgcttatcttagagatgtcatagtcttgaaaaagtattcgagtcgaataagagttctttatggttgtaaattttagggtgatatgcaacaaaattggaagccgtaaataatggattgtgaaaacaacctgtgt

SEQ ID NO: 35484 - DNA, 319 bp, Arabidopsis thaliana columbia
tgaaatagtaaataggattttaaatctttgatagtaatttcatcgctaaacacaattaggcaatttatgatgcttaaacctgtcccagttttggtacttagtaattccacctctagtcacaattgtgtaagtttgtcatgctttgacatttcaattctaacttttcggacccacttttctggtggtataattagttgtcgggttatgaacccgacccaagggttgatgaaagcagatttagattagataccttaacccaccaagaaactaatttcgatatataatatcgacataatatgatccaatcagtttctctagc

SEQ ID NO: 35485 - DNA, 459 bp, Arabidopsis thaliana columbia
actaaggcttgcaccaaacccgaatggtaaaacccgggagtgatcaggtcaaggagttttcaggtgaggatacaattaaaagtggtgattaccaaaaggacaaaaagaaggtggggaacaagggagatatgtgcttaatcgagagtttctttctaatttcaaaaagagtagagactaatcaacaaatgctggaccctaggaatagacgacgtttcgacatcggatttgtcactcacagctaggacacacaacacagttccccttccattctcttgtttatccactttgaaaagattaccttctttttctttcctgtggcattattgagtggagagagagagagaaatagattgagagtacttaactgatgacactagacatcagggagcagatatgatctccaattgatctttgtttcttgatccccaagaaaaagacataactttatcactaataacg

SEQ ID NO: 35486 - DNA, 224 bp, Arabidopsis thaliana columbia
gaacacttagctgcggagttctgatgggctcgtaatataccacagatcacggacacaccccaaacagtacctaaaggtcaaaatttgggggaaaaaaaagaataggtgtaccttgaacccatggccatgctcctttggatggaagaatctcttgagctttcaaacggtatcacatggcaagtttggcctcatggtctaaaggttataaagtctcaaagttttta

SEQ ID NO: 35487 - DNA, 597 bp, Arabidopsis thaliana columbia
caattgggtttgcatgcaccatctaaatgcaaataccaaattcggaaaaaactaacaacataagatgtattcttatccagatcttcatcgaaaacgtggaaacgaatgggccagtacgagagacttaacctatctcctagccgtttttatactatcaatatcgtcccgcaatacgatattgtattaaaacataggggtatatcccaacgtagcaaactttcttaccaccaccatcagttgagctatctatgccacatatattgtacttcttgcacactctttccaaattttcataccaccatatttttgcttgttgcgccatgcttcgactgtaaacaaccacttattgttagattgattgatacaaatcctagattattacttatgatcccaacagattactatgcaaaaagaaagtgtagcattgtataagcttagagcccacattacttgtagctcaaatgtttgagaattgtcgttccgtcactgcggatgttaagtaatatagacacgcctagtgccaagtggatcactctgccttcacctgggaatttgacctgcatgcatgtgtttgagggaattacagcaataatggta

SEQ ID NO: 35488 - DNA, 620 bp, Arabidopsis thaliana columbia
gcatgcgtaatgtttcacaggttcatgggaacagagtcagagaaagtgattcccagagattagttgatgtcagagctttggataccgttgggaattcgctgacaagatttcatgatcagccttattgtaataatttgttgactcagatgcagccttctaatactgactcaatgctggtggaagaaaattcagaaaaaggtgggcggttaaaggcagagcatatcagaaatcctcttcaaactcaatttaattggcaggtagtgtactgtgtacgcatgctttttgtaattatttatgaaagagcaatgcatagatattattagtgaaagtatagaaaaaaatgtccatggatgttaagaattatacaaaagagagagatgtgttgtgaagaaaaagcttagaaatgtgtgacgatgtcatagcatagcaaactttggagctaaattagatttatgtatgttttacatgcctttatcagcaattttctcagggttgatatttctgtcattgacgcattgttaagctagttggttgaagttgaatttatctgtcggtaattactctgaaaaggtgcattcgatgccttaatcagttttccttgacctcagataagaagatga

SEQ ID NO: 35489 - DNA, 560 bp, Arabidopsis thaliana columbia
ttcacacgtgcctctgcatctctgtcttcagggttcacctgcttggaagaaaaacatccatcaaatcaattatttcattctgttttccaaagttaattatatcattctgtaatgaagtcaaatatagtcttcattacctctatcttacacgcactgcagagcttcaaaactatatccttccattttgcagtcaatagttcatatggcaagacacctagtgcaagtgcagaacctcttcggacagctacatttgggtccgttagatgttttaggtgttttaatattaaatcaacagatttcttatcattgccaacgagataagattgcacaagctgtttaacagcactgacagctgcattctgtataataagtgaaacttgtcaactattgaattctgctaataggatgagaataacttcatgacttttagaaagataggtacctgtatttgagaattgggatgtcttaaattctcagtgagagtatcaagcaagatccgttctgttctttcagctaaagtcacatgcgataacgaaatacactcgataaatcgtgagaca

SEQ ID NO: 35490 - DNA, 155 bp, Arabidopsis thaliana columbia
tatcattgatcatttaacagagtaatttttgaatatttttttctttttcctaaaaccgatttatttgtatatatgtgcgtatatatttatttttctgtaacttggttgtatttatgcagtaatcaacggatttggatatgagtattgcactgtag

SEQ ID NO: 35491 - DNA, 580 bp, Arabidopsis thaliana columbia
catcagcagcttctctaatataattggtataagtatatttatatggaatttataaaaaaatgtataatatagaaaaactctacatagtagttgtagagaaattggcaaaaataaccataaacatttatattttgtcaaataatcatataacataaatggtcttcctggaaagtactattagagttttttttttttaaaaacagtgtaaaagacaattaagaataaaaagtatctagagcagaattttttatttttggtattgttttttttatttaaactctaaaaaaaatttagcttgtttagatagatttactatattttatgatttatatgtaaacatgtgttagtgtatatgttctatattgaatgaaacgttttactaagtcacatatacatttagttttttgaaaattaaaatcgtagcctgagcgaagttttaaaaggggtttcaagattcatttagtttttacaaaaattgattgcaaataaatataaagatatgaaaaaagacattattcaaaaagaaaaatagaaagagaaaatgaaaagagaacaagagtaaagaaaatgcgcatgtaag

SEQ ID NO: 35492 - DNA, 562 bp, Arabidopsis thaliana columbia
tatatacgaaggtcttcgtccacatgttcaatgtgagatacaaaataaaaataacagagaaaatcatgtagcgataacatgtatggtcgtttttgttaaacaaaaaaaaatgtatggtcctttttgtttgttactacatgtctggtcgttgtaacgtgactaatgtgattgtgagattcgattaatagagcaaaaaatattgaaaaaactgttcatacaatataataagataacttcaaattattagttgctaggcttagaatcggtcttcagtttggtccattccatttgtgttctatccgttgtccaatgctgacagtttatcggaatgatactgcacaaaagaatgttttgacaggaagattaactgtaaaagctattgtttatatttgcaaaaattgtgtttttttttttctttgtatttgcaaataaatttgatatcatttcttttagggcactttcttttattctctagaacactataaattaatttcaattcattcgcatacccaaaaaataatgtcaaagtgtcacaggttacgtgttttttgtgtttgaaaat

SEQ ID NO: 35493 - DNA, 469 bp, Arabidopsis thaliana columbia
cggatatttttgattatccaaaatattttggttccgtagtaattcaagtttcgattcttttgattataatgtttagtaattatttttaaatttttgtttcgattgactttattttgctttcctatttcagttcgatacattaggtttaatttatttgccaaaacctaaaaattatcattttcttgtgtttttcctccttcttctcaggataataattagtttatgtatatttagacggtccatttaaattcgatattaattagtattacttcccataacttaaagttcggttctaattatacaaatatttgattaacgcaatctcgagtggtcaacaacatgatacatgatctttaacatcataatttcctccatcatacacaaatgacaaatccaacagttaataataattcagaaaaaacaacagcttactagaacagtaattatagaagataatgtctaacataat

SEQ ID NO: 35494 - DNA, 433 bp, Arabidopsis thaliana columbia
ctaattatcgatcaataataataatataagataaaatatttcctttacaaattttatgaaaataaattgctatatattactctacttactttcacaaattgctatattttgtttagatatacacattttgtattgttcatttcattgtaaagtatattttgtggtgaggaaaaagagcaaaccattttccgacaccaattaaacgatcatagtcagaaacattgatgaaaattcagatgttgtacttcaacataatgtttcatttttaaaacgtgtttatacattttgggtaagtttaaaacacgaatacatgatcttactcgtgcaattcattacagtaattttgtgattataacacttgtgaaataccttaaacacaagtgcctagtgataagcgcgtgagtaactgtgtctaagcttcaataggaaattg

SEQ ID NO: 35495 - DNA, 538 bp, Arabidopsis thaliana columbia
tctttgtgtccgtcaaaatgcaactgaatagacttaagctgtttaagtcttggaataccttccattcctaaagtctttcttcctaaggcaagagtatttgtccgaagtttcatctgttttttcgctgcatcgggaggtaacgataaaggaccagatttgatctcagagaactgtttcttgagcttaaaggcatttgtatcttctttttgtttctgatcaatctctgcgctcacaatgaccggttgattgctctgtctctttctctcttcttctctcagtagattctcgatctcagagacgagtgctgcttcattgttactgtgcttaagcgttacatgtttccagcctttcttctcatctccgttcgtcatcgcttctgtgttctgctttgatacaacgggtcaaaatataagtcttacttcttttacaccaatgaaactcaaactttctacttatttacataaaattcttaagattcagatcatgatagccaatcacattcatgcaaaagttactacacaacagtgatctttataga

SEQ ID NO: 35496 - DNA, 496 bp, Arabidopsis thaliana columbia
ctctagtaacgtgccgatcccccctagtcggagaaaacacccaccaatagttctattcttgtcccggaaagagatggagctttaagtttctcttctatgattaaagatgcatggtcatcgggaatgggcagtcttgtggctaagacagataaaattttcaaaccacctgagacattgagtgcactgactaaccattggctcgagcttctgaaaattagatatgtcagttttaaacaaagcaacaacctcaaaactaacatggtatagtcatcctttacctccctgtaagcaaatgaagtctcgtgccgcccatttatcgtcatatgaaaaccttctaagccaaaccacaatgcggcagtgaagggactccctttgaggcatggatcatgagcatttgatagaccgagttccatagttgcatcatcgttggaactcttttccgaaatgattctaccggtctgtttgttgcagagaggaagttcacaactacaatggt

SEQ ID NO: 35497 - DNA, 487 bp, Arabidopsis thaliana columbia
aacatttccccaagtggtctttaccagtaaggagagagcaccaactggagcgataaagataggagtgagtaagtgagagagtgagtgagattcaaaaccaaaaagaaaaaaataaatcaaaacagaagcgagcgaagaggacggagggagaggatcttcttccctctttctcttatctactttctcttctaaatctctaatcttttgaaaccctaaatcaaagttttgtttttttttatcaactggggaagaagaaaggtgtaacctttatataaccatggattccggtgacgcgacatctttgcttttgacgaaaattcgaagcttggagccagattatgctcctaagattattgggtatttgcttttacatgattttggtgatagagacttgatgcatctggctcgtggacctgaatcgattttgcagtcgactatttcgaaagtgaagagtctcttggggattttctccaacaactcgccttct

SEQ ID NO: 35498 - DNA, 622 bp, Arabidopsis thaliana columbia
tgcgtttcaaaattcaaaatgtcttctcttcacttcttcacacaactctcagattcaatcaatggaggtttccgaagagcaaaggcgaagagacgaagcgactcggttagcttttgcggagaaacgaaagcagtcgttcgattcttcggaaaacccacagcgacaacaagatttcaggttagctaaatgtcgaaagcttgacggtagtaacgatgtgtgtcctcaagaagggtatcggaactacgaaccggtacgagtattgagtactagtgtgccggaaaagtttcgcgtcaggctcgagatctgttctcctgattcgttttcggttacgccggttcaattgcaagggtttcgatgccctgaagaacaagagtgccttcgtcaattgagaaagattctatctgatgtaagttcttctctgagttttctcgcgtaaagttttgttttttgttaaagggtgacgaaatgtagaagagaattttacgaaaaggggaaattttgagtctccgattttttaggggttttagtataatgcgaagaacgaagttgatattctagttgattttactttcaggcgattcctttcactacactcaaaatgatgatggaggaaaagctgggg

SEQ ID NO: 35499 - DNA, 483 bp, Arabidopsis thaliana columbia
ttcgatgtgtgtgtgtgtgttcatcggaagcaggagggtttggttttggtgctcgatgtaggtcctgcgatgcgtagtgttctccctgatgttgaaaaggcatgttcaatgctacttcagaagaaggtatacgatctttttcttctggaattattgttcatgaattttggatctttccttattggttttggtttgttgttgcagttgatttacaacaagtatgatgaagttggaattgttgtctttggaactgaaggtctctctatctattcttattactgattaaagtaggaagttaggaatctatcctctttagtactgcaatggttctttcttggagtattatcggcttgttgatgtactttgataataatgttacatgtgacctctgcagaaactggaaacgagcttgctagggagataggtcgatatgagaatgttacagttttaaggaatatcagagttgttgatgaattagcggca

SEQ ID NO: 35500 - DNA, 469 bp, Arabidopsis thaliana columbia
aagagatctactttctcagtcaactaaggatcgcatgaacagtacggtcaaaaaactgctacagattgagatcaacaagcggaacataattgtaaagcgattcgatctactatgattctgttaacaataaaaataacattatattcaaacaaaagagagagagagagaagcaatcgaacaatacccagaaagagtaaacgcattagcagatcaaaccaagcaatacccacaaacaaaattatatagtcatcaatggataagtttgcgagagattgacctgattcaagctttggagagaatgcaacagatccgaggatttttcgtcagagggacaaacacgaatcgtgggaatgcattagatttatcgcgttacttgagaaattagagttggtccaaaaacgtttcgcgcatttgcagctgcgtcgcgcaattttcactttgatcgtgcgtttaagtggttccaaaaaag

SEQ ID NO: 35501 - DNA, 553 bp, Arabidopsis thaliana columbia
atataatcttccaaactcatcgtgttcgaaggatattcttcagaataatgaaatggacttttaacatttattactagaatcttatccgatttttctttacaacaaaaaaatgaaaaaatataggtgtgaatatgatccacatcaaattcggatccgaaacgaaagaaattcccgggtcattggagctccgtgttacaaaaaatctccagatttctccatgactccaaggaaaatctcacagttcgctctaaaaaaatattatgtttgggaattcaaaaatcccaaagaatcaaagattcatctaataaactctctcctccgtaatcttcgatgggtaaaatctctgtaaatcgatcaccaccggagaagccagagaagtcgtcggagaaggaatcaaacccgaaattcatcggaagcaaatccaaaaacgaaaaatcataatccaccgtcgatgtagcaacagatgcagatgtagaaggagactctggtcggatctcggatccgggtactaaacccgattcttcttctcccttgacaatgtcttggaatgtgt

SEQ ID NO: 35502 - DNA, 540 bp, Arabidopsis thaliana columbia
gagagagaaaaacgcagtgacggacggcgataacgactgcgattccgggcatgagagaggaagtgaagttatgccgtggcggtggagaaggcggaggaagtggcggtggagtatctgaagttgttataacaaccgccgtgtgattgtctgcgagtgagacattgagaaagagagagagagtagagaagagaagtatcaaggaagaagaagacatggcttaaaggcttctagttgaaagagaaggtctttagacttaagaaatggttatattattttcgtatatttatcttgaagtgcctgaaaataagggaaacacttttgtgagtgtgtgagatagggagagaggtttttataaaagggaaagaaaacaaagtgaatgaggacaaagaggatgcattaaaaacatgactcccttctttcatctttcatgccttacaaatttgattttaggaactactatagtaaccaacatttttcatttcattttacattgaattcattaatggacattaatatatagggacaaatatcaatgatgat

SEQ ID NO: 35503 - DNA, 577 bp, Arabidopsis thaliana columbia
tcttcgacatatttgcctgatcccaaagcaataaaacaaaaagtgtcttttaaaattaaaactctcaaaaaaaaataaaaaaaaataaaaaactctcaaagaagatagtttttcaacctttatgactaaaaaatccaccttcatgtctctttttttcctttcttttattcctcaagtaaaagcagactgcggttacggctaaaccaataacagagcaacccacagcaataatgatttttactctgacatttcttgccaaaactaaaatttattaagaaataaattgttagaaacaataaagtagttgtacattataaatattatattatatttcacgtctcaaaatttgataatctcagctcatacacacagaagtagttaatgaagagtattctgttttttttttgttttggtcaaacaaattaccggggtctgtacagtggtctatatctgtacaataatttatatatgtactgtggtctatatctgtacagtgaattatatttgtgtttggagaggtggatagataggacgactagttgctcgatcaggaccttagctttattgcgagcccaga

SEQ ID NO: 35504 - DNA, 1311 bp, Arabidopsis thaliana columbia
taataaatattagttatataattaaattttaattaaaaaaaaatattttgatcaaataaacaagtgtctttacgagtttttttggagtttttcattgaaaaactctcttcgctctcttttttactttttgattatatttcatttttatattagatagtttctcaataaaaaatcattgacgaagatgatcttatataatgaacaggttttgaataggcctgaagaaacggggaggtttcacttttcaactcagtttctgtattacagagaagaattgttcatagcagaacttaataactcacggctgggaggaaagcctgttgttttcgatatggacatgagcgccggagatttcctctctctcttttatctccttaaagttccagtggaaatcatagatttgaaggtattgttttgaaggggttcaaaccatttcttgctccataagttactaggtgaaaaagtaaccctaataaaaatggacataattattgctttttacacaagtaacacttcagctctctcatcattctgaattctccaggcggttatcgtgagcccaaccggttgggctaatacagcgacaattgatgtggtctacgatctgctgcatatgatgggacgcgatgacattccggtcggtttaggagatatgttcgccattaaccaatctgaaccggtttttccatctgctggtgactgcaagtacgccaaagcggttccacaaggttgtggcggttttcttgattccgacactctctatggccttgctcgtgacctcccaagaagccctcgcaggtatgagaactcagtggcacatggagctccgagcgacactgatcggcctgaactccgacaacctctggcccttgaagtttggcaaaatctgaccaaatctgttgatgaagtgtctaagatcaccgtactaaccaatggaccattaactagcttagccaaaatcatctcatcagataaaaactcatcctcaataatcaaggtataagagctttctgttattttttctaataaatttcatcaagatccgatattaattaagatggcttctgacgtaaattgcaggaagtttacatcgtgggtggacatataagccgtggaaaatcagacaaagggaacatattcacagttccttcgaattcctacgctgaattcaatatgtttcttgatcctttagcagctaagactgttcttgaatccggtctaaacatcacactcatccctctagcaacccaacgcgagttttctttccaagcaatgcttaatagactctattcctcgacgaaaacacccgaa

SEQ ID NO: 35505 - DNA, 1806 bp, Arabidopsis thaliana columbia
cccagaacacagagatagaatcattcattgatgagaaaaagctcttaagatgaaacataatgagaaaggaagctttacgatgtgcgtgtatctcctgtgtttctgatgaagagcttgcaatcttacaagcaaccgtttcacaaaccgagcttctggtgttttcgtcgaggaatagagtctatcaagcattgtttggaaagaactcaacttgtgttgtgttgctagagggacgagtgtgatgtttagagcggattcaagaacggtcttagctgctaaaggatcaagaaacatattgaattcagcatatgcatttgaaggaatcgtgaaaatgttccctttgtctgatttctcacggtttatatgtccacccacgatgtaaacttcctgcaatttacaacagaagccatctattaagtctaggatcttaattgaatttatcaaatatattgtcagattgttcttgccttgattagtgaggatgattttttatctgatgagataatcttggctaagttagttaacggtccattggttagtacagtgatcttagacactccattaccagatttggtcagattttgccaaacttcaatagccagaggttgtcggagttcaggcctatcagtgtccctgggagctccatgtgtcactgaattctctgcagtgtatctgcatcaaaatgtagatatatattgcttaaactgatcgtatcatagcattgtataaatataacatattcttaagatattttcacattactcatatacacaaacatacctgcgagggcttctcggaaggtcacgagcaagaccgtagagagtgtcggaatccagaaatccgccacagcctcgtggaatagccttgacgtacttgcaacctccaaccggtggaaaaatcgggtcggattggttcaatgccaacatgtctcccaagcccactggaatatcgtcccgacccatcatatgaagcagatcatagaccacgtctattgttgctgcattagcccaaccggttgggctcacaataatagccttgcgagtcaagagagagggggtgttaggatattgaagaaaacagcatattcacctagttacttgtgtagcaagcctagttacttgtgcaataagcaaccgttgcaatctgagttatttgttacacaatagttttgcaacacggattagctagatctctgtaaaatcataccttcaaatcgattttatccaccggaactttgaggaggtagaagagagagaggaaatctccggcgctcatgtccatatcgaaaacaacaggctttccgggacgtgttttgctaagatctggtctaaacaattcttctttgtagtatggaaactgagatgaaaagttaaatctccctgtttcttcaggtctattcaaaacctgttcattatgtaaacaactccgttatatcaaacaaacaaataaaacgtttgatatgtaacttttttcagcttagatttgtcatttgtctgagaatatgaaaacttacttccaggaaatcaacatagaattctctgtcaagtttacttttgatgtttatgttgggtttagctcgtgtcgcaacaagaacacgaacagaatcagaaccagagatctcttgtgtgtaaccatcctaattaatagaggttaaaattgtattgtttactctgaaacaaaaccaaatcagattacaaaaagaatatggtatatgaaggaaacacaaaccttacactttcctcttcctattccgcttttcggtaagcaagttggatctcgcaaagaagaaacaaaataaccactgtgaac

SEQ ID NO: 35506 - DNA, 444 bp, Arabidopsis thaliana columbia
gcaattgaggttttaatacttgtttctttgagttttctttcaaactactgtcaagttttttcgcatcttcattgcgtttttcgtataatatttcttgaaaagatgcttaatctgtgtgttcatttgaataacagtcaagtggacccgatagtagcgtcgttttctggaggagcggttggtgtgatttcggctttgatggtagtagaagttaacaacgtaaagcagcaagagcacaagagatgcaaatactgtctaggaactggtattgtggcttactttttctcctttttcctttcaaacatggtttttaaaaaatgagtctggtggttctacaatatgtattcacatatattcttatataacacagggtatctagcatgtgctcgttgctctagcacaggtgctcttgttttaactgaaccagtctcagctattgctggtggg

SEQ ID NO: 35507 - DNA, 572 bp, Arabidopsis thaliana columbia
aaaaatccttggagaaaaaaaaagccatcttttactaattccctgagccttgtgtaaatataagtgtaataagtatttttccttatgtcatttacaaattcatttaaaaagaaatacggtgtaggtggaaagcccaaactagggaaatatctggtttccaagagatcataagctatccacgtcaaaacttctggtaaaattgcctgtggaaagagaaattttgtgttttagaaaaattgtagtaaaatatatgttaacataaaatttaccattttaactatttttatgtgtacaattctgtggcattaagtacattcacattgttgtgcaaccatcaccaccatccctctccagaatgtttttatctttcccaactgaaactcagtatccgttaaacaataactctttatttcctccctcccacccagtccctggcagccatgattctactttctgtctctatgaatttgactactctaagtacctcatataagtggaatcgtatttgtccttttgcgacgggcttgttcacttagcataatgtctcaaggttcaccatgttgtacatgtgc

SEQ ID NO: 35508 - DNA, 305 bp, Arabidopsis thaliana columbia
ttccaaatctaaaacaaaatactagttagcaaatcccttcataagattgttgagaattggcagaaactttcaaacatacaacaaaaatgagaaataatataagcccctccctcttctttgtagctctctgataatgacgacaatccctgtgtgagctagtatataacgagagtgaaagaatctattatccttaaccatatctaacagagtgaaagaagaatctacaacaatacatcatgagtcacatgcatgaccaagttatcttcatagacagacttggatctataaatatacgatctacgctg

SEQ ID NO: 35509 - DNA, 563 bp, Arabidopsis thaliana columbia
ggcaggatacagcttactaaggagtttcttggaacagtcagagttgcttttgaggatgtcaagtcaccgaaaaccgcgatattatattttcgcattggtgacacagagtactctatcacgattcgagatctttgcaagcctttggtttcagtaataaggacaagattcggttcacacactgcaaaagtacttgctctaaatggacaaaatttgcatatgatacctacgaaggtggttctaaagcggtacaaatcaagcatcatgctttgcgttatgcccttcgaatgttagccaacactatgttttttggcgcagatactatcacaatcaaagaaggtgagttctatatcatgatggcaccattcatcaacgacccgtagaaggtaaaccttggagcacttctcagttgtgagttggtagaatataagcattatgcttacaaaaaaagggacaagtgagctgtttttggcactggtggagctgatatgtaatactggaggcctgtgggattgatctgaaagattgatcttgctttccttgggcgtacgactacttgggaggat

SEQ ID NO: 35510 - DNA, 460 bp, Arabidopsis thaliana columbia
  unsure (1)..(460): unsure at all n locations
ccgattcgaattcgtaatattttgtcagcattccattcagttttaggtatagttttttatttattaaaaaaaaaaaaaaaaaaaaaaaacataataaaatcaagagcatatatatcttcattagaccatattaggcccacgactaaaaccaacacacaatacataaacaaattcaaagttgggccaaaaactatatgttctcaaacaaacaaatcatttttctttccaaataaaatacgtaatatagcttggatacaaaattttcacatttaatataaactaaatatagaatataaaatctgactcggntacttctcggcngcgacaatctaatgaaacattaatcattatattcaaatagtaataacagtaacgcatattatagcatcacttttacacttagataattaacacaaagtattcaattttattcatgaaaaatattaatgccggtgctgta

SEQ ID NO: 35511 - DNA, 599 bp, Arabidopsis thaliana columbia
tttttacagaaaaattcagaactcgaaagagggaaaattaaagaagagttaagagagcaatctataaagaaaaaaagctgaaaatcattaaatgcgataattaaaatagaagaaaaagggtaatttagtctaaaaatttggttatgtcatcagtagtctagattttaaaatacaacagtaacagatatttaattgaaattgctcagattttgttatagtcgtcgagattacttcgaaaacaagtgtaagaataccgcgacgttctaatgaagcattcgaagtaaatttacaatcatacccttgcactgtcgttgaatacgaaagaccaacttttgcaccagaggcacgtgggaaatttattaaccagtgcctagtggttcccgctccagtgaagtagtctcgttaaccgttatgggcctaagccaatccataaaattattaaaaaaaaaaaaaatgatcatggaagaaaaaagcttgtgattgtgagacatttcatcgaacacttggtgatcaatatttgaaaacgaagagcacagccaaaattcgataaaccctaaggaacagtgagatggagaagaagaagcaatgcaaattgaagg

SEQ ID NO: 35512 - DNA, 571 bp, Arabidopsis thaliana columbia
agctcgttatcattgctacctttatcggtttatggagctgtacaatggcgcacacgaaaactcagaagaatactcttctccttaccaattcttcttctacctatacgataaaagaaacgtaagcatcactccaaacttccttagcttgattccatttttgaaactaagaagcttgctcttaatcttgtttgtattttcctgcagtctggcttaggaggattatcctttgacgaaggacagttctcggtcttcgggtattggttttaaaacttttcttattcggacgttcagaacttgcaagttgcatttgaattgatggttgctcttgtgtgctccaaattctgcagatacacaatagcaggaaaagatattctcgggcagatcaagactggagatatcatcaaatctgcaaaactaattgaaggccaagaccgccttagtttgcctgttcaaaacaacaacatcaacgaatccacttgattctttttctttctttacatccaaaacgttctaagactttcttgtccataaacagagtgctaagagttcaactctctgcaattgggtatga

SEQ ID NO: 35513 - DNA, 521 bp, Arabidopsis thaliana columbia
tgggagtatgcgtgaatgattgtcaagagaccgatcttgtttctcacttcgtttgaactctgtcctgtttcccatttatacttcagattctagctcctttagggcaaatcttctttggcaaaagtaacaattaagcagcagcagcagaagtgaagtttctcacgttaggtggctttgatacaagtcttggagctttcgaatttctttgaggtttgaagctccaccctcattctagggcatatctcctttggcaattggaactccaatcacatcttgggttcccctttgaagtttatccaactggaaacgtcagtccattcgttgggcaaatctcctttggcatttcggagtcctcagttggctcacctcatctcttgttcgagcaaatctcctttggcattatccgagttcgtagttgactcacgttatctttcgtagagcaaatctccttgggcattatctgagtcttacagttgactcctattatcttagtcgagcagttatcatcacggtctgcagtt

SEQ ID NO: 35514 - DNA, 621 bp, Arabidopsis thaliana columbia
tgagtcgaaattatccaaacatgattatattttaggtgtgataaaataatgtaataactaatttcataagttgaataatattctccactgtaatattgggattaaagttagatattaaaaaaaaaattgctaacggatttaacatatttttttttcagtttgtgtttcacaaactttgaattcttaaaattcaaatttgtggatattgacattacacatgtaaacattaacaaacacacctatattttttatattttatcatattatcttatgttttgctcatatttttcttaatttttgcttaataaaacaatgcattttcttttctctcatgtcactcagtgacggagctagagcattaggaggggggtcacttgaccccataatatttccaaattttttttataacaatattatgctaaaagttaaaatattagtagacactttttaaatatggttagtaataattaatcttaatttgtacattgtgagttgtgatttttttttttgtcggccaaattccattaatatggaagcccaatggcgagtagtacaaagcccaataactaatagtacaatgatgagaatacagaagcccaccccaacatttacacccttaat

SEQ ID NO: 35515 - DNA, 556 bp, Arabidopsis thaliana columbia
ctcttttgtaacagatattcaatacatgtttgtttgttatttggcctatgctgatgtggaaatggattgtttgcttacaacaggtgagggcttgagtgtcccgctccaggaagcctcttctgacaggtcggactggtgactgtaacggcgtttcagacaaggaagcaacacgaggaacaagaggaagacggcgaacgtgatgacaagaactaccgtcaagatctcaccatgcatggcgtagtgtctgtctctagtgaaagtaagtcgttcgccatcttcaggactcgaggcctccaccgtagaagttaccattagagaggtaatctcaaatattctcaaatctcaactcctttgctcatacctacttcatactgtcatgcatcatcttggagggatttgtgtctgtttctttttcctctctgaaatataaatttgacttgggagaatatgtatcaaatgaaaacaatatgtcaccacagaagaaaagaagagtttaaatatatttctttgggataatttagtagatggatttttgtataaaggttggtgtagaaag

SEQ ID NO: 35516 - DNA, 622 bp, Arabidopsis thaliana columbia
aggtacaaacagacgcaagaaatgaaggtcttagcccttcttaagagaagatccaatatgtggctcattgtttaatgagttttggaatggatctctcttaagccagtgtggtgtttaattatgtaaaacacaaagcaaacgcttagaagctttttgccacgagacttcatgaagagtcccttagtgtatgattattaaaaaaaaatagagaaaagagtcaaagaccattgtttgtgtaagaatctatttttacatttgttcttgataataattctcttccgtgcagaatcttacctttaacatttcgaaccgattttggacacagccatcgaatgacaataataatgaactacattgaggtttcttttttcattactaccaaatgaaaaaaaaaatgagtactattgaacattgaagaagtgttgtcataacaaaagctgactagtgacttaaataagtacaattgaattcgacaagtgttaagtactaaaataagtacaatacaaatacaataattatcaccttttttttactaatttttgtaagcagtttgaatgatagattttctttcttctaaatatacatttaagattttgatgaaatatatagaaaaatatattgt

SEQ ID NO: 35517 - DNA, 434 bp, Arabidopsis thaliana columbia
tcggttgttcaaggcggtgactctgtatgggaaggacttcggatttacaagggaaagatattcaagcttgaggaacatctagatcggtaagaacagttatatccagaaaccaagaagcaaataacagagttttctaagcaatcctgttttatatgttggaatcttgggttaggttgtttgattcagcaaaggctctggctttcgataatgttccagcgcgtgaagaggtaagcatctgatgatcgtagtgctatgttttgttctgttaaaacgacgttaccacgatagctttttagtgtggcataacatgcaggtaaaaggagcaatcttcagaactcttatcaccgatggtatgtttgacaatacacatatcaggttgtctctgactcgaggcaataaggtatttcaactttcgtcgacactgatgtaagaaa

SEQ ID NO: 35518 - DNA, 592 bp, Arabidopsis thaliana columbia
tcctatactttaaaactaagctaataaactatgattttgttgtgcgggcattttctcgccagggttctatagtcaaagagccatcgatatccgtcactcgtgtagcatggagcccagatggaaacttgcttggtatggtagatggagattgttctcctaaaaacgttttaaagatatatagttgtaatttcaagtagacacgaagtttgaactttgtaacattttccatgtacaggggtttcttttactaaacatctgatccatgtatatgcttaccaaggctcagacctacgtcaacacctcgaggtatgtttaattgtcttttcgtacttagtttcttgcctttgcatctgcaccaaacttaatcgatcatctgtttctgtggattagattgatgctcatgtaggctgtgtgaatgacttggcgttcgccacccaaataagcaaatgtgtgttgtgacttgtggggatgacaaattgattaaggtacgttaggattatgatgactctgaactcagttttattatcccgtgtctaattatgatatttcctaggtgtgggatttgagtgggaagaactcttcacctttgaag

SEQ ID NO: 35519 - DNA, 516 bp, Arabidopsis thaliana columbia
tagactttttgaaaacgttaaaatctaatggtgtgttgtttttaataaacgtattgtttgaggtctaattaaaagtgaaaagaatctcgatcggggaataataatcatgaccgagaaaccgactcagcaagtttcccgattcgttggacaagttcaggagatagcttcttcaccggtttcttctccttctccggtcgaaaatcaaaaccaagtgcatccgatacttcttcggagctccatccagcttttcggagcgactccgagaaccgacccgctttcaaaagcaatgcatcaagaacggcttgattatccaaaattaccatttcaccctcaaaaaaaccagatgctgacacgtgtacaatatcatcaacgtcggattcgctccacccgcctcctcttaaaaccgacccgatccggttcacgtaatcgtcgacccatttcggtgtctcggatcttggtaaatctacatatctctccggcgatgaagagtgtgacgacgacatagaagaagcagag

SEQ ID NO: 35520 - DNA, 498 bp, Arabidopsis thaliana columbia
cccttatgtcctttgctactctcacactcaactttgggtttattaatgtcattaaataaaattaaactttttccttgcttgtttcctgagcatgctttcttcaagtgttgtagtaatcatctcatagaagtgcagctggtaaaaaaaaaaatggttcataaacgaaacgaacagagataatatttttcttcgaaccattttcacattctccactacatttttcttagatcctctcgatcttttcttactaagtcactctgttcatggtgtcaccaataatctaaagaaccttaatctgaaagaggaaaaggacagaaaacttccacctctttgctcaacctagaaattcactaactaccctttacatgttttcctctatctactgtttccctaacactcaaaatcttttctttcgagtttccttccttcctttcccttccatttacacaaaggttcacctccacccaaattctccgattctagtctcctggagttgtt

SEQ ID NO: 35521 - DNA, 519 bp, Arabidopsis thaliana columbia
aattgaatttctattgtaattaaaaatttaaatgttatttaggtaggcatgtcttgacccataccaattaaactctacaatgcggataacaatattagttttgaatggtaatttattattaaagcaatacagtttttgacagttttcatttataaattttttatcaaaagctttacaaacagttttactttcagcttttgtaaaagtgtgattcaaacttctgatttagtttgatgttgatttggtttagctggttatttgttggatcatggttcagtgccggtttagtattggtttaagaagaagaagaaatcagtttcagaataacagaaggatcagaagactcttctggaattatagggtttggctttccttgctctgttataaatagtcttcatctttttcaattgttcgttgaaacagaaaattcttatctcaattcttctctcttgaaaacgatcttgagctctgggttttgagcttgagtaaacattgattagtagtgaattgctggattga

SEQ ID NO: 35522 - DNA, 874 bp, Arabidopsis thaliana columbia
agctgtagagggatgttgcaattctaagatagagttagcatatgcgtcttcctctgtttcagaaatcgaccaaaacgtccataatgagtttgagctatggggcttttggatttattaagcctaccaaatcacagtaacccacaggcccattaaacctccagaccattgtttaattttctgctagcatcttctcttcggccactgtgaaattcatatagtggctacaaagtaaaaactatgtgaattagtttgaggtctaacatgagattcctccattatttttattttgtctaaaatgcatgtattgcatgtaaaatacgtaaacataaatcttgagcgaattgaactaaaaaattggttgaaatttgaaactgagcaaataatagcgagacaagacaagtcctagtaaatgcaaagacatggaacctctgcattaaacatgtggccaagctgtaactttctaagctactaactcacgattcataagaatattcttctagtaattgtaatccccaagagaaaatctagacaaccttaagttctctcttaatttgtaaagttcaaaaacttgaaaaccccaaagaaaatggtgtggttggaatcatactgtaatactcaagctgtctgttttcaaagaaaatgcgtggctaaatatcatcatctcaccatgcatttatttacttgtagtacagtttatctttttaattattactgtcacgttttaaaattattttctgtcaccaccctctgctcgattatcaatgcaatatagagataaagttgcagtgctgcagcttccgatagctctctcgggtcaggaacaaaaacataaaatttcaaatttggcttttttgctggtgcaaaaaagattttg

SEQ ID NO: 35523 - DNA, 538 bp, Arabidopsis thaliana columbia
taaattcatagtatcataccgcttgttgaaccacacttcagcatggcatcaactactgctgtaaatgcagttcggtcaatgaacacgttctcacacaatttcatttccaaaaaaatttcctgcagtgataacagatccgttgcatccccaaacccctaagaagtagaattatcataagaggcagaaatttgataacgtttaaagcagaaactaaaaagagtactaggccatcttcctacataatgatcagatatgtaatgagatattgctggctcaccttcaccaaagtggtgtaggttacaacatctggctgaagaaaatcgtcgtaatattcctctgctttctcctgaattatattcaaaaccaagacattataattaatatgagccaagctctaccccagtactactctgagtaacacttggagtataaaactggcctttaaaatatacatgtgtgaccttcatatcattgaaaaacttcatagccgcatccaagtcgccacacttaatgcaggcatggatcaaagtatggtagg

SEQ ID NO: 35524 - DNA, 565 bp, Arabidopsis thaliana columbia
gtcttcaagcaatcaacttaaagttctcccgtaagcatctcatctcttttttttaaatggctatatataatatctttcatttttttttactaagctaactcaaatatacggccgagtcgtcacatattaatttttctatgactttaaacaaactatgtttatttatctttattccaaagctttcagcaagttttgtaattttgtagcgtcagtaaatatttagaaagacactcctccatttattcttatggagaatcatctgttcacgtaccatgttaatatgttattgtttgatgatatcatttgtttgttgcaacggactcatgtcctcaactataaaagtcctcgaccagcgatagttttttaaaattctccttataggatagctcgactcggagctatactccagaccaccgaactggttcaattgtcgactttccaaaggctaaaccattcatccctaagttcttctaaaactaacaaatccttaattctccaaaaaatatcccattataattcaacaattcaagaaactagacattttgttccgacaatatttttttta

SEQ ID NO: 35525 - DNA, 435 bp, Arabidopsis thaliana columbia
gtgctgtaacatgcataatctttaatttctccgacattgattgttgcttcttaccgaattaaaaaaaccttaccccactaatctgataaggctaatatgtgtctgacgctcatgagtaatggcccgatcctatcaaatttgggtcccgaaaagataataaaagtgtttcttcaactactaaggtagaaataaaaacagtgagaaataagtaaggtaggggttgattagtttatctgattcgaattatatggccaattaatttggagcctaaatgcatactgtacgtgtttcttcattatcccccaagtttttgctgacccaattgtttcggcccaaatataataatctacaggcccattaacgatccatccgggttactggagaagaagtcttgctccgagacgacgtgctctttctcgccggcgtcgtcgttgc

SEQ ID NO: 35526 - DNA, 541 bp, Arabidopsis thaliana columbia
taattcagatggttagcaaataaacaaaagctgttcacgataagtttcaactcaaacccataaatttaacccttatgcagtcaatatgacaagaaggtaaggggtccttacgtacgtaaccaccttcaggaacctctccaagcgccttctcgtacatcaaagcccaatcataagtcattacaagcaactgcccaagaccagtaatcaatccaagtagatctccagtcggattaggcgagatacacttgacacctccttctatatttccaactagctcagtcacatcactctccacattatgcactagcaaaagcccatgagaagtcccaattaatagagactccttctccgcgagataatcgaaagccgtgatgaaatcccaggctcaatatcaatactgcagacctccacaggcatagcactctttgccccagcgctttcattctgccacaagaaatacataaacataaagagaaagactttcgatttaaacagaccctactcgctaagttcacttgcaagttcatcacaagaaacttga

SEQ ID NO: 35527 - DNA, 630 bp, Arabidopsis thaliana columbia
taatgaaaaacgtaatctaagagaaacaattaatatcctgcaacgacctaaaattataaaccagatattatagctatgattgtttttattccataacaaaaaaaaaattacggtgtcattatgtgcgtaattttgagtttatccaaccatttcaatctcaagaatatgacacaacaacaccactgatattcacattacatttcccatttttgttctctaagaatcaaaccgctcacatattcaattgatatgacttacgaaagaaaaaaataatctataacgagtcgtctaaacatgtcatcattcaacaatacattcccactatagtctcatcgagtaatgcatgcacatgtgaaatgtatattcaaatcattatggcttaggaagtacaacttattcatttaatcctagcacatatttagatacaaatatacaatcatcaggcatcagctttcatacaacatttgtatgcgaaattaaaattgaagaatatataagagaaaataattaacttcgaaacgatgcatgtaacattctgtttgtcgacaatatgcataatacaaatttacaattgcatggtgatacacgactatacctatacaaacactagtttcatgtgatacctctata

SEQ ID NO: 35528 - DNA, 517 bp, Arabidopsis thaliana columbia
atcgattgtcccggccatgttagtttggttacttcgacttccttattttatttttttatcttcactcttctaacttctaagaggcaagcgttcttctcttacaatttaaataaccaaaaataaataccctaaaaaaggaagaagatttgatttcattgtatcaaaactatcaattgaagaaagaaggcaaagtcatggcaattaatatgacagctaacatagacagctaaaaaatataaagcgcttaatttgtgtttattctcacttgtttctatcataatagtattaataatgattactgtatttaggtgatatgacaagaacaaatacgatcaaatagataaatgacaataaaattgtctgtacatgtctacgagaagcacatcactaattgttacgatcagaaaattgatggttctaaccataataatgttaggctctgtacaatgcaccatcgtgcatttgaatgatatctgttctagcatttgacatagagaatattacgtgttgaggcact

SEQ ID NO: 35529 - DNA, 511 bp, Arabidopsis thaliana columbia
catcaatctcataaatgtgacatatcgctcaggcttcatctcgcctgcatgagtgcacaactaagataacattgcataggcatttttccttatgcctggatgctagagcatgttcaaacatctgctaaactttggctgcagacacccacaattgcttttgtctcaatgaaattttgcaaccaaattctgcatgctacacataaattctgcagacttctaaaccctgcaggctgcacacaaattctgaagaacattctaacagagggcttgatgcatcacttgtgtaaacaaaaacactgaagaacattcttaatgacgttgggctccatctttacaacagacctgtaaaacagagcttccacactgattaaaaactagcttgtgactgcaacataaaacagaagaacgaacattagagagatctgcttcaccatcaacaaggaactgctgtcgccaataagaacaggatttgagcctgccgtactcacagaacagtcacttccgatgtgat

SEQ ID NO: 35530 - DNA, 306 bp, Arabidopsis thaliana columbia
tatcttgtttctcgaaaatgtttttttctttttttttttttttgccaattcgacagaaaagtgaaaagtcacaactttttacgaaattaagatacctctttcgtttcctgattcatggctttatcatcaaccgggaatatttttccgatcagttatacgacgtatcacggaaaagggtttctgcttatcatcagtttcatcttctactctcgaagtaggtttctctgtttcctcgaacggcgacgttttgatctcgctgttcttcaggcggaacttggaacccaaaaaccaccgagggattcgctt

SEQ ID NO: 35531 - DNA, 512 bp, Arabidopsis thaliana columbia
ttcagccatgtcataaggtaacagcttttcaaagttaacacttgactcaacctctgtgcctttttggactgccgatccaccatgcaaactactatactcatcctggaaagaactagtatccccactagacgcatctgtcttcgagggcactggtaaattcccagtagtagcacacccaaaaggactcacaaccctctgcctggaagcagtgcgcactcgccttgttggaactgagccggcattaatattactgtcaggccttgttgccatcaaacttgatgagttagagccacctgtgttgttgacgtatggtaaatcgtccccaagatcatatgaccgggcagaatgagacttcatcagattcttcctttttttgtggcttatattaaatgatctgctagactcgaaagctcccggaagataataggtacttgtgtctccttcatcctcatcgaacgcagtaacattatatcctatatctacaatgagagataaaaaattagcaaaaattt

SEQ ID NO: 35532 - DNA, 508 bp, Arabidopsis thaliana columbia
atatagaaaaactataaaacgaataatttgacctggttttatacaccgaaatctacccttagttaggatttataaaatttgataattaactaatgtccaccaccctaactcgaatcttgataagcttaagatggatataaattaagattcaaatcaataatagtcattgataagacaatagtcttgtgtttgacaccatatgttttttgggggtaacaaacagctcaatgatatgcattgtttttatggtacaccgaatgatgttcgatgtttccttggttgcttccaaagtcagtccaaaagacagttttgtttgtacatgctcactcaatcccccacggtgtcctcacgtgatatcaacgtacggtcctgatggcctcatcactcccttttcacacgtttcatccacggctccgaattatcgcctctcgaacaccttttcaagagatcacatttgctcttttagcagaaaaatgggtctatttagagaattaaagtcaattgtgag

SEQ ID NO: 35533 - DNA, 217 bp, Arabidopsis thaliana columbia
gaggaacaggatacagtgtaccagtaaaataattatttttgctacttggagttgatttaatcaattgatgaataaggaaaagtttcattagagagagacgataactctctgcttctatgaagtggttttggatttctggataacaggaacaattcaaagaatgtggagattaaagaatcagaagaagaaagaaacggcagattcgccgagttcttct

SEQ ID NO: 35534 - DNA, 993 bp, Arabidopsis thaliana
tccccacaaaaataaacaacatttcctcatgaaaaaaaaaccctctagtatttatcaattatgccggtagtaattttattactctcttagataataatcttgttttccacccaaaaagatgctaatcaacaagaactacttaataataataagaattatcaactaagaactggtcttatctcatgaactctcataccaacaaaacatgacttcaaacactttcctctcggcgatcctcctcctccgaccatcattccactctccaccaccgtctcctcccccaccgccgctaatataaccttcctatatccatcatcactatcaccatgcacattgcccttatcatcatcattaatagtaacatccttattaatcttatccgccagatcatccaaatcatcttccacctcttgctgatcatcatcatcgcactcatcctcatcatcacattcatcatcatcctcttcatcatcactttggtaatgagagggttcttgaggaagatcaaaaacatcatcgtctaaaggaacaaggtggagagtgagacgaccattggatctattcgcacggaaatactcatgatgacgaaccttctcttctctgagtataagcctgccgtcgctggtcaccacacgcttgagaacccacggcatgtgcgggagaagattccccgtctgagcaagcaacggtatcggaggaggaaactcacgcgccgccgcagctctagcttctctctcctctctcctccttccaccgtaacgaaaccggctttttacaggctccgacgcaacggagacaacatcgttcccttcgtcagcggagaggatgtcgaagcagctctctgtcccgatgtagtctcccacggcggaggaagaagaagatgacgtgcgtgaaagcatggatgacgtacaaaaggtgaggtttgatcggagttgatggaaagagactgatcagaagaagaagccatggatgatgatgagcagaggaagaaga

SEQ ID NO: 35535 - DNA, 542 bp, Arabidopsis thaliana columbia
gaatttccctattagttgcccattgatatcaaatgaaactatacgattattcataagtaatactatacttcatcaagcaaacccaacactgactctagacaagcaaagatagatcataacactttgcgtttattgaggaagttaaatagaaaacacatttgattccaaagcactgtgagatagagattcatcagaagttatcatatctaggaatacagctagatgattatcagagcatcaattagttcgcagattaagaactattaacagaggaacatctaaaatcgattcaacaaatacattgagcgattatcatttactaaacagacgaagatctcattcactgaaaccaagattcataaggatcattataaaagtatccttcattatttcttcagtcgattcatcgggaaaaacaattttttatcaagaaacccaaagatcgatttcagatggaatacacaacaagaagagcgatttagagacgtgtaccttgagtctcggtgataagagagaagaaaactcggtgaaaaaagagaatg

SEQ ID NO: 35536 - DNA, 465 bp, Arabidopsis thaliana columbia
ttaaattttgggtctttttgttgtagttcttggttttgtaatggatgttgcttatttagagtcgaactcttttttcttcatttgatatgacttagagttaaatagtgcaattttgtgtttgagcctatatctgaagctcttttattcttggttaagtaacttctgttaaattgtacaattttgtgtttgacttttgtgataggggaaagaagagctgactcgacatttcaggaactcaaggtttacttgccacaccgacgattatctcccggtggttctctcgcccccgagcaacggcttcacggcttatactctcacaaaacttggttaccgagtcggcgcacttggtggtggttccgaaacgcttcattgcgttaaggtttttagggtttcgtagaagagaaattgtgttttcattatctccctgggtgtggtgtcacaactagggtgaaatggaaacatagc

SEQ ID NO: 35537 - DNA, 523 bp, Arabidopsis thaliana columbia
atgatcgcgtgaatatgacatgcatgacttgcgcgtggtatagatgactttaagcaccaaagccacgtaagccgccggaaatgtttagttactgggccaagacgtattttattttgggccgattaatcaattccatatctattatctttgacctatagtttatcgcgtttactatttttacctattgtttagttactaggccgacttttgcatgtacgtaaatttttgatgtattctttattctttttagatattcactttttgctttagagaaagtttgaaacaagtgttcatttttttctggggaataagtaccaaagattggatatttatcatcttatactcataaaacataattctcgtatttctagtggggtcaaatttaatatttaaaaaacaatttaaatagtgattgaacactttggtaagtatgcattctcgtgaattcggtggaataaatttatattagatccacgagggaaaaaatacggaattacaatatagttttccttatttgataatt

SEQ ID NO: 35538 - DNA, 415 bp, Arabidopsis thaliana columbia
tgttgacagtctcaagtttgttgctaagatcctccattgtcttcttcgcctttgagagatcgtctagagcacgagatcttgtgctctcagcgttgtcaagcttttgcttgatcttcatgaattccttgtggaccagcattagctgtgtttccttgtcgcaaacgctctgaaacataacataaacaaatattttcagttttgcacacaacacaatctgttacctagacatattctggtcatctaaaaccaggatagaatcatagaaccatttcttgatcagactttaatgatccatgttgttggtattggattacttacctcagaggagagtcgagatcgccttggagtacttctttgctttgagactgcaacttctccgaacaagctcaccgcagctatcaccgattggaacggt

SEQ ID NO: 35539 - DNA, 490 bp, Arabidopsis thaliana columbia
  unsure (1)..(490): unsure at all n locations
ataccgacatcaaactagcttaattccaaaccttacgaaacataatgaaacctttcgatttggttgcaaaatattttgttttcccttaaaacttaatatgacttaaatttcacacttgttgggctaacttaaaatttatacataatatccaaaattaatcaaaaaatcgatgaaacactctttatgagttacgtaagaaggtgctactttagatggtaaaagacaaaactgctgaatgatagtttgatacagcgtgtatttgttgttgcacaatcctagtgcgtacacgaaaaaataaacagtactcgaaagtcgaaagtataaccagctcgaacaagtaaaatcctctagctggatattcgttattggaattttagaaaaatgattctctcaaagtgtanacttgtggaaataaaatatatagcaaagtcgttgacataaaatatcacaanagtcattctcgactctacaaatatatacttactagatt

SEQ ID NO: 35540 - DNA, 585 bp, Arabidopsis thaliana columbia
taataggccgtaccttgctctttctttgacatttttggctcggttagctgttcattaaagaaaagaaagggacaggtcagtaataaaaagatcagatagcaaataataaatggatcaatgaatcctcacatgcttttcgttaactagcaaaagcatccaaagaatgcaggattgaatggcatattaagtgtagagatttggcagttctgttatctaacttaaccaagttgaatgagataactagttcatcttgtatattgtttccgcaaaactgagccaaaacaagatgtcaagaagagaacggatagcttgttccttgtgaggtatgcaaaggaaacacataagaactactaaaaacaggatcttttcggtgcacataacagataagacatacctttcgtgtccgtgcagtatctcgttctcttaggtgctgctctagttcttctctctccctttggtcacgtaatctttcctcttcagactgtgccaattatttgtgattaaagcagattttcagaaaaacaattatgaaagcaggtattatccacacataactatgtttttcctaaggaccaaaacataaat

SEQ ID NO: 35541 - DNA, 584 bp, Arabidopsis thaliana columbia
tattatgtggcataaaggagaaaacaaatttgtctttgtattaatttgactactataggttcaaatatttggataactattgaccctgtttgtttgtgctattataccaaatttttatttaggttttggtcataattgatgatagcattacagtattgacttttgacaataacaactttagtagaatctatggctttgtttttttcagatagcaaccgttgaatctccggccaatctaacgttgaggtgatgatagatttgttgatcactgttggatccaataacaagcttgtggtgtccggtgactagttttcttttcccgtgagtatccacaaggctaagtgctttgcagacatcaaaatcaacggtaaatttctctgtcatgcttctcccaacttctactctctcaaaccctaccagttgcgtcagtggcacgccaccacccaccagagactttgaacactttggtggttccagaacacgagcaccacgtggctaccagaccgtagcccgtggttcttgaccccgataactatccggatcttgagatcgtggcaatttactgtggagataccacagaggtt

SEQ ID NO: 35542 - DNA, 575 bp, Arabidopsis thaliana columbia
taaatatttttggatattttcgatcatgaacataaaaatctttaaaatacattgctattgtatctaacacaatttagagatgattaaaaatatgttaattttttgttcttcttgttttctattcaaatatgaaaacaacgatttttcaataataaatattaattttcatgtcagagaatacagaaatctttattttgtgatataattaaaaaaaaaaatcataaattgagttggcaaaactaggacaacttgggacagaaaacatgtatttaaaagcccatattaggcccatataaacgacaactttgtaataggcctgacagtataagacgacaaaaaggtttcttgcggtcaacgaaaaaagtcaacaaaacatcatagttcttttcattcacagaatttattaaagtcaaaagatacatcatgaaacaaaaacaagatttatacaactgattttacttcttcaccgaagaacaaaacaaaaaagtgaagttggcaactttacagtaaactcaaggtttgatgtttttggtcatcttccccagataattcaatggcatcttggttatgcatag

SEQ ID NO: 35543 - DNA, 338 bp, Arabidopsis thaliana columbia
aaaagcaaccgctaagatatcgccattatggccagtaccaactccgatacaagatttgcttgttgcgttccatagccttacctgtaaagtaatcaaatacaagttaaccgagtccacagatcactctagcagaaaaggtttatttgtaggtgatgttgtggggaatgatgtgcatgaaaaagcaatgacgtaggctacaaacaaccctaacgagatcttgaacaaaaaattccatccctactaatctagctatcgtggtacgtagcataattgatgttcactacaaggagagtaaatggcatgacaggtctgtcataacttccagttacgatgagaac

SEQ ID NO: 35544 - DNA, 598 bp, Arabidopsis thaliana columbia
taaatttgcagtcatttggtttcactatcagtaagctaatgtggtgggagagattgagttgattctctttgatatgtgtacctcaatttcagattacaagaaataggagaagaacaacatgaagaggatatacaataaacagagaacccgaaaggtgagaaaaaaaaaagaacgagaagtagaaatttttttaatagaggtttgtgacaatgtagaagaaacaagtgaaagaggcaataaaatggtgaaagaggcaataaagaagcaaacaagtgaaagaggcgataaagaagcaagaacacaaagatagggtctaccgttgtgtctatgagtcctattgtgatgaggcaaaatatgatttaattactttatgagtaggtttatgaaaacttcatgtattattttgatttttgtcaacatgatttggtttttttttttcttggtataactacgcagtttgttaaacttagtacaacttggttagtattgttatttgaagtatttctttaactaggtataacttggtacgtagttgtactacccagattttgttccccatccttttcgcactctttagtagaaaatgaaaatttgcaat

SEQ ID NO: 35545 - DNA, 490 bp, Arabidopsis thaliana columbia
ggcggtaattgtcatgcatcggttataaaccaaagtaaaacgctcatagcagataacatttattaaaaataaaactgtggatgacacgagcaaagcaagtgtggtggtcgtacaaagttaaaccaaaacgttatgtgataggaaattaatcaagtccaacagcagtgaattaaaattattctggatatcgaaatccataatcaaagtttgttttaaaagttccctactcggaatcggaatcggattcgctgtccttcagtcctcctaagttgaattcttctaccgcatttactttatttgtaaatacacggccaccgcctccacctccacctccgcccgaatgacaactccacgccgcgtgtctgggaaataacttggatttagggtacttccattcttgagcgtctggaaccagcggccgtagcctaagttcattggaatcctcatctccgtccaaaggacaactcagcgcctcgcgttcgggaaacaa

SEQ ID NO: 35546 - DNA, 452 bp, Arabidopsis thaliana columbia
gaggatcccctgacagatgcaacttcttaaactatagaagaaacatggcatgtattcattgtgattgcaagcgtccacctgaatgctatcctagagaacaaaccacaagacacttatcgcttcactgaagcacaaacagacagggttgtgaaacgggatgatgtttcccatgcatggaactttgattttgatgacgatgaatcagacagagcagaagttgctgcttgtgaatatgcggattccagtacaaagaatgaaaaccttctccgggagggtttgagagatcctgaagaagaatttgggaatcctcctccaggaccccgagaaagttctgagtttggccgacgcagatgacctggagttgggtttgatgatattgacgatgaagatgacattgatagctatgaaatagacgagtctatagagagagatgtgcagtggaaggagctcga

SEQ ID NO: 35547 - DNA, 572 bp, Arabidopsis thaliana columbia
aaacataatacaaagattatggcaaagatatgataatacccagacaaagaggcatctatatgttttaaacgaaatactacattcaacaaaagtttcccaatctagaagtagagagtagacaatagatattggagactatctaattagagctgtcaattgggcgggacctatgggcttgtccagtccaaatgcatatgggcggactatattctagacaaaaaacaaatggtctaattgggcatatgaccagttttgtccacggacaatatgggcttgaccgtatggacaatgggctgcccatgggcataaattgagtcaatatacatgtcttcattttaatcatatttttataattttaattacaattacaactaaataattttcaaattatatattttacattataagtttctattttaatgaaatttttaaattttaataaattatttcttattaaattatttacggttttgaaggaaaaatactattccacaattttttggaatacgcaaaattttgattttacggttttgacgggaaaaatacaattctccgattttacggttttggcg

SEQ ID NO: 35548 - DNA, 513 bp, Arabidopsis thaliana columbia
atccccgtgactacttaacgctatttcctactatttatttatacgtttatatcaatatacacgtaatcccattttcacacttcatataaaacgtttatactccatctttatttttattttatcgacaaatttgtttctgtgaattgtttcaaatcttcaatccaaaagcagttcatacagaagtttgttttggaaatgtaaacacaaaaaatatctgtaacggacaccaataatttcaatagatattaattaatctgatcaaggaacaacagattttttgttttgtttaaggtagtaatgtttacaattcgaaaatatttgaagatttgtagtaacgacgcgtagaaacataagttcgtagttatttcataactttaaattgttatgattggtgtagcttgtagcgatgacttcatagtttaagaccactaatcatgctgtcattatgtccactcaaagccgtaattttaaataaaaccatactattaaaatttaatacaaatcatcatcatc

SEQ ID NO: 35549 - DNA, 927 bp, Arabidopsis thaliana columbia
acacacatcccaacatcgccaatgtgtcaatgtcagacaattttcatactctactgtttgcaagaattagctgttttatcttatttcggtgtggtttttgacagtttaaaggaaatctgttgatgtctctttgaatctttctgagtaagtgataagaaaattctccttaatactacacacattttcaattttcaatttggggtccacattaggttcaaattttagtggagaagaaaccattggtgaatggataacggttttgttcggtacaaatccgaattctgcaattatatgtgtgtagataaagttaacacctttttcgtttagatagtttgaagattaaactgaaagttaggacctttcatttccaatctctaaacccatttctctacgattagagaagctgacatcaaaattgaaacttgggaaatttttggatttgttcttcttctatggcaactggtaaattttctgtttctctataactgatttatgactttttctgactttgtgtgttcattcttttacgttttctgtttgtttgccgggaaacaaaatgaagaagacgatggtgaattgtcagctcgttaccagaacacgttggatgcattgtcgtctttgatcacaaaacgtggccgtttagctagtaacaaccaatctcaccgattccgtttgctctttcattatctcaaggttacaaatcacttaagcttttttgtgtgtcgtgccaaaatttacgaggtttttgaaagattcatgaatctcttaaaaggttcttgagcttgaagatgcagtttcacaaatgaaaatcattcatgtggccggaactaaaggaaaggtacagactttaaagttccttgagattatgcaatgaagattttcaagttttgtgatcgttttgaagggatcaacatgtacatttgcgga

SEQ ID NO: 35550 - DNA, 777 bp, Arabidopsis thaliana columbia
atgcctaataaagaccatgtccatatcgggcaagcccatgttatagcccattttattattgataaatcaaaaatcatgattttaaagaattgtgtttttgcattttgcatttttccgacaaaacggtaaaattgtgtttttccctcaattcatgcccatgggagcccattgtccatatggtcaaacccatattatccgcggacaaaactggtcatatgcccaattggaccatttgttttatggtctggaatatagcccgtccatatgcatttggactgggcaagcctatgggccgcctgtccagttgacagttctacaaataatgtacctactaacagaacattgtaagaagctacagatatagtaattagtacatgtccaatgtaaatccactcatacatttcttctctctttgttttactttaaaatatcgattgagcaatttcgatctctagggatttaaagaagtgaaaccaaaattgtttctgacgagcgattaagaacccctcttttaccgcaattgacaatagataaacattatacatctcagagaaaccttctccattttcataaacccttttctacagtgatcgtctcgaagcagaaacactgttcacgattttttcaacgcgggaaaatttatttatcttagggatcatctaaatacagtgaacctcatcagattgggtccaaaaccaggttttagactgagtcaacgacaacgactgtattagcgtgttgatgacacatgtctctccgttgtcacgtataatcacc

SEQ ID NO: 35551 - DNA, 1029 bp, Arabidopsis thaliana columbia
ctttcgttgatttctggttcgattcatatctgcgctgagcttcgtctccgtcaatctccgtcgtgtttaacaatctcttcttcgcggccaaaatttctctcttcccgtagtaagcagttctctctcgaccattttcctcagatctcacgtccgatcaaagtcatcgcgagaagcgccatggagacgacggcggagacaattaccggcggtgttcccaacaacacgatgaagttattgttcgttgagatgggtgtcggttacgatcagcacgggtacgtcagatctttagttttcttactctcaaaatttgcgtcttcatcgatcataccgatgtgagaattgagatcgaatcttgaaaatgttgaaaaaattgaaacaggcaagatgtgacatctgcggcgatgaaggcttgtaagaatgcaatttcttcgaattcgattcctgcttttaggaggggtacaaattgaatatcatcatcttggctcaacaatgcaagtaattatctagcaatttcgaacttttaacttgatacttagtggcgttgaatgtgttggtgaaggttcgattcctggagtttcatttggagaaatgaagttgcagattaagcttggagtgcctcattctcttcaccagcagctggatttggacaaggttaagtctatcttcccatagtaagttcctcaagtaacctctatcatagagtttaaatttggcttggtactagatataagttgttttgaagttggattaagattggtgttgtgaaaaagtagaaagaaacaaccattaccgtttacttatttgatcatgtatagtgtttgtgggaaaacatctctcattttgttacttagtcttggacaacatctcttgagtcagctttatctaccatgttttcacaatcattcgttccttttttgtttgaagtgggaagattgtgaatgtagaggtggtggatggaggactgatttgctcaagcggtgttctagtcgaagaaatgggtgatacaaatgaagattgctacatagtgaa

SEQ ID NO: 35552 - DNA, 473 bp, Arabidopsis thaliana columbia
aggatccctttttagtgtggaatttgaaaatgtcaggggagaattgtatggatgatatgaaaggggccgcgttgaaacatgtggatgttgtattgtatgctcctgagtccacccttttctttccgtgttatttcatactattacaaataaggttggtcccattgctttgatcacattattgattataccatttacttattatgtcagtgttggtacaggtcattgatcacaatttgggctttaaacggagaggatggaaactgaattctaaatacatttcggcccatttagggtccataaccttctacgccaatcagaaggtacgtcgacatgagcaacttggtcaattttatgacataaatacaataacaatagcaaaataaaaatcgatctgaggggttttagaaagaaaagaagaaattcgggagtcggagaaattgtcgggtggatcgatgaatacttgtcagtttatg

SEQ ID NO: 35553 - DNA, 503 bp, Arabidopsis thaliana columbia
tttttaattaataaatgaaattgaaattcattgaaataattgacttgtttaatgagagtgatttaacctttaaattcgaccaaaatatatagttacgtttcgtttcaaaatgttcatgagtttctccacagtttgaaatactttttaaaacaactaatgattacataaaatttataatttcattaaaccttcgttacaacccattaccattactatcgaaacgagtagaagtagaccaccagaaaagaaatcaataaacggctgctctcggccggctccatcgctagaacaatccaccggagaatcactaccaagggcaaaactggaacttcccataccatcagcattacttgcattcaaaggctgaagaggaaaaagagggagtgttttccgtccactggaattgacgttaatgtcctcaccggcataacagttatcacggagggcaaatctgtcaaatgtgagtgaactcggagaaattggcattcttgtggctgctgttg

SEQ ID NO: 35554 - DNA, 587 bp, Arabidopsis thaliana columbia
gtgtcttctgatataatacaaatatacaatttgtgacgaaataatttacattaccatttcaaatggaatcggattttcttttctatactgtaaagaagaaaataaaatacaggaaaaggtatggaaaaagttaagaaagttaatgaggagttactaaaattaggaagctggtcggtgagtaattttgaatacactggttagacttttccctgataaaaccaaaagtgggtggatatttttctttaatgtttctcatagcaaaaaaaaacataaatatagtgatgtgaaaagacttaaatgggtttcgaattgattttgaaatttacagggacgtgccatctgtttggtcactgtacagttttttctcttgcagcgatgcgacgctgactctctctcttcccaattacttactctttttaagcacaactgaatttatattcatcgatgcacacaacttttatgattcattggtccaaacgtaaccaatcaggatatgaatggcttataggcctaaagcgcattttcgtttgcttagagatgctcaaaaccaatcttcgctattcgaactggaattgtgaaggatgatg

SEQ ID NO: 35555 - DNA, 527 bp, Arabidopsis thaliana columbia
caaattacaaattaaacaagttgaaacaaataataagcttgtgtaatgattctttacaggaatcaacaacgggatgcgagaatctccaccgtctgaatcagatacatttccttcctctttccataaaacgcctgaaaggagccaactaacaaaagaagaatggaaaaagctcactaaggatagcacgacaaaggctgttcaagaattggtttcttcacccgattttggcaaatgggcagcagttaatgcggataggatcaatgtaacaccaagaaaaggatcttctagcaaaaaccagccacggaaatggatgcgttggttctgatttctgaaccaagccggtttaagtttcataacgtttagagagaaaaggaactcttttgtagaaagagagagagcctttgtaggtaaagttgctttcttcttttatgacttgttcagtgttttagcttttgtttttgtggatgagacacgatttgttgtacgatcctaattgggtttttaggttgcgtcatgtttgtgtgtag

SEQ ID NO: 35556 - DNA, 557 bp, Arabidopsis thaliana columbia
gaatacataaaaaatgatatagtcaagtaaaattacaaaatcagtgactacaaaatttgattcgtatagttaaaaaatcacaatctaatcaaagttatatattggacgctagataacatttagccacaaaaggttaatccacaaattataaattttagtataagtcatgagatgtacacacacatggctctgaatgacgagttgctgacacaacataagaacaatgaaagggtccgtggattcgattcagaatcgagtcaaataatagtctcactcttatgtatttgcagcgacatgctttgcgtctaaattaatttaagaatcacttttttttcttcttctcatcattatttaaagaaaatcattgactcatacgtctaagtaccaagatgaataatcgtaacttttataagaatgttacacttatctgctttaactagaaaaagttacacttgatcttagccaaagacaagatattagtgaaaaccgacaagagagaatgatgaagaagtaaacaacagaggatgctaagagagttaaaaatgaataaaaagagt

SEQ ID NO: 35557 - DNA, 586 bp, Arabidopsis thaliana columbia
caaatatattagttagcttaaattatttaaagaatacaaattgaaaaggtatattacactttattcgaatataatatcaaaacttatataacacagagattatataattttttaattgttaaatacttttttgtgctaatttttatgtgattaagatttaattgatttcgtatataaaatattaaattgttttacgaacttatttgtttataatttggtaacagagagatatttgaatattcagtatattttgctttagtttaggaaatctttgatgacccgtctttagatccaataagccatataggtaagagatgaatattgtctttaaatgattctggtaaccttaatgacgtcaataaaaaattttgtttttggttaaatttttctaatgacattatcatgtaattaattacaaaaattaaagttacatttaaaatgtacttcccaaataatatagcaggatatatttcaaagttgctatcagaaacatatatttgagcctgtatttcgaaacttgtataatgttaaactaatttgagcttggattcgaatccatgtttcgagcttggagttttgtgatatg

SEQ ID NO: 35558 - DNA, 666 bp, Arabidopsis thaliana columbia
ggtcttctccagttgatatggtcgtttacctaagcattagcttctccagctaatttattgtttccctgtctttactttctgaacagttctcgcaggttcctcaacaaggctcattctcacagggtccttatggaaactctcaagtaagtgttttccgacaaaagaaatgttgatacttataaatgaattcattctctacatagagcagagccggggtataaagagagaatattattaacaattaaaggatttaaggactttaatagactcgataaaaccgtcatatatgcattatccactttttgaaatctagacataggttctcatatgttccagtctctgaggttcggcaatagcatcgagcatcttgaagtgttaatggtatttgtaatctatcaatatgcagataattgattaaactcgtttgtgaatgtagggttcgaatatgatggttcaaatgccgggcacagagtagtactaggacactattcatcacaatcttccgagactcgactatgcctgttgtgtctgagaatctgagtgatccctttccatagatatggattgtggtactcagtttttgggagagagaagatttgtatatgattgtgttgtagggagaagagtttggtttggttatgataagaattgaaaagcacctttttt

SEQ ID NO: 35559 - DNA, 780 bp, Arabidopsis thaliana columbia
ccagtgtgctcaataacaaaactcatatgcttctcgttaggtccattcttagacgtaaagttaaactgaaatccaacagcagcagcaggcgaatcaggaagatcaacgaaatgccacgagatatatatgtaatcgttggtgagacgacatttggtacatttgaaattcactgttggtcctgaagttgtattcttacaagtatagcttcctaaactagaaagagcagcaactttgaactcgctaaacccgggattacccatgaccacgttcccaataccgcgtaaattagagcaactcatatccgaaacagcggtgatgttaaactccaaatcgttctcgaatgagatcaaatctggagaaccagtagctctcacattgtgaacttcaattgttctcttgggttatgatttgataaagcagcctgtgaagaaactgactaagttaacaaaaaccaaaggaagcactaaattctgaagttatcaaactcacgcagcgaataaaccaatgaaaacaatccagctcgcaacagaaaatgttccaccaagttctgttttacgtttcttgacaatttgttgatcatcctacaagattcaggaacctaattggttttactcaaaagaaaccaattcatggagacaaaagcaatgagagtagagaaagcactaacgagccaatgtctagtggagaagaagacgtcaagtcgagtaatccaccaacggagattaaaccagacattacgaccatcgccgagtttggtgaatctcaggaagatactctaga

SEQ ID NO: 35560 - DNA, 618 bp, Arabidopsis thaliana columbia
taagaattatatactacaaaaaaacatagactatattactaaaatggtgataaaatatacaattttgttaaacttgcaaaaataaagaagaatataagttatggagggaaccttggctagtgaaattgcaagccaaccagttatgcagaataaatcagccacccacaacgtctaagaaatattgtaagacaaaaaaaaatgagggtgtagaaatttacgatataaatttttgggcttacgacaaaataaaagaaagataggggtgattttgagaataattgatacttaccattttatgaccgaagcacttgcagctttggcgctgaatattgcaccgatcatcctccaaacgtcgacaacgaaccaaacagcgaaaactgtaaacatagttctcaagaaattaaaattaactagtcatcactgtaacaatatgagctcgtacagtagtcaactttttctattttgttcccctaaataattttcgatttgatataaaaaaaagcgatgtaactagtagtttcacaaaatacgtatacgtttgcgtgtatcgaccacttgtaaaattggaagaattgcctgaagaattatattaatgttgtttccataaacatgtgatga

SEQ ID NO: 35561 - DNA, 847 bp, Arabidopsis thaliana columbia
tatggctgcgatgggaacacatctttcactgcagaagctgcggtcaagtaattgtgaagacatagaaattcacagattgagaaagaagtcttgttttctctcagtcgctccagttgtctttatcttcagctacttcaccttgcgcctgcaaatagacaaatcttgattaaagagacatccacaacaagactgcctaacctctaaattatgaaaatttgaagtagtactagaatttagctcaaccatttcatcttccacggatccgcctggtgaccacacaattatttgtctatctgcgccacttgtgtatagttcctatgagcaagtataacaagtaattcggatttagaggtgtgttcaagcaaacttacaaactcaaatcactcgcgaaattcgggaagattctgaggattgagtttatacctgatcattggaattaaagcagcaagtgttcacgctttcgtagtgtccacgaagcatcagtgttgttctacccgaccacatgccaaaacccttatatacagttgcagcaacaattcatcaaataatgcaagtactggaatggaaagatttgctgatacaatagtaaggtggtgactaccttcacagtcttcatgcacggaacaaatacgagagctggatcatcgcttgtatctaattgaatcgctctgtctgtctggatgcgtccagtttcaaagttcaccagggtattgcgtccagattcaatatcccacaatcttattcttgaatacgaccctgaaacataatagtaatagactcttaagtcttaactgttgtatcccactgatgtgtacggtagtaattagtgctccacaaattgatatag

SEQ ID NO: 35562 - DNA, 450 bp, Arabidopsis thaliana columbia
tttaacagtttgaataatttttattcgattgatgagtacttttatcaaagatgcaaaaaacataaaagaactgggaaatgttattttaaataaaccgaaaaagcaatccgtctctggttttgtatctgtctctcctaaacattattcaaaatttgaaaaccaaacgttcccgattttcatccttttgtcttctccaccggaagcctttgcgccgcaataccgccgcctccgccgcttcagctgcatcggtgattgtaaatagccgtcttcttattctaacaaggtaagtcatcggtatcttcatcatctactttttcgtcttcttcttcctcctcttataaagcctaatttcgaagggttttaatacagtcgcagtgtttacaaatcctcaatttgatgctcatgttagattcactccaatttgattttaaatccggaatttcccccatt

SEQ ID NO: 35563 - DNA, 338 bp, Arabidopsis thaliana columbia
agcatctctgtgtctaactttagaattactcggtgctattggcgcagttttgaactccgtattcgcatttctattagccctgggaagcttactttgatccctcgtgtgaggaacattgactcaaaggcattctcctttatgtctgcactgcgaaactacttatatgtagctgacataaggtgtgtgtgccttacaaatttcttccgatctgatttcgtgtacttatgctgcgtccgtcctctgagtgataaatcatgtggtcaccgaacttgcagtgaagttcgagttgagggtttggagacactggattatctagacaacgtgattggtaaagaaag

SEQ ID NO: 35564 - DNA, 502 bp, Arabidopsis thaliana columbia
gttgttgagtcttctaggacgaatgaaggttttggtcggtccaaaagttaggtgtatgactgactttgtggtttctaccaatccctcggctatcgtcccaccgaatctttctactattgtaagcttaactttgggtgagacatatattaattactgtgttataattattatttaaccagtataaatatagataaatattttaaattaaaataaacgattcggagcatatattttatgaaatactaaaatgtagacatcatttagtaatctcttacatgatgaaagatcgagttaagaataattctgtatatagaaaagctatcattgttccaaagcaatcgttatataacatttgtctgcgccataaaattcacacaaaatttcgatcaagtcacaattccttcattaaaattttgacagtatttacctatagtggatttaaaaatagagttgtacccgttgtcatgaatactacaatttcgttaatccatggtaagatgat

SEQ ID NO: 35565 - DNA, 1052 bp, Arabidopsis thaliana columbia
tttgaatctagttttctttaagtaatgtaatttcacgactgaactgaaccatcaaatctcaaaagacctctgattaattttcatccatctttagaaaaatagtgaagtttgtttgatgaattgggacaatttagttaatatattggtggtatacagaaaattattaattattaattattttctccaatgtacttgcttctttcttgctcgcgcgatctaacggcagcaagggaaggagggagtaacgaaggatgaagcgtgggccattgaatttgagatagtgccacgtggacagtttagttaatgggacccataagccgacaaaaagaggacacgtgtagaatatatttgcacaaagacgtccgtagagagaaacatacgccgacattgatgcccgtccgcaaaccaacgccaacaccgagccgcgcgtgttttggccgacctttgattgagacgcttttctttattatccaatttcaaaattaagaaataaactaggcgaaaaaaacaaccaaaaatgttttgactaggactgatcctataatagtcaggtcgtagtaactagtaatatctgtaaacttgaaacattattatgaaatacggtcgaagaaaattaaattaaaataggttactaaaaaaaggggggaacaaaatcatggaagcatgcaaaaggagagctaagtttgcaagcaaattatacgagagtgggtcaccactcactcttgtacaccacacgtgcatgcttcttctttccttattttttgtttcgcaaaatcaaaaacaaatttagttttcgcaaagccgaggtaaacaaattcaaaaaggataaagcaaattatatataggaaaatcggtaaaaaaagaacaaaaagagaaattcaaatcttgactttgtttaacctttagcttttcttctttagtcatcgggatcaccgctgtttattacgaagatccatgaggcatgcaggagttatactaatccgggcccttcactttgatctattccgattttctttgggtccactaacctttaaacatatggagtagtacta

SEQ ID NO: 35566 - DNA, 535 bp, Arabidopsis thaliana columbia
catcaagtagtgtatcttttgttagtcaaccatgaaaaaaaacgtttgttatagaagtaaagttaccccatgtaaaaacaaaatctaaagccaacaagaaaactaatagaaaaggataaaaatttattaaaagatcaaaagtaaaaacagactacagaacattgtataaaaagaaataaaaaacccaaaaaaaacacagtagaattttgttaaaaagtaaaaaaaaaaaaaaagtagtagaagaagagtagctaaagcccaactttatattattttcacttaccctacactatatttttgaaaacaccactctatgctcagagacacacagtccctcactactctttctctatctcctacaagtagactttaagacaacttttgtctcagtgttgagtaatgtaaaatacccatctggttatttattacgcatagatctctctcttctctctttctctatttagattacttaaagcagagaggtccgaacatcatcaatcaaacccattcacaactactacgacaatggactacg

SEQ ID NO: 35567 - DNA, 483 bp, Arabidopsis thaliana columbia
catctagtttggtcttgatgtgggttccccccattgttcccgggttcaaatcccggcaacggatctctaaatgttatgattaataatctcgtataaaacgtagattttagctgctgtaggcaataatctctctgtccaccatttttgtggatattttttcgtcacctatttctgatgtttccaggtatacttcttagtaagtagtgttaagaaagatatctggggacaacattgtatgggcatctgtgatgctgtttatttagcatacatctgtaatctggctgaatttacttatttgcagcggtggggggctataaggagaaggactgatacttcaaacacttctacccaaactggcctacagcgaacagaagcacaaatggcagctaatcgtgcattatctttagcggtgggaaatcggttaccctcaaaaaaacttgcagtgggtacgagtaacagaagattcttccggcttattgtact

SEQ ID NO: 35568 - DNA, 839 bp, Arabidopsis thaliana columbia
cttcaaagaaatcatcactatagtcaaccctttctcgaggatccaagttattcatgtttccatggtttctatgtacaacatgatcagatggtttcctaaatgagttgccatctcttccataacctcgaccccttacataacctcggccccttgcataaccccggccccttccagcattcgatggtctatgcgagaaaggtggagaattgtgtcttctgacaaccatttctcttgaataaccagaatggtcaggcgagctcatcctctccactttgtaacctgagggtgatcttcgatgagaaaagtctgtatgcccactgaactcttcctgtgatctattcctgaaagacgaggatgaaccatctgatctttctcttgatctaactggagatcgtgaacgaaatccaggaaaatctcgtttggggttgtttacaaactttgttcgtcctcgagcaaaaccactccgacctcgatatggacgttggtgattcataaacagtggttctgtgttgttgcattgtaatccccttgtgaatttttcaccatctctaaatccgtgaaatgcagatgtatcctctttatttgttggtcctctattatatgaaaagctaggggatcttctcggaaaggagtgagcatatggtgtaactccatcatttgcaggccgtctccctctctgaaaattactcataaaagcaccaccccgacgagtgtttccatgattatcaaactcaaattctgcattcacaagatgagagtcatattgaattttagaaacaatgagctttgtttttccataaaaaaacttagataggactttactttttgtgtcctggtca

SEQ ID NO: 35569 - DNA, 544 bp, Arabidopsis thaliana columbia
aatcatgtgtgtatatcaaatcatcaggcgtggagcaacgacagaatcaaggcgtgttaccacaaggtggagatggagagcgtggaaatgaggtactcgttagggttcttttcgttccaagaagggatgatatcgacaccggaagagatggtggacaaggaccatcctttagcgtacaacccatttcaccatgacggacttcttgagtactatgaaacattggaggttcatctcaaggctcaccgtaccatgaccaaggcttattgtggcatcccataaacctgatcattttcttgatcttattataggaaaaaatgtctgcttgtatcatgtattttgaaactaatagtgtgttttagacttatttggttccttgaaacaaaactaaaaatttctactgttttctctatctgcttggtactatagtaaaagctattttgtccttgtttgtctctataatgggccttgtttatattactatgggccttgcgtaatagttagttacctcgatcctttttcgaggtttcttttgcagtttggttgt

SEQ ID NO: 35570 - DNA, 178 bp, Arabidopsis thaliana columbia
ccgccggcggctgacgatccggcagccgagtcatccttggccgcgacatcctcgccgcacgtgacagcgtcatcaaacctgcgagggacagcgcaatgagtggcctcatgtgacgcatggtgtctccttctcacgtcacgtcggcatccaaccgacggtttcgggacaccatgccatc

SEQ ID NO: 35571 - DNA, 519 bp, Arabidopsis thaliana columbia
tcctctgttcttataggaatcatttaaaaatgtgagacataaatatataattctgaaagccaatcttatcttcaaatgcacatttcacttatacgtattcagtattctgccattcaacaaacccataatttattttgtctatggtaaaaaaaacgcatatagtcagtcatattagaattattttacgaatgtaatttttattgctacttatcatgtatgcttaagtgaaaatagtgagtcactatcgtcattcgtcacccatctcatgcttggcgttggcgggctcgaggtcagttttcgaataatccgtcggtgttaacagaataatccgttattgaaaaactaaacgccgttaacggaaactgtgtgcttagctggcagacacagcagagaagtcaataaccagctggcatgatcaccgttttgcaattatcccataattaccgcaacacccttctatttttttaccttttttttctttaattagtatttactatttattatcgttatgttcttaat

SEQ ID NO: 35572 - DNA, 500 bp, Arabidopsis thaliana columbia
  unsure (1)..(500): unsure at all n locations
tggtgaattaagtaagtatgactatgatgacacaatgatatctaaaatggaaggtggttttcatgcagattgacaaaatctccctctttcacttttgcaaaattgtttgatttttacaaaataaactttagttagcatcacataaaatagtgggttatttgacaaattatcaacacaacgtattattatttgaaatcacatacgtattgtttactaatttgattattattattttttgctacagacatttactaatttgatggtcaaaattgtagtcaccattaaaattatttacataaaagaattgattattttacttccctcaattatcaaatataaatttgtgatgaatttgaccgaaatgaagatgtctgaattgtttgagccacctaaatgtttagatggtcgattcttaaaaaggaaagaaaacaaaatgaccanaagaaagaaaacgtatgaaactatgatccatcagatattacttttaaatcaatcttggg

SEQ ID NO: 35573 - DNA, 564 bp, Arabidopsis thaliana columbia
gtccctcccacacatttgcatgccttttgtcttcatcaatttctctgctttatttaatttttattattcaaactttcatttataaccatataaacatttgtgaaattcatttatttaatctatatatatctgaactctatctatacaatatttctttatagatgctttgttccaagttgtcttatcaaaaccattattaaatctggactagttatcatagaaaaagcaaaacaaattctgaactaataactagtgatttcatgcgatgtattattcataaggaacgacatactaaacttataatggagtgtattatgaaaaaatcaaatcgaatcatctagatacttaactacaacaagaaacatgttactaactcacataatcgatcataaatatgtcttaatcaatatataatatgaacattcaactagtggttgcattttaatgataatgacatgttaaattaaataagaaacttggaattttttttaataatggtacacacatatctttataaaaaaatttcatgttattcgatcgatgtggtagattgatgaatttggt

SEQ ID NO: 35574 - DNA, 271 bp, Arabidopsis thaliana columbia
gtgcttatgtgatggttttttaggcgaccggtagtatgacgtgactgatgcttgggagaatccaagttttgaactatgatttagagtcacaatgtatggttaccatctcaaattgtatgtagagtgcgaccttttcttgaattggcgtgtgcttggtcttgtcgaacttgcttctaacgctatgtcagacttggataaattttgattttcgctcttgatcagcttgtttgttcaatgagattagccggttggtttgtatattgggtgtgtc

SEQ ID NO: 35575 - DNA, 516 bp, Arabidopsis thaliana columbia
gggttcaaaccggtctagaaaaatggttgacatctaaatctaaccacaagaaaaacagtgtgtcctagtcgtatccgtgcagatccaatctacatagtgaccaacttcggaagtgttggatatgggcttcgcccaagataacattccagagcccaacaaagattcaccaacaaaatcagtaaagggaggtgaaggtcagcccgttagaagaagccgcggcccatagcagagtaaaagcccaccttccagaaggaatcgacttatataggagtcccacatcgctcagaaaatcgtatcttgtaccatcattgaagtactataaatactgacagaaaaatatcagaaaaggacacttgagatcggacgggaaaagtacaagaatgttcccattcggagtcaaagacataagctcggcaatcgacttgtgtagttttgtgtttattctatctctcaaacgaggctcggctgtgaaaatacattctgtaaacggtcgaacgtcgagttcaataataagat

SEQ ID NO: 35576 - DNA, 1130 bp, Arabidopsis thaliana columbia
ttttcaagtctctagtaaatgaaaccgaataagataagggaagtcaaacactgtctgtcggggaaataattcttgatcttgatctttacgggcccggtcgatgacaaaatacgacgaaatctactcttgtcgcttttgtaagatgtaaatatgtaatgacacagtactactctactaactcgcctagcctgtcgttacagaaaaggatttcagcccatgggctttactatgataaattcatcagcccaaaataattcggacacatctgaaccacgtgtcagcttatacaacgatgacatggcatgctgagtcagcaccgccaaagatggtgcacgacgaccggagagtttttactaacttgtacacgaaattgggtcagaaacccaagagtctctcttgcacaaaaaactgtctgtaaaagggagtgggcatcatcgttgacgcttcagttgtagtactttaacctgctaaagttacagtcttttcaaaagagcctgcgagtgaaatcgatgaatcacagcgaagctaggggttccggtggccataagggttatcggggacgttctcaagcatctgagcaatgggttccggtacttatacttgattgtcgtctcgtattcttgtgttaattcatttctgtttttgaaattggagtccctggattagccctttacttgttgcgcgctattggtatggttgataagctgattgtttcctttgtaatgtatacaggttgcagctgatgataagtctttggaagattcttctggtaatagggttaggggatctcaagggaaaggaagaagtagaacatcgtggtctcctagaaatagttatgggcgtggtaacgatgaacacagtccagtgcaagcgtacgttaacaagtccaatgtgggatttgtggaaaagggagttcaacaggatagaaagtccctagaggatggaattggttctactaagcaacctgatgatggtgctgctgctggagataacaaggctgttttgcaatcaaagagcacaaatgtcagtggaggttcgtttgtctctagtgaatgtgaggacaaggatggcgctaaaatgtaacgtgatcttgtgaatagggtgaatgatgttacggtgtcttgccagga

SEQ ID NO: 35577 - DNA, 836 bp, Arabidopsis thaliana columbia
aaattggttgttgtttcaactatagtagattatattagagcataattaaacgcactaattctgtttactatagcaattcttcgatgtcattgtcaaaaaattatatatgatagcataaaacacaaagctacaaaacttatattagagagcaataattagttgtcctattaggtgagggtattatgacacgaaattagaaagattagtaatttataacaagaattaaagtgatatatcaaaactctataatgacgttatatcgttgctatcgtagcaaaatataccatagcgtacaaaacaatgctgtcataggggtgacacctactatagctgccgcaaacatagcatttgtgaattcgctgtgtattacatacgatagcagatggtttgcgctaacaatgaagactttttttgtagtgggaaggcgtaacatcaacgttctttcggcaagacgagtctgtgtgatttcggagacaacgagagagaatcacgaggcaatactgtgtaacaacgacagcgatagagaatcacgagaaggcgacgatgacggcgagagagatgatgacggttaatcggcgacagcgacagcgagagagaagatgatggttaaccggcgacgacgacaggcgagagagaatcgattaggtttagattttgagattttgtgttttttgtttttttaatttttatttgcattaattaattttcaaaagtttttggtgctatttttggaagtttcaaacgtaaatgccatttttagaataaaaaacttttttagtgtcatttgtgtcaatcctcctatttagatctttagactgaattgtcaaacgttacta

SEQ ID NO: 35578 - DNA, 522 bp, Arabidopsis thaliana columbia
tcgaatctgcacgttgataatatctccatcggcaatagattcagcagcacgagcgagtaaatccattcgttttgcctcatctttaccgcttggcctataattgagatagttttcctgcccagatggaaagaaaataaataatctttaaatttaacggtaaatgaggtacaaatttcatgttgggaatacaagttttagaaatcactaatgtcagaggtagcaggaaacaattttccgttccaaaagatatatcacaataaccccacaagaatccaaaaaatatacctgtataagtaggggaacaaatccggatcactcatgcttaggtcaatccgttcatccattctcagcttcccaccattgtaaccaaacaacctggaatcatttataattaaattatgaaatgtccagaccgcttaaaaccaaactttttacgacaaaaccagggtaagaaatttcttctataacagcagctataagacttaactcaaaaagtttggcaacaatactatgtgcattgat

SEQ ID NO: 35579 - DNA, 317 bp, Arabidopsis thaliana columbia
ttttactttgctcttcttttaactcctttttctgaaactaaacttcaaatgcttatttcccggaaaaacagcctctttcaacacatttcgtttgttgttgtaatttatactcttttagatgatagatattagttcatattttttaaatgtacttctaaactaatattagtaggattaataaaatttgaactttaaatatttttaatatatatacaaaatactcagataatcaataatcatttctcgactttcatctttttctcaaattctcgacaatggtttctttatcctcaaaaatatgatctgtcgtcgtacta

SEQ ID NO: 35580 - DNA, 490 bp, Arabidopsis thaliana columbia
tgatgatgatgaagcacccatctctcgatcgatctctatcgcacagaagaaactaattaaaattatttgaagtcaacaggtctccgcttcttcattgttcattttatctcgcagcagcattacagctgttatgttaattccttggtaacaaacaaacccatccctaattgttttttccatttgctatttaactaattaatcgcctctttgaccattttttagagacatctcatctctccaggtgacagaaatgcatattagtgtgtattaccaccactccccaaaaataaaccaaaaaattttgtttacaaaatatcaaatgcctaaatcagtgacagtattgcctaactcaaatctctctctctctactacaacaaatggcttttcacgactgtttctttagccttctccacgacgtttttggtcatatgtacacacaccaaactgtgccttttttcttttgtatattaacatctctctcaagtggccc

SEQ ID NO: 35581 - DNA, 349 bp, Arabidopsis thaliana columbia
atatcttatatgtacaccatataagattgatatgttacaaagataaaagaataattaaggggcatacaatgtcccatatcaaccatggacaactcgtcattcgcatgcattaccagctaattctatataattagttaccaacttaggcctacaccatttcaaatcacacaagctaagacacacacgcactagtctccatccactatatatatattaaatacgacagtactcattcccaatttgtgattgtgcacgcggacttgtacatgtcgtagtaaaacggtacatatggtgcaaatggtgggtcactctcaacactattgtaaagctttcttgtgtgtgcatgtgt

SEQ ID NO: 35582 - DNA, 453 bp, Arabidopsis thaliana columbia
gattattcaacagaaaaaaagaaaactacatgtagtagtgaaatcaattccttcaaatggaactaacacagtcaaacatgattggtttattgaggaaaaaaaaagatggatggttaatgatatcaaggcaagggcaacagtgacattttgatgcattgatgttggattcataaaacccttcaaatatattgtaagttaatatgcccgatagtctagaagataggaagggagtgttgataaggacacaccgacgcgttccggagaaaaactttagaaagaagaattgaacttgacacgcgtctaatttggcggccattagaaaaaaaatgggtgtcacgctcatatcacgtgtccataccctagcatcaactccatgacttgtggggatcacggtgtctttttaaacatcaaacggctacggttgagtcttcttcggcttgaactcagttacag

SEQ ID NO: 35583 - DNA, 474 bp, Arabidopsis thaliana columbia
tagaacttgaccttctttcactatgtctttctgtagaataaccaaaagcaaatatataatcaattgagagattccaaatgctccttgaagatggatattttgaaagacttgttcaaaacataggagaagaagtacctctttacagattgtaggagtgcgtttcccttttatggtcttggatctcctgaaataaccgacctgcaacaaataattatccatccagttgagagatcatgaattttaatcatttcatgtcagtttcaaagaaatgatctagtctctaaccgttggagattggagaatcactaaaccctgatcagcagctttgttagcgagtgtttgtggtctgtctgccgaagaagatgatgtttttgtgatagcaatgacgaagaagtagctgagccattagtgtgaccccctcaggagttgcgcttgcagcaaccacaggctgaatttgctgaggtggtggactac

SEQ ID NO: 35584 - DNA, 596 bp, Arabidopsis thaliana columbia
  unsure (1)..(596): unsure at all n locations
tgaaagattttaaccttttttctcactcctttttcatttgaattttctataattactttttgattttttgaattttgatctatttgtttgttcttctctagtgaagatagagactctacgaccactagttaatgacaacaaccaaaccaaaccataccatatgagctttgttgcctcatatccagctacctatatagcaactagtcgtaacaattagatatcaaaatttttaatcagcgattttccgagcaattcgttttaaaatattgattaaaaattataaagtgcagaaatgaaaattatgatccttgatgtggtatagaacaacataataaattaattgtgattaatttctcgtctcttatgttgcaacttaagtcattctgcttcccgtatgttgctactttcctttttgtcacttcgtattaattaaacaatgattgcgagagatggatgtttgcattggagagtgaatcatggatagcttcaaacaatgtcatttatagagcccaagaagattcttctttgtgataattgcgatcaattatgcacaatcatgangccatatgaggtgtaactttgtgttatttgtaaga

SEQ ID NO: 35585 - DNA, 520 bp, Arabidopsis thaliana columbia
cgagccaggtactctcggttcaatttactaatatacccttgtcttaaaactgctaaacgagagcaagcaagaaggttattattgtctatccatcttactcgtaaaaatgcaaagacgtttctgtttcaatctctccaaatataagccaaacaggatatgattttggttctggtggatcattctagtgggccgtatgatgggcctaagaataaggcaactaatctgggtcgaatacgggtagacccgggttgagatcccgacgtgtgcgcttcgctgttgtagtagtagtatatctcatcatcaatcaggcttttgagcctcggaaactcaatccttgtatattcaacggagagagatctgcgagagaaagagagatcagattccggtgttccaaggaagcacatattttaagatccagaatcgcctgagagatgtctaccttcagtggcgatgagaccgctcctttcttcggcttccttggcgctgcgctgcgctcgtcttctcatgtatatccatctat

SEQ ID NO: 35586 - DNA, 399 bp, Arabidopsis thaliana columbia
ggaagagatgagggagaagattgtcaataaggagaaggaggttcatgattagaaggagaagattaagagtttggaatcagatgtagcaaaagggaaaacagagttgcagaagtggataacagagaagatggttgtggaagattcgtagaaagattcagagaagaaagtggtggctttggaatcagagattgtggagttacagaaacagatggaatgatgctgacaagatgatcaatggaatgaagaatgtggttgaggagccactgaatggcattgaattcaagtcatggtcgccgaatgtgacagccgtaggtgccggtggagctgtggcagcagcatgcagttgcagtggcaggagcagctgttgtctgctacatttaccactcgaggagggtttga

SEQ ID NO: 35587 - DNA, 361 bp, Arabidopsis thaliana columbia
tgtccaagaagtcgcaggaatgctgcgggatttgattgctcggatcatgaaaggttcatataaccgaagggtaattgtgatcaaatcttccgatttccaatctataacaaacaatcttctcctagggttaggtctataatcatcggtttctgctctgttcttgatcagttcaccaaggagtcttggatcgtaggaagctttttcgataagggaatcaaagaacacatcaacaagtccaacatcagctagcttgtcaaaactcttgtcccctgaacgaagagcatttatggtctcactccagctcggaaaaactcggtgctctaagaactcagatgccttgcctaacaagttattagagctt

SEQ ID NO: 35588 - DNA, 596 bp, Arabidopsis thaliana columbia
caaaatgatgagggacctcctgacaatgagtggaatgagattttttttgatatcgaaaacgttgagtacgttgttcgttttttttttagttgcttcgttatataaacagactgtttaagatgtaatatttccttcaggggtgataaattgacatgccgtcttctcaaagcatatgcaaacgacttctttgacaattggcggcattgtgttgacaagatcataatatgtgtaatgagatttgcaaagttgaaagtggatcaaggtattcttatatatatccaattattattttgtatattctataaaaatttgtgtatgtatcccaaaactattatgtcctattttgtagaggattagcgagccaagacggtgcacgattgtacgagagttttattgaaccctccatgtgccgaagttagtcggaccgagtccgtttttgccgaggctgaagacgagtttccttggtgatacacatgtttcccttaggaattaggtttactatacataatccttggttttattatatttgcgtttacactatgaaatctctacctatgttacattagcattcatgatctcttactttttattgatac

SEQ ID NO: 35589 - DNA, 525 bp, Arabidopsis thaliana columbia
attttgattcgtttgttattatcatgattcatgacagttccaaaggaagagttgtggaaccaccgccgaagtcacgaagatctagaagccgtagtcctaggcggagtcgtagtcctaggaggagccgtagcccgcctagacgtcgtagtcccagaagaagccgcagtcctcgtaggaggtgagtttcttctttaatctgcattcttatgatgattaggtgaactagtgggagttaataatggttatgttattagtcaactagcttttgttacttgatttatgaaagaactccatctctgcctaagaacagtatttgtctgaataattctctcatccgagttacataacttgtaggtcccgagatgactatagggaaaaagactaccggaagcggacgaggagcagaagctatgacaggcgtgaaaggcatgaggagaaggatagagatcatcgtcgtcgcactaggtctcgtagtgccagctcagatgaaaaacgcagagtcagaggccgttatgataatgagag

SEQ ID NO: 35590 - DNA, 487 bp, Arabidopsis thaliana columbia
gaaaaatttgacacaaaaaattgttatcattcaatcaccaatgcgagcaaggcaacaaatgcgatgacgagaggtgaacaagcgccgatgtttgtgcccacgacttccccacgaaggagacaccgctggcaaagatgtacaccgtactcaacaaattcttcaaattacgtacgagttacccaccgcggatcatatcacgttgcatgacaatgttgatgactataagatatgcaattgtatcagaattcagaaagtaatgagaagaaacaattcgatatctaaagattacaaaaactataatatgaccaaagtaaaacacacactaatacacaaatctcatgtcttaaaggacgccattggttgtagagaaccacaactcaatttccacggtgtacgtctacaatctccaaccgctattcccgcgtttgcgttctgatcgtcgacacaatcgccaccaccactctgcgtcacggttaaactcgtcgta

SEQ ID NO: 35591 - DNA, 447 bp, Arabidopsis thaliana columbia
cgatatgttaccttttcctatatattctcgtcatttgtcacccatcactgatataaataaataaaaaacagccaattggattttttgttttctttggcacttatatgcctaaaagtaaaaatgttttgttttcttcttgcttgtcgcactgtttgtatgtgttatgcactgcatgcatatacatatagatattatacaaaacaatacgtcgtggtcaatttagagttattctttagaaagttaactacacatatttatatatcaatatagatgtgtgtgaaattgagaattgcacacgtacacacatatccaaagttaggtctgaaaataggcagaggtgctgttttaatgagttgtcggcatcgtaggtctaatataatggatacactaaatataaaacgttcactattagtcttagtctataacgtgatgcagagtaattgttgt

SEQ ID NO: 35592 - DNA, 507 bp, Arabidopsis thaliana columbia
  unsure (1)..(507): unsure at all n locations
tacctctggacatagtaatgaaaataccggtcaatgcaatggttttttttgtcatgtacatatacacacacctgatttaaatctggattgtaaatgccagcagcactaataaaaattaaacacacaaagaatcaaagcctgaaatcagttaactaaaacaacaatgtttttcattgccctagttaattttatccgccaaagaagtgaatggacccttctctagttgagtctggagtctgttggactcttaaaaatcatttatagataatttgttatttcttctcttggtagacggttggcccaacagcgacgtntatgaggtttggcccaatgtatagtttgtttgtacaaagacccaacgtaaggttattttatggcccatgttatggagtcttctacctatatatacaattcagcacagcccataaaaaatgatataaccattcagttgaaaattttctatatatttgaacatatttcacaatggtgtataaattcactaggact

SEQ ID NO: 35593 - DNA, 585 bp, Arabidopsis thaliana columbia
ggatgtcatgactaaagaagtataaaacctaattatgtaccactttaaccattaggttgttagaaatttctaaaaattaaaattggagcacgatgtttgctggattaataaagagagacaagctggtgtccttgactgtgttatgttgtgccataatttgcttgcatccaaacgtatcaagaatcatgagttattaacgaacaagaaactcttcacaatcagactcaatgcatttatgttattacctaccacaagccgtgccaacttggacaagcccgaactttgacacatatggacataatctcatcttagttaacctaaggcttcaaataaaacccaccgctcatggttattacaattttcttcgtcctcttcattcaagattgtgattttgtcctgcatatacaataatttcttgctttaacattaaatatgtcgggctaaccatgcatgcacaacattgcgtatttgttgattacaatactaattaatctatacaggaatttatcagtttagactttagtcagcattggaccgttatacatagtctccacaacattcgaataatgttgttgctataattat

SEQ ID NO: 35594 - DNA, 504 bp, Arabidopsis thaliana columbia
caaaccagtgttaaacctgtttcataatcatgtccacgtacaaacgtacccgtttttatcagccgatgccaatggtttcccgatcccactccaagaacaacacagtataggagatgtttgctccttgagaatgctcactatattgcctttagatagcgaccatacatgaaccgaaccatctgcagatcccgcagccacataatcatcatctggacttatgcatgaccggctccaattcgatgctaatctgttccccgatgctctcagtgtcccacatatttccaaagtccgggtatcaaatacattatgcacgttgtctctcccgctcgtcaagatcctatttccgttccgggacaatgatactgaggtcacagcagaagaatgtccagctacttcggacagaagtttcccagtttgaatatcccataacctaagattcccatccatgtggcctgagaatacggtaagcccatctatgctgaggcagattgcattgcagttgct

SEQ ID NO: 35595 - DNA, 320 bp, Arabidopsis thaliana columbia
attactttttcaagcattgttttcgaatatgattcatgccatgagtattagtacgtaaaacttgtgtaagtgtcgtatttcttcagatataatattgtacttgctattttttttttcattttttgttgtcacattgtacttgctatatagtatttatgttctacaaacattccttctactctgaattctgattcgtctatgaataattactcaaaattgtgcttattccttcgaatctaatttgtgtattatataatcttataatagtacagaaaatgacgcatagaagttagagcgcataaatatatatccgtcggcga

SEQ ID NO: 35596 - DNA, 512 bp, Arabidopsis thaliana columbia
tgcaaggttgttgttgttgtgagctggaatagattgttaatgtaataattttgctatattaaatttgtttgcatgtgtgataattgatgtagctagcgataattttcccatttgttttcctaaacttatgttccactacgagtgtcactttgtttcacgaattttttttttgtttcttttattaattgtgaactggtataaaatataatgaaattgtaggttaacacatcagcagaaacaccaaagctctgcatgaggcaattgcattcttgtggtgaaccacgagtcatcaaaggacgcaatgcgagagttatctagtgaaagacagtcctgttagagacagaacaatatctgagtattgttcagtaagaagtaatgtacatctactctcttctgtttactgatcaagcccatagttacaccgtacataaaagccccatcttccacaatttgccacatgagatactcaattctttcaactcaaggctcttaggttcaatcaaatctcgtag

SEQ ID NO: 35597 - DNA, 497 bp, Arabidopsis thaliana columbia
gactccgtcttaatcgaccaacaccctttgtgggttctaggttagcgcctctgccgagcaagcaaccctgatttggtacaccacaaaaaaagtgttgtcaaaaccccaatgagtacagttcatagaagcatagattgaagaaaagactagtcactacctccaacggtggctccaataagagcaacaagcaacaaaataggcatgctgaacatggagctctcaggctcacatatctcagcagccaaagcttcaagaggtgtagccatctgaagggagtttgtcaacaacactgccatcaccggtaatttgagcctcccaattccctgccacatccatatctaaaagcttactatcactaagaaaaaagttgacaacataaaataaaccgagtcaaacaatataatgtgttttagctggatatagctagacatcgcggaattcatcaccaaactacctcaaaagctgaaaacttgtcaagagatccacactggcaaatg

SEQ ID NO: 35598 - DNA, 343 bp, Arabidopsis thaliana columbia
tcactgtttgggtgtgtgttatatatactccggcgcgaattgtgaagagacaaaaccttccctataatcccgaggcccaaatctttctcttttctataatcactcactgtttggttttttatatttgttttcaaaaactttgggaatttcggcaatggaaccttaacttgttgaagatcctcctcctcctctgatcgcttcgggttctagaactcgtaaacccagaaaggttcgatttttatatttctatgcagaattttgctgattcacctggataaaggtggaattttgttcgcttatgatgcgtgaatgatcatctgggtgttttaggggttggttttga

SEQ ID NO: 35599 - DNA, 529 bp, Arabidopsis thaliana columbia
tatgttgtaaatttaattatagatgaaatcaaaatatagtttcgtaatccatggccaattaaagtattatcagaaatttagtgatacatatttcaggttatactttactagattggtgattaattgtttcccttgggtctaacatcatattaatataaaatactaataaagcaccagtacaaacaaatttaaaattaaaacatgactagttacggacttacggtttacatagcttggttattattggttaagttttggaatcagtttagttgttgttgtattacaaacaaatacgagaataaatacaagaccaaaataaataaaaagggacaaattgcaaattctgaagttttcctagcaggctgcaaaatgcagtatcttagagaattgaacttttttttgtttcgtgttttaagaaatgactttgattagtaacaaaaccttgttttttttttttttcaagatctgatagggctttaaaaggacatgccctttttgttcttgttatcaattgcaaataccaagaaat

SEQ ID NO: 35600 - DNA, 578 bp, Arabidopsis thaliana columbia
aaaagaatcctaatttttcaacagtgagaaaactcaacaacacattatcatctccaaaaagtcaatcagattatttcagaaaccaaacacacaatatatatctcaccgcccccacgtcgacaaaatcaatcaacgaaatcgccaaataaccccaactactatcggaatccacgagaaaagcatcatgatccagcgacgtaacacttgtcactgatgatcaaatcctttatcaattgatcatttcgcgaaaacaaaccatccgacataaaatcgaatcaaaaatcaaaaaacgaagccgtggaacgaagactctgaaaattgaatagagaatgagataagaggaagaggaagaagaaaccttgaaggtagaagaaaaacgagaggaggatcggaaacgagaaaaatatcgccatggcttgcaggcgaaaaggatgatgagggagatgagaagcaacataagaaccatgaatagcccaataatgttcatccctatcatcgccatcgtcttcgcttctctctctctctctctctctctgcaccctcctccttccagattggttccgagaactcgctttgaa

SEQ ID NO: 35601 - DNA, 423 bp, Arabidopsis thaliana columbia
tgctggtttgcgagtgtccacatgttagaattgttggtcttttttgagtttgtaagacccaattttaggaaatatgatgttgcatgagaagagattaaaataattaatttgatcatctatatctttaaagtgaacttatctacagttaagcatgcttgagctgaagtggttgttgttaccatgcgagcgaagacaaaacatgaggaaagatcacatagtgatttgtaggatcggtagataactctttaaagcctcaagaaatagtgagcatgccatcgaaaaagggtggcacacagaccgagaaaagacatggggtccaccaaaggtgctagtcgtaacattacaagattgaaacaccccaacttcaggagatagtggtgtatgaagagagtttagagcgcttttaggatttgtgacctatat

SEQ ID NO: 35602 - DNA, 550 bp, Arabidopsis thaliana columbia
aaatttcttcttaatggagatgacgtggacaaatcactgtcgagttggaatgttgtcggctgatgagtcagcaatttagatgacgtggctaaagaacatccttatttatgacgtaattaataatgatctctcgaaatgcgtcttttcttcgtctgttctatcttctttaccaatttctgcaattctggagaagctaaaggtctcaatctctcagtcaaaaacaaaaggtctctcctttattaaactatctatcactaactagaagaagagattagaggaggaggaagaagatgttgtttcaggtgggaggtgaaggcacacgtcccaccttctttgagatggctgctgctcagcaacttcctgctagccttcgcgccgctctcacctattccctcggcgtataatgcccttctctacctacgtctcttttcgattttgaaatttggtacttatgtgtatgattcttatatttgtttgctgtttcgtgattttttaggtttttgctttgagacgatcgtttctccataagattttagactatgaggatgaa

SEQ ID NO: 35603 - DNA, 173 bp, Arabidopsis thaliana columbia
taattattagggtataacccatctacatggtattagagccaggttccgatcatgggacatgtgggttatgggtctaccacgcttccgctatgtcttttacattctcgacgagttatggaccctggtgagcaaacaccggatgaatcactgtgacacgctgactagcactatgt

SEQ ID NO: 35604 - DNA, 476 bp, Arabidopsis thaliana columbia
gactctagccttcttaaagtttgttgttatacacgtggaaatttcacaaaatgacaaagcaaataatgaaaaacaactcaggccacacagagtcacaaacattattaaagtgtgatgtaacttgtttcttggatcttggtctttttttaattagtgctttcaatatatgtactcatttgaaaacctcacgtaacccaaaacctcactgattaagaaaaaggtaaaacgatggaagaagaattggtggtaatctcgaagagcatagttaatcccagaagccttaagaaaccgacttctgtgaagaagattcagctgactccatgggatctctctcgccttcgttttggttatcttcaaagaggtcttctctttcacaaaattgaagtcaaacaattacaagcttcactctctgttgcacttgatcgtttctatcctttagctggtcgtcttgtgaagctaaagaacgacgacgatac

SEQ ID NO: 35605 - DNA, 894 bp, Arabidopsis thaliana columbia
ttcgagaatcattggaggtggttcaatgtccctcttaccttctttatcggcttccttctttgtgacaatgagggctctcagcagcttagtctcatttctctcccaaaacattttcattcataaatgttacactcctatttatagggtcgggtcttactcgtccataaactctgattttcattttcattgtattatactttcagtatcgttttctttcttgattatgcattaattattaattcttttgcctttcatataccaacataacagtttataagttatcggcgttcatttcaggattttatcttgttcttaaacaattatttatgattttaactgataattggaaacacatgtaacaaaacgtcacaaagtatggtgactatctacttacccagttgatgattatttgtttaatgtgtgtgtttttatcatatatttgctcgtattagtttgttttgatatttcttttggtgctctatcaagcttcgacgagcttgtgtctctatcttttatttatatatcctcatatactttattttccaaacttgctatttggggttctcggaatataaacaatcttcttatatttttctagtttgaatcaaaaagttggtgcacaaaaaaaaaaattatatttaaaaactatatattagttgggaagtagataatgttattaagtgaagtgtctttttaattttatcactttatttacaaaagaaacatccttttcatcttttaagtctttcgtatcttcagttttgagaatattatatgatttcaaatatttcttcaattgttagtggtggtattgaatcaattttagatcgtttttaaaaattacggatttcaagtttcgtaagccatagaacatatcacttagttatgttatag

SEQ ID NO: 35606 - DNA, 536 bp, Arabidopsis thaliana columbia
gttttgacaagaagtctcgcaggagcattgagtttcttgttgatgattttggaggtaagtagcgacgagatggagaagattatcctccgctggcggcggagaagggtggttggatttgttgcagcagtttggtgacgtggcgaattgaggggtgttattgtggtggttttggtggcgtgacacacgtggttatggttgtggtggtggtgagaagccatgtaatcgacggcggagtcgcgtgactactagatcgaatgtataaaatggctttgaccaaatcggtcccgtgaataagaaacctttttagaagaagaagacaaagaaacgtcacgtagtgctcattgtttattacgacacggcacgcatttcgtcttattgactggtcgaaccaaaccggatgtgttctgcacgagtgttatgctacaaaaaaaatgaaaaatggctaaatcaacccaagcaaaatgcttaatgaggtttcatttttggaaatattaactaattaactacaaaaaaatgaaaaataattcaagagttta

SEQ ID NO: 35607 - DNA, 729 bp, Arabidopsis thaliana columbia
ctttgtttccaatggaaataggtgtagaggaagtggagtataacatcgaaaaagggctcatgacagtcagaggtgacgtagaacccatggctctggttcgtaaacttaataaacatgacagaaaaacagagcttttctcagtcaagtaccagcttgatgatgatgatctaaacagtgattcagaagactactcttcttctgactctactaattcatcttatgatcctaaacccatggaacgtcaattccaagagaagatgatgcagcagaagaagaagaagtctgggatactaaaaatgctttctcttttatggtgtttcagcagtaaatcaaaagttgttcagcctttaccgatgcgaaaccgaaactggcatgtcccatcaaagtttgagaatgttcctcctggctttggcttcaattctactacatcgtcgcagttgcggcctccgcatccaatgatgccctatccaccaatgatgcaaccaccaatgatgcagcaacaacgaccactaatgatgcagcaacaagcacaagttccaatgccacctaatgttaacatgttccagtcagcaccccaaccgtttaagatgcaccctaagttgcattacggggagcagaaacaggttgtcactaagctacttgttctgttgattatgtctctgatacatatactaagcaaaagaattgtttttaagtttcgtatcttttgccaattgctgatagtgaaca

SEQ ID NO: 35608 - DNA, 533 bp, Arabidopsis thaliana columbia
cgaagagcttgaagctgtccgattttctcagagattctacctccaagactcttccatggaagttgaatgacgatgacttgaccttgagcacattttattccagcccagcctccagagcaagcactgaatccagaaccgttccagcttctcaagaagcctcttggatcaatcagttcttgtttaactgcttgaagaccttggtaatcagcttgtgttatcactacaccatcccaggcttggcttgagcagggagggacgaagaagaggaggcatatgattagatgaaggagaaatcggcttcgaagtgaagccttaggttgatcaatgtcggtgttgatcatactcagagaagtaatagcttggttttgtgtgagtaaactccattagaagatgaagaagaagaagaaggagagaagagaggagataattgtagttctttattggtgaatagtagttgtgatgacgatggaacagggaaagattttggatttgaaagagtttggtaagagagagatgggttcgttggaaaggac

SEQ ID NO: 35609 - DNA, 633 bp, Arabidopsis thaliana columbia
tccaagtttatctgtcaaacatagaacaaatccttttcatcaaagaagacacgattgtccagaagcagttgactaaaagagcatgaatctaaatcacaaacatactaatgaaactccaacagaaaaaaagggatgaatcctaaatgaggtacaatggggaggcagaagtcactttagtcccgcattcgatgaaactagaaacagagagaatcaaattgagcttaggttcgaatactatagtgagacctaaacattcacaacaactacgcattaacagctacttctgaaaacgagatctttaatctgagtaaacaaaatgttaccactttaagatcataccggagatttactggggaaatccttctgcgacggaggatcagctgccgccggcgcaacagtcgcgtacccatatcgggagaaaaaggagagatttttcatcgatccattagtggtcaaagatcgaagctttgaggtttgagtgacgactcgagctaatctgggcaacattagagagaaacccttgtggttttactcaacagatgaataaatctgaagggagaaatttgaatgagtaagatcgaattctaaaaccctaggcgaaaaaccctctccgactccttttctgtgtgattg

SEQ ID NO: 35610 - DNA, 491 bp, Arabidopsis thaliana columbia
atggatacaggatcgagtaacaaataatcgtgcttagccctacccgaaactataccgtatcttaagatacatgaataattgagcttttggtttaacttattattagggtatcatcatactcaatcttaaaaaactataagcaatcttactcatcaaaaagaaaagttccatttgttattttcttcttttgacaagattagttgatttgtatgtaaatatatgtggttgttagttcgccccaaatgacataaaattataaaaggaccgactttaaaaagagattccctatgaagacatgtgcctaaattaaagctacaaaattttggtgtttctaaattgattaatttatttaaacttttttcaagtcgacaaatatataagatcactcaattaacttaaaatattagcaactttgtgtttctgaccagtgactagtgtgtgtagatcaaacaaccaattattagcctacatcctatgagtctatcaaaccg

SEQ ID NO: 35611 - DNA, 642 bp, Arabidopsis thaliana columbia
cattaaatgtacattcagctagatacttttccggcgtagcaattttgtaaatgtctagaattcaccgactctaagaaaataacttcacagccaacaacctaaagttccaaaatgttgaagtgttaatatagcttttaacattttccataatacagtttctgaattttctattaaaaaaaatccatactatcttgatttttcataatcatggaaaccacactcactgggaccctctcggttaatgctacgtctgttggtgctaaaccgggttctaactaaaattgaaaagtattttaaaaattttaaaatctacagaggtagaaagtttgttacaggggtatatacgtcatttgacattcgaaattttcaaattcgctgtgtctccctcgcggctatatatcacagctacacggttcagagcaaaaaccaaattctgaaacaattttccgcttaacaaattagcgactagtgagatactgagtgagaagagagatagagagagagagaatgaagacgagatctagtgatgccgaacgagatagtagagggaagatgatagctccggtgggagaaggaaatggtggacggaagagaaaattggtgcagagcacgaacagaagaacgatattcagagagaagaag

SEQ ID NO: 35612 - DNA, 569 bp, Arabidopsis thaliana columbia
aggactaattgaagtactacacatacaggggtgcgcataatctacattttaggtttgagatcggtgcctaacaagtaacatatacgtagacgctcatatagcgtaacaatcttttattcgtgtttgtagatatatttatttttcacttccgtgtttttatttcgaagtcaaatacttaggtaacttttttgacgtaccagaaagagtgatattctccaaggtagtcaaactttttttctcaattgtcaaacttcatactaatattccagaattaattttcctttcgtaaatgattcgttaaaaagtattcttaactttttgagttataaaattcgcaattgaaaatctcttcgtaaataacatcacaagatgacgtcacaattcagctcgtattttctattcttttgttgattttttggctcgcagtttccgttattccgggggatgatccataaattcactgaaaattccaagaaaatagctaaaaatatctgaagaatgacaacaaaatttaatacaacggagaagaaggtgtatcgtttttaagaattttgttttcgcacggaaca

SEQ ID NO: 35613 - DNA, 579 bp, Arabidopsis thaliana columbia
attggattagttatgaagaagatgtaacgtgagtagtctgatacgtatttgaatatttaaaagagaaagaaaaaagcacgtcagggagtggcggtgcgattgggggaaatgcgtctgagagagtgaggctaaaataaagagagaatctttccaagaaaacggttggggatttgggaaacagctgttagtggggacagctgtcaacgaaatatgtaactgtgtgtgatagagagagtacattttgtggtacttgagagcgtttcacaggtggatcgtttttttatttaatttaaatcatttcgtttttaagttatttccttttttaattatcttttctttttgcattttgaaggttacattctttgtttttcctttgcatatcagtgttggtatggtcgaatttttgaagatttctatttaaacgtaattagatgcacattaattatcgttgtcgtatctaaaaacgtatttaagttttttcggtcgttttatttgtcggattataaaatctttagtttaggttgtgaaagattgactcttatcaagaccgtctttaccccatggcaaattaggcaaatg

SEQ ID NO: 35614 - DNA, 573 bp, Arabidopsis thaliana columbia
ctgctcggcggcagtgcacatgtcatgtactcttctggtgtccattttggaggaaccgatacgtttagttttgtcagccttggcctttgcataggaaccatcccaccttccacagccattgcttgaccaccaccgtttatatcggacttggcaattccgttgaagtgatagatatcaaacactttctttcccatcagtcctgttgcatcttttatccctcccaaattttggtctagttccaagataacttgccataactcgctccacacgatgaaacccgtggcgcagatgtcgtcgagcttcttgattgggagtctgatgtttgtttcctgagcaacttggtgaaaggcctccacagttatgaaacctcctcctccgctttggtctcttgcatcgaaagctcttcttatctgagactctctcagctcaagttcgttttcttcttggacggatgggtcaagtgcaaacaagacggtgtaatgagactcactgccaataacccatattggccatttgggacatttgagattctgaccgactttgcagaagttgagagactcgagcaacgtgagg

SEQ ID NO: 35615 - DNA, 571 bp, Arabidopsis thaliana columbia
aaccataaaaattgtaattacatatttatggatctaattttattaacaatacaataataaacaaagaataaacataaattagcaaaaaaaaacaatcaatataaatactattttcaaaacaaacccacgcatagcgtggtattcatctagtaataataataataaaagattacatcataactttactattcaaaatctcaataaattataaaaattacagaaatgattgatggagcagacaatgtttgatggagatgaaagatttatcttgatgttgttctgttccagcgactttggttccggtttcccatgagcttccttccattctttcgctcgcaagaaaactaaaagagtgacgcttttgggtgtagaaagcctaaccaaagtctaaccataggtttgatgcaaatgcaaagatttttttttttgataaaactaccctagaaatataatgtcattcttttataagctttgtgctcaagaacttccatctatctttagctaccaaacaaactggtcaaaaagattcttatttccaataaattttgaatcgaaaaagttggcatttaca

SEQ ID NO: 35616 - DNA, 552 bp, Arabidopsis thaliana columbia
tacttaaaggtttttaactgtaaaagttaattttgacagtaaaaatatttatttctaaaaataaaataaaaaaaaaaagagaaaaagatttaatagcaaaaatggtcgtggtacggagagacggtggcgcgtggaggcgggagaggagcgtggaggaaaagaaaaagagccaaaagagaggaaaaaagcaaacactttcacttggtggacccatttgtccctcccccagactctctcttctcatctctctctctctctctctcttcaaaccctaaaaattcacgcattttggcacagttaagttcgctgaatcccgttcctcttcctctgtctctctccccaagaaaatcactcagatcaaagctcaaatttcggatctcacagctgtcgcttcggtaggtatttcctcttcttttcccccctttctcttctcctgtttcgttttcgatttggatacacgaaattcatgtgatatgttgcttctttgggttttgaaaatgattgctggtgaattgtattgggaattttgtgcagaggaaaggatgaccagag

SEQ ID NO: 35617 - DNA, 807 bp, Arabidopsis thaliana columbia
ctttatcgcatttcttggatatttggacgatgagaattcaaattgctttgtcgatgataaatttgtttaataattgttcagactgccatcacaacatagctgattactgtcatataagtcatacatattatatttccgatgattctctggactctcaagacaataataataaaaattcagatataagtttattaaggttttctttgttaacgtgtttactgtctagggacaaacataaattattagcactaaacttgttaggttttgaaagtaaacactgatttatacctaaacttaggttattcatgtaatcaaatgtgaaaactaacgtaatgaaattcctctagttatttaaatacagaaaacaaaacctaccttgcggggaaaagcatcgtggcgcgaaaggaaacttcctatgatccgtcatccgtgccgtctcaatttgattggaccacgaatctcgcactcgatactgacgccttacgtggattactttttttatagaaagaatttaaaattgtttctgaagaggcaggttttgtgtataaaatagagaatgcaagtaacgtgtaatgacattatttctcaaattgaatggttttcgagcatttttattaaccagtgaagcaaccaaaacaggaatcaccagttcttgaaagagttcatcaaaaaagaaaacatttcttgaaacatctaagaaagagttttgttcttcttgatcagaaatacagagcaaaatccatttgaagacatcaaagtttaaggttttttccccggatatggccgagatatgttacgaagtagtga

SEQ ID NO: 35618 - DNA, 548 bp, Arabidopsis thaliana columbia
tagagatccgtttctggtaaactaatcactaaatccagaatcgtataaaatatgaatctgagaaccagctttatactatatattatttacttaatatttatagtattcaactatacaagtattcctttaatgcttaggtttcacttaatttgtttgagcataaggggtggctataacatgggctaaatgattcgatttattgtatttggacaaaatgtcagtgataaatgagagagaggtgatgtttggcgtttttagtaatattgtctttgtctttgccattttgtaaattgaatttttacacatataaaaaataacactcactatcagtcaattattatgcaagaagaacaaaatataaacttggactatatacgcgtgtttatctacacggtagcttttgagttaaaaaattgacttgtaatttcattatatggaaagataagaataaaacatataatgctactagatacattcgattcaatcagaaaacaaatttgttgatatttttcatgtaaattaggtctaaacttttgcattaatatgag

SEQ ID NO: 35619 - DNA, 1304 bp, Arabidopsis thaliana columbia
gttacgttgaaaatatgggcctaagctttaatgggcctgatcccgcttagtaacagtaacgccgactccatcggaatttgccacgtgtcatggacgtggcgactaattctcggtgtcttttgctcggttgctctcttcggctcttacgtggagaaagagactctcaaaactttcttcgtcttcttcggacggacaatctcgtttacgcattttatcgaacagtttgtgtgcataaaagctaacgagtggtgaatctaacggactatgggattttcgcttgctgttcgactgaatagatcttcgtctcgttcgtgttgttagccgatgaggaatgccgttgttgcgctccgccatcaccgtcgtgtttcgctgctccggagaagtacgtttttcttctctttataggtcttgcattttatggaaatttcgatgttattcggtataaatttcgggtgtggatgattttcgtgttgaaattctggatttctgactcgagaatccacttgatttactagaattgtgattatcacgagaacatacaatttctgcgtttggggaattttggaaacttggatgttagttttgtaatgctgaaaactctttgctttgtaatcccttggttgctcaaactcagtttcagtgaagttttcactgttaactttgctaaatggtgatgaatgttgctgctgagatttcctattttccttttggagattgaactttatgttgatgaggttgttgttgctatagttgtagcgttccgtgatgacaatactatttgtctgtctccaagcttgaagaataatgaactctcaagacagacaaattcatgggtttcaccattttgcttgcaacgcagagcgtgagttcttgatcatgctgaataatttgcagatacacaacctatcgagatttcaggatgttttattgggataaaaaatttttgggattgggtttgcagggcattcgacgggtttcaccagcgtacatggtggaatacctacggcagagtatgcaaagttgcggagagaatcccttgaaactgaatttggacatgctctaggagcatatagctcgaaaagtttttctgcagtgtatcgttttggaccctttttggctttgtatagagctgcaatcatttcgtatcatgtggtgaagcttgccttttggcagctgtttgttcaggatatgaggaaacgggctgtcaaggtcagtaaattcgcaatctatggtgatttgttgtttgccaatacttgtttaataagttaacatgaagagtctttttggatcaaggcctggcaaat

SEQ ID NO: 35620 - DNA, 507 bp, Arabidopsis thaliana columbia
tggcgtactgtttttgggctattgctcttcgtggaatcgagttggcccttgtaaaggcctggccttggggttaaatccattgcgttctgcttccctgaggtgactttccgggtttgtctagagtttccaaccttgacatttggtagggtgacattctgtggcagcggagaggtggaaactggagctgcagatttcataacaacgatcgatgaagatttgaagttcctggctggacttgttgcagctgaaactggcttgtgagttctctgcataagagtggttgtactcagagtaccgtcgtccctgctttcatctatcagctgctgcgttttctccatagcctcaagtatttgcttaagagctctgagatcttttcccgactttttgaactccaactgcgtaacgcgcttctgaatttcaccatataccgtcagtgcagagtctcctgctttcatttgcttccatggagctggttccattggaaacttagaagcagctgaagcaggt

SEQ ID NO: 35621 - DNA, 488 bp, Arabidopsis thaliana columbia
cgccagtgtgctgtactcttcacgaacttgtacaatcgatgtttattttgtaacccatactagaaatttttattcacaacaaaaactaagaaagttttttttttttgttgatactaattctttttattattataataataaaattatttccctttttcatataacacactatcaataaaccaaaattttattttttttgtaatgtattgttgggataaatttcatttgcaatgtaaagaccaattagattacgatacgtgtgtatatttgttttttccttttttacctttaatgagcatagttaaccaaatcttgttattaacaaaccggtttagcatacataaaaaggtgaagtcctccgccgctcaggttcttgtgcgatgaagccgtctccgagaaatttgttacaggtgcgtcaatttcttttcagtttagattgaactacaactattttactacattagatctacggatacgaaatatatgtt

SEQ ID NO: 35622 - DNA, 468 bp, Arabidopsis thaliana columbia
atcacttctgatttgctcaacgttttcacctcagatttcaaaccttgaatgttcgttttcttagcctttaattcttccgcgatcatggcctcggctttatgtaagtctttttcaaatgcttcaccgagatttactactttgcgagcttcataagcgtggagaaaggcgataagggccacaacgaaaagtacgaaggagatctttgccatggtttttctagctcaggtttcccttaacaaatcaatttgaatttagattcaaatagtttgttaaaggaaaagaggtgagaagagatctgtgagttcttgtgttttgttttgatttctagagtatcttatatacattatttatgactaataatagtatgtacaattgatggtcaaattagaattgtactgactcgggttactcaactttctttggttaccatacaactcgcaaactatttgctaaaacttttaaactaat

SEQ ID NO: 35623 - DNA, 534 bp, Arabidopsis thaliana columbia
tgactatacgttatatcatattcataaatgaaatccgtattttagcagcattaaataagagaggtgaagaaataaaggtatggttattatttatttatactaaatagtaataaataaacgaaccttgttgtgaatgtgagcagctgagcaatttctgaatctctctatcttcttctgtttcgttcattttaattccattaaatgcttaaaccccacattccattaatgctctctccttccacttcaatatttctttttatcatcaccaccgtccaaatttcatcttacatctctgccctacacgtgtctcttcttctccatctctccggcgataacagtgcctctggatctccgcatcttaaccggctcgatgagtgcggtgctgttctgaagaacatcggactcgtcatcgatttcgttcgccgcgatgagcttcccgtcgctggaatccgttctgatatcgggtaaaacactcccgccgatgatctccgtcggaagaacggtgatttcgtgcttctgtagtaacggaacgag

SEQ ID NO: 35624 - DNA, 159 bp, Arabidopsis thaliana columbia
ataactactgggtgtaccgcagtcaggacgattctgagcaacttgccgaattgacagtaacgactttgcgtgacattttcggtgttccccatccagtgtttctggcccccgaccagcttgcggagattttgcagcctgagcccccgttgtcgcctacag

SEQ ID NO: 35625 - DNA, 496 bp, Arabidopsis thaliana columbia
gaccaactcttcttctgaaacatctggtatgtcttttgaacttaagtcagaaaaggagctctatttgattaaatattggtacatataacatgataaaaaaaactgcatgtgttagtcgtgtggtaggagaaaccggcggctatgctgtaaattcagatagtccgttgtttttccccacaggtgtaaacaatattcttgaaccatatcatcactgggtctttgagccagtggtttacccgtggtggacttgtaggaaactcctcttggagcctagtcaccaccacgagtatttccctatggccaacacgaaccatatacacggtgccaataaaaaactctgaataaaacgttgaagttactctataatatagtggctagagattcgatctcgtacatttattatgagaagtagaaaaagagaacaagatagttttaattaaaactctttcccaatgcctccagaaacttttataggtagaggagttcttctggtggt

SEQ ID NO: 35626 - DNA, 593 bp, Arabidopsis thaliana columbia
cagcttgtagctgctcatagtattgcttatacctcttgtaaaccttcaaaacgtcacatggaaatgtttttagattcccccacttacataataaaatgggtgattataaatttatacattatttcctcactcaaaaagtatgttatatacctcggaataaactaattaaaatctttaagtccctagctttaagatcatataatgcatatattcctttcataaagaagacgttctctttttatcacttaatgtttatacccctaagatttgaagaatctaattcacaaattcagatcaagagctaaggaagctctatataaagttacttcctcaagataatattatccttactttagtataaccttaaaattctattaaaaatcagcatgaagatggcaagcttgtaatttatataatgtattaaaatggacgctataacatcatctattcatgcaaaacgtagggaacattaatttaattaacatatggtattataatgaattaaataaaatatcatataattttacaatggctttgaaggagtttcatttccaaggaagatctttttaagagacatatcatttacacatttt

SEQ ID NO: 35627 - DNA, 728 bp, Arabidopsis thaliana columbia
tttcaaataacaaaccttaatatgtaaccggtagccaatttcaacatatatccattataaataatgttacaaatttgaattatgtaatcgttaaccaatttaataaaaatgaatgattcagatacaaataactgataatattgactcaagaattccaatcgacattaaaaatataaaaggtatatgctgaaattggctaacggtcatatgttttaggtttgttatttggaaatcgcagtgttcaagaaaacgttaggcgctaatcggacggtgacccaatgcctaacacttagaacgcctaatcgggctctagacgaatttaggcggtttaggcgtttatagcataaaatattataaatatattattataaataaaaatcattcaaaacatacattaaaaaataaaaatattaaatttattaacaagaattagataaaatgtacatttaattcatatcaaacaatatttttgaactcaataataatttacaaagattacaaacaatatttttgaactcaatatttaattcatataaaatatagattacaaagatttttgaactgaataataatttactttaaaataatttcaaatatcattaacttaattatattagcatgattattaaacatctgaagaaaaattccaaatattgattacacgatacaaaagacataataattatcaataaatgttttcgaattttagagtacaaaaaattcaaaat

SEQ ID NO: 35628 - DNA, 739 bp, Arabidopsis thaliana columbia
gtcccaaaattagaattcgccccacgcttacctaaccagcgtcaactccagccaattccgtagaaggcagatcaattctgcttgactatgtcaaacttttccatgaaactacatcgaatatgcacacaagtgagaaagaagtcatgtaaacccaacacaaaaacgtcaatgtgttttctaaccgattttactaatgagatctctttgtgttttttgcaggtccactttgagctgcagcatcatgctcctaacctgaagagaataatcgatgaccaacaccagcggcttgctgaggcaaatgagaaaatatcaaaagttgagaaaaaccaatcttttctggagaaaaggattgacaaagcaattgaaagacatgattctcttgaacaatgcttgcaacgtctccgtagcttgcctggtacacacaagaaacctctgacgagagcagaactggattttaaatcggagctcggtaaatcaaatatcccccataaattttgtccgcaaaaggatataccggaacccatttcatcatcttttcttttcgcttataaatgaaaaattgcagatcaatatgcgggagttgaggtggatgcgcttcaatcatccatcgaaacactgagagcaagagtgaagaagtcaactcaaaaatctcacaagggcacagtagtcgcagctagtcagaaaaagcagtattcaacgaaaaacttaattcaagatacacaaatgtcacagcttcagt

SEQ ID NO: 35629 - DNA, 529 bp, Arabidopsis thaliana columbia
tttcatcagtcatgaatttatcatataacaaatatacaaattaaaaaaaaaaaattagatataattttttagtgttaatattttgtgcaccctcacaaagtaatatatgttattaaacatagatttatatatctcttagaaactacttgatcaactcaaattaaataaagagaaaaataaataagagtacttgatcaattcaaaatacattagtaatttagcagttttgtatcatttgtcaatcgtatgagagaccccttctactactagctagcgaagacctacagggcaaaatgcttccactagccgtacataaggttgaatatgtactagtgggttcaaggtcaaaccatgcttgactcagtatttttgctggctggaattttattctgaatgcgtcaaaatgaatggtgaggtaatggacacagaccattcacttgtgacaaaaattatttgctttttttttttattaatagtatcaataatgtacgtccaagtacttcaatatatatgataatgtacttttgat

SEQ ID NO: 35630 - DNA, 932 bp, Arabidopsis thaliana columbia
aaaactccaattgagctacaaaaactaaagattgaatttttaacagaaaaagagagaaattcaaacctcagctttctcacaggcataatcgaaagcgttctgattcatcggcctaacagcaataatatcataactctttagaatcggattcccagaattcaaactctgacactgagcattactctccacatgaactgtgagacgcgtgtactgccgaaacggagtagttcgcggaacaccgagtaaatcgcgatggaatccgacagaagaagctaaccgcggagcgactttgattagagacccaagagtgagaagagggatcgtacaagagtctttgtcagacattacgcctttgatcgaacggttatgtgcgatcccaacatagcctagctccatggctttcgtggcgagctttaatcgtaaggttttcccgccggcgatttccttaccacctgatcgtggcggctcattgtacggaatgctaagatcgaagaatcccattagtgagtcggagagaacagtggcggagagattttccgattagggtttaagcattaaataacgggtttttagatacttcaccgattttaggagaagaaatataaatacgaccaaaaaaaaaaaaagagaagaaaaagaaataaatttattttactatgcaaccgacgacgtatgaggcagttaccgaaacgcctgcgtattcgaaaataagagaagtttggtttcgatccataaccggcccattaaaaagtaagccagcccatgcaaactagtaactacaaagcgaacgtctgaagaacacttatgtagttatcatgcggatcacaattaataacggttgattaaaatcaatcgacggctatcatgtcatatcagtattgacaaggatttgagcttacagccgttagatgggttattaatcggatggttga

SEQ ID NO: 35631 - DNA, 663 bp, Arabidopsis thaliana columbia
ttgtacactgacctgttacaaaatacaaggagaaatatcgattacgctatttttttttttcgcgtgcggctctacgtgtaaatatgctttggtgtggaaccagtaggctttggtggtggctggttaatgtaatggcttgaggtggaagacttggcaggctggtttgtataatcctttggaaacagcctgttcgaacttcttgcttggtgcatcgttttcttctaagtttgtctggacgaaaaagcggttccaccacgatgcgctacgcattttagcctgccaacaaaaataagagtgcaagtattaagtcttgtacttgtagtctctatcttgaaaaactttgtgaaagattggtaactgtcatttaagcatgtgtttaactctacagtctacacagtgttttaatcataaagagatgctaatgactaactacataaactaagctaatgccattaaacactaacgatgaaaggtggattcatatttaatcatcaggattcaggagaacagggtatatagtaaacttacgggtcggccgaatttagagagttcagcaactttagctctctgctgaccagggagacctagagcagttgaagttcaagaattagaaaccaaaacttgaaagacatttattagcaaccctttttctcaagttttatg

SEQ ID NO: 35632 - DNA, 508 bp, Arabidopsis thaliana columbia
cttattctcttccacttcttcgctctgctcccctttcttatctgttccctctgatgcctcatcttcatcttcttctttcacatcgttagcacaccctggaaaaaataaatcatttcattgtacttgggtaacacaaactcaggaactgctgtctccaacccgaaatctataatactgttttactaaacaaaattgatgttcattagagaggtctcttgaacaaatatataagcatcctaacaactcaaacgctgagggaaaatatcaatattcaacactattaacagttgatgaacactatttccacacaattacacatgatcactctctacagtggggtacttgatttcagacacatgatacaatgactgactgaacaggaagactagggatatttagctgatctagctatttaggatcaatgactgactgaacaggaagactagggatatatatacagatatcatgcagtctcatgtgaaagttttctgaattgtataatgacaag

SEQ ID NO: 35633 - DNA, 559 bp, Arabidopsis thaliana
actggtggtactcttttgcaactatagaaaatagcagagattcctgcttcttctattccaaccgacactgcaaaggaagctgagaaggacgcaattgaggatgatacctttggtgaggtaataattcaacaaaggcacatgcagcattcccataccaataaaatatgtttcattattgaagctcttccaacatggttggattatacaggaaaaccaaacacaaaaccctgcctctccaattccaaaccttcccaaaaccaaggaaggagaggccgaggaagaaatggttgaggaaacaataattgagggttcccctaagcaaaggcctgattcaccggtaacacctatagctcaggttaatattctgaattgcactgagccaatagccatgttctacaaaagtgtaactctttttttccgtagatcatacccgacaggcatggagattctcctcttaatggcgtgaaataccggaatatgtcttcgattgttgcagcatcacctgcttactttgttcaagagcggaccaatgtgcgtcacgcacttctgggtaagcgtg

SEQ ID NO: 35634 - DNA, 583 bp, Arabidopsis thaliana columbia
taatattgtttttggtcaatagtccaaaaatgatttcctttttggatcgatgatcaaacttataccgattaatgtttttgggctgtaggaggccccctgtaatttagcttttccactaggatttcccatactttcagcctatgccctattccatttttctcccaatgtatataattccacctaaatcactaaaatcaattaagcttctcaacttccgtttgaaattgataatcgcattttacaatcgttaaccgcaatcaaacggttgatccaaacacgatctattaacactttctcaaagagaaaatccaattcgggttataacattttttttctccaaaatagataagtctaatcagcacaaaactagataagaaacgatatttgaatctctaggttttggatgtgtcccaccgtctccatggctcttctccggagttttacaatgaaggtcgcacgtgactactttcattcagttctaacttatggtaaaagagattttttgtattgtaatttgtttgtgtgttttgtatgtccagatttgttttaaattttagttttagttttgtaaatattttttgag

SEQ ID NO: 35635 - DNA, 507 bp, Arabidopsis thaliana columbia
attgactttttatcataagatggaacattacaaaatgggtcaagcccaaatatttttaaaaactgaaacttaaaagacccaaccccgataaagggatacctaacccaacttaaagagaggtataaaagctataaggattggaccaaaagcacaaacgactacagttgttttttaaactattttaggcacgtacattaacttttgatcaaaatatagttgtatttttaaccttttaaagcacatgaatataagttaacgggcatatggaaaaattaattggttgtataggcgccgattaaataaactttaattggttgtctaagcgtcgattaaataagaaaacttgtttgttaggtttaattttgaaccaattaatttggtcaaatgctaattggaatctccggagacaagattacgcaaaaaccggttaccatctcatgagttgcttggtttgcaagataacacctctcaactttaaaaggttacatttttaacccgatcatgcga

SEQ ID NO: 35636 - DNA, 499 bp, Arabidopsis thaliana columbia
gtaacgtagaggatgcctatttttgtttttaatacgagcaaatatatagttgtatttttattttcgtgttaaattcataggaattaatttattcagacaaccttagccatgaaaatccgaattggagtccgaaatataggaaatccgaagtgtttattcaaaaagaaacatagaacgattatggttgtgattggtgaagtttattcaaatagaactacacgcgtgtaggaattaaaaatacaaaaccactcgcatcacatgcgcgttgcagcgcgtgagactataatccgtggactataaccctcctttttggggattttttcataaatttaaaattgagaggacctgcagcgcgtgggtcgagatttcatttgttgtgtaacttattgttcactactgtacagtttttttttctttttttttgcctaaagatctgtttattgactttttatcataagatggaacattacaaaatggggtaagcccaatatttttaaaa

SEQ ID NO: 35637 - DNA, 555 bp, Arabidopsis thaliana columbia
taaaaaaagtttataatattatgaacatttacttcctttatatttctgaattcgtcaagcgtcattgtccataacaaagcacgaatgcattttaatgactttaataaaaaaaaaagtattctaataccttgctcaaaactttaaatattataatattccaatcgtctttactagcatatatccatcattttcatatatttcctttactcacctcattttctacttattaacacaacaataagagacaaagcggcattcctggtgaatatccacgatactacattcatttaaaacaatttcgtcaaagtttacatcaacttcacattaatcccaaaatagtccaaagacccaacaaaaaataaaaactgagttctaagaagacatgggcttgttaatatcattttcatgggaatagatagcgccagtttagtttttttagaagctgttttcatataaaattcagagaagaattgttgaacatagtcaatcttaatgctgaatgcaaatccttgatgcacaacatttctcttaagataggttctttaaggaatgaca

SEQ ID NO: 35638 - DNA, 613 bp, Arabidopsis thaliana columbia
cctttcttttttgtcaaagatactttttcatttatctttcaagatcattggtttctagaagaagttttgaagaatctataatatatggactctgccacttcacctgcccaaaatctttgtgatactcttttttcatatacttttatttatccaaattaccatttttataaaaatatttttcaaaagaaccaactctctttacagcatttctcatgaaaatatttcactaatgaaataataatattttatatttatttattaattaataaaattctgatttgttaaaagttttgaacaaatcaacaagagacaaataactagaacaaatcatgcgcggattcttgcatgaaatgaaacttgtgacatggacacgaatattctaggcactaaactaacgatttgttatttttctagtaaattttttagtgatatgttatttaatatgtaattaataatacattgtatgcccttaacaatgtcataattcataaatatgaaaaccttttgagaaaaataaatgtatattacatctatatatagaagcttgtgagcacgacacagcttagataacaagaaacaacctttcatctcagacttcctcctcttgtacacg

SEQ ID NO: 35639 - DNA, 758 bp, Arabidopsis thaliana columbia
caattaaaccttacataccctattataatataattaaacaaagtctacgatttctctttaaaaaatgtctgcgacactaaaaaagcaattctccacaaaatctatcttcttttcttctcccttttaaagccgcgtgccgaattttatctgttaggtattctatcatcctccttaatgtcttaactccagttaagtcgaatagaaactattaaaggaaaaaaaaaaaagaagattgttttgtttatctctaaccttaatatatatccaatgaattcgactacccgatagttcgtgatataatcagctttcttaaacaaaataactctctccatctcgaagatctttttggcgatgaagacctatataatcaaaattttcttctatcattgtacttacgtgtttaacctttaaacatttttttttacacgttgttagtaatgttttcgcaaaagatttagaaagttagcaagacatagtactatcgcctggatacgagtcgacttctcaatatgtatgttgtggagccagcaatttggatgaaaccgccgacgtggaaaagggtcacacacagaagtgtgagaatcttgcagcatcattggaagtgcgccctgaatcgagggcaaaagaggaaagttaggtcccacaaactaacaagtctgatttcttaagacagtgacatgtgaacaaggtggccctacataagtcactcctcgtgggtgacaactacgcttatgtttggtacggttgtttttttcagt

SEQ ID NO: 35640 - DNA, 590 bp, Arabidopsis thaliana columbia
taaaatgttaataacaattttcttctaagcattactaaataattactaattataattcatataagaaaagtatgtatgtatgtaaatactcacatcggctgcaagatttaggtcggtgtctctacaaccaatctctttaagaatctccctgaggtgaagaaacggacttgagatctctgttatccatattgctgccaccatctcggatccacactttaaatccaccatatattcacaacaaaaaataagtttatttagttacttaagatccaacttttcatagtacataatctacaagactacaagttaccattaaaaacgaaataaaagagggggaaaatatgtaccttttggtagaaaagtccagctacaaaaccaagaatgcaaacagaatgatgaaccgcattatcaatgctaaggacttgatcaaagtggctacaaatgagatcgtagatcatgtacgacaatgaaaacgccaacgtttccatctgccggagagacgatgtagaagcaatgggacaaacaggacaagaccaatcttgaattgagagagttgctaaagtgacagcgattgttgcgtgaagcgttga

SEQ ID NO: 35641 - DNA, 738 bp, Arabidopsis thaliana columbia
gttctggagatattctcgctgttcctttgtcaggtcaggtctacacaatctttaaaagttgtatcttcagatgtttgtataatgggaagtagtttctattgttagttgttggttgccaaattgggatttttggtgtagctttgtggacttttgattgtttctttcattgctggttgattgtgttctgggttttgaatctcattaaggtattgtttttggcattgaatgagtttgagctaccaaaagtttccctctttgtggtatttttttggctgagtttacttttggtaagggagcaattacagattattaatgtttggttctgtatctttaccttctctcagcttgtgcttcaaagttccccagatacgcttcggatttcggattgattgttccaaatggtagctatgctctagctgcaggtcactgtgtgcaatgcagctgtgcgcttgggagccgcaagtaattatatctaagctttattatttgatatgactaatcaaattcatctctgattgcattttgactcacttgtgttgtgtgtgggtgatgtgatgcagtttgtattgtgagcctgcttccctagccgtctcttgctcaagtatgcagtgtagaaacagcaacctcatgctcggtaacatcacggtgcagcagactagcgctggctgtaatgttcaacttgtgattcaacggtatagccacggactatcttaccatgtaagtagaaatcatcacttt

SEQ ID NO: 35642 - DNA, 511 bp, Arabidopsis thaliana columbia
gtaggcccattctaagcccatatatttagccacccagaaaataaaagagatggattacactttttttcctataggcccaatttaattagacctagaaggacccaacgcattgaatgaagccgatggccacgtcatcatcattttccccaaaccaagtttcccggttttcctcgcaattatcgaagcaagaaaacgatgatgatccaaaacaggatctcgcttcacacgactaaacaagactgaattacaacacacggatatgttctgattgaactacagtatataagtaatcgatgaggtaagccaaccaaaacacaagcttttttaatggataaaccattttgatctatgagacgacgacaccataagatggatataaaattagtatagaaaatctttggtgacagagtctcgggctgacatgaattggagaatgaacacttcatcagttctggattctattttcttcatactgagacaaagcttctgacgttgtcacaaaatggggtag

SEQ ID NO: 35643 - DNA, 596 bp, Arabidopsis thaliana columbia
cagggtgctgggtcaagggtacaacagatcaggcaaggtgtacttcaatcccttgaaattggcactccagggatctctgcctctcctctccttccggagcttaccagtcctgatggaaatattataaatcctttgacaagtacttgtggaaaatcgagtgctactgagctgcctattgaacgccttattagagccgtaagtaacgttactaattttgaagggtatattgcaacagggcagtgtcattgctgccatccctcatttgccgtggaaacattgttctgatcttgatgtttgctttctgttgttttcagatgaaatccatctcaccacaagcgctttcgtctgcagtatgtgatattagatctgttgtaagcatggttgataggattgctggttcagtaccaggcaaaggttcaagagcttcatttggtgtggacttggttgcaatgactaagtgccatctccaagaaagaaacttcatgacgcaagatggcgaccatgaaaaggaagcgtcagacaaccccaatgccatcaagtgttgcttcattgggaggaaagcgttggtaatagctacaagcattttgctggtttgg

SEQ ID NO: 35644 - DNA, 993 bp, Arabidopsis thaliana columbia
aaaccataatattttaatatatatctaagtgcatgcttcagagtagaaacaccaccacaagtgcttaataatatacggggccaaatgacacccttaagctctttctttgcccatggtccccctagctaacactacattatacagtacatgcattgagatcttaagtcaacttattattatagtgtcaaccctgacatattatatactttatttggaacatctagatgtaagtaggttgttcagagatgttattgaaaggatacatgaatgaaatggttggatttacatatgacttatgtatgtgctttaatagattccaaagtctacgtacataaaaccaaaaaagagagagaaggtctacgtacaacgtacgtgttgactagaaaggaaaggtttaaaaccgtgtctaaagtatgagtatatttactttgtgaaagtatttgagtatatactttgagataaaataaaacatttgttaaaaataacttatattcttcaatgttaatttcaatcgatttttgatgtttgcatttttactatttcggaactttgttataagtcaacttttgttggagtagctaaactttacttctggatatcaaaagctaatctcaataaatcatcacagctcgtcatggaaatatataatgcataatttttcttttgtaccaataaattttaactaccgtcatatataatacgaaaaatgttacgtattggtaatgtgtattactccattatataaaataaattgttacgtattgggccgtgtaagtcgtgtttgtattcaaagagaatgtgtggaggagagatggagatatgtagtttcatgcatgtacgccatgtatagtgatatgacgtccaaatcgaatcgtgaaaacgaagaaaatcttagactggctggtgtagtcgttaattaatagagtaagatagagaatagtacgagttatttttctcaaattttaaacaaaattcagtgtggacaatgaaatg

SEQ ID NO: 35645 - DNA, 885 bp, Arabidopsis thaliana columbia
ccctgtccctctcattgtcattgagtctcagccatttggttctatataacttttccaaaacaaatacactaaacctttataaattagtactcgataaattaataatttctataaattaataaattcttagtttaattttcattgatgttcaaagatttttttttttttcactttttcatgtttataatttccaatgcaaaattaaatatttttttttaatttgttttgaccatttgtattttgctgtttgttttctgattggtggaatagtttttaattagataaaaaaaatgtttaatttaaattagataaaacaaaaattttaatgatttcttaatgtatgtgccaaaatttaaaacatcaagggaatatgtttttaagtgctcttgttggctggacatgtagggattgcttaccagatggcgttggcccccggagatatacaagtcccgaacttcgtaatcaataaataaatatttaaaagttgtgcaaaatagatattttctaatcagcatgattaagtgtcaaagtgctcgtgttaaacgatacaaatacaaagtaaattgccttgccccacccttattcattagatagttcaggaaacgatcattgagtgatgactcattgatccataccagccttttgattctatataacttttctaaaacaaaatattttgaaaatcatgataaaatgaaaaataaaaagagagaaattttaggacttgtcgcatggcgtctctagattcttatgtaaactatttttcagttttcttgtttttccgcaacgttttcgatttaatttgtataaatatatgaaaacatctgaattcttagggtttcatttttttttcctgacacggtttctttctctgtttttctattt

SEQ ID NO: 35646 - DNA, 831 bp, Arabidopsis thaliana columbia
ctacttactactgtcctgcgtcgctgagatgcgttgctactactagttctgatctcgtggttagtgttgttgggtttgcgtttatgtaaataaatgatttcgtatatttttaggtattcttgatgtttacgtgaagcaaatatgtgtgacgtgaagcaccgatttaggtggatttgacgaacgtgattggttacaatattcaattttaaccttaaccttgatttattatatttgtatgatcgattatgctctatcttcaatcatacggcaaaactctcctgtgttccaaaaagttaaatttccattttactatacaaaataatggaatctaaaataatgaatatcaaaatctacggaaccgaatagtaaatgtttattgcgatattttataattatgtaattaggaaaggaaagaagctgtgaattaacagagtaaattatgtcaatttgagattaggcagattagagttaaggtgcttagggtaaaaggtcaaatccttttacgtcatcgttgaattttatggaagatgtggttaatgataacagttgaagcaaaggaaaataaggaaatttgataatgacgctccacctacaatcgtctaggtgtagcccattggccattacgaaagagagaagcaactaataatatttaattagaaatgaccaattctctgtatccacgttagctttattatctgtatatacactcatcttttacatttcaaatttccaaaaacataactctgaaggaaaatgaaattatgtaactatttggaatttggatattttatggatgaactggatcaagtaaaagaataaacacgaaatagt

SEQ ID NO: 35647 - DNA, 589 bp, Arabidopsis thaliana
tgggatttttgtctttttcattatgttcgataagtaagtacataaaataatattccaaaatttcgctattattttttaaaaatgttatgtattttatcatgcgtatacgttcctctacaaatccaccattcggagtattttatatttagtccttgttgatacatcaattgggcctcagtaatcaaccggcccatttcaaggaataacggcccagcaggccgaagcccggcctagtcgggatgtgagttcggctgcgtagaaaaggggcattctcgggaattcgccttgcgtaccctactatacggacgggtataaataaggaatagaaagtctcgggaaaaaggggacgtttttcgggacctggagagaggatagcacaagtcagctcgcccagatcatccagttcgcccagaagagccagctcatcgatagaagacagctcgtcgagagaagtcgcctcgtcaagatcatccagctcgcccagaagagtcagctcatcgatacaagtcggctcgtcgagagaagtccgctcatcgaagatcatccagctcgcccagaagagccagctcaccagaaccaccagctcgaa

SEQ ID NO: 35648 - DNA, 609 bp, Arabidopsis thaliana
agacccgattaaaaaaaatgaaaaagatattcaaaagctaaataaagaaaatcgaatccgaactctctccttcgtcgacgtcttcttcttctttcatcgacgttcttcttcttcgtccgccaccatcgattccggccgccgccgacttgaaaatccatcgtaaaaggcaacgaattatgtcagtttcttctcatatttcctctgacattggtgcattatgattttagattgggattttgaattatatataattcccagattcaatatgatagtttgatgattggtttgcaaagtaaagagtaatcgattagaggttgccgaaacgttatttgaggtgatgagcaaaggaatgtaggttgaatgtgagttgaatttgaattccgagatttcatattaaagatttggggtttgtgtttgcaaagtttagattaaccaattagtttaacgaataggtatgtattaacattggaaatcaattgaaaggtaacgaattaggttcagtagaatcgagtgcgacgagagattgatttcacgtatgactagagtacatgtggtatactattaaaatgtttgattggagttgacctggttgtatttctagagtgatga

SEQ ID NO: 35649 - DNA, 538 bp, Arabidopsis thaliana columbia
tgttttatcattatcgcttaatcgttctcattgcatgtttcttagtttttgcaattactcgaccaacttactcgaccacacccagtgtctggcaacagactgtgcaatcgagtatagttgtcttgtttcctgtctattactcgaccagtacactcgaccacacccagtgtctggcaacagactatgcagttgagtatagctggttcatatcctgtctgttactcgacctgttactcgaccacatcctacttctgccatcagcctgttgtggtcgagtgattttagtaattcatttattgtttctgttttctgcatgttcgcttaggactgttaggaacccaacactgataacgacggcttgacttagtgacttctgatcacatctcatctatttgcatcacacccgatttggattgacaccctaagtactacaacgacatgatagtgctataggattaattgattaaaaactattatcaatttggcacagttgccaattggatgtttgttgctatatttgagattgtagaatcttaag

SEQ ID NO: 35650 - DNA, 525 bp, Arabidopsis thaliana columbia
taatttattgagcatgtcaatcacttgtaaactgaggaaacgaaactagtcaattaccccatcctcgggaattctttatctgattgattttattgtttactctactatcgtttactgtattttgttacctcttgcttagtttttgcatttctctcctgttactcgacctgatactcaaccacccagttgtctggcaacagagtgtgcagtcgagtatccctgttatattttctgtttgttactcgacctgtcactcgaccacacccagtgctctacaacgagctgtgttggtcgagtgttttacagcttctgcttgattttctgtttcctgcatgttcacttaggactgctagaacaccccaaaacctgttattgtttggcttgacttagtgagttctgatcaaatcttgattgttagcatcacactcatttggattggcaacctaaaatactacaacgacatgattggtattttaggataattgactgaaaaacctattatcactttttaaatgaagatgaaaa

SEQ ID NO: 35651 - DNA, 491 bp, Arabidopsis thaliana columbia
ctttaaaaaagaatagatacgattacattgcatgtagtaacagatgcgatcataccagcactaatgcaccggatcccatcagaactccgcagttaagggtccttgtgcgagagtagtactaggatgggtgacctcccggaaagtccacgtgttgcatctctctttttccgtttttctctattttgttttgttaaaaatgtatgactctatacttttagaccgtgagccaaacttggcatgtgataccttttcggaaagcccaaagagagctctcgaatgaatgaggaaggaaatttgaaattttctattgtttttttttctactccaaattttgaactaaatgtacttttttgagccttttcgtgatttttgctaaattacggggggaaaattatattttcggacattgttttctaatattttgcatgtatcaaagctcttataaacaagatagggtatcctacatagttggtgggaccacggcaaatgga

SEQ ID NO: 35652 - DNA, 541 bp, Arabidopsis thaliana columbia
ttgttgtagatcgattagttttgaacacatttctcgtaggatgattcacagaattggaagatcctaggttgttgatgcttgcttgtgttctctatgtgaattgaatgttgatatctagtgtttttggttgttttaaaacctcttttctcttaattttttgttgctttgcattcatattttgggatatagtattgcatttgcatttgcatttggttttcttaggtacatgagtggagtttagaattttgaaagtaaaatgcagcaaatggagcaaacaaatgagctaagacaatgtaaagtgaccaaggaggagaagctaggaggacaatagaccaagtggtcgattgcgtggtcgattgcgtggtcgattggtcaggaccagagctacgaagaaaatttaaatctaccaaagtggtcgattgcgtggtcgattggtcaggaccagagctatggaggaaatttgaatctaccaaagtggtcgattgcgtggtcgattggtcaaggattaatgatgcggacgatatgtgaatctaccaagtga

SEQ ID NO: 35653 - DNA, 571 bp, Arabidopsis thaliana columbia
aaccatgttagtataagaaacctcaagaatacaaacatccgttaagtatcagatataagtataatcaaatacttattgtctttgagaagcaataagaagcttggttagtgttttggagtcaaatatgactagatgtcatgtatatgattaagtataagaactagaaccgcacactacaaaaaagtctccattgatagcattacggcataacacggtttactgaactgctattaaggtttacctgtaatttttgtattcatatgatagcattttagtgacgctaagaaatagtaattaatactatatcaatttgcttatactatgaaaatgttttcattaagcgggaaataaaatcatttagtccgcctaatatctgtctgaatacttagtcaatttcacacaatatcacttattttgccccaatttctcgaaaaccctagtaccaactatctctcgtcaatctctctcaatccgacaattcgccgtgattactctcttctccgccgtccttgaaggtaccgcaagaccaaacctaccgtcgaccctatttatgtcgtctcttcccgtgttg

SEQ ID NO: 35654 - DNA, 721 bp, Arabidopsis thaliana columbia
attttatggaaaaagagaaacgacatcgatttttggagtcttatgggaaggtggaaagaagctactaaaacaagcatttctattattattttttttaataaaaactgctataggaaaataaaatagtttaaaagatttgggtgtctcctttttgtaagcaaacgtacagatataacagctaagcatttttctttcatattgtagtttaattatgttaaataaccaaatccaaagtacttcaaataaacaaatcccaaactaagaatcgccgccgacagtttggtgaaggtgaagagaagtcagcgtagtgcaaagtctctttgacaaccagaagctttagcttcaggaaccacctgatgacacgtatactgtcattcacacgtgtgactctcgtcaactcatagtcgaaaagtttgaaataccagaaggagacccacacgtgcggttacttcatcatgtgaaaacttgtttttcatggttataatctaaaattttatggtttttctcttgttatgtgaataacagattttggtaatgcaacaaaggtacaagtcaacatcggtcgcagaagagagagtggtctgaaatcccccgtctaaataggtataatatactggttacgacaagaatacattgcatgtgcacgcatatattgccttgagacatacaacttatcaagtactgtcgtctttattgaatacgtagtttatgtagtgatgta

SEQ ID NO: 35655 - DNA, 850 bp, Arabidopsis thaliana columbia
actattttaaatttttaagaaaaaggcaaaataaatgacgagtttaagactttggtagttagctccggtttcaatgaatggtccaagttggagagattaggttctttttcttccctatgtgggtcccattcttccttgtgtgggtcccactctctttaacgtttcttcaccgtcctttagtgccaccgttatgccgtgccgtcaactccgttgacttcaggacaacgctgctcgtcttttactgagtctcactcacgtcgtctttctccgtcaactttcttactaacggccacttaacggaaatccgtcactgttaacaattaaattaattccgctcgacatttatcgccgatttacacgtcacttttttctatcttaccctggttatttaacacgtgtacatttatgacgctatatatcgaggaatttatccatctcaaggcattttctcaattatattctggctgcaagtatccaaattttataccagttctaaacaaaattagaaagaaaacaatataacaataaagacatacttataatattgagatcaaatctgacatttaagaaccactcaagatcttcctattttaaaaggcaaaagaaagagtcagactgatacttatcataaataattttcaacatatatatcaaatgtttgagcacataaaatataaatatcaaatataaattttaaatgcaacgctgtaaattttcgttttatgtatgtcataagaattgattagataaaattggcattttcgcataatttacgtaattagtataaactaaatcattatgcaatttcaggaaattaccaaccttcgaatataatattccaacaggtgct

SEQ ID NO: 35656 - DNA, 526 bp, Arabidopsis thaliana columbia
cataattaacctcctaagctatattaaggaaattaatgaagaaactatcctattcacgtgctacttcacgtaactcaagactcacttggatttctgagcggtttggcttccgaatgttttctcccgtgaacttagctcttctaggcgatttttaggtctaaggaatcaaatgggcggagggggtatttatatggtccaaggtcggtgattaggtcggccaaggcaagcaggaggtgtcctggattaatcaaaacgtgaaaaatgtcgaccaacggccgctccaagacactaatcggcctccgattggttccttccatttttcggataaacatcatccaaaaatggataagcacgaccctaaaaagataaggatgaccaaaatatggataagcttgagcctttacggataaacatgaggcacggttcaatcctggccgtccatttcttcgttccggggaaacctacgatctgtcaccagaccgcaagaacattaatacggcacattccgttccaatgtctcttgagg

SEQ ID NO: 35657 - DNA, 556 bp, Arabidopsis thaliana columbia
gtagtcgtcgtttttggcgactacgtcacgtccgttttacgacgcatatacgacaacatgaacattagtagtcaattagtcgttattttacgactaaatatgttagtcggcatatactcgtatagtaacgactatttaacgattatattatagaagaaaaacgtttgtcgttacatagtcgcaaatggacgacaacattttccgactgcggttgttagtcgcccaatcggcgactaacatacgacacatatctgtaatcgtaaaatagtcgcaactgagtcgcagaatagtcgcattaagttgttggaaaacgttttccgcattgccaagttggtacacctaatttgtttgttgtagtcgtaaattagttataaaaattcgtctatataatcaaaattcacgacactcttctttcgcaaacaaatcataacaacaatcactagaccgccaaccgaaaaggatagaaatttagtttattctataatggcgggaaactacaattatggcggtagtggcggtttctatcgagattggatgtcaagagattcgatgaagt

SEQ ID NO: 35658 - DNA, 521 bp, Arabidopsis thaliana columbia
caaacggacctcttattatatttattataatatagttataaaaatatatttcaaaaaatatatatactgaaaatgatataaagaaaaaagaatgaggttgccaaccataataatacaaaaaacagaaaacgaagtttaattttggggaaaattcccaaaaaataactttatttatgtaaaatttactagattttaacacacggtacaccgagaagacaatttttttttatttaaaattagtatatataaaagtttgtaaataatatctatctataaaatatttttattttatagtttacaattgttattaagtaacgtcctgccaaacccgtcccgccaaaactgtcccgtaaaaaaaacctgcggcacatcgctaatttaaatatataattaaaataaatattttaccagattgcaattttattttgatttgtcaaacaaatttttgttttaaatagttgccaaaatctaggctcattttaagggattttacgataccactgatttttttttgcatattt

SEQ ID NO: 35659 - DNA, 341 bp, Arabidopsis thaliana columbia
gcaataactcggtgtcttgttagttgcagattccatataaaacaactcgagaaacgagaaggcaagcaaaaggcacatacttttactctcaactttaatgtgttcatatgtatgccaaaactccaactaaagaaagaatgcacatactttaactctcaagttagcaataagtacttaagccattctacagtgggacttaagattactgaaattttcaacacttagaaatcttgagtttttagtatactaccaattacagcaaaaaataactaaatttgttccatagctgacagaagtatactagtgatcataatcacaatcattatcaacattcagcacaa

SEQ ID NO: 35660 - DNA, 554 bp, Arabidopsis thaliana columbia
tggtgagctaattcttgacagagcatttcgattactgactttctcgtagctgtaacatgacactttataagccctttctggttagtagctgaagctacaaaactatgactagagatcaaattgaccaaacaagatgaagttaggttaaaagcagagagagaggtaaggaggcaagtcaagagttattgaatctctcttacaggaaaagaatattgttaagggaaagagagaagaagaatggacaaaaatacaagaaatgggcaaaacaagagacaaccaaagcaaacttgattacagtattttcaaacagtgatcttgaaggaatctaccacagtgtgaagcctatctttcatcttctcccacctcctttcattcgctcccgtcgtcagtgtgtagaagtttcctgcacagcaaaacgccatttctcgatgagcattggatactgcagtcagtgtgtattagatatgaatgtgagaattcatggggatgtatatactcgttgaggaccgtgatggtcccagagcatggcgagtgtagtttctagcttgaacagt

SEQ ID NO: 35661 - DNA, 570 bp, Arabidopsis thaliana columbia
ctcaccgcagatctaagggcattcacaaccttaactttgaacattttttcttgtccagactcaaccagaagaagaacaactccaagagtcaaccccttcttctcaaagatttgtactttcttacaacaaatcaaagcaccatcaagagaccctgaaatggttgaccatggaagggaacaagtacaagcaaatgtgagcttaaacacagaaccctgatcatcagcttcctcatcacacacctcttgaatcacaaacacaggattatcatctccaaaagcttgctctatcaactttatgtgtacaaatacatctttcatatcgaaaccagtctgactataactgttacaaaacaaaaccatatttaatccacattactccatgatctattcccaatacaacaacatatctagatctaagctttgtatcttccacataacactaaattaataatttaagaagacgagaagaataaacattaggtgaagagtaaaaatgacgcaacatcttaagcgtctgtgagaatctggtgttactgagaggcaaagaatcgtaatgctttcggagattgga

SEQ ID NO: 35662 - DNA, 372 bp, Arabidopsis thaliana
  unsure (1)..(372): unsure at all n locations
cccgccccccccccccccccccccccccccccccccccccccccccgcccccccccccccccccattccctcccacgcctccccctcactcctgaccccccgccctccatttccccgcggatcttcagataaggagcagagtcagcttcgtcattgtgggggagatccatactcatctcntctggctcgtcttccggaaactggttctgcgtgtagaaattgtgttccattttctgatcaaatttaagagagtgaaatcgataatcacgagagaattctagagagtgtgttggcagagatgagatggtttgagaaattgcgatgagaatttatagggggagtgaagaaagagtgttttggggtttttctaga

SEQ ID NO: 35663 - DNA, 836 bp, Arabidopsis thaliana columbia
ataccactatgctacggaggcaatttgtccattttatagaatcattttagaagaatgtttattacttgttaaacaggctttaagtaactttcatgacaacaactttgacggaaacggagaccagaaacagacgccggcggagatatgtgcggaattgcaattgtagtgtgcggcgttcgtatcgaactctcgacactttcgtcgtctctctctgaaactgagactcctttcgaacgagtaaatctctctctccaacgtcagttgtgattttagtatgaattgcttttgggtttagaagtttagggtttttgttctgtctgaagtaatttagcatcattggtaaagcttgaatctttaatcgagtttgttcttatatagaaagaaagacttacacttttgagtttttatcgatggataatggtaatgtattgagatgagagtgaatttggttgttcatagatgagctaatttggtgtgttttcttggtttaaaccagttacaagtctctgttgaagatgttaaagctgtcttaagccaaagaggtcctgatagtgtaggagaaaagactattcatcttcgaccaaattgtggtcaagaatctgctactctctctgttgttgagactagtgaaggaacttataagcttgaggagactacttctttgggtgaattgcattttattggttctacattacagcttagaggaactagtcctataaggcaaccattggtggattcttctgggaacattctagcttacaatggtgtggtgttatcttaaggttttctgattatcatatgtttcgcttacactatacgatattgatttgtatatt

SEQ ID NO: 35664 - DNA, 514 bp, Arabidopsis thaliana columbia
tttgtttgagtttttattgtaacgtgatatttaaaagtggcttaaatggcttatgatttgtctgcccctcattctctcttaatagtatagattatttcttcactcatttgtctaacctacgacacaagcaagcacatttggccatatccacaacaccctctaaaaatatttctctccgaccattctctcaccaatcaccaacaaaagcaagcgcattttgttgtatccttcgtcacaacccatatctcagcgcaactgtcacacagttccctcgagtgatccacacagctgagaagctccattacccaccggttgcaccaacatctcaccgtcgccgtcacaaccgttcccgtacacaacatcttagaagctctattacaaactattgcaacaatctctcccattgacatctatcttcactagagacactctttctaactccgcaaactattgtatctgcatctatagtgttctcttcttcgtgactttggtgtgtttgatgactatagaagac

SEQ ID NO: 35665 - DNA, 585 bp, Arabidopsis thaliana columbia
tataacttggtacgtagatgtactacccagattttgttctgtctcatcttttctctatctttaattaaaaacaaaaaaattgaaaaataaaaaatttcaaaacttaaaaaaaaacgtgggtcaaattgcaagtggatcaaagcatgtgggtcaaactgcaccgtcattgtagtaccccgcgtattgacctcggaaaagaatgaagggcaagaggaggagaggagagaaatgcgcatgaaagaatgaggagggtcgcctatttataaaccgaggaagccagagtagagcccaagtctaaaaccttggagccgaatccattcggtcgagccaacttggtgaccaagtttccatccgagccatgcaagccgacttggagcccaagtccaaagacttggagccgaatccgcttaagaccacgggttgcatttcacgcgcctcctcccatcgttaatccaacccgcaaccttagcttataaataggaccacaccccccctttagtcgaacacttagaaattttctcaccgaaaggctcccaaaaaaaaccgatcgtccgacctttaggatacccgagagagaagagagag

SEQ ID NO: 35666 - DNA, 231 bp, Arabidopsis thaliana columbia
tagtaacggtccgccagtgtgctctaaaggtaatcggagtctaatttggaagaaaaagctgcatcagcgactaatgctacagatgatgtcaattctggaagaataaactgcttgtctgcgtacctggatgcacgctctttgtgctggtctcccctcgctgtaatcgcggatggatctcaatcgactgcggggactgtgggtatgcatgtcagctgtcagcttgtcaggcat

SEQ ID NO: 35667 - DNA, 592 bp, Arabidopsis thaliana columbia
aacaaatatcagatattaaactacgttcctaattatgtatctaatatatattgtccaagtaaacttatccaaacacttcgcattatatgaaatgctttaaatcaaataaaaatattcaagcctaagtagtattatatagttccaaaaactatgttcctaattatgtatccaatatatattgtccacataaacatatccaaacaattcgctttatatatatcaatacaaggttcatcaacaaacctttttttgagaatgtgatacaatgttgttgacacaagcaaatggtttgtggtgtgtaaaccttatacccttaaggctctgcactaaagcctaatttatttaccctaaaattaaacccaaaccttcaatccctaatccttatccactaaatctaaaatcgtaaaacaaaactctaaaccataaaatatattgtaagcataaataagaaagtgataattttactgagagataaatgtccattgatgattgccaagaggtttagccatgtggtcactaatgctcacgggatcgtttcatttcaatcacaagtttatgtatgaacgataatcgcagagcagatttgatggag

SEQ ID NO: 35668 - DNA, 363 bp, Arabidopsis thaliana columbia
cattaagttggagactagcgataatgaaaattacgaaattatgactatacgatcaatttttttgtttgtttgaaaaacacgttaattatcggtaaaggattctagttgcaagaaaatatgggtggtgaagactgaagtgaaaaggataatcatttgagtaaacattttaaagtcttgacaaaaaaaaaaaagtaaatatttcaaagattacttaagtaataattattttatggtatttcaaccagaaacgaagttatggtaaatcacgataagtgaagttaggagtggacattcgggtatccgttcgggtatcgagtcttttttttgggtatcgggtctattcgggtaggaggttgagaacca

SEQ ID NO: 35669 - DNA, 543 bp, Arabidopsis thaliana columbia
tgccttgatcattctaaccaaacccatatgcatggcaagtctaatcaaatcctaaccaacatgtacttctctacaagcttacacaacattctagattccatacctaagttccacaactatatccaccaaggtttcatcgctgggtctcatcaaacaagctaacaatcaagatccctctaaactcattcatgtactatacctcgataaatcgaccattctgttcttctgtggtattccttctctcccccagacttattctttttagagagtaaacaaaggggaactcgcatactggatccacaccctcggcatttttttccaacatttgtaattgatcattcctaataatgtataaattatgggctaaccaccccatttataccaccccatttataatccccccatttattctaaacgatatttaactctatttaaatttatacctgatgatttgtttatagtcaattatcctataacaccgaatcatgtagttgtaatattttaggtgtcaaccaaatgggtgtgatgcaactgatgagatgt

SEQ ID NO: 35670 - DNA, 499 bp, Arabidopsis thaliana
  unsure (1)..(499): unsure at all n locations
nnnnnnnnnnnnnnnnnnnnnntaaagtctctctttctttctttcttccttcctttcttcctttcttccttccttcccttcttcctttctttctctctttctttcttcctttctttcttccttcctttctttctttctttctttctttctttctttctttctttctttctttcttcctttcttcctttcttccttccttcctttcttcctttctttctctctttctttctttctttctttctttctttcttccttccttcctttcttccttccttcccttcttcctttctttctctctctctttctttctttctttctttctttctttctttctttctttcttccttcctttctttcttccttccttctttcattccttctttcatccttcctttcttccttttttcctttcttccttccttcctttctttctctctctctctctcttccttccttcctttctttctttctttctttctttcattccaaatttttgatg

SEQ ID NO: 35671 - DNA, 520 bp, Arabidopsis thaliana columbia
cacgagtttcacagtaaattacacattactacaactcaagattcaattttgcaaacactaacaagtcccaaatcaataacttgactacaaatatcttaaagcttccacatttctccgagttttcaaaagagtagaatttacttacagcttcaacgcaaatttcccagaaaaatctctgggcgttctcagtaaatgatcctccagtgcaccctctacacaaaaaagaacatacagaagcaaaatcaaacgccggagctaatggaacaaagaagctagcggcggcgggaatgatggtggttttacctagcgagagtgatgacggagtcaccggttcgatggcgaggaaagcagagagtacattaaggtactgtgattctgcctccgtctccgccgccatgacttcaccgtgtcaagctccgaggatcactagccacatcaaaagcatgcaaactttgggcctaatgggcctatatacaaaaggaccaaataacccttcaaaaaaaacgaaatttctattgta

SEQ ID NO: 35672 - DNA, 552 bp, Arabidopsis thaliana columbia
gatgcgggtacgagctccattcaggatgagtgaccttccggaaagtgattgtcaaaactatacgagtgaggacaaagcatggaaaaagatcaagtggtgatttgtaggatcggtaaacaagtctttacagcctcacagacgtagtggaccgaccgtcgggcaaggatgagcccacatgaccaaatgaggacatggggctcactggtagggacggtcggggcattacaagtggtattagagctgaacccaaacgagtgtggagtcaagaagactcacaccgtcgggagtgacggtcttggtgtgcaacaagaacattgcgatctgttagcggggatgaatcgtaaaaccccggtttcagaaatatggtggtgcatgcagagaggtttatagaattgatttagtcactcttgtcacaaagtgtgcttatttttttgattaaacgttttgagaaaactccacaattaaacgtgcttgggatgaaataatatcaggatgggtgatattcaggaaagtgagaacaaaacctgaagaaagatcatgtgagtatttgta

SEQ ID NO: 35673 - DNA, 564 bp, Arabidopsis thaliana columbia
tagtaacgtccgccagtgtgctctaaagggaccaaatcattacactatacatcaagtatcagcgcgtacggtccaacgggcttcgtgacgggaacccgctacttggcggaggacgagcggccgcaagaccatatgcttgcccttgaattcgacactgggtatgcgcaaagcaagtttacagccgaaacgatcgtctggaacgcgatagatgccggactgccgatcgccatataccggctagggacggttctagggtacactagtggcaaggggccgatgcacgcgaacccggccgatttccttactcgtctagtaaagacttgcatccagcagggagtctatccatgcctgtccgatcacaaagatagcatcgtccccgttaatttcgttgtttcgagtctaatgcatatatcatccagaactgcgagcctgcatcgtgcctacaatgttgtgcatcctcatcaatgcaccttggatttctcagccgtattccagtccatcagcaaccatttaggcactgattgcctacgcgaagtcccttatagggagtggatagaagtaaca

SEQ ID NO: 35674 - DNA, 511 bp, Arabidopsis thaliana columbia
aaaagtctagtaaaggttttgggaatgtcaaaaaaaagaatgaggttcttgtcagctaaagaagaagggtaaaaagcccttagttttaaagattaaaaccatgaaccttagtttttacaagaaatccaaatccgttagaagtatcaaagtgttgagaaagcttctcttagaagttaagagacaagaaaagaatgatctgaaaaagggtttaaaagattcatgaatgcaaagggtagagttaagttattattttgggattggagatgggattaccattagagcttcatttgttatactttgggtagatgggatcttatctctgtatgcataattagggacttacctttagcattatactaaagctcaatcattcttgagagatctcattttactaaaacctattctttaagggaccatctttgtctcttgaccttcaccttagccaaatgagttcattgatgatgcattgcttgattcacgttctagaactaatgaattttaaagggattgt

SEQ ID NO: 35675 - DNA, 352 bp, Arabidopsis thaliana columbia
aaggatccccctctcctaaaattataacaaatatttataatatttaaaaaaacataaagtttataaataataaatatttaaaaagttttatgaagtttaaatttttaagagtttgaaaatttgtaatatttaactgtaaacaaagtcacacaagccaagaattagagtccaaaattttataggtcattttgtttttgttcttaattctttgtttttaaaaaatgttattaaaatagtgagatttggaccataaatatacttttcttttctggttttgatgagtaccatttttctttgtcagtaccattgaatttttcaagttctttgtataatagacgcagcagtttccaaa

SEQ ID NO: 35676 - DNA, 442 bp, Arabidopsis thaliana columbia
  unsure (1)..(442): unsure at all n locations
caacaatacccttttgtgttgtccatttttaaaaatatctcttctcttgaacagaatgatcaaattaccttcatctaataggaacatgtaattggaaactgaaatttttacgcaaaaaaaaaatttccgccaaacttttttcccgcaaaaaaacctatagcagatgtgttgtnatttgaaaatttttggcgggaatttttttccgaaatttttttggcgagaaatttattttggaataatttaggcgaaaaatattaatatttcatttcgttaacctaatacaattttcaaataggggtaaaatggtcattaaaaatttaaagagagtagaaataaaaatgactaagaaaaaggtagagttgaaaaagggcatcatgaaaagggcattagagataaattttctattgcatgaataagtaattagataaatgaaaattatatt

SEQ ID NO: 35677 - DNA, 465 bp, Arabidopsis thaliana columbia
aaaatagactttactctaaaatagagaaaaaaatagaggaatctcattttcacttttatatatagagtcaaaagtgaaatttatttttttttcttctattttagagtaatacatcgaaacaaaatcaactcaatttcctttaaaatagagttgtctctaaaatagaagaaaaaatagagatatacattggagatgatttaagatgaaccaaaggtgttttagggactaataacagtaaaaacttcataagttatgcacagttttggccgtagtttactgttcaaaccatattactatgtgtcgttctgtacgatgctaacattgaaagtatcaattctcgttcttacattaactaccaacattcattgcagagctgtaacgtgacgtatatagtttttcatcctcatatatggacatacaaaattcaatgcgttctaaatttgtatatatcttcttccttaaatg

SEQ ID NO: 35678 - DNA, 1306 bp, Arabidopsis thaliana
taacccctctctttctctatctgatacttgtcatactttcttttcccaaagttacttcaaacctttgaatcgagtcctaatgaaactcgtaatcttccaaacaggggcaaaacaagaaagtctctgaaacatctcgcatctgaaattctaggggctgacattcaaaatggagagcactgccctgtaagtgtgtacatataaatataaaacaaacagcttcatgttttggagctgcaaatctataactattcttcaatggcagattgatgatgcaagagctgcgatgatgctttaccaaaagaacagaaaagagtgggagaaaactgtgaaagaccagacacggatgtggctgaaacaaaagaagcgtaaccctaagaagaaagctaaatatgggaacaacgcttccaccaatgacaatccaattgtttgaatcaatcagcgagagaaacctgactaaacagaaaaccaagaatcgctgaaaagttttggtcgtttttcctttctttttgattgttctcagcatcaggcgctgcatccaaatgtactatcgtctattacaatgttataccagattagatcatgtattattgttaaacaaaaaatatacatttttggaggttccgaaattaagctaatcgttcttgagttcagttttgtccaattacggttgaacattgtagaaaccaaaacctctacttctcacatcacatatactgtactgatcaaatcggttcggtttggagtaaaccggttaattacataaaactctagaggttgcatgtacagtcaagtaaacaaacgcgctctgcggacgcaaatgctgccacgtcttcaatttccgtttctgtgtaaacaagaaaacctaaaaaacagaagcaagcagattctcgcatcaacgaagaagaagaagaaaaggacgagtagattgatttcttagacgacggagaaatgcgagtgatgagatcattgcgcggtaattccggtgctggattggttttccggccggcgaggttaaattctcttcggagcgtctttaccggttgccgtgctgtgattttgccccgctttggtggtccggaggtttttgagctccgggagaatgttccggtgccgaatctgaatccaaatgaggttcttgtcaaggcgaaagctgtctccgttaatcctcttgattgcagagtgagtgttaatctgcttgatccgttttgatttcattttatgagtggcattagatatcttcggagattgctttatttgggaattaagattggcgtgatcggttagcttggatctcttgcatatgttc

SEQ ID NO: 35679 - DNA, 285 bp, Arabidopsis thaliana
taatccatcgtcaatgatgaagatatggttaacttgtaagagtgggcgactttagggagaagaagaagatcaagaatcagcggaagaaattaaacaagtttggaataatttgatcctttcattatacttgaagatatatatatatatatatatatatatatatatatatatatataattgtatttatgtgttaagttatatcattcgcttgagtgcatatgttgatgtatagaataatcttgatttggaaattatattattagttattgttaaatataatttgac

SEQ ID NO: 35680 - DNA, 561 bp, Arabidopsis thaliana columbia
ctcttttgtcatatattttaaattatatcattgtattttaattgttagttataggatttcacccgttgtataacgtgtcgtattactataaactcaaacccgtcttaccatctaataccgttcaatgaaattaaacatatttaatggatttcatcctaggtatactgtctaatattactatcgacccaaacccgttctaccatctaaccccgttcaataaaattaaatattattttattatttttgttttaataatactttaattttaattatatataaaaaaaatcaatttcaaactttttattttaaatggttatttaattgttataatttataaagttcatatattttaatattctaaaaccgtcatacaatctaatcccgttcggtgaaattaataattattttttaaattttttgtttaaataatatttttattaaaagatttataattcacataaatttaaaaggtgtctttcaaatagttatttgattttgtatagattttacatctaagatatttctctatatgtaacatatagttctgtattttataaatat

SEQ ID NO: 35681 - DNA, 518 bp, Arabidopsis thaliana columbia
atttgcgagggatttacaacaaccgctcgcaattccctcacagagtaagccgcaaaaccctaattatgtaaccccaattttgcgaggaattagcgagggtccccgtaattccctcgcactgtaatccagacaaaccctaattctaattttgcgaggaatttgcgagggtcctcgcacttctgttgcagaataagccgcgaaaccctaaattgtgtaaccctaattttgcgaggcatttgtgagggtcctcacaattccttcgcatagtaatccagaaaaccctaattctaattttgcgaggactttgcgagggtcctcgcacttgtgtcgaaagaatgaagcgatcctattggttagtgagtcggttcctcgcaaacgttgcgacggatttgcgaggcaatttatttctatatatacaaagcgaacgcagtttgagcaaagcgaacgcagtttgagcaaagcaacgcagtttgagcacagctcaaaccaagccgcctccagacaaaccctacaaaaat

SEQ ID NO: 35682 - DNA, 397 bp, Arabidopsis thaliana columbia
tttcctatttatataaatagagatattattttattatattaaaggttaagaacttttatattttattttaagaatttatatatacactaacagtatttaaacttgacacataacagtaatttatgttttacttgacacacattatgatctatgtcttaataactttgaaaaccaaatttcatgtaataagattttagttacctaatttttagctaaaaccaaacacaacaaaacgaaaattgtatcaaaccaaaatatatatagttttgtggcaattttttaaaaaaataacaaattcagagcataaaataaactcagaaaccgaaccgaaactaaaccattaatcgataaggctggacattagagagattaagtcatttttggcctccaaatgatt

SEQ ID NO: 35683 - DNA, 409 bp, Arabidopsis thaliana columbia
cgtatgtattgagatttaaactattgagataaaattggggctatggtcttgagtctgtcccaattaacatcattcactgtacttacatcgtatggcagataggtgttcagtcatatatctggacgtagaatttgtcgaatgttgtgtgtgtgtgtcagctgtaaaattcaaattatgttccatcttagttaacactcatagattgaattgattcctaatagggactgacacggtaatgagtttgaatgcaatcatgaattccccaacaatatctctataatggttaactcaactgatctccgacgattgactcgctatgatagcgttgaaaatagcagataaaggcgtgtgggaccgtcagtgactacgacgatcaggctatggtggaatatacatggtcagcttgtgc

SEQ ID NO: 35684 - DNA, 388 bp, Arabidopsis thaliana columbia
tgctagctgctcaatagtcaattactcaataatagtgtagattagagacaacttttacttattcgttactctgtgatttattcactacaactacaagaaaacatgctattaacaatagaaatatctgttgtctctaattacttattcgttactatatgatttatatatatatatatatatatatcactacgagataacatgctatgtaacagcggaaatatccgttgttagattttgtcgtttataagttatagcaacatatccatagagaaaaaacactttgtttgagtaataaactaacaacgaatttcagatgtaatatggcagagagggataaaagacaaactaattgaagatattggttttcatatcctaagaggctaagaca

SEQ ID NO: 35685 - DNA, 620 bp, Arabidopsis thaliana columbia
ctacttggctcagtaagtaagtagtagttcaataggctatctgactttcagcttaggatctctctcggccttgaagccaggcatcgacactaaggcttggaatgttttttgtgactattatcgccagccttgtttgcctgttggggtttgaatatgcttttgtcccccttaacaattcggttgtttaattaaagacttattgtagtgaatatctaagttcaggaagttacccttttgtctaaatcgttcttgcattggaaacagactacatacataacctagacaaagcaaagccttttgtgtagtgctcatgattaaaaactgaaaccaaaacaaatgacagaacctagtcaaagttaagagttcacgacttgttgtagtggatatttctgaagtttaggacgtcacaatagttccaaaacaacaaacaaacgacttattgaagtgaaaacttttgaagtttgggaatgtgtctcaaactttaatagttcatacattgaaccgacctcaataaacaaacgagataagcatagtcaaagtagtaaagcttaaaggcgaaaatgagaatggctgcagtgatagcatttggtggtatgagaggagtggtggttgaggtgaaa

SEQ ID NO: 35686 - DNA, 640 bp, Arabidopsis thaliana columbia
tgtcatatactttaattattatttgcatagggaaaaatagaaagagactcactccccaggtgagggcaaatagaagcccctgctccctgaatttcacagcctttatcatcaatgctcctctaacctcaaacactcaaaatccacacatctatacacatacctctacatacacactccattttctctctctatctctattatatcttcgatttatgtgccattttggtatataaatatataatcttgcacacaataaggttatacttcccatcaccttttgtatcattgctatctttgttcttccttctggtgtctcttcagtgtaacaaaaagtctctttttcagttatattaagtaaaagatgatgcttgcggtggaagatgtgttaagcgaactcgccggagaagaaaggaacgagagaggattgccacctggcttccggtttcaccgacggacgaagagctcattaccttctacttagctccaaaatcttccatggtggtgctccggcattccattccgaagttgactcaccgctgtgaacttgtgactacaggtaataataacatttgctctcttacccatagtttatttggaacttgttttagtgataattgataacttttaccagaaaagtgta

SEQ ID NO: 35687 - DNA, 566 bp, Arabidopsis thaliana columbia
  unsure (1)..(566): unsure at all n locations
ggtagtctacatacaagactattttaccaaatgtatattcaagaaaagaggaatttaatccaacacataactcatagctaggttgattaatttaaattcctttgagtttgacatacgaaaatatcacaaaatagcgtaaatatatactcctaaacatagctttgacaaatatatatatatatatatatatatatatatatttactgataaacatatatagctaggctaaagaaggctcttttgcttgtaagaacccctaattagcctaattaatgtaattagttgttgctaaaaaaaaagaggaatataatagccatacttccacctgaaatagaacaaggctacgtacatgttacttaaattccccctaaatttacatattaacaatcaaacatataatagtatcatcacatgagcccatgncaaatgatcagtgactaacaaacaattattgcaaagtgcgtattgtgtacaggctttataaccatgcacgatgtcaagttagatgaagaaaatcacgtgaaagtgtagtttgaaaatgtgttgaatttcaaactaaagtgttg

SEQ ID NO: 35688 - DNA, 522 bp, Arabidopsis thaliana columbia
cccgattaagccaagtaatcgtttctcaccacaatccatcacttgtttgacaaaacgttgttttgcaggaaacggattagaggtagcaagttcatgactcattggtttattatttttttgcagagagtggccatacatggaatcatcggctttacaagattggcgatcaaacattggcaaataatattcagacatttgttaattcccaaatctaagcttaactcttttgatgaacttattttcagacattggcaaataacattaagttatgggctgaccattggacatggtccttaatggttttggacaaattttcagaccattgtccaataaagatcatccattaaaactaatggtccaattggacatgaccattgggctttggacagcccaattgacacttctagatggaatcataagtagctcgaaacatgtcgggtaacgacactagagtgaacaacctgtaacatattcctatagaaagttcaattaatgtgtacctggagagaaatacatcgatga

SEQ ID NO: 35689 - DNA, 554 bp, Arabidopsis thaliana columbia
tcgactctatacctggagagcttcactgatcttctgtgcgtataatcctttcaaacggctataatcgtacattgttagagatctcatgcacacttgcctccattaatctgtaaatttgttaataaatcgcagtatctaacactcgaaccccagacctcttggtgtagaagtattaataatgaacccttggtcaaccaatgagcaaggaagcttccacttttcatttagatttatataattctctatgaatggaagacttaagaaccaaaaacttattcacagcttggctttgaagttagactctttagactctagcttataattatcatctgcttgaattaaatctttgcttttcataatatgtaatgatgaatctgctaaatgtgtatatgacgtgatgatatacatgtaacatgtggtgacaaaatcataaataagtaaattgtttttcacacgtaattgttacatatgacgtgagatcatgttaaataacgtgttatcgggtaaaataataagtgagctagtgagaaagtcaataaccttgataataatta

SEQ ID NO: 35690 - DNA, 296 bp, Arabidopsis thaliana columbia
tttttaagactgtaaatacttttcaaatacaaatatagcatttaaagcttcattgttttttaaatttctcatgttttattttgtcaaaattaaagtactctaatcctctgtttttattggaatcattttgtatttttgaagtattatttgttgttaaaatagtctcttgacttactctaccttagtatagaaatattatatttatgcatttcaaaagcttattgtctgcattctcttttcttgtcatgttattacattattacttgtgatatttaatctaatcatattatgatgat

SEQ ID NO: 35691 - DNA, 482 bp, Arabidopsis thaliana
ccctgaagcacctactcttttcgttcatgtattatatcagaacttcattgtacatattctccggtgatttgactgatgtcatgttttctttctttggtacagagagtttagccaagtttcctcggagaacaggcccttcatctgcactgcctggtccttctcctcagcaagccagcgaccagcttaggcagcagcagcgacaacaacagcagcagcagcaacagcaacaacaacaacaacaacaacagcagcagcagcaaacagtttcccagaatacatacagtgatcaaagtagtaggcaagttgcactaatgcagggtaatccaagcaatggtgtacattatgcctttaatgcagcctctgcatccacttccaccagcagcatcgcagggctcatccaccagaattcaatgaagggaagacatcagaatgctgcttacaatcctccaaacagcacctatggaggaaactctgttcagatg

SEQ ID NO: 35692 - DNA, 483 bp, Arabidopsis thaliana columbia
gaccgttttggaaaatgaagcgctagaggttacaattgagacaaacaattagtcggctcgagtgttaattctggaaacgaatcccaagccggacgaaggaacacttcgggagttcagaaagatcgccttgaacattcatagttggatcggttgttagtctaggtaacacatctcgagccaagttcgagaacacctctagaattatctgtaccgctttgggagatagtcagcggcatcttccgacattcccctagccgaaaagtagtttgacccaaagactcctataaacgtctaccgagccctgaagattgcccaaggaaaagacttgtggaaatctgatgataaccgaagtagtatttccggggaaaccggaccattttctgaaatcgtggaaatgatattggagaatcttaaaggacattgtcgaatcgagaagtttcccaagcccaagaagaataaggaaactatccttaagatgactat

SEQ ID NO: 35693 - DNA, 415 bp, Arabidopsis thaliana columbia
atgtcttatagcttcaggtctgcttatggtgaatgtgtaattcagttcaattcccctaaaacacaaacatgtcgttgcagctatagggggtgtcaatccagtccactgtattgctagcaatcaagatgtgtacagaaacaactaagtcaagccagattataatgatggtgggtttctagtaacaatcctaggtcaggattcaaacaagtgaaagaaagagaacttaagagccctactcgatcattgggtcgagtagaaccaacagacaacaaaattaaatagcctaaatgcaatcaacaggggatacaaataggggatacgaataacaggtaaataaaagtgcaatcaacatgagatacgaataaatctaatagaagttctaaggatggattcattgataagggcaactctaggg

SEQ ID NO: 35694 - DNA, 284 bp, Arabidopsis thaliana
gataggcagaagggaaggaaggaagacaggaagaaaggaaggaagatagatagatagagagacagacaggaagataggaagataggaaaacggaagataggtaggtagacagatagatagatagatagacaggtaggcaggaaggtcggaagatcggaagatagacagatagacagacagagagagagtcagacaggtagaagggcaggtttgtaggtaggaaggaagacagataggctggtaggaaggtaggtaggaaggaagacagtcagatagacagacag

SEQ ID NO: 35695 - DNA, 582 bp, Arabidopsis thaliana columbia
attagtaagtgatgggccaagttcctgggcttcttagggaggcttgaagtcggcggcaagaggaaaggaaggagtggttgtgcaccctagtggtcagtggaagacttgaggggacgcccgtgttcaagtctcttcggccggcggttttaaattgatcatttccaaaaccgcgattctagaacaattcttcactcttcgggccataactattgaacggcgtcatggattgcttcgatttgacttcgacgttaatcttgactcttctggctttccaatgacacctagatacctccaggacgagatcgggaagaccttggccggatgccaaacatctgaggcacataaactgtttctaaaacagaatttggtcgacttctacttctttttgcatgaaaactcataattcttccttgaaggtcaaatactcgaaatattccttgaagtgtcctttaattcttgatttttccatggaaaacctaataaaaacatagcgaaagtgggcgaaaatacaatgttatcatcaatgcagatttaattctcgattttttggtcttcttggttgttgacgagcttctggtggta

SEQ ID NO: 35696 - DNA, 883 bp, Arabidopsis thaliana columbia
gggctaagcaggctgctgacctggctaagtcaacttctagagctcctctgcaggagacaaagaaacctcaaccaggaagtgctgatgattctgagataaagggtaaaactaaaaagtcggctgacactttgatagacaatgatactcacctcattaaaagctccacagccacagcttcaaacacttcccaaatgagttctgaagtagattcagtcaggggagaagagtcttcactgcaaaacacacgaacacaaccaggacgagcttggaagcctgctcctggctttaagccgaagtcattactggaaattcaaatggaagaacagagggtagcgcaagcagaagctttagctccaaagatttcttctaccgtgaattcagtgggttcggcggctccttgggctggaattgttaccaattcagattctaacatactaagggagactcatggagagtcagctattactcaaaccggtgttgtaaagcctgaaagtgttcctactcttaaggctaagaaaagccacttgcatgacttgctggctgatgatgtttttgccaaatccagtgacaaagagagggaagtaatggaaatcatctctaacaatgatgcatttatgcaagtcacgaccactaatgcagagtctttcgacgatgataactttattgacgctagggaaacaaaaaagagccgtaagaaatctgcgagggcaaaaacttctggtgcaaaaattgctgcacatgttcctgctgtagatacatccctccaaacaaactctgttgagaagggaaaaagttctcgtattctgcagcagcaggagaaggaagttttgccggctattccttctgggccttctctgggagattttgttctctggaaaggaga

SEQ ID NO: 35697 - DNA, 617 bp, Arabidopsis thaliana columbia
gtgcactaatttatgttgtaaccaccttttcaattccctcattattcccccttggaatatttaaatttgtaaagtagttggggtaggatcctaaaaatgactcagcaaaagaatagcgccctcccattggtgttggtgaccaggtttggttttaccatactcctacattttattatcttaccaaagataactcttaggttagatgttaagttttttagcgaactatcttttgtcttaacgaccagtttgaacacttactctattttgatctgttaactaactgtttttattggttcagcgtgaggacatgcgctcattgatcaagattctccatctcaatccggcctgttacatgattcgcaggtgaggtagtaggtaacatttgggattttatttcgataagtgttataatagctgttaagttgttagtgagtttacacttatattacccacctaacgcaataatgaattatcgagatgaaagttggttagtaaatgtaacgtcgctgtatgtgtcttgtagggaccggtcaatgtcctgcacgaactgacagcactctggatggtgaagatatttcagaggttagtagtgaggttggatattgcgctaactattg

SEQ ID NO: 35698 - DNA, 472 bp, Arabidopsis thaliana columbia
aagagatgacgatggaaggttaatttgagatttggattggagagatttcaagcctaagcgaagaatcaactttctttttcttttttttttcttgttggaatttttcttttttcttttttggggtgaaattaatagagaaataatgatgagaatgaagaagaatctcccctgcctaaacaaactcccatcatgtttttttttccatttatttaattaatacgagattttttaaaagaaagagggacccacaagtttccatgcgatccatacatgtttgtttcccttgctgattcgagtgtataactacgtttttttttgtcaccaacgcgctttttttctccctaattcaacacttcaactatacacgatttacacgacacgagtggtcagcagcaagcaaattcgccttagattgttttggttctatatagagagagtcattgtccataaatcacatttttctctatgaaga

SEQ ID NO: 35699 - DNA, 491 bp, Arabidopsis thaliana columbia
tattagtacctataccaccaaaaacaagcagacgaaaatatgagttagtaacttgataaatgtaaaagaacttgatcttaaaagtttatgatatcttgaatgtaacatgcaacaatgaattggcaacgacgccaaagtgataagcaggttttttcggcctacttatgttgaatgtgtgtgtgattcagtttaattcccctaaacacacaaacatgtcaatgcagctatagggggtgtcaatccagtccactatattgctagcaatcaagatgtgcacagaaacaagtaagtcaagctagattataatgatggtgggtttctagtaataatcctaggtcaggattcaaacaagtaaaaaagaaaacttaagagccctactcgatcattgggtcgagtagaccaacatgcaacaaaattaagtaacctaaatgcaatcaacaggggatacaaataacaggtaaataaaagtgcaatcaacaggggatacaaat

SEQ ID NO: 35700 - DNA, 532 bp, Arabidopsis thaliana columbia
tacggcgtctcgtctgtgtagtggtactttggcgactaataagcgactataaacctattagttgtatattagtcgtacaatagtagcggaatagtcactaaatatagctactatttatttagtcgccggttgtagtcggtagttagctattttcttgtatataatttggttatcgaacttgttgtctagggatagtctattgagcatgtcaatcacttgtagatcgaggagacttaactactcaattacccccatcctcgggaatttctcatccaattgatttctttgtttactctgctattgtttagcgcatattgttacatgttgcttagcttttgcatttcatagatgttatcactcatatactcgaccacacctagttgtctggtaacagaatgtgcagtcgagtatcattgttactgtctctgctctttactcaaccacacccagtgcttggcaacaagttgtgttggtcgagtattttaactgtttctgcttgaatttctattcctacatgttgccttaggactgt

SEQ ID NO: 35701 - DNA, 478 bp, Arabidopsis thaliana columbia
ctgagatcttcaggaatcagaacgagtaaacaatgctaagcaactgattattctccatacaaatttgtgacactaagagaattcaagctctagtttcttcacattcatataaaattaccatcaaatacaaagacattacctcaaagttgagtctcttaagagtcaaaaccagagtaaacaccactctctctcaactgtctcttctcttcttcaacataattcttgcctctacttgcttgtcccaaatctctcttcttcttctccttctgtgaaaaagagagattcttcctatcattccgcaactgcgcattcgcaatcgtctcgccaccagtaaccgcagcagctcttgtagcttctcgttcttgataactttctttcacttcctctactctttgtttatcctttcccgtagtccatgaccaatcctgtttctccatgggagcaggaatatcagaaagaccaacagctttgtaaccat

SEQ ID NO: 35702 - DNA, 595 bp, Arabidopsis thaliana columbia
ttgtatcaatcaatatgtctgaataatctgctgttaggaatagggtttctcattagtgattcatatggttttgtagattgccccttttgctaggttatctgtagaattcttcatctttaattatgcttaatgctagatctagagtaattaactagatctttaatccagacaatagatatgccatcataggtatctgtagttgaatctattatttgatgagcctggtttataggtgtgtaataagaatcggcctatctactaaggtgaacaatcaaactcgtttagaatgaatgtttaagttaataatcttcgcttctccggattttcttagctatagatatagagagtttcgcggaacaccaccggttatctccataattagagtttgagtttaagaattgttcgataaccacctagctttcattcgatctactaaccaatagtttcctgataatacattgttcctagctcttttcctaatcgtttcaacacaaccaacatgctgtctttttactttgtttacttattatttcagtcatcacctgctagcttaatcttgacattgaactcattgtttgaataaaagaactttgtg

SEQ ID NO: 35703 - DNA, 513 bp, Arabidopsis thaliana columbia
aatcggcctatttactaaggtgactttattgaattcgtttataatgcatgattaagtataagatttctcggcttctctggttattcttagctctaggcatagggagtttcacggaccgccaccggttattccacaataagagttagagtttatgaacggtttgataacaacctagctatcactagatatactaatcatctaccctaagcctgactatttttccatctaatttacatcttgatatttattgcttttctttgcttcttaatttataatctactggtttagcttaattcgatatccatatagtctattgtgtgattcgagagctttgtggaattcaaccctgaagtactacaatcgatctcttatttgagagagtggtcttaaggcaatttgacctacattagaactgttcggctttgggtctttttttcttctaaaactcttaaaaccgtcttggctcgcaaaatacatgttcatctccttcgtggctctaaaatagcaccaaat

SEQ ID NO: 35704 - DNA, 603 bp, Arabidopsis thaliana columbia
  unsure (1)..(603): unsure at all n locations
gtccaacacagaaagctctaaagtagttaagcgttaacacttgaaacttcatctgctccagagttgtgggtgaaccgtcaacgctcaaatccgctgttgaaagctgcagcaagatcatctactgtgcgactgctcggtctacgattactgcagaccttacgcgggttgatcacttgggtgtttataacctcaccaaggcttttcaggtatagtaagatttgtccatgactcaaccgtggttaatttggtttcttgttttgttgagcagagagtagtttattcatgtgtgtcgttttgagtatttgcaggattacaataacagactagcgcaattaagggcgggtaaaagcagcaaaagcaagcttctattagctaagttcaagtcagctgagtcacttgatggttgggaaattcgtcaaggaacttactttcaggacacaaccgcttccaaatatgatggtgggatggatgctaagtttgagtcactgaaactgagagagctgagtattcaggtacacattatctttccggagaatatggcaattgcaaagntgtttcctttgatgtatattttgaggtatagtggtttcacagttttcaaat

SEQ ID NO: 35705 - DNA, 610 bp, Arabidopsis thaliana columbia
tgatgtagttgcggcgcttccataggtgaagcaggttaatgtgacaatgtcagcacaaccagccaagtccatatttgcagggcaacttccctttggactacaaagaatttcaaacatcatcgctgtttctagttgcaaggtacaaatatcttcccatgatttttttttcctttgtaagctcttgatgtttctttttgaactgaagttgttctcaaagtagtcatggtgaagtgatatgaataagatgtcatgtactgtattctttgtttctttatcatattcttgtcttcttcgagttttttggaagctattcaatagatttagttttcgataacataactgtttctttcatgaccagggaagatagaaatgaaagcgtgtctggtctttctacttcttgacattgaaactaattgggttcttattgaactccgagtcattgaaaatcaatagaatactacatacacatatatttatgaacacagtggatcttcttctctcctcttgttatatgatcactatcgtccctgccacgacgtcgcgtttttccgttcgcgtatgagtttccattttgttgtgttattgatgatgagttgtgagataatattat

SEQ ID NO: 35706 - DNA, 880 bp, Arabidopsis thaliana columbia
acacatgttccttccttgttgctctctgctttgatgcacacttcgtcagttttgctacagactccttttgaacaaactgaggttgtatttcccttttggacagatgttttatctgccagaaagttccataggaatctagaaacatcaccgacgtaaccaaggtaaggtttggaggaaggttctccgaggatgacgccagcatagttgcctggacaagtgtttgtcggtgaaatatagtcttttaccaagttgcaagataagcccggttcacaagctaaaagacaggttagaagatattcaacgaaagaagcattgacatggatggatcccagagctgaattgcttgtatctttgttgtcacttgctaggatgtaaagtgttcgggccacaacagaagcagcagctactacagacgaggagttgatatttgctgcaatacaacaccagaaaggaatcaaaagtgcaaaatggggtttggagcgaaaagaagagaaagacaggctgtgactcttcttacacaagtcatcgaggtgactatggtagaacttattcacaaagttggtatcaaagtcttcaagtacaacagctgaagtctgagggttctgcaacaatgaatatgatgttatacctttttcactctaggcaatctggttcagaatcacataatagtaagcaagtatacttctcctgtcatattcatgatcaactgaaggtgaagtatatgcaaagagtatagtgcgaatacacatttgaattgtcttcccatctatttacttggaatatatattgtacctttctcatgaaagccatcaaggaggatgggggtatccagggtttgcagtatctgctgaaagaattttgatgttttttgatgcaagtg

SEQ ID NO: 35707 - DNA, 588 bp, Arabidopsis thaliana columbia
tgtccaaattgagttgacaaacagagcaatgaaaaagaaggcgcttggtgttattaccgcagagatgacattttggatctgtgtgatcaggagctccagttgtaagaagcttaagagaatgtccatcatgagaagggtggtcgactatctcttgtttatcgaacacaaatgtacatgctacatgaatattaaacttgcattcgctgcatgaatagccatcaacattcaatcgatcacaagcatcgcattccagaccatcatgatgtttaacgcgggaaacaagatgctcgtgtccttctaactcttctaactcataagtcatggcggatgcggttagcagagacgaagaggatgcaaaataatgtttgggggtaatagaacttcggtttcatgtaataatggatcaatatagttgtttctttatatactctaaataaatcaatgctacttgttacattatcatatatgactttgacaaatatatatcagtacaactagtgggcacatggctggtctttgtttagtttaaacactaatatcgattgcccactcaggttttgtctgcatattagtttattacttggactt

SEQ ID NO: 35708 - DNA, 540 bp, Arabidopsis thaliana columbia
aagtttgaattgttgtgtgttgattgattatacataggcttcatgtgcaactgtgtgcttcctgcgactataaacgcgaccaggtttggaaacaacagagtcaatcaagacaaatcatgtgaagcagaaaatgagaagaagaaactgacgagtgtatcgagcagagagaggtctaccattgctactccttcgtcgtcttcttcgtctccttcagttcaagttcgcggtcgaagcaggaaaaggcgtcctcgtgctctgcaaccttcatcgccattgactctcggatcttcctccgtttgactataagtaaaatgaaatttggctttgtttggtaaatccatttttgatctctcaactagagagaccactctgtatttcttctattaattgcgagtgtgctctgtaatcttgttaatatgcaaacctttttctttacttaatagtgtaatcttatttgcattttcatttcagatattggactttatttttacagtcagatatcagattctcggtcagtagcaatcagaaacaagagatacg

SEQ ID NO: 35709 - DNA, 603 bp, Arabidopsis thaliana columbia
aaaatatttgcatccaactttattttcattagtgtgaacatcaatataaagaattgagaagatcattacaggttgtttcagatgataacgacaagttcgttatatatgcactataacttgctttgttacatatgctataaagttcatttgcaatatatacgatttgattacatcagtgtgggattcctagaggatgaattaagtgttaaaaatgaatctatacatagtagtttgctttgaatccatatgaaaaaactgttgaggtttaatgtcgaaatttctttatctttggcttcggctgcagtcaaaattgccgaaagaccacctcgactccaaaccattttcttgataattgtaaaaaaaaaaaaaaaaaaaaacatgatgtcccatatgcgtgtctaataatatatatagccaagaagcatatatttatttaggggaagagaatgctaaagcatgagttttgtgctggctttatgtggttgtactcttagagcacatgtatcacttctaactgaactttacataatttaaagcatgatttggattatctaaaaaaaagttagattatgatgaatatacaagtgttttttgttagtggaa

SEQ ID NO: 35710 - DNA, 987 bp, Arabidopsis thaliana columbia
tcatccattccatgaagattgaccttttaattacgtttttattttgtttgatatatggagactaatttttataatcctatcatgaatctatattacttgatgttgataaattgtaattttttgaaaaatttgatagagaatgtttaggtttattaaattgtatatttcatagttgtggaaaagttttagtatgaaaatggtccatatgtaattaaacattttaattatgtgaaaattctagaaaactaatctttaattgaaggacagagtattaacaaataataaagggttaagcaaaaagataaaaattactaattgtttgacccaatcaattctttttttttttttacttgctacttaagcaggcaccacaagaattcgaaagtaagattcaagagccaatcacgactatgagcagagaagttggtgaagccctaaaagccatagccaaatctattaaaacaatgaggaacgatagtgcttgtgtgaacgcacacattgacaactccaaaaaggccattaaaaacttaaagattgcactcaaatcttcttatccagagacatataaagatcttttggagatcattcccggagtcacaatggcatcaatcctgatcgaggtcgtgaattgcgtcgagaagatctacgaggctgtggaagaattctctggtcttgcacatttcaaagagactttggattcaaaactatcagcggagataggacaacatcaattactccacaggggatgtgtaaagccggttctagatggcgacaacgagaaagaagacaatagctcatgtcatgttcttatcactgtccatgatgaaggatatctaccgacggccaccgcgaagaacgttttgggagcagagaagactagagtagatattgtgtgaatatttttgttcattgcgaaacaattacacactctttcaagagaacattatttagtatataagagatatccgcattctacttagttattgc

SEQ ID NO: 35711 - DNA, 571 bp, Arabidopsis thaliana columbia
gaggtttatgttccgctttgtgtagcattttttggaaaaccgttttttgtgaaaaaaaattatatttatacaaaaaagtagaaataagtataatgcattttttttctttttcttaaatagtctttgtttaaatataatttggcttcatctgttccatataacatgaaccgagttcttgaagtaaaagaactgatttgtgattcttctggtgatcagaacaacaactgaacaaactgtcttattgttttcatggaaaaaaaaatacttaaaaaggcagtgagttcaatgtaatataatgtggtagcacacactaattacccaataagggtaattctaaatattcagttctgatccggatcggatccaatcgggtttgggttggcttgggtaaaaagtttcaggtcctaaaaatatccaaaataaatagaaacaagtatactttatgtagatagtgggtaccaaacaaaaaaaacccattaaaatttgttatttttaataaagttaatcatatttgaatatattttactagattttgacaaacataacaaataatttttaaatagtttagttg

SEQ ID NO: 35712 - DNA, 499 bp, Arabidopsis thaliana columbia
tgaggctaagagtcgttatcgttggtttaaggatgaaaacagctgttagcttacgcagttaggaaagttgttcatgactgttaatggtgagtcgatttggttaggtcaacgataacttatagattaaattagaagtcaacttttatgttgaggtataaaacggttattttaagagttcacggttaatttggccactttttgaaagttcaggtattaaataacatttttccctatgtaaattgtcaacaaaatccgaagttggaactagaaaatatgaacctgttcagtgtacactatactaaagactgatcatagtagatgtcatgaatcttttcttatcaacctctacaaaatcataaacctgttccaaagagataatggttcataccattaacaattactttgataacctatgctaacttactatttacttctgagatattgctttggcccacttttctatggttttgtaccattgccattggagaccatgctggcg

SEQ ID NO: 35713 - DNA, 413 bp, Arabidopsis thaliana columbia
acaaatgatgtgaaatggtataaaacagtggtgatatgatgctaatttcgtgacaaatggatgctcaaaacatgtaaaatacacagttatcacttaccgtagaagctggggcagcatatcaatacatcaaggattcccaaaggagaagcgatccctgaagctcctcctcattgaacctaattggttcccaaatgtcgagccaacgacgttaaacaagtgcgctatgtgggagccaacccactaggtaaatattttctttaggatttaaactttgcttttgcttttgatctctccagtacttgtttcaagactttttaaaaacaaaaaagagaaataggaacataatagatagaaaaacccaaaaagaagagaaggaaggagggtcacagaacccgtcactaggcaccctgaca

SEQ ID NO: 35714 - DNA, 214 bp, Arabidopsis thaliana columbia
tctctagtaacgtccgccagtgtgcactgtgctctaaaggctgatcaagcaaggtttggtgacagtcaactggtacgtggagtgtcaaccagtatccacgtctcgacgtcaagcgtcgaaggtcgaagttcaacctctctccatcgacgacgaggtctaggaccagcatctgcttccacgcggtgtcattgccagtgtcacagttgccgatggt

SEQ ID NO: 35715 - DNA, 558 bp, Arabidopsis thaliana columbia
tatatatactaaaatccaatttaatccaaacacaaataggttgaactcatctgaacatagaccatccaaaaaactataaaaattaggatttttttaaatttgggagaaaatttattcctttcagcaaattaggatttactttatttacccatttagatctgaacaacccatttgacatggttggaggacgatgatacgaaaagaaactacctttgtcactgtgattgattagatatgagaagttgaaacgaagataagctgtgttgttacaactccgaacttcgattaaacgattctctcacaactctcaatcactcgtttgtactctcaagaacttgaatcacaacaaagagaaagaaaacagagcacacgcgtgatttgttaccagttcaacggatcgatgtgatcacgtctacgtttggggccgaatcaattcggcaattcactaacaacaagagatgaacaagtctcaagctcgagctcacaacaatggagtctctcagctttctgttcaacagaataacgaactctcactttcgaaatgaatcaaagaagaag

SEQ ID NO: 35716 - DNA, 243 bp, Arabidopsis thaliana columbia
ttattttttcttataaaataatcatcaagtattaaaatattagaacttgatgtcgtatgctgtgatcgaatatgtacttaactgcaccgagactaacgcatatgcactgcaagtaaaagtaaccgttgtttttaagttttaacagtactctcagttggaattaattccataacaaagctatgacgttaaatctataataaaagacatttttacaaaaatttacgaatatagatatatagttta

SEQ ID NO: 35717 - DNA, 335 bp, Arabidopsis thaliana
gatagatagacagacagacagatagataggaaggaaggaagagagagagagagagatagataggaaggaaggaagataggaaaataggaagacaggaaggaagataggcagatagatagataggtaggaagacagacaggtaggtagacagacagacagacagacagatagacagacagacagatagagagagagatagacaggtagatgggaaggtaggcagataggtaggcaggtagatagatagatagacagatagatagatagatagatagacaggtagacaggcaggcaggcagacaggcagataggtagatagatagacagatagacag

SEQ ID NO: 35718 - DNA, 508 bp, Arabidopsis thaliana columbia
ccgaaaatataatgagcataagatatgctctactcatcgcttgagattgctttgcctaaatttgtcagaaatatctcaaaatatctcatatatatgcttgactttattattagttagaaacatgaaatttttgtgataaaggttggtatttttgaaaataaatgaagctattaattgttcattggtaagtaaataataactttatttagtagtaaacaacttataaaaaaagttatgaatggtgaggtgcatttacaatacttaggatggcatttagaaaaaagatagtaatagaaattattcacacacacatattctacctgacttgaatctagaaggtgcatgatacaaagacaacaatattacaaatcaataaactacgagctcttgtcattggattgtgtatatagtcgtgcaaatccaattttaaataaagattgattgtcgatcgataatactgattaaacgtttttgaactgccactttgaaacatgtgaactacaaaatg

SEQ ID NO: 35719 - DNA, 558 bp, Arabidopsis thaliana columbia
caggcaaaacaggagggacattgggagggaaagaatcagtggctgcagcaacaatcaagcttgattttccagtgcccttatcaccaaccacaacgattcgcacagatttgggagaaccaggacaatcaaccgcaccagcagcgtatctcgccatctgaaactgcaacacaatcaaacactcaacaattcagaatcaagtacaaagattgacgagtctgagacacgattactgaaacttcgcagcatgattttaaaaacccagaaacatgaagatcgtgaaggatatgacgaatccagaaccatagataacaatggaaagagtaacatcaacgagaagcaaaactaacctaaagatcaaaagattcgatgaaagaaacgagagataaacctgaaacctaaaactggagaaggagagaaggacgaagattaaaaacccttagaaaaccctagattcttagtttgggagataatgtggcggtgacgatttgccgtgaaggaggagaaaaatttggtaagctgttttttttttttaccttgtctgtgtttagtctagtggta

SEQ ID NO: 35720 - DNA, 379 bp, Arabidopsis thaliana columbia
  unsure (1)..(379): unsure at all n locations
gcggcatctctagtagcttccgccaggttcctctaaagactggtcaagcaattgttagtgacatttaacgaacaagtcgtacgtgaacgtatcagaccacgtatcaagtcatacgacgaaggtcgaactcttaaggtcaacctatctacaacgaacaaaacagctaggatcgacttgacgaaccgcgcantgtcatttccaatggaacagatcacaatggtcccaatagctttgtcnacctctgttcccaatctcaaacatcccatttaccctggtgtacgggtcaactgggatgcgtcgaggagtctttattttcaccagtcatagggactttacacgcganatcatgtcaccctcntaatnatagttgcaacgttta

SEQ ID NO: 35721 - DNA, 460 bp, Arabidopsis thaliana columbia
tcctcaaaatccatttctttttcttcttttttgttagtaacagatgcgggtaagttgctccctcatcatgctatttcccctatccagctacgccacactcagatatatcactggatcgagtagtcctaaggaggctttctaagtataccaaccaatacgcgtcagaaaaccattgctgtattgcttagatgtatgtcccttctgataggatcagactgactcctcaaaagacaaagctcccgatggggtgacacaggtgagatcaactcggaaggtgccaagttctcggtttagccgctttggtaccggcatattgaagagcactgtcgggaaggtcttaccatctcgatcatctaatgaggtagaccttactgaatcgtgaggtcgctaggagtcgcgttgaacttatacgcaattggattgcgtcagtcgtttgggtaaatgcgcaaactgggcaatg

SEQ ID NO: 35722 - DNA, 527 bp, Arabidopsis thaliana columbia
tgttatccctgggtactctgtttctcagaggaaccaagagcatgcacgatttgattgttgttcatatctcttccgatactacggaagacgatctccgtctcttcatgcgcttgatccaccgctccggtgtcacttccaaatccgacgtcgttttactcttcaattcgggtacgagattcactgaaatgatcgaagaagagaacgactcgttcttaaaactcgttgatgttcatcggaattcgaattcgtcaaatcaaatcgactccgtttggggatttaatctcacgaaattcatgaagaagcaatcgaaatcatcatcgtctgagccaatttgggggaagaagacgcatcgagctaattacaacgatacgtcgtcgttgaataactcgaccgagtcaaccgagttgttgacacatggctcagtagtgggtttcgacgtgactgagttggatcctgaaaactcgctatccgggtttatggatcacgttccgataagtttgagaagatgggcgtgttacccaatgctg

SEQ ID NO: 35723 - DNA, 522 bp, Arabidopsis thaliana columbia
  unsure (1)..(522): unsure at all n locations
ctaaaaaccacaataatattgggtctctgtcaatggaattgaatttactgagaagagcagtggtcagctcaccggtctatcacaacatttataaaaacacatttaaagcttaaactccatatgacccactttctctctccctctatctctcaagctactactatatcctaaaagaaccaagatggcttcatcaagatatntcacattttcaccattgattggttccagtggatcaatttgattcattgaattgatagatatcgtgaattcaatacttataactattctatttcaggttcctattttcaccatttgcatgttctatgtctaaaatgtttatttagaccaaaatatccaactatacgtctcaatcggaatcattctattgcaccaatcaatttaacgacataaacatactaacataacattccacatgattaatggaggtggaggagaaataatgtacagaagcagacgagatgaatggtgaagagctaaagaaagccttcaacgccagtacga

SEQ ID NO: 35724 - DNA, 485 bp, Arabidopsis thaliana columbia
cgaattcaagtagataatcataaattgaagttatacttttcaagaaagaaattcgttttggttaaaattgtagtaaagtgaaatgataaacgtttgtgtgaagaaaatcgtaagaacaaggtaatatcaatttattggatgaaaatagtacaagcaatatatgcttcaagcacttttggagattgagacacaatgtttccacaagtcatcactcttcttcaagtattctgtttcgtgggcaattaacatgggtttatttgcaatatacttaataagcgtatcgtgacatacttttccttctttgacgagatcattgcaacaaggatcaggcatgtttccattttcaaagacagcagcgactatatccaacgcacacttaggagtgattttaacaagacaagtattccataataagtttgcttcagcttcttcgactgagaaaaccggaacaaacgcacacacctaagctacaacaatgaataacg

SEQ ID NO: 35725 - DNA, 479 bp, Arabidopsis thaliana columbia
accgagctcgaatgcgcttagggaaattctcagaaaatagatgattagtagatctaataatgactaggatgttaatgaaccgttcttgaactcaaatcattaggacagagtaactgatgttagcctacattactcactatgtctaataactatggattccgacgttagcctgcaaacccctaattctaaacatgcattattatcaagtttgataagttcaactaagtagatagaccgatcttagtacacatctaaaaacccggctcatctaatgatagttcttgtaaaatatgccttttcgaattgtacctaatacgtgagatcaagttttaggtgattaatttagaactagcattaagaacaaccaaatataaagaatcctcagattagtaatcctaaatcatacataaaatcagtaaaaatcaaggtatatcattgtcaccagaaataatttatcttttaaaaggtggtatgaatag

SEQ ID NO: 35726 - DNA, 399 bp, Arabidopsis thaliana columbia
gaaatcaaacatttttttcggatgtataaattacatgtagacaaggctcttcccatgacaacatgagcaataccactagtattagttcaatgttcttagtacagaactgataggaattactcagggccggctcaaactttttgaataccttgtgctgatttataaaaactgactttagttaatattggtttttaatttttgaaaattttggaccctaaaaccttaaagaaaattgaaaaaaaatttgaaaaaataattgaggactctgtgcttttgctcctctagcactcccctagagccggcactggaattactgatcgacttatcttatttgatacacacgtttgtttgttcggacttcggagtaatgtatatatatatatatatatatatatgtag

SEQ ID NO: 35727 - DNA, 767 bp, Arabidopsis thaliana columbia
caggtcgacgtcagactctagacttctctttcttgtatagtgatctttatcttagacaagtaaaagaagcattaagacacaccatgcttgtacatgaatctgtctttgaaagtcaggtgcgttttcttttgtaatgcttcttcatctttgttgtttcctgtttcctctcaagtttaagagtttgatactttttccatttcagatctgtgagcttcatcgtctgtatcggaagcagaaggagctgatgatggaaatggaggaaactcgacataataaggccttgtacttgaattctggtttgcctatccctagaacacactggatgagttcgagcatttccgcataccaaactaggaatttgcctcatgaagaagaaaacatttctagacttcttgtagataacaaggttgagaagtttgaaaagaagaaggtcttggatcttgaattaccggtttttgagtatagtgatatgcttgaagaagtccatgaagctcaaaactttttggaagagcaatctctgcaaaggatgtctctggattcgggtaagcagtcgagtaagctacaacttgatttgaatgaacctgccaagattgaggaacattcagattatgtgttcaatcagtttctaagttcagttatatcaaatgaaattggagaagagtctgatacaaagaatgagggagaaagtttagtaaaaggttccaatgggataaatgaagcgcaaggatctgtaaaatgtcgagaaggtaagaaaatggaacaatagg

SEQ ID NO: 35728 - DNA, 560 bp, Arabidopsis thaliana columbia
cataccaattaataaggagcattatgcacgactcttgtccaattggagtctcaacaagcataaggcctagggttaattattcaccagcaaattaaccctaagaagtcaaatgatggttcaagtggagtcaaagaccaacgagccgagtcaccatattgtggaaatatgactgttgcattctttttctcttatctagtgtttgtcagaatgggtttacctagaaaggcttttaacgagacaacatcaagtcatcaaggaatcatttacaaaataattgattcgaagatatcacaagtacatataggtgatgaacttgttgacagaccggctcaactactcgctaatctacttgctgaaccacttgctaatctacacgctgaactaccttttgttgtacataccaaatgaagctatacacaaggaaatcttacttattgtacattttgatgtgtctcaaagctttgtttggcagcctagagagtttctagatcacttagatgcttcactacaagctctaagatacaccaaaccacacttgatcaggcagatcaattaggagc

SEQ ID NO: 35729 - DNA, 492 bp, Arabidopsis thaliana columbia
gagagagctatgaaggtaatacaggaacatcacctagagatgaggagaataatcaatcttctgatgaacaagtgtctggaactcggagacgtcgttctagaagaagaactgtcattgatgatgatgatgaagaagaagaaccgtgatgctctgcagtttggaaatttggtctttggagtttatgataaaatgggggaaaccttgtagtaataaccccacttatgaaaccctattatgtaaaatttctttggagattgaaaaaagtttctactattgggaaacaaaatgttcaatatttcattaccgtttaaatatctttttgataatgactcttcaaacaacaaaatgtaaatctcttcaccatacaaaaagacaaaggaattgtaattaacatttgtcatagacaattatcttctctgcagctttacaacactaaaaagagcttgaaactgaagtaatttaagcagaggctgctggctctgaagttgctgc

SEQ ID NO: 35730 - DNA, 1207 bp, Arabidopsis thaliana columbia
  unsure (1)..(1207): unsure at all n locations
ctgcttagagagttttaggttcgttttcccacttaagccaaattggacaagatttggacgtttctgtatctctcttaaagctaaaaaaaagggcgaatttttccatggcgttgtcggagtttcagctagctctgagcttggtggtcttgttcttctagctgatttgatcgaaaccccatgttcttatgattttacacgacctaatccaaaactccaggtccttgattgattcttctctctctccagctccagattcttctgatttcttttgttatcatttgtttttgtaagatttgtatccgtttttgggttttgcttagctgattcttgctggatcgagagttgaataactctgcttttcttcaatctggttttttttttttgtttcatagaggagaaaggttgtggatttctcaggtggggatttgagaattagggttttctgattgggggttttcttattgatgttaccttcaccaaattgttgtcggagatctagatttggttcagttatggaataatggctcgtctcttgccatctctattcgtaattagcatcttcttcttcatccaaagactcctcctttcttcgttaatccatcgccagctattgaatctgaagcaaatctgagaatctaccgaactcacgcacctgtatattgcttacacggtagatatctcttctttttgtttccgtttttgttgaatcaactcttttttctattggaaagtttgatattttgcttctccatttgttaattcacctgttcattttctttttggtgcacgatctcttggctttcagagtttgtagttagtcgtagttgtgcaatcatagtaagtggtctcatcatatgttgttgcagagagaatatatatacttagtgttcttcttcttaatgtttttaactttgtgtatgcttttactctggtggatataggtactaaactcgtacgaatagtttctttttcacattgggtttcttgtatctctgcaaagaaagctagatatatggattgttttatatgggaactgcatatgtttattggctgattgcttctctttccctgccggttcagagctcacggagacggagtgcctattgttcagcgcctgtgncagcctgagcctttttgtctattgctgggtgaggcgttagctgactctatggacctggatttgcctcttgggcctggtcctgagtct

SEQ ID NO: 35731 - DNA, 762 bp, Arabidopsis thaliana columbia
ttttgctacgtatcgttattcattttatttaacttaacttgtggttgtggatgtacatgaatcacgacagagcctcacccccactctcgcttaggaaaaaaatgtctcaatatatctatctactcatatatatatagtaattaagtagtatagtaccatattgaagatttcttctgcatgtgacatttcagctttatccatgtcacaaaagcacatacctatcagttcattgaccatgctccacgctcctaaatatgtttcacgccgaaaaaaatagaatgttgatgacgctctttagctttctgacgtgttccgaggatttgttcattactattcaataccaatatttacctcataactcaaaataattaaaagattccaattcaatgagcaaattgtttcttgctcaagggtactttacttgctgaaaggttgcgtaaaatgaatatattttcatataacattgaactcaatatgtagagttatagagattatttcatcgattttgagccgtagataatgatgatttaagcttcgtaaatcatatcatggtaattttatcgactcaatagtcttctttccatcatgaggtcttccaaaaaaaaacttcaagtagtccgaatacacaatctttctataccgagccatctcattgttcttatctaacacctccggtaacggctcaataaccgaatcatgaaccggtccgcagaaaaccggaatggaaacccggctacaatacttattgacaccacacaatgc

SEQ ID NO: 35732 - DNA, 360 bp, Arabidopsis thaliana columbia
ccctagttatccgttatcacttcggcgttattattatttttactaaaagtgttgcaagataattttctttttataagatacttgtaatattttatttttctaaatctttgtggcatctaaaaaaaacgaaaaaaaaaacgatagataatcttattttgtgaattttcgttacaaataatatcttattgttataaaatatctgtaatattttatttgttaatatattttgaaaattaacatatattcttgaaatttatatgatatgtaatcatttatttttaatatttcagtgaatcatgtcaaaactcatgagctttgaatttggagctcttgatatcacgggagataactacttggcat

SEQ ID NO: 35733 - DNA, 333 bp, Arabidopsis thaliana columbia
gattgaaataataagaaaacaaggtaaaagacagcaggatgattgtgttgtaaacgattaaataaagagctaggaacatggtattctcagaaagctattggttagtagatctaatgaaagctaggttgttatcgaaccattcttaaactcaaactctaattatggaataaccggtcgcgttctgcgaaactccctatatctatagctaagaataaccggagaagccgaggcattatcaacctaaataagcattcttaacgagttcgattgtttaccgtagtagttaggccaatttttattacacacctaaaaaccaggctcatcaaataatcg

SEQ ID NO: 35734 - DNA, 610 bp, Arabidopsis thaliana columbia
  unsure (1)..(610): unsure at all n locations
tggaagtgtcagctagctgcgctactcaaccgagttgaatgggtagtgacgcggttacctcatcagttacccctacagttagcccgatagttactccggcggttacccgagcggttatcccaccggttaccccgacagttacccgaccacaaatgggcgacacatgtatggacagaagcaatgggaattcacagccattcgttcataagggcggttgtcagcggttttcttaccccaacgcctatatatgcgacaccttgggttacaatttcggaaaacacacacaacaaacacaaaattccagcgacatttaaaagagaaattgagaggataatacgattatgtctaaaggggcgagtgaactggatcaacggatccggggcagccctaggagactactggtcgtacgacaaggtgatgcataatcgtaccagccttagatcagatgatcttgagaatggctagggaattcggtttatgcgacttatctatgttataattaatgtgtgagcgatatatgatatgtgtgggagtaaacatggggagcacctagcatatgcatgatcgctaagtgtanacactgcaatcttatcttttgttgattttagga

SEQ ID NO: 35735 - DNA, 492 bp, Arabidopsis thaliana columbia
ttttagattttttatcgtttaatttaaatataatttataattatctaatcattcattcatgtaataaataattattttaagtattaaaatatttaccccgaacaacattttcaacaatgcatcatacacacacttcctaaacaatgtttgtcttaaaccaattaaataaagggtaatgttgggattctcgaaacctaattaaaaatttgatgattaaatttcatacatactctttaccctcggtgatttattatctacatatacatttttgcagtcactttgttaaataaatcctcaagttgagacttatttacagtgattgtcattggtatttaataattgtttttgataattaaaaagtaaatcttagaattaaatgtttgcatttaactactttcccacaatctctccacattaactacacaattagttactgaaataaaacttccaaaatatttaatatcatttaaacactacaaaattattattttt

SEQ ID NO: 35736 - DNA, 453 bp, Arabidopsis thaliana columbia
tggtaatgctagatctggtgaaattccaaagccgacagtatagtctcggatgaaagatcgatagaagtatatatgatcttagcttcatctaaactataagcagtggcggaggtagcatataaggaggggggtcaattgaccccatgaactttatatttttattattataaggtaagtttatatattaattagtagatattttgggttaagtttatagaatgacccccatgtcatgtgatcaatttctgtatttgaccccatacatattcattttccacaactttagttttgatttatcatttttgtcggctaaaaatctgtaacatctttcatattcattcgatctctttaattgaaatatcatagatcatggtaaacactacaactaatcaatctccacattatactagacattttgatagagaaacaatattttgaggatatgagatactt

SEQ ID NO: 35737 - DNA, 570 bp, Arabidopsis thaliana columbia
gtaacttcgtaggttcatacacctttaagacaagagcaaagatcaagtataaaggattagtaactaaagtaaaaggcttagtctcaagcaaatatgaaatcctaatggctaataactattgcaaaccggcaacggcgccaaattgatgtagcatttctatcaattaattatcgaaccacaatttgcaattaatcaactcaccaagaatacacacaattgcttaatctaagctaataaggtgactttgagtgttcctaatcttagtaacaatgcattatcaagcaaacaatgcaaaacaagataaaagaaagcaagaaacaaaagactaacaagtttcgaaagtaaacaaagcgggaaattaacaaattacttagtgataactaaagacgaattctcaggttaaggtaatcgattagaaatgataaagagatggattatggagcaacaaacaacttctaacaagcaatgatccttaggccatggaacactaaacaagactaatacatttccatgatattaatccttttactaatcaatcaatcatcaacaatttccaaaggcaatcaaatg

SEQ ID NO: 35738 - DNA, 474 bp, Arabidopsis thaliana columbia
ttgaaatcgatttatgtcataagatattttataggtaactatttcaactagtccatggaaataaaaattgcattcttgaaaacctgagacatggtaaaatctaatcaggttcacataatttttcttgactaaatcacatatcatatataattcatgtacttttaccaaatttagcaaaattatccccttattaacaacattaactagggaaaagaaaaactatagtaatctgtcattcatcagatctcgtatgttctatatcatcttcatccatgtaatttctttctagattacctcatttgcccacaaagacatcaaaagagaaattatgatggtcactacaaaacttaagaggcaaaatataacgtaaattatatatatgaaaggagctcaactctctcccacaacttgacacatcagcacatgagagcttgccactagacttattaaaataagtaaaatataattagtaat

SEQ ID NO: 35739 - DNA, 590 bp, Arabidopsis thaliana columbia
ttttgtattctatgtataaacgtttatttttctttgaatataatttaacattattttttaaaaaagaagattaatctgtgaatttacaagggtcaaaatatgtttgaagttctgcaaaattctcctacaacgcctctgagatctctctttattaagccttgcatttcctttttgtttcactagatatatgtatctcatgaaggactctgcttcattattttcatatttacctcctagttcgacaatgaattacacatttaaacaaaaaaagaaatctcctacatctttaaaggattgatttctttaataggaaagaatcaacaagagaagtaatatcgaaaaatcttgatttaattgagtttttaggattcttttaacatttaattacattatctactgttccaaacaaaatattgtaggctttaatggcctatgttaaaattgagacgctgtattgaatatacataatccattcttaatttgagacgactgaccatttgctacaagtattaaatccagaaatgaagctaagagatacatatgtcgtcacatcttcgtatagtgactagagtctaccgataattacaatg

SEQ ID NO: 35740 - DNA, 516 bp, Arabidopsis thaliana columbia
gaccggagagaggtataggagacaagtcgtcggtggcaatgatccttccaccaaccggcaatggttcatggctcaactatgatcggagaaatgtcgtttttgcaatgaacatatatgttttgttatctataatcgtattttaaaatcaagtggtcgtatatatatactctaatacttatagtcatgtggaaattttttcataagatgtacaacttacttacgatgatatattcaaacttagtaggaatttatttggttctatagcctatatatagttgactcactcaaaaataaccagagataaataataaaattgatgttttttggtaatatttatgaagtatgggccttatttataatcacacgctgaattctgaaaccttataattagaaaacgcattcaaaaaaaaaaaaaaataacaataagaaaatctatatagcctagtagaacggtcacaaaaacccacaaaagtatcaaaaactcgtaaaccgatcacgtttgagctcattttgttg

SEQ ID NO: 35741 - DNA, 540 bp, Arabidopsis thaliana columbia
ccgtaattgcatgctcttatagtaattaatctttcgttactaaatcagccgtaacaaggccgagttatcccataactaaggcgtctttgaatactcagctagccaaaaaagataactgagtcgtgttgaggaaataactcagccattttctcataatttagccacaatgttgtctgggttatgctcgaaattctcataactcagacaaatttcattaactcagccgtaacgtaggctagattatctcataactcagacaaattttataaatcagccataactataggctgagttatactcataagtccgttgttttctcataactcagccattttgtcagctgcaacatagcgtaacttagccgtaactgcctctttatcgccttacggctgtcagcaatttctgtcgtggcgacacggttttgctgatgtggcagtggcattctttataattacgttatttcatgtaacgtttagtaggggcacgatgggtatacaaaatggacaaaatatgacagtaataaaaaaaattttttataag

SEQ ID NO: 35742 - DNA, 452 bp, Arabidopsis thaliana columbia
cctttctactcgggatctctttctcggactatcctaaggctcggtgatttctagctcggactctctctctatctctccggttaagggttcggacgatctctctcctctccgggtttaaggttcagacgatctctctttctctcttggtttgggcagtgttttggtgggaaagcttctaaggtttaactacaagggttaaggtcctatttataggctcaagattcggacatgaggagtgggacgagacttggtcaccaagtcggctttgggacgaaacttgctcaccatgttgcctcacctaggtggattcggctccaagttgtctaaggcgtgggctcgaagttggcttgcatggctcgggacaaaacttgctcactaagtcggctctgcgcgaatggattcggccccatgttttcgagatttgggctctactctggctttcacagattata

SEQ ID NO: 35743 - DNA, 320 bp, Arabidopsis thaliana columbia
gatgagctcttgcgaacaatcccgtcttatcgatcacctgcctcccgacatcgttggcgtggcaacacataccagttaaaacacgttcgagcacagatccagctagtgaaatagatccagaactttacgtgtttagagaatagaagccatagccagcctcacacaagtaacctaggccagcctcgaacggctaagaaacccaattcctgcttgcacgttcttgcctacctcaaggcacccacagagtaaaccaaacacgatgttcgcacctagaaagcagcactagtccgcctcatcgacatattgcacaagtctacttc

SEQ ID NO: 35744 - DNA, 209 bp, Arabidopsis thaliana columbia
ctagtaactgtgctctaaaggttgctggagctgaggaagagtaacatcatatattaggttgatcaactagttctggaggagttagttcgagaaagatttcctaaattgggtgagttccctcaaagttttttgtttcatcttgtagaatgttcacagttagtactaagctctgcaactgttctatgtctacaggtcatcatctggattat

SEQ ID NO: 35745 - DNA, 522 bp, Arabidopsis thaliana columbia
atccggtttgataagttcagctaagtatctaaatcagacctatcctcatttagctaattaagcccatctagttccggcaataagatgcctctcgaatcttacctattaacttaggatcaagttctagttaggtactctagaactagcattaaaaacaatcaaagataaagaactataaatataaatcttaacaggttatcgatatactaattcatctaaatccctaatgaaaaacactaaacccagctaggggattactcaaacatgatcatcgaaacataaaacatgtttgtataagattgcatataagaaatcaaaagaagaatagagtttaggaaaagatcttttctctacaaggttttgaaatctctcaagaactctccaaaaatctccttgaattgtagggcaaaagtagaagacctaaaaataaagctttggtctaaacaatgagcttttaaaatatattatatgttctcaaaaacgtgcagggactaattctgtaaatagaaaaatctttaggtg

SEQ ID NO: 35746 - DNA, 628 bp, Arabidopsis thaliana columbia
ctatttgtgattagtcaccataacacctggatataagagaatatcatgaaatcagcttatgtggttgaggatcacgaggctcccacggtccaaccaatcacatcgactcaactacatctcgaatctgtcgtggtttgccaccatgggaagttcattgttttttgtccagaaaaataaataaaaatgttgtaatctgtagaaaacttccacgtagctaccgtttacgattcatctaatttttctctatattttctattacaatcattgaagcataatagatcccaagttttataaatataacgtgtgtttcagtcatttgtatatttttatatgaagatgcgatattttaaggaaaaatcaaatcaaaaatttgaaaagaaaaatgaatggtggtatgattccatgatataaagaatatataagtagtccaaaataaaattatttggccgcgtccaaatatttatagccaccaaaattggcaccacttggtcgctcctctttatcccctcattctttgatttttttttaatgatgaaatttgtttttttgggttaaatattgatttattggaggtgtattataaaatatgatttacagttacaatttatggtatggtcatggcatgtga

SEQ ID NO: 35747 - DNA, 427 bp, Arabidopsis thaliana columbia
tcaaccaaattctgcatggattaaattagcaacttctgatcatatctcatatgtctgcatcacagccaattagattgacaccctaagtactacaacgacatgatagtgcattacagattatcctcgactagattcctaatcgaattacgtcgatattgaataccttattgactttgagacaactccaccattgtgctagataaaataggcctttttaaaactttgaagataaaaaacggcccataaacgtcgtgaaaaagcctctcgctgaaacagaaggtctctgtaagtgtctaatcgcgcgatgaacttgataacggcgatgaccggagctaaattgcggccataccatgctacgatgcacttgctgcactccactttggcctttcacggcggaatagccttctctccttaggaaacagcaccg

SEQ ID NO: 35748 - DNA, 539 bp, Arabidopsis thaliana columbia
tgctctaaagacaacatatccacagccataaagccttttggagaaaaaaaaaaaagtacgagcacaagagcctgatcatggctccttctatcgaagtcgcctcgccaacccctgcgtctgccccggttgaggcgaaaggcgagtctcagaaagccactgcatcgggctacatccgtgaaccactaaagtacagcggctcactcgacgagtataaaagtttcgacgtcacgcccattatcggacgcgaattttctgatctgcagctgactgatatcctccacgatgaccaaaagctccgcgacctggccatcaccggtaggctgcgctgttgcctccagatctatagagcgcacagaacttacaaagcctgtcgcagtttctcgccgcggcgtcgtcttcttccgcaaccagagtatcaactctgacgagcaaaaggttctgggccagaaacttggtgagttgacggggaagcctgccacgtccaaggtcagtttttcctagggtcgaccgcagaaccctaaactgatattgacatgata

SEQ ID NO: 35749 - DNA, 606 bp, Arabidopsis thaliana columbia
tccaggagcactccaagtatgaatatgagaatttaagcgaaagacaagagttggaaatgaccattagtgacagagtcacgtgtaagttagaggagtctagatacgagacaaatgaaactcttgagccgagcaaggtgggcgaagatggatctcttgtttctttcgagaaggtgagcgaggcattcgaaacaatcatagaaggcaagacaggtgaagagagactggtatctcatcaaatggattctccaaacgagaatgtagaaaattcttatggaacattagaaccggtttatctagaagaaagcgggtttgcaggtgaaagaacatgggaagggacaatagaagatagagcggggttacatttggaggaatatgaaagcaactatgagaattacagcagaccatttgaatggacttcagaaacagctccaacatttcgcatgcatgattatgagctagggacaatacttgaaccagacgagtatgctgacggaagatcagaatcaagttcacggggctccttcaatgacgatggaggttcagaagagagggtcgtttttcatgagtctcaagttgctatacctgagcagtccactatgagtatga

SEQ ID NO: 35750 - DNA, 909 bp, Arabidopsis thaliana columbia
ttttttgttaactgagcagagcatgttaatgacatgtttgtgtagtactgtattattttggacactatacgagataatgcttttcctttatgaataaaacaaagtaagcgatttgaaaaaaaggtttctatagtctatttctgcttgtcatatgaatatataacgcataacttcgattcacaatcaacctataaaagaaaaagtatgtaagttggtaaatgttttatcctttaaagaacgagtaatacagaacatgttcataattaaattccaaaaaaataaaattcttatacgtctacatgtgaaataaatattacacaaacttatgtcggttaaagcttaaagattcgcccacacattgaagctaaattcgcatgaaaccaagagaatatctttatttatactatatcatacaaaaatatgtagtatttattacgtatcccttttgtttgtcggtttgtggattagatcaacatagtctatcactaatcacttatataatatcacaaattcccttttgtttatcatcttctaacaatttctaatcttttaaatataaagttgcatggttgcgagattttaatactaattgtataaacgaactaaataaactctaatctctaagttagttccatcaaagctaacttaattgtcaaaaaggtctcaatcagattaaaaaacactaaatgaaattaaatattttactaggggctcccatagatatgcaaaaagaaagctctgaaatacccaaaacaccctttcggctttacacgttattaaacaaaacgacaaaaattagccaaagggtaacaaagtcaacaaaacataagttttcagtttttgcgattctctctgcttcagtaagcgaaaccggcctgcttggtttctcggatctcgacggtacgcgac

SEQ ID NO: 35751 - DNA, 697 bp, Arabidopsis thaliana columbia
  unsure (1)..(697): unsure at all n locations
tccccacgctaatttgtgaatttagaaagagcatacttacacttagactctccaattgaagcagaactccatcttctcgaaagaccacttgaagatctagaagcgaccaactgactatcttctcgtttatgattgattggaggtaagcaactactaaccttcttcaaagagagatctctttcctgagaactaaatctctgtgcaaaaaggaaaagcaagcacagaaatatgaaatcgataatcagaagaagagacgatctatagctaagtagcaaacctgatcgttgatgaggagatcttcgatagaactctgagtcatctgagaaaaaccaccacaaccacgctgagacgaagaaggtccctgagagaagggactgctgtgactgttgagatcgaagctgctgagatgcttgtggatctgctaatctccttttaaaataagattcgcgcaacacagatacacaaattcgattcagaaaacataatcagtagccaaaacgagagaaattgcgcccaatcaaacgcacttcagatttcattgtttaaacataaattcgatagagaaaacataatcagtagccaaaacgagagaaatactatattttcttcttaaataattttattgtcacgtgggtcacctgacctcactacataataagtatcactttttacatgtanagtatgtagtttttttaga

SEQ ID NO: 35752 - DNA, 589 bp, Arabidopsis thaliana
  unsure (1)..(589): unsure at all n locations
tcccttttttggtatccataataacgagtccatttaaatatatccattcagaaacctttctactgatccgtatctattctatatatcatgtcaataataacagaagattcaattaatcgtgttttgtaaagaaaccaaagttccatgtccataaggtcttgaaggttggaggtctctgcaaactgaaagaaaaatcaacaaacaattttttggtatccataataacgaatccatttaaatatatccattcagaaacctttttactgatctatatctattctatatagcatgtccatgataacaggagattcgattaactgaaatctcgatgctacgtagatgaaacgagtttgacacatgagagaaagcaaaaatcaaatcaagccgctgttgttgaagaagaagaagtttcttttcattttttacaaagatgaagagagagagagagggagagagagggagagagagagagggagagagagagagagagaggagagagaaagaaaaaaaacgtggattaagagaatattttagttagaagttattttagtanaaaaccataaagaaagtgtctagtcttttgaaagtg

SEQ ID NO: 35753 - DNA, 582 bp, Arabidopsis thaliana columbia
ctaccctttgcactcaaggtatttttttttctcattcttatcttggatcaaaccactctttcttttctttgactcttattctaaggagaagtttcttttactttgatggatctagtggacttttggttttctttgacaactctgactcttgtcctaacactttcttccaagctcaatcctgaaacaggcctcacaatcgtgatctttactatattacggtgagaaaattataggttcggacatttgttttcaatattttgcatgtatccaagctcttataaacaagataggatattcctacatagctggtgggaccccaacaaatggatcatgaagtcttcaaaaaagaatagatacgattgcattgcatgtagtaacagatgcgatcataccagcactaatgcaccagataccatcagaaatccgcagttaagcgtgcttgggcgagagtagtactacgacgtgtgacctccaggaaagtccttgtgttgcataactcttttgtgttcgattttctcatattttttgttaaaaatgtattactctataacttttagaccgtgagccaaacttggcatgtga

SEQ ID NO: 35754 - DNA, 286 bp, Arabidopsis thaliana columbia
ctctagtaacgagataaacacgaaacttctgcttagaaaggaagcgatcgcaaagggagccaaaggtgactagagaaatctaagggagcgaggagaggcaaaggattaggagataaactacaatccaaaaccaagtaaacttgacggcaaagaaacgttgaaaggctcaagagcagcaacaaactttaagcgcatgaaaaagcagagaagtcacctcattctccgagccatagcgtatatcaaccaaattaggcattgctaacatcttctctgaagtcacaaaacc

SEQ ID NO: 35755 - DNA, 470 bp, Arabidopsis thaliana columbia
tagtttttgtatgttttgatggacaacaatgaaaaattgttgtccctctaatcattttttttttttggctgttcgttttttttgtttttctcaaagaacagaaatatcagaatggcagagagatcgatcaacccattaaccataaaatcacagcactgtttttattatattaaaattgtcagactcaatatttaaccttctttcttaaaaacaaaaaatagcgcagatttaatctgacacctgcaaaatatttcattaaatattttaaatttctttaaataataaataactgtttgttatttctcttcatctcctttctctttcaatgtccgttggtaaaagacgaaagtttcagacataacatctcttcccatctctctcccctctaagcaattaagcagacaagacactgatgatatgagacgaagagaatgaagtcttatcactcatcctttcctcttatgaatctc

SEQ ID NO: 35756 - DNA, 366 bp, Arabidopsis thaliana columbia
tctaatgaaacttgatcggtggtgaaatcaatgtttggacaaaaaggagaaaataatggatcattctcacccaaactatggtggttaccagagagccactttgcgtgactttcaaaacaaattttttctcgatatttaaacttttaactttaaacatatatatatatatatatatatatatattaataaatgtataacaaagatgtctacaagagtaagagtagtattacaattaaccattagaagctattcttgttgcttgagaattggaatgaaatatttggaaccaaactgtaagataaaatgtctttgagatggagagttcacagaaaagtggccatacggttcatgttgaaagctgacctg

SEQ ID NO: 35757 - DNA, 601 bp, Arabidopsis thaliana columbia
  unsure (1)..(601): unsure at all n locations
ctctaatcttttttaatgatgggtaatttaggtggtgatgaaaccgcatggtgaagtgctgtttgaatagtaacaaaagaaattacatatatatgtgtatgtatatatattttgttagtatttgaaccgcattgcatttaatccataattaaccgatcgtcttcattccgagcctaatttgtaggtgtattatatatactttttgtttggtatttgtaagtgttcatatatactgcgtatttatttttgtgattgttattttttttcattttgttttttatttgtgtcttatgtctgtcatatgacttaatattgtcgaataaagcttttcatatcagtatcaaatttttattttacttttgttgtaatcctaattgtttaactttaactaatttgtgattagttataaatcaagtttcattaatgttttgtcaattttttgatatgtatttttttatatttgtttgttatttcaaaaatgttttggcaagaaatatcattttattctttatttaaaatataaggaatgtaataaaatgtgttttatagtagttttctttatacagagttgtanaggactatagaagacaccattttactt

SEQ ID NO: 35758 - DNA, 611 bp, Arabidopsis thaliana columbia
tagtaacgcgcgccagtgtgctctaaaggttggagatacacagcacagaggcaccatggcaggtagccatgatcttcttggggagcaaagaaaggatgccgacgaaaccgtaccgctgctacccctgcagttatcagtaggcaggacagtactctgggagatcttttgcgctggataaatgggaaatggtggtatcccgtgtagaacctcagctcgagcggataaagcattatgttccgcgaccccactcatctcaatggcgtgcgacaatacggtatatgaaaatcttctccaagaccgttctaattaacaatacctctccgaagtgggcttttgctctaaagtcaacccataagtgagttggacggacaactatattaggcagctgcccacggcgggaaccgacgagaacactgtatagaggcacggtctagtgtcagttaccactgacttttgatagcaacatcgccgaagttgaacattcctttctcaaagctcaccatttccacttaaacgatgcttgcgctgctgatatcagctccctcggcatctcgtgctcgtaccagtccagcgtctgtctttcactagtccctttatctgagtaacatgat

SEQ ID NO: 35759 - DNA, 478 bp, Arabidopsis thaliana columbia
tacagataagaatctaaacgaacatggtttaaactcaaatcaatgacaagaaaattcgtattttggttctttgatatttttaaaatttaaatggagtggttagtatatcagcatttcatgagatttaaggtcaccaaatccccgcctaactttgattataaatttaaaaaatctattttgactaccagtcccagtttatattttattcttaaaccttaacgaaaaaatatgacattaatttatgtttaattaaatagtgacagaattgataacactaattgtgttagttagctagcatttaattacctcttttacttcctcttctgtaattctcccatcttcattcttgtccactctgtaaaaatgattaattatgtaattaattatcttcaatgaaagtcaaaggtttatatttaaaaacaatagttacaaaaattagaacatacgcatcgtaaggaacaataatttctgcacacat

SEQ ID NO: 35760 - DNA, 531 bp, Arabidopsis thaliana columbia
atggattcagcagcagttcaaaaggttaacctattcgggaatcgccggccaatttaaaccgcaaggtaaggttccgttatttgcttcctatatttgaagccctctactcgtgtctcgtgattcctaatagacatacaattataatccataactaatgatgtcatatatatgttcttttagcgatgagcttaattactaaatcgaatttggttgtttagactttagagtatatataaggaacgatgtggaattctcttggggttaagatgcaaattgctcgtgtcttgtagtattcactgttgattgtgtaattaaacaataaatttatactaaaggatttagacaaattcacttttctcttagctcgcgaatgatcaaaagaaaagaacaaggttacttgggtaaaaagttagggtttgctctgtaaagagtgatctcttgtataaggttaaagatggtcgtaatggaggataaaactcctctatttatacaataaactggtcatgtcaaaatatgataaacttctaatta

SEQ ID NO: 35761 - DNA, 464 bp, Arabidopsis thaliana columbia
taaccgaccgacttcgtcctttcctcctgatcaagaaaactcgtctcctacaaaaatcccagaagacaagagattggttcttcttttgcatcattcttacaaaatccccaaaatcattcgaaacgcctgagtattctccttgactctaagaaataaatttctgaatggatgcatcgtcttcaccgtctccttccgaggaaagcttgaagcttgagcttgatgatcttcagaaacagctgaacaaaaagctgagattcgaagcatccgtttgttctattcataatcttctccgtgatcactactcttcttcctctccttctctccgcaaacaggttggtttttattcttagattttcggatcaatagattcaaaattattcggaattgttagggtttatgcctgcgttgacgtttactcattgcttatgtctgatgatgggttaacttttgaggattgaatcagg

SEQ ID NO: 35762 - DNA, 322 bp, Arabidopsis thaliana columbia
ccttacatagtcttgtagtcgatcgacactggtttcggcccagagatgtccctgacgcttacaagtttacagaagtttacatttgccccataatacttccctatttgcattgttagtccctggacgtttttaggtcatatatatagttttagaggtcattgttgagatctaagttcttttctatcaagttttccctgagagacataagctattcatcccttgtgttcacagattcattcagttttcaatacagtgaagagatcctttttaactctcttctttatcgatgtctttatgctttcttacttgaatatgttgcttg

SEQ ID NO: 35763 - DNA, 493 bp, Arabidopsis thaliana columbia
tattgtggacatgcagatatcaaacctaccgggagaattgataatcaatgcaagcggatgtgttcggcaacgtatgggaacggtaaatgtgccgcagactgtagaagtgatggtttctcatccggacaatgttttacttctccacctttcgacaatagatgttgttgcaacaattgatcgaaatcgatcttgtttttgcattgatctatgttttctttttttctgttgttgacttgccataatacgcaaatggaataaaactataactttactattttatgctttcaaaaaactaaaagtacgagctattattagtctatcaccatgcacatgagtcgatttaatttgcagcccactcttattcctcgtatcatattagtcacttactacgacaagtttaactttggaaacctccaacaaacctatttgagactatgtggtttcgatatgattagggtttagagttaaagagtggcatcagataccgctgttg

SEQ ID NO: 35764 - DNA, 514 bp, Arabidopsis thaliana columbia
gattacatttgacttttaaatcatataaattatcttatctatttgtttttccaatttgctcttttcttctttaaccaaaaaaccaaaaaaaaaaaaaaaaaattgctcttttcttttcatttgattctactataggccaattaaagttgctggttaccgcaataacgcggtacgtttttccgtttgtagttaattcggtttataatccagaaatccgaaccggaaaattgaattaaaccaaacaagagggactcctaacaagtctgattcaggttgagatcagagacttctcttttgcgttatcttttgcagtctatgatacaatattacaatctacctggtttcacatcgaatgttgagatcacgagagaagacacaccagatacagagatctagaaagaaccatatgaaaaaagtgggataacaaacatagcaaaggtttgagattaaccagataaatgaatgtttggttaacttaaccagagtcatattccaaaagaagcagcacatttga

SEQ ID NO: 35765 - DNA, 196 bp, Arabidopsis thaliana columbia
ctcatgttgcttatttggagatgatgatgattatggcgtctaggatgagaacataccgcttattcaagaagacacacatagactgactatcgttcatatggattggagacatgtctcagtgagttctctcaatctatgatgttttggttcactgtggccttctcagacgttaaactctttgctatggttatagaac

SEQ ID NO: 35766 - DNA, 767 bp, Arabidopsis thaliana columbia
ccatattctgcagcttggtggacccactgtcagtacgatgaccacttcatctatgcctgctcttcaagctccttacccttcaggtacattttactgtcttacgcaccataatgttattctctgactgttatctcaaatgtctcggctactaatggtttagatgctattagttatgtctcctttgaattatgtttgtcaggtataccaggccctgctcccgtacagtcgcatatcattgtccactcccctcaatttatgcagagtaccgcttctgaccaaacaacaaggtgagaatcaatacaacgctttctttactttgggtgtagtagtgatgaattatgcacatttgtctttgttccactgctaatatgatactaatggtttcagttattcttgaagactgaagagaaaaggaagttaagttagtgaaactgctactggaggtgttgcagaagaggcttcctgttttattaagtcttgcacgttatttatcttgcatccttaaggtatgcgtttcttattcggcgttattgtaaaagcaaaacagaggatggtcatcatcgtaatgcgttgatctcgttaaccttgggatcttattgctgtataggttatgtaaaatagtcttgctcactgggaaggcgcacgcagaaggacaaaaaaaaagcaaaggaaattggagtgtcagggtttatgcttccgttttctacccatccatcaatgtgtataaaacacagcccaaaaaagctgctggctcgagcttgggttga

SEQ ID NO: 35767 - DNA, 562 bp, Arabidopsis thaliana columbia
gaaaaatatattttgtaaactaataaaaaattgttctatacgattttatttggtcttaccctcttggtaaagtaactaaagtagactaactcaactctcttctagtcttcttcttcgaactctttttttaagaccaaaaaaaaacacacacaaagagatgtcttttgtctgactccataatcacaccatcaccaagaagaagaagatctaggttttgcatctctcgtcattacaatggagcgagcacgaaccgaaagccctagctacttccgtcaatggagcggcgattcaggtaccaccaatgccgccgccgtagctccttcttctccggcgcgtcatcaccacgctcgatcttcttccgtcactaatatgtctaacgtcaaacgagctcaaaacgttgctgctaaagccgctgctcagagacttgctaaagtcatggcttctcagaccaacaatgatgacgacgatgacgatgatgatgatgaagtcggtggtgatgatttaggtttccgatatggtgctcctctcctctttccttcactagaaatccttcttccacaat

SEQ ID NO: 35768 - DNA, 590 bp, Arabidopsis thaliana columbia
gcaatcatactaataattatatcacgtgtagtgttactattatgcgacttgcaaaaagttacgaattttgtgtgatatttgggttttgagagaataattaaacacacagaaaatgaaaggatccagattaagttactctgctaccaattaattaaataagttaattatatcactatcgtctttcttcggcttcactgaaaatgctaaaacaaacaccacataaaaagaccacagccttttcaagtaggagcggtgctaatcaattaatataatactcagctaattatacattctctaattaaatactagaaaacatatactttataattaaccgtagtatttctcgactttgagaacactatagaataaatgaataaaacggataattattgaagataaatatgaaactcaatttttttttgggggtctaatgttaaattatgaaactcatgattaatagctaaatacagaaaagaggagatttcttagggctttctttctataggataataccagatttaaacaagacaatctttaatccgggtccccacatcaaaagctatattgtataccctctttagtgaaattat

SEQ ID NO: 35769 - DNA, 514 bp, Arabidopsis thaliana columbia
tcttggtttaatactgattcattttaagtgtaagctaagcttctcatttttgataagttagttcatacaatgcctcacatctactttaaggcctgttactctcagggagtgaagtggttctccgaattccaatcaacacgaagatactaacgcagtttccatgtcgatgccgggtttccagtctcatcattatgcaccaggaggaagaagcttcatgaacaataacaataactcacaacctttggtaggagttcctatcatggcacctccaatttcaatccttcctcctccaggttccattgtagggactactgatattaggtacccactagtcatcatatcatacagaaactctttctacattttcatagttgactagagacttatttttgtcagatcttcttccaagccaataggttcacctgcgcagttgacgatcttttatgccggttcagtttgtgtttacgatgacatatctcctgaaaaggtatctcaatcattttcttccatatat

SEQ ID NO: 35770 - DNA, 373 bp, Arabidopsis thaliana columbia
tgggttgttcttcagattcctcaatctccagcttctgcaaggaaaagaaacataaaatggatttagctttggataagacattaacaggggtaagatttgtagtccagaagggtataacacaatgtaagatttgtaagtaaaactatacaccaagagtaaaagaaaggtcaagggatacaaaaacaaattaaagcaaaccatggattattaccacatggcatctaccagttgagttctcttaaaatttgacaggaacattaaatttctcataaacagttgtaaaatcttgagaaaaccataaacaaccattgcattttcattttgatactgtaaattcactttctccatgaaactaaaaaaggtgaatgaatat

SEQ ID NO: 35771 - DNA, 467 bp, Arabidopsis thaliana columbia
ttctgatgttggtgcagcaagatctgacgtagtaggagatgggcctgagcttggacatacgagggtgaggttaaggctgcctaggtctcagataacaaagttaatggaagagagccatgatgcttcggaagtggcagcgaagattatcagtgcttatatggagagttccggtgggatacaaggcggtagggataacgatggccttcgccagagacttggaaattgcggagataaacaaccattacaaagcacgagaggtaaatgtccgagaaaattacatgatcgaaatacatttgaagttatcaatcctaaggtcttatatatagcataagtgcataactaaaacaaaggtcttatagcatagctaaatatttgaaattacgttttttttccaacaacatgcattttatccgatttgaatataaatggtgacacatcaacaaagaaactattacaaaccaataaac

SEQ ID NO: 35772 - DNA, 396 bp, Arabidopsis thaliana columbia
gactaaactatattccaggattactaagggtcggttatatctgattgcgtctggtgtatgtggatagaaatatagatattcagtttctatctacatggaaatattcagagacatcccgtgcagtaccaagtttatcaaggtttgtctattagacactactaggctatataagatgagatcacatgtatttggcgatattctgtgatatccaattcactaaatggccacattttctattcaaaaccaacaaaattctaaccttacatgcacttttacgttacgatgcttttagcagaaatttgcaattgcatgagtgttaaaaaagaatataatgggaaaagatgtttgtttagatggctaataggttctcctttgatttattaatgtgagctgatc

SEQ ID NO: 35773 - DNA, 585 bp, Arabidopsis thaliana columbia
ccagtgtgctctaaagagacgatgtggcccctccacagcggcattcgtcactcgcaccccccccggggcactgtagcccggggccggcgggagaggcgtggtgtcagttgacaggatgccccccggcgggctgccctcgccgctgaggggagagccgacgtgagaacggcccaaagacgcccttgttcggctgatcgggcgaatctgcaggcccagtttgtatgggacattttctgccaccgcctttgccccatacaaactgggcccccacgaacgactttcgcacggccaaacgtttgcatccatttccgtactccaactggggtcggtggatatatgtagggagcaagtagtctggcggccgaaacgagccggacgaacctccgtctacatccttccatacttggcaggctacctgtccgagctgatggtcttgaaccccgcggttaggcttcagcaaggcccgtagccaagcacgtcgggatggaccctgggcctaaacccccggagcgtcctcccccggcgtgtcaagcctggagccctacgtgtgctgggcccagcatggtctgggtcggtgtggattct

SEQ ID NO: 35774 - DNA, 358 bp, Arabidopsis thaliana columbia
  unsure (1)..(358): unsure at all n locations
nnnnnnnnnnnctaaagtttagaggaccacggaggctcagtgtctacaataataattcgatatgggtaagattagacactttggcctcgttcaataatgaagcttgtgttcgtgtaatcttgattaatcaagaaattctacatcaaattagtcaacaacaaatgtcaaattcatgttagatatcttaaacacaaaaaaacgagaacgtaagaaattggtaataacttttaacatgtgggtttgttgtttgagtaacatgtgattgtgtggtttgtaataactagttgtagcaataatatggccacaaaaatgaagaaacatactcatggatttatagtgttgagcacattcattagat

SEQ ID NO: 35775 - DNA, 512 bp, Arabidopsis thaliana
  unsure (1)..(512): unsure at all n locations
agtaacgtccgccagtgtgctctaaagaaagatgaaatgaaacagcgacagcgatagaatccaagaatgatagtgaataaccccaagccataatcacacgcaatgttcgccccgatgccccgtacccaaatcataccatgattttgtgttttcttagtatacacgatcataacacagactctctaaagcatgtcaagatgccggtccctttcccttatctcccgtggagtcatcagccgttggccttcggcggtctccaccatactgatgatgagggttctggttgtgatggtgattatgatggttgtggtgatgatggtggttgttagcggccttctcttgtcgagcctgatcaatagcggacgtnatgggcaatgctgtcatcgtggctcttccagacaatgttggtgtctgcggggaaggcgagcaaccgtttaatggtctctctgtatttagttaataggtaaaattggtccgcagtagaatatgcttaacgcacctgatcttgatgt

SEQ ID NO: 35776 - DNA, 257 bp, Arabidopsis thaliana columbia
taactaacacgtatattttttaaaaaactaaataaacagaaaatatgtcgttaaatgtcgcttaccattaatcaatcattgatcgggctcaaatagtaaacattgaactaaattaaattatactctgttatatatatatatatatatatatatatatatgtgtctttcattttttaatataggctattataaagatctagttgggacgctcaaaatttgtatcgtacaaggttgacacgctgtgtttagggattgtt

SEQ ID NO: 35777 - DNA, 749 bp, Arabidopsis thaliana columbia
tgttagtcttgatgagttttatttataccaggttgtggattaattcaaggagacacaaagatacgaatatcaaatcaggtgcagtcaccaccactatgcagatggctgatcaacagcagacaggggagaattcttctgctcttgattctagagctgaagtagaaactggttataccacagtgagtaactcaacaacattggatggactaaacaagcagacagttccctcagttcaagcatctggcagtgtgtctttggagcaccaggctcccacagatgttacgtcgcagtggaagatgattctgcatgaggagagcaatcagtattattactggaatacagaaactggagaaacttcgtgggaattgcctacagttttgactcaaactacctttgcatatgggactgggtacaatgagtctgggcccatggttacagatgcttccaccttgatttcaagtgttgaaccaagctatttcgtacccgtgcaaaatagtttcacaggaactgactattctacttttccaactgttgagctggatgggagaaacaaaagtgaagatcgtatatgtcaaaagtttaggaactgatggtcatcaagttgaatgtcggatagactctgttgttagttgtcaggaggacctttcaaggccaggaaattcagatcatgtgcatacttattttgatgcaggagctgctactgacctcccatctcgcttgttgagtcaaatcgaaagcttactggagaa

SEQ ID NO: 35778 - DNA, 559 bp, Arabidopsis thaliana columbia
tccaatctgttaattgttctgtactcgtcgtggtggaataggagcaatgtcgacttcgccttccattgctaaggcaatcacaacaagattaatcgaagaacaaacacgattttaccaatgagagaattagggatttggtttgagagaattagggattttgagagaattagggattgagttttcgatttgggcgttttgatttgtttcgttaggtttgaaacgacggcgttttggtcttaacagaattcattaacgttctcttaacggggttaatcagcgagttaacgtctcgggattttggccaggtcaacgttttatttctgttaaaatggctggtcaacgtatttttcatgtttattttggccgacgtcagagttcacgtataaaatgaccactttttgaaagttcgcgtataaaacaacatttttcccattataattgggtttagttcctcaagaaaatcggttaaatgaataataaaccgataaacccaagatcgtgggtttctaaatctataactattaattcgaaaaatgtatactgtatattgaaatttttg

SEQ ID NO: 35779 - DNA, 535 bp, Arabidopsis thaliana columbia
cttatattgaaatgagctactgactctggccaacaagttctggttaacaacttgcattatcaatcacatcttctttcattgttaataggtttagctacatcatctagtcttaagaggatacaccaatctcatctcatcttcacctgactatgaagaaaacagaacaaacatcactctgtatcaaaattttgttgcactctgattgtctttagctaccaattccataaccatccagaatttgcaatcacataacaacagcacactcaaaccaaagtgagattctttaatagtaaaatcttatatccatgatcagatgatcttgaactctgtgagtatacaaatacatacattcttaaaacaaaagcatacacatttcaataacaaaagcaacaattttcacaatctctcaagtctttcttaatccttaggccaaacactaaccttctccttctcaatcttgacaaacatagcagaaacagccgcaacgaaatagatctgaagaaacaccacagaaggcgtgtggtaattaacacac

SEQ ID NO: 35780 - DNA, 651 bp, Arabidopsis thaliana columbia
cctttgatgagttttgattgagttgatcgaattgttgccagtagagacagttgttggatcacacctgaaagctgctgtcacaatgaaggctttaaatggttataactggaaactgtttttttttttacatcttctgtttatatatcatctctactttttggatttgctttattttctctaatattgctaacttggagatcttatatatatatatcaggtgcaacgttctctagatgtgatgcttttaattcattgataaagtggaagacggggagtgagtcttttgttattgttaatgcaacatctgagatgatgatgttggacgaactaagaagcatggactccagccctccttgttcacgggcttctatatatactgcatctactggccgcacagtagtagaagcaactctggcaaaagagttccattattttgataagtctttgagtgaatcaatagatttgaaagcaactttaactatcggggcctatctgccactttctgtcagacaagatagtgacgggaatcatcatggtggatattggtttgataaggcacaagaggaaactgattttggtgttagtaactatatcttgtactggtacatatgttgacgtatcatctgggtggactgaaagtgggatgcaatg

SEQ ID NO: 35781 - DNA, 471 bp, Arabidopsis thaliana columbia
tcgtttaagaagcataagttagtggcagataatgatttacaagggattttaaaaagggtatgcatggtttacaaccgtttttaggcataagtaagtagcatagaataatttacaagagattttaaaagcttaaagaagtgttaaacacgtttacaagggattttaaaagcataagtaagtgtcataaaacgatttacaagagattttagaagtgtttgcatggtttacaatcgtttttaaaacataagtaagtggcatagaatattttacaagggattttaaaaccttttctaagggttaaacatgatttacaatcgtttttttaagcataagtaagtggaatagaataatttacaagggattttaaaagcttttagaagggttaaacatgatttacaatcgtttttaaagcataagtaagtgtcatagaatgatttacaagggattttaaaagtgtttgcatgatttaca

SEQ ID NO: 35782 - DNA, 554 bp, Arabidopsis thaliana columbia
ccatcgaatcatcctcaccatttacttcattagaagcagttgcagagttttctaaaatattaacagcattcttctcctccacctgactgtataatctggatattaagtcactgatggacacagttggacttggagccttagttttctctctcacaggaaaatcgctggctaaaacaaaactatcttcatgaaccaaagtgtcagaggtttccgatttctcatcctcgaaaaaggacaatggcaagactcccttgggcttgcctgtctgtacttccttttcctgagaacaagtaagtacaaaatcaggaaggtgaaaaggcaattccattaagctaaacaatttgtatagaggtttcagcctcggaaaaaataaaagaaattatatataaacaaaggcaaatcttagcagcagttctatatgtttggacctaattaatgttcaacccgaggtagtaatataccaaccgaaggttaagcaaagttacagatgaatagcatgtcagttataaacatttagtagatatgacagattaccaagatcagagtacaataca

SEQ ID NO: 35783 - DNA, 525 bp, Arabidopsis thaliana columbia
acaggcgattcgagcaacggaaatagaagaaaacttagttttctcatacatcattactgtataagaagttgagagatatgattgtggaaatagagactccttcgaatctcataaagctccatggtacctagaccatgataactttctttctcatgattcattcgcctgataagctttatgccctggttaatacataatagactatataagcaagacgataatgaaaacattagtattactatgtttctactttctagtaatatgttcctagtgactgcatgaaaacgaaaacacaaatgttcgcaacagtatagatgctccacttttctaataacaccgcgactaagttgatgataaagacgaagaaatgaaatgctactgaagattattaactcatgtgctttatgaaggaaaatgttctataatggacactattgggacataataatatctaagatagtagaagaatctggattattggcaagcactgactgactactcaacaatcaacataggtttttggtg

SEQ ID NO: 35784 - DNA, 568 bp, Arabidopsis thaliana columbia
tgaaatcgttattaatgtaacacccaaaattaaaagaaaatttaggatcagattttgggttaaattgatcgttttgaaattgtctgatttcaggagatttctgagaatttgaaaaatctggagggaatctgtaaatagagaaaaatcagaggactaaaatgcaaaatcgtggaaaatgagagaaattcgagtttatcttttccgaaactgaagggaagttgttggaaattcgaatcattgttccttaaccctaatatcgtgtatatatgcgttttaaagccccaacgaattagaagccgaatccataataaatttgagacttttggtgagtttcttagaccctttttgcctcagtgccaatttgaatatttgttgatatttttgtgaccagattttgtggctgtttaggttggttgtgacttcagttgttgactctttagtattgggttgtttcagccttctccagagttttaggtaagcttcatcttcttcctatgttcttctgttctgatggtattattctgtctgatgatattattgtgttctgatgatttaataatgtattttg

SEQ ID NO: 35785 - DNA, 429 bp, Arabidopsis thaliana columbia
ccccatccatcagttacatccctaaccatacgctaaccacacgaaaaattccatcttcactacataaaagaaaagatagcactccaaccagaagaccaaaatagattgaagacgaagacggtcaaagaaaataacagattgatttattctgttagcgtgtgaggcttatctattacggaaatcaacgtgtttttcacttttttgattactttgttaaactcatatattggttgtgtggtttgtagagcttcaatctgtgtgctcactgatatatttgtattatcgtctttaaattaataaagaaaatatatatatatatatatatatatgtatatatatatatatgtgtacgagaacaatagttccgtgagctcacgaagccacactatataagtcccatagtgtgaccatgtgtaagcctctcaagag

SEQ ID NO: 35786 - DNA, 539 bp, Arabidopsis thaliana columbia
aaatttgttttcttcaaactcacaaacagttaaaaagcactagaaaagtcataaacttgcagaatttcacagaagagtcctgacaaagtcagagtgtttcccttgcaaatccagcgtaaatcagaaagagaaacaagaactgatgatcaaaagcgagaatttcatctgagaacttgagcatagctcctctgcttccaattatttattacaaaaaaagaaccctaaaacgaaaataatgaaactctatggtattccgacaaaaaaagagaaactttttcagatgggtcaagataaagaatgagtttttcgaggtttgttcgtgcaaagaaagatctcgagggttgaaaaaaaaaaaactggttggtaaaaacctggagaaaaagaagatgagaggattataaggaagaaggactgaagagtgttgaaatgacagcctttgtaaatgacagtcgattttaaatcgttgagctgctaattaaaaaagggacgatgagattggacggtgacggcgtctacgtcaccgtgtttatttttaagag

SEQ ID NO: 35787 - DNA, 488 bp, Arabidopsis thaliana columbia
tttttgatctctctaacaacttattaactagttacacatttgtctctccagggattggtataatcttgaaaagtccaagagagtgaaggcgtttcgttgtggggagtatgatgcttgtattgcgacggcaaaggctactgcatcgactactggtaagaaggctgtcaaggtatgcccgtagagaagatgctattgctcatgctcttgagattgagaatgcacaccttgccaaagatcactctccgtgtattgagaaggctagtacatctggtgaagtttccagaaatggtattgaggactcgggtgatgtggcagagactgaagttgcattgcaatctactatgtctttgaaaaaaaccaagaacggcaaagcttctaaggtgcagcctttgtcagaaaagagaagaagaactaccatatgactcggaagatgatgggactcaaacaaacaaacgaatgagaggagttgaggatattggaatgggtac

SEQ ID NO: 35788 - DNA, 1340 bp, Arabidopsis thaliana columbia
attatcatttcttcattccataatttcataaaattattaacaaaaatttaagaatattttcatcccctaaatagttctttttataaatctaatattaaattatattcagaaaaaataaacgtttttacatatgaatgtaaacttttttgaaaaaattacattaagattctatcactgattttgtgtcgatgcaaacgaaagttgaaaaaattacattgagattctatcactgatcccgcgaataattttatcttaatgattttgaaattctgcttcatatattttgttttttaaacttttcctcgattatctggttccacattagaacaaattatagccatacatacatcatgatatatgttgaagtgtgagtgactagctagtgtacttattagccaatgtctaaaaatgtcggcttcttgcttgttagcttcttcttctttttctgtctattgcctctattattctctcggcccactccctcacctcatgtgctctctatagctatagacctttctctccttgtctctttgtgagttgtacgtgacactctctaaatcttcattggactttaccccaagtcatatacagatttgtatacattacatgttcttataacaaaattgacttaggcttccaaaacgttcactgtaaattgatgtaaccatctaaatctaatcgggccatagactccccctaagccttccctcctcgctgtgaaagccaacgggtttcttgaggtggaccgtggacagcatggatgatacatacctcctggataatcaaatggaagaattgagagttgtatgcatctactggtctacaatggatagtgtgcatgcatttgaaatcgagtagtaacaaagaaatggacccaaacgaagaaagcaatgttgtcgttgttttggagtactaatccatttcgtatataactttttctttaatgatctttttctcacttcatatccttaaacttacgtgcatatatatcatatatacatttgggaaaaatgatctacacatataatttctgtaaaatatgaaatattggcacaaagaaataaacaggactgattattatttggaatttagaatttggaattaatatttttccttttccaattacttttttgggattttgtaccttgaggttttgtttgaacagaaaatagggattcttgcacatatgaattccagcaagaacaagataatagtagaaaaagctggtagaactacagatctcaatgaatagcataagtggaggagttaagttaagttagataaattaatgaaataaaaatgattaggattgatagggaatggtggttcctcgtgtgcgt

SEQ ID NO: 35789 - DNA, 571 bp, Arabidopsis thaliana columbia
  unsure (1)..(571): unsure at all n locations
taataaggaaattgtaaaatgtaaggagttacagtctcagacatttgactaatttgtctcctgaactgcatgcataatcacacttttaccaaacctcatcttcttcttttgtcttgttttgtttgtttgccaacaactttcatcttctttattcatcttacttgtccgattatcccccaataaatctctctttacattaaagataaaagtattatcataaatatgtttgtactatgcgcgaccgacaagcttctcatccattggttcttaatattttaattatctgttgatgtcactagttttgttccaaggatggtactactatattcactagtttagtcatttactcattagtgcttcgaatatgacccaccggttcaaaaaacggttggaccggtgacctaattaattaattttgcttttacaccttgtttctttcttttattgttggttgatttggtatttgcttggttgaatataacaggaagagcatgaanagattagggcaatgaagagtgattcgtatagtcttgaatggagtgattcaagtcaatgccattcacacaatgtg

SEQ ID NO: 35790 - DNA, 579 bp, Arabidopsis thaliana columbia
ctcattgaggtgagatgatcgacttgactctagtgttcctctcgtggaagctttcttttctttccttcggtgtatctttaacccttgttggatcttcattgtttcaggtgaagaacttagttgactcacctggaattgtcccttcagctcaatcgaagcctttgttctccacgccttctcttcccaatccagttagtgatctttcatcggctcacacgcgtttgcttcctcctaaatccacaccatcaagacgggctcggcgttcacctgggcatcagttgtttaggcaggtttctgatagtcaaattttaggactgaaatccccaattaataattactcaatctcagaaggaaggtcgtcctttgtgctttcgacctgtagcaatgacttcgccactggatcccagtacgcatcttctgaaggtggctggtctatgaacactttttctgagctcgtggcatattctcaaagggatagatggtcctttgatagcgaacacttgggttctggcagacggaaactaagtggtggtagcacagattctcattctcccttccgttgttgatcacaggtttgtg

SEQ ID NO: 35791 - DNA, 426 bp, Arabidopsis thaliana columbia
gttcccaaacttcttgatttggttcaatcttatatacgtatgggcaacaataaacgaaaggagtaggggtcacaatgatgaaaaggccaagaaactaaaaaaatgtaatcaacgataaaagccttaaaggaaacttcccggaagctgccttcttgaggatacgtctatgcacttctcacttgcatgtggttagatgttgttatcgacccttcttggttagacaatctattaatatatttttgtctttgttatataagatttctatactatatgggaatcaaagctcctacatgcatgtgttcttacagtcttacttgttatggcatttagcctaacgtggtcacaaaccatatgacgagtgggtcctctaatgtgtacggaataagaaacttatgttatcatttagatcatatcttcttagaaggt

SEQ ID NO: 35792 - DNA, 540 bp, Arabidopsis thaliana columbia
aatccagccatgaacagtgaaatttatattaattaacacttttgtattcgttttccaagtgctcctaggtacaaaatcccgcaggatagtaaatagttgtagcaatgcgattagaaaaattccataacatttatttaaagctaagtggtgtgacaagtaatggcctacaattaaggcgccacacaatagctacagaattacagacagacaaaactggcaaagagacgacataacatccaatgtctgaaaataggtattttgatcacctgacttgggctctgttttcgatgttgcttggtgtcatcttgagaatagtgatgtgactcgtttgggagatgtcagctttgccacgctcttaaactatcaaagtcatacagaattaaaaccagttcaatcattcattcacttttcttcaacaatcagtagtttgatttaacggtgttttgtagagaaatgtacctttggttggttgtattctcacgggtggcagcgagagtacagcactggtgttgagctgcaagtccccatggcgagaactgt

SEQ ID NO: 35793 - DNA, 722 bp, Arabidopsis thaliana columbia
  unsure (1)..(722): unsure at all n locations
aagcacaaacaattccaacaaaatgtgaatatggtataacgcacgtaaataatggtaatctcattaaaataatacaagatctttactaatctttatgtggaaaacaaaaaaaaaacataagtaaaacaaatttacgtggataagaaacgccatacgcattcacgtattatcttgccatgttagatatgattctcaatgttacaagaaaacatttatggtaaaataataaaagtttagatcgcagacaatggacctaaatgatcccataattcataggataagttttcattcttgtttcgagcatgtttaatatttccactaactgttttgccctcttgatctctacattctcatcaaagttaattagttcataataccataaactattagtatcctcgttctcttctgcatgaagataatatttgaaaccgatattacattcgctgcactatatatggatttgtaggttaactctaacaaaatccaaattactctaaaatactacacatacggtcctacaaattactaattaaaaccagtatactactaagattaaatgatatgctataagaatttggctcgccaaaatataaactaggaagaaataatgtggggatgataaattactaaagcctcactaaaactcaaatatgtcatcatatcaatcaatatatgagtgttgagatttgccgtagatantatcttccccaccaaataattgt

SEQ ID NO: 35794 - DNA, 450 bp, Arabidopsis thaliana columbia
ctgaacaatatactattaaaaataataatgaaagaaactaaaatcaaacaaaagttagtggtttttcagattcacaacgtaatgtgtatactcattttgtaagagtaaatggacataacaaattagcagagtcaacaatcaacgaaccttctataattagcagatgaaagcttcaacaaaattagtaggagttaatgtaacacgaatatttcaaattgacataatcaatgaatttgtgttccacaaagcacgtgctcattggaaaatggtaaaataattctaataatgtatatgtttaagttaatattaaagtcatttatcatatctacgccgaaattaacgctaagacgttacatttgagatgtttgtattattatttacgaaataatcgggacatcaaacacattagcttaaaactgatatttctcattttaacattgattggtggtt

SEQ ID NO: 35795 - DNA, 504 bp, Arabidopsis thaliana columbia
ctcaataacgtttttgtgtggtcttctttgttgcaacgtatctatatcacttccagtaatagtggaaatcttcggaggagatccttagggtttgtggggttcgagagtgtctcagcactcagcagccatttgcagtatccaccaccttcattttcgaatcatcatcatcttcatcttcctcatccttaactaaattaaagcctttcaattaaataataaatatttgtttttttttccttgtctcaaacagttaataatatcaaagtagttaacaaaaatccaaatcttaatttttgcatatcagatgtaaaatgtattttgtcaaaaagttttcatgttaatgacttttggttttatgatgatacaaacaacttgggcctaagccaacacaaaatatggatacagaaataaagaagaaaaagttaaaggcccaagacaaagaaaagggaagaggccagcaatgtgagcacaagaactttctgaacattttaaacaaacaaaaca

SEQ ID NO: 35796 - DNA, 433 bp, Arabidopsis thaliana columbia
cctgctaattctcggaataacatcaacaaaactcggaaggtttaaaaaacccaggcaaagtgatgttcaagacaaaaagaaacagtcatgttcaatacacaaagccatagtgatgttcaagacaaaaagaaacaatcatgttcaatacacaaagccacaatgatgttcaagacaaaaagaaacagtggtgatcaagatgatactaacatgtcgcgtaataagagccaaatatcagcttcacattcccattatttacacagcagcacttgcaaaaacaaaaaatagaatgagtatatctagtttcatgtgtttgtgtatgcaagaatgtgtttgacaagttgtggaaataatctaaagattcagagccatgtcattactagcactagaagatccaaagattcgaagaacaagtcaatacaaatagctgtgatat

SEQ ID NO: 35797 - DNA, 593 bp, Arabidopsis thaliana columbia
aataatgttcaatacacaaagccacggttattttcacgacaaaaagaaacagtaatgttcaatacacaaagccacaatgatgttcaagacaaaaagaaacagtcatgttcaatacacaaagccacagtgatgttcaagataaaaagaaatagtcatgttcaatacacaaagccatagtgatgttcaagacaaaaagaaacagtcatgttcaatacacaaaaccacagtgatgttcaagacaaaaagaaacagtcatgttcaatacacaaagccacagtgatgttcaaggcaaaaagaaacagtgatgttcaatacacaaagccacagtgatgttcaagacaaaaagaaacagtgatgatcaagatgatactaacctgtcgcgtaataagaaccaaatatcagcttcacattcccattatttacacagcagcacttgcaaaaacaaaaaatagaatgagtatatctagtttcatgtgtttgtttatgcaagaatgtgtttaaaatcagattcagagaccatgttattacaagcactaaaagatccaaagattcgacagacaagtcaatacaaatagctgtaatagaatgtcaca

SEQ ID NO: 35798 - DNA, 762 bp, Arabidopsis thaliana columbia
tctggttattactatgatgcggcttctggatactactacgatggaaattcaggtcggcatttacttatattgttatttatttctttgaattgattgtatggttgggtagctgcagctctaattcccatatctggcattgcaaaacatgtaatgggcaaaagtaagattgatcctgttggctggttgtatagtcctgctatagatgtattctattataggataacttcttggcaaaaataagtcgtcagctctggtttgttcaaactatcctgttcttttttatgattgtggaattcttatactatgtatgcaccaaactagcaaacatcgagatacaatcaatcaatcatacaagtgtatgtcttaattagacttttaaataatggctgtagggattcagcaagtgttatatgattactattatggctgctgttggacttccaatggaagttttttcttttagttattgctgagttatgccttcttatatatgtgtatgtgccttaaaatttcgcatctgatatggcacaatgatagactgttttaatgatcttggttatcactaggcacctcttcttggtgtgtggtgatgggaaacttggtttcactggtataagaagtgggtaatattctctattaatcgtatgtttctaaatatacaggtctctattatgacagcaatagtgggctttggtactcgtatgaccagcaaacacaacaatatgttcattgtcatgatcagacaatgagagtaaagtacag

SEQ ID NO: 35799 - DNA, 568 bp, Arabidopsis thaliana columbia
gtgtgctctaaaggagcttgccaaaccacacgatttacatgcctcgctacttacctagcaacaccaccttaccagcgctgatctggggcaacggcgcctgttccgcgaacgggacgctctttggcaactttctcaccaacatcgcctcatacggttttcttgctatcgcctcaggggcgccggatggacacggaacaactgacgtgcagctgatgagagacgcgcttgactggattgagacgaacaccaacaaaacagcaaagcacagggctattgataggagcagaattgcagttgccggccagagttgcggcggacttgaggcgtaccagatgcgcgatgatgaacgggtgaggtacctggggattttcaactctggcttcctggacttagggttctttggagggctcttggggctgcctaatgaggatccggataccattaaagacgtcaagaagcccgttttctatttccttggtgggaagaaggatatcgcctataaaaatgtatgttctttctttcgtaaactccccattcattgttatgaagacactaatggattgtttgg

SEQ ID NO: 35800 - DNA, 632 bp, Arabidopsis thaliana columbia
gataagaatctttaggttaaaatggactcatcagacacacgggaaatctaaggtctacatgagatttggatatttataagctgacgtggaatcctacgtggttagatttgcagtcgtattgatgccaacaacggtggagattcaagattctttgattgattgtgaactaaacgactgtcgttttccaaacacgtatttatgggccccactttaaaagcattcccgctaaatctacaccgtccacgtagcgatcatgatattgatgcaaatgattcaattttaacggaaagatgacggagtgatctttccaccaccgtaactaatcttaacaattcatggcgagtctctgtctctcatcgtcccggatcgtttctcttcaccaccagaaaccctttctcgctcttaaactccggcctcgtccttcaaatatctccggtctaggtcacagtactagtgttgtttgcttcaatccgttaaggtatagtgacacagaaacacccgattcataaattctcaatcagtggatttctgcttattctaaatgaatgttggttggtaggttacggctgatcgtcagcgaccgctacggtgtcggcgaggctgagaagcgcgaaagagaggatgagtgtggc

SEQ ID NO: 35801 - DNA, 562 bp, Arabidopsis thaliana columbia
tgttaattttggctttatattatttggccttgtataaataaataaaacacagttgtgacaaaaaaaataaaaaaattcaaaacaacatatcttgaagggatctaggaaaatgtactaactagagttaagaaagtcatcttagctagtgccaaaagtatgggaataaaagcaaaattgtgagagaaagaccacacacggatagactaatatattcattattacactcactaataaattgacgtacaatattgaaaattggtaagtctacaaggaaaaaccactcatgtttacccgtcaaactagcgatgtaaattttgcactcttttgccaaatatataacattttcatcgttttctattaaacaaattcacttcatatagtctttaactttcagagttgcaaagttaaatgagagatcttggcatgtgtttgaaatctcaacttgaaagactaatttaatactggaaattacagaaagacatgggaataactgaacaaaggatgagaagcacacaaagtatagactcttgagttcaactttcaacggtagagacggtatgtg

SEQ ID NO: 35802 - DNA, 526 bp, Arabidopsis thaliana columbia
tataaatcccatatatatgttttttttttctcaaggaaatcccatatatatgtaagataccataaatagattatttgaaagacaagaaaatcatgaagatatgatatatcaacaaaaaattaacacaagaagtcaaattaaatttctctgttggccactttacattatgtctcaaccaacaacagaacgccaagctgtccaaaaaaaaaaaaaaaaaaacccctcaagagtctatatatataacaacattctcaacacaaaccatatgacatttacattctctcaaaagaaactttctacataatataaaacgtcacacattctctctattaattaaccatgttgcttgttgcgtttgtgactcttttggtagcagtagctttgcagccactaccgtcagtgttgtctttggacgttcaccttcttcggcagctagccgcaaagcacaatgtgacatcgatacttgtgtttggagatctagtgtcgaccagggacaataattcattaaaccgaaatgaaagggaat

SEQ ID NO: 35803 - DNA, 475 bp, Arabidopsis thaliana columbia
taaaaaattgtttatattagggagtttcctccttctagtcgggtgcatagcctggcggctcaggagtgaagctgcagaccttcgcggtgagtattacagctcttaaggcagcacgtctagagttgttcgtttctcccggtgggttcgtggtctcgctggcttcaagagtgaagctgcagaccttcgcggtgagttttgtagctcacaaagacagtatggacccaaagagtgagcaacaagatttaatgcaaacagtgaaacaacaaacttctacagtgtggaaggggttgccactgctggctcgggcagcctgcttttattctgttatctggccccacccacatcctgctgattggtagagccaagtggtctgttttgacagggcgctttttggtgcgtttgcaatccctgagctagacacaaaggttctccacgtccccaccagattagctagatacagagggttgacacaaag

SEQ ID NO: 35804 - DNA, 622 bp, Arabidopsis thaliana columbia
attgcaatctctcagttctgctgttgtagagcaagaacagccacagagaatacacataaatcagttatatgttccaataatgttttctttgcacaaacacatagtggaccagtttgacatgtgagttgtagtttgctgaccccggccctaaaactttggtttcttttgtattcgttttccttactcttttcctgtttgcctctaaaattttcctttacagtattccatatttctcaaacacctccctgcttccatctttgttatcacaacacacttcattgtttcaaaacactataaatgatcaccctccacttgtgtcctgctcctgcccattctacctgtgaccatagagctatgccctcctaactcactttagccagtctgctcatctgttaatgtgtgtaataatagtaattgtctgatgtggttattgaaaggagctaatgaaatgtgtataaaattacgatcgtggaaggcatgaacattctcacattaacacattaacacagaatagttgagacttagagccaactaacactaataccagtgtgtcctcattgtgtgtggactcaggtaggaacttgctctactcagtttctcaatgtaaatgaggattatggat

SEQ ID NO: 35805 - DNA, 501 bp, Arabidopsis thaliana columbia
cattcgataatattgtactggcgccgacgataagactggactatagtagtgggttgacatgttttgtatagatggaacatctcctttgatggagaggtgtgcatagtagttgttggccattgaaatgcttggtcagtcttacttggtttgacatcaagtcgtaaactcgtaatgaagtaggctgcccgctgaaagtgtcaagggtgcaacctcatcctttagcctccccgcttatgttggtacaatagtgtcaaagagagaattggatgtgaagttgtgaactggattcctgtgagtcgacgaggatacttgtcttcttaggccttagctccaccactgaatgcaaattattccacctttcttaacggtgatgcgaatttgtatttataatattctcacctaatctaagtctagataaagtcttacggtttttatatgtacctcaatatcaaatttctccatatttaagacggaatatcatagtctcagactctcaaatat

SEQ ID NO: 35806 - DNA, 136 bp, Arabidopsis thaliana
aaaaataaaaaaaaaaaaaaaaaaaaaaaaaaaaaaaaaaaaaaaaaaaaccaaaaaaaaaaaaaaaaaaaaattaaataaaataaatcagcatgcaagaatgaataaatcctctatcatgaatacaccctctaaa

SEQ ID NO: 35807 - DNA, 604 bp, Arabidopsis thaliana columbia
cttgtttttgttgggtggtgagattaagatgaaataaacctgccaatgcgtataagttattaagtttaatgaagtctatcggtcaggatcatgatttaccagggtttatgctagaggaagctcttttgtcgtatctttgaaaaatggtgcaaagtccaaaacaggattacattaaatgtattattttatggggatacaaaaccccttgattcatgcaacgaggtttgaatataagcagagtagaaaataagatatgtttagaggaattcactacctatttgtcgacacactagttgtcttttgtgagatgatgatgtcatgtataatcttgtgttgtttatttgcagatggatgtgtgtaaaagagagatatcggtgttgatgcctggagaagatgtccaacgttcattgctcagccatgtcctccctcatcatcatcaagctctttctgaaaccttctttcatctcattaagtaggactttttatcagacaagtgtttatgtagtcaagtgttgttaacagaacagtgtttctctgtttgtgtctgcttatccatagcaaaagagcagcaatctccataaaataaaaagcgatggaatttgtg

SEQ ID NO: 35808 - DNA, 161 bp, Arabidopsis thaliana columbia
ggaatttgttttatatattgtctctatattcatgggtacctccgttatgtgtggggacatcgagaggtaagcccaaacagagtcagaggcattggtctcagagacagttgtcgctcttctgggatagatgagaagaataatgctgagctttaggtaaaagg

SEQ ID NO: 35809 - DNA, 475 bp, Arabidopsis thaliana columbia
agtatgaatcatatccagaaaatttcatatctgcaaaatgtgtttacttgaccatattctaggtatcgcaaacactaaactaaatgcaaaattttgttttgtatttgtaatataatatatgcactcaccatcataatgattttagaggttgaaacatatttatgggcgatttttacgttactaaatgatggttaaatatgataaacatttttgaaattgatctcactcacccgataaaatttattctggaatgcaacgtgaattttcacgctgaccacatgtttaagttagcgttgttccatgttccgatgacttctgggtggaagcttttgaagtgtataagattctccccttttttcgattcaccgaagataagggaacctatagtactcacgtacgtgtatcattcgttcttgataaacatcatttgtcttgtcacgtcgtcgatctgttagatcatcatccccatactttg

SEQ ID NO: 35810 - DNA, 401 bp, Arabidopsis thaliana columbia
aaaacaagaaagaaacagagtcatgtgtatgtttttgtttgatgatgtctgtataaacacttattacctggccaaagatttctatgtttgcttctggatagtaccacagatggaagaatctgttaaaccaggttatgacaatctttagattaaattctgttaaaaaacaaagagatggttgttgaagggcacggtttacttactgcatgatggggatttcggctaaaggacaggcgacaccaaggagagtggcaatggtgaagcaaatccaagttctatccaaagagaaccaaataaattctgctaaggcaaatagaatgtaagctgctatgttgtctgactctccagctttgtacatttcagcacttagctctaagaagaacatcaatgctctgtttcat

SEQ ID NO: 35811 - DNA, 592 bp, Arabidopsis thaliana columbia
cttacaaattaaagatttaaaaaaaaaaaaaaaaaactgttcgagaagaaactaaattcagataaagaggtctctcacatgcgacgcattttgagcaaaagagtcggaccgtagggtcgtcatgcacatgccttctccgtctatatttatacttttattaaaattcaaattttttggcatatagcttataaatatcgaaattacattttcttaaatatagcttttaaaattttattaggtgaatgaacaattgattttaatatccgatacgtacaacggacctataaattagatacacatttagagagaaactaaatgagtttttaatattattttagaataacctctaatgtttatatctaactggtggaacctagattcttgaggaatatctccaaattgacacatttaaattctcgatggaatttttttacttacggatttatcttaaatatacaaagttgtcatgagcatcagcacatatgtggactaaagacaaatcgttgggtttaaactttaaaagttaatttctggaattatgcttctagtaaatatttgaacacttattatatcaaatttttttttagaaatt

SEQ ID NO: 35812 - DNA, 510 bp, Arabidopsis thaliana columbia
tgattagtgcagcgggagactttaaagattataaggtgagacgactgacttagacgtagaaactggttcataaattgaaccaactttgggtccgaggaaaagtaattgaatcttgccgtgactatgagggttgcttttgagtcctttcattaatgggtcaacgttgttaggcataaaacctgtcgtgtggctttgatcaacgacggctttttccagcaaaacttatatgtttttcgaaattggttttgtagtttatcgaaaacattgtattatatatgtcaaatctcgaaatataatatctgatatgaaaagggaaaactaatcagcaatcagcaaaagggtgatgggagctagaaagaattgtctctttatgagatgagattcaaagggcgtacagagaggaagaagatggacttttcttactaaacccttaaaccaagctaagtaatcccctaattagtataagcagtggtgtggaaaaaaacgtggctgctgaaatttcattgtact

SEQ ID NO: 35813 - DNA, 415 bp, Arabidopsis thaliana
aagggacaggaaggggaaagaaaaacaggagagaagaaagagagaaagagagagagagagagagagagagagagagagagagagagagagagagaggaagaaagaaagaaggggaggaaggaaggaagggaggaaggagggaagaaagagagaaagaaagagagaaagaaaggaaggaaggaagagagagagagagagaaaaaaaggaagggaggaagaaaggaaaaaaggaagagagggaggaggaaagggaggaagaaagaaggggagggggaaagagaggaaggaagggagagagagagagagagaggggggagagagggagagagagagagagagagagaggaaggggaagggaaggaagggagagaggaagggcaggagagaggaagggaagagagaagagagagagagg

SEQ ID NO: 35814 - DNA, 519 bp, Arabidopsis thaliana columbia
  unsure (1)..(519): unsure at all n locations
tgaagaggagcgaacgtatatggcaagtctttgtcgaattggtggggtcttaaggctaaaaaagggttcaccacatgtgtatgaatcgaaatctactcatccgctgtcgggaccaaactacatatcaactaccacgtttttctcatatgaatattcaaagctaccgtaaatttttataaaaatacgtcattagcataagaatgtatgtacatattaatgactattataaaccctaaggcacggataccttatccttccaccaccgaatttcacggattccatatcctttcaccggactagacgaatatgaagctaagatattaatagattggtgaccaaatttgaatcttttcggataaaacttgtttggcatactttcccttagagtcaattattcttcaaacaatgtttaacttaaatctcaagatcttatgtagttaatggtagatatcgtacagttttaacagtgtttgtattttgatcgtgtgtaaagtgttggaanatctaactttgtatata

SEQ ID NO: 35815 - DNA, 420 bp, Arabidopsis thaliana columbia
  unsure (1)..(420): unsure at all n locations
nnnntgagtaaggattcattaattttctacatcaagaggtctggtgttcgagtcccaaatgttgtgatttattagcagatttgtagattaatagaggcaagtttgcaggaaattttcaacgatgtacaattatactcgttcgcaaagaatctatgcagagaagatcattgaagatgtctatcatgaacatgaagaaagaggtgtcgtctatcgatggatctaataagggtcagaaaaacctatctgttataaaatcgtaaatttaacagttctcataatttacaatcaataataaatctaagacggcaaaagaaaatcaataaaagtatcgttcgtttttctctactaattggacgaggttgttatttaaaacaaaaaaaaaaaaaagtagttaaataagttaactggatagagcttgga

SEQ ID NO: 35816 - DNA, 431 bp, Arabidopsis thaliana columbia
gattagattgtagtgaagataatgaactttgaaatgattccatatatgaatctgaatgatttttagtggtgttttgttgttcttttcattcaaattgattatcgttaattcaataatactaaatttcatgagactttttaaaatccatgtttgaataacataatgattataaactctacacaaatctcttaaaattccactttcaatacaccccctaaattctattaccaaaaccgaatagatacaaacgtaaatattttaggtaaccaaaaatatccaaaatataaatatattttcaaaagtattagttatttctatactaaataattaaaaaaaaacttaagaatatatataacactagtaaaacactcgaatataaccaaaaaatatcaaaaaaatccaaaaataaccaaaatatccgaaaatattta

SEQ ID NO: 35817 - DNA, 513 bp, Arabidopsis thaliana columbia
atttatcgtattcaaactatactaagttgtatatttggagacatctatagctagcgggctaagtttttgatggatcaacatagtgtatgcaatttatgcaaatatacttttggttttagggtaatattttttttcattaatgatccatctaacctttttttttttaaagaaaattgatctatctaacttttaccataatatttcattgatcttattgacaaacaaaatatatatcccacaccctttcacacgattatcctaactttctgtaaaaaaaattaaggacagttttccctctgacaatcacaattaatattgaaaattaagattgacaggttttgaatgaaggtctaggtgaaaaacataaattatattgaaaaaactagtactctagatatgcatagtttagtcaaacacagaaattggaaagttcaacaaacagaaattcacagtttaataacttcacagaacaggaaaaaaaacatttttggaaacatagaccttatagtttga

SEQ ID NO: 35818 - DNA, 461 bp, Arabidopsis thaliana columbia
cgtttgaatcacaaacacctgcggttatatattgcgtttgcgttttctgaagtagtagtcatgagtgacttacttgatacacaattttaaaatgctattacttgataccaaattactggcgcgttttatatacgggaatggcaaattttgtgttgctataccgataactgacgtgacgtggcccgttattagtcctggacattcggtttcagttcgcttccattcggttatcagtttttctggttctaaagcttagtatccattcggttattttgaaagtttagttcggttctagtttttttggttttaaaattttgtatccattcggttgtttagattgaatatttttggatattttggttatttttgaatattatcggtcattttggatatttttcggtcatttttggatatttttggatatttcggttatcttcgagtatgtttactattatatatat

SEQ ID NO: 35819 - DNA, 557 bp, Arabidopsis thaliana columbia
  unsure (1)..(557): unsure at all n locations
tttcttacagtcaaaattagggtatcatcctatcacctatactttcgggattaaaacatatgagatttcttgccattttatgtatttttatactttcttttggtcaagaaaaattgaattttcctatttatagtagattaggtttttaattaaagattttttataataataagtctccccttatgtttttctagtgattattaaataacacggttatctctttctcctggtacaaatatcttaacgaatcagaaaaacatttggtttaattcggtattttgaattatacaaatgttaaggcgaacaatttggcacgaaaaattcgtactaaaccgcttaatataactcatgtaaatcatactcctcatacttggatcttttgagccctaaataaaatctgagaatttattttaaaacgaagaaaatataagaaaaaatgaagttgagaatttatgaaattatcanaaaaaaataaactatancaataatcttaagattaaccatagttttgatattttcttatcaacatatcacgattgtttttatttgagatattt

SEQ ID NO: 35820 - DNA, 402 bp, Arabidopsis thaliana columbia
tgctagcatattgttcatcaattttagcatctctgcagaagtaataagatccataacgctataccgtcactttaaatcatactgcacctaattaacggacaagatggacaacatttaaaaaatataagatccaccaacgatataaaaaatgtacaagtgagtagtagctaaaacgtaaaaaagtttctacagaaaaaaaaaaaaaaaaaaaaaaaaaaaaaaaacctgtttcaaccacaaggcgagatcattgtcggaaacatgacattgggttaggttttcggaacccttgaacctgaaggaaacccccgggggtccttggaggtaaaccctagcttttggcagggttccaaatgggaatttgcatagggaatttctacaacaatgtaatttccctgaaaa

SEQ ID NO: 35821 - DNA, 543 bp, Arabidopsis thaliana columbia
tgtaagtaacaagcccttttctttgtcagtttgatggaatgccaataacagttggggtcggaagtcttatttcagatgaaggctttaccatgttaatgtcgccagggggtgccgtttcagtctggaagacccttttagctgaaggtgctattccgatgggttctgtagcctgggagaaacttagaatcactcaaggttagtaaaaattattgtccaaatgcaggcgccataagtatttgtcgatttggttttgcactgatgacactactatcacccgttaacctccaaaatctaatatcatgaatttgtagccactagtccgatagtcctactaatggcatgattggtcgatatttacctaatataggcaagaagttcataagtatgctctcagatctttgccttgccattagcgaaatcagaattgttagatcttacagaactgttgatgtagtgaatacgcagagaaaataaaatgtttctcaggccaaaagcattgatgttttgcaggaagccagcacctgagagagactcagcaaggaa

SEQ ID NO: 35822 - DNA, 340 bp, Arabidopsis thaliana columbia
gtacacaaggaatttgctgagatacatattttacacaaggaattagcactttcgtagccttttttagttttagaatttttttgtgtggacttgggcaaatatgcctttccaacaccacataaagcatggctcagtgtcttacctatcagccaagactttggaaatcccagcttcctcttcgcattcctttactagattctcacaaacgctaatcccgtgaggctatgcaccaaatgaccgaataaaaatgtgcatttcgattccctcaaataagaattattattatctggtatatataggacattctacaacatgatgtataatcgacaagtaaatgaga

SEQ ID NO: 35823 - DNA, 658 bp, Arabidopsis thaliana columbia
tcctctagttttctcctatttgttatttttaaaacatttggggctatttattattttcttaaaagtatagataattataagaaaaagggtctcaaacgctcatcatcctcaatcgacgcagatagttccaccaattagggttttcgtccgccagaatttccaggtaggtgaactcttctctgttcctcttccccaattcgtctctcttcaatctcagatagagttacgattttttcttgttctaaaaccctaaaaagttttcgattacgagtcgattgaaattttactccttttgaacagagacgtatcttgaatctagacatgggatctcatgagcaatcgcctgagaataacggttcgagcactgtatcgaagaaagttgctgatatttggcaacgaatgaacgaaggagttccaaataaacgtgtcaatttcgtctcaaccgctttgcccgctaaaaactcagctaatagcgtgagatttttatctactctctctgcgttttgattcttttcttacgtttgggattttgaatgtgtttttcaaaaaaatttgcagaattggaaaagttatctcggtgtgaatgtgaagatgatgatacttgtgttctgatgtcagaagagtgttttgaacatagctgtagtgaggagctagagta

SEQ ID NO: 35824 - DNA, 322 bp, Arabidopsis thaliana columbia
agccacatcaaattggaatccttaagataatatcaaagctacgaatctgctactacttttattccaccgatttaccgagccctcaaccacatagccaaccaaaccatagtacacctagcactcactaaccgctctctaaccaactcacaacagctataacctgctacattaagtactaggctagattaaagcagacctatagctaacagttgaacacttcaaagcttataatccttacatagcacccgtatggatcctaacacagcaagggaagaaattggtaaccatcagggataaatgaaaaagtgaaagcgacgcaaac

SEQ ID NO: 35825 - DNA, 594 bp, Arabidopsis thaliana columbia
  unsure (1)..(594): unsure at all n locations
caacaatattaaaaattcctgttcgtttaacatactgtaacatcgaattagcgattgactttgttagtgtttcttgtctcttttctttcttattttttctcctccctcactttttatttgtttggaagacatcttactgaataaaaaataaatttaaattagtacaaacaagaacgaactaagaggcatagcatcatttatataactgcatatggtggcacaaaaagttaatactatatcttagaaaattacaacaaaaagatcaatttgattacgaggtttatcgtcattggtaaaattcttggattaattagatgaattttagaatatttatgagatacatgcataggtaaaatcaatgatttgaaaaaaaagatgacaaatttagaactatggcagtagtgaaccaccacaatgctagaggaagaagagtaattagaaagaacgtgacgatggattgggatttaagttaatcttgtttttcgttttttctttttctaaaaagagtattttactggagataagtttttctacttaattattacaattagtatttttgagtaaagananaaaaataatgacaccanaatagag

SEQ ID NO: 35826 - DNA, 147 bp, Arabidopsis thaliana columbia
agtatgattggagtgttcatgagatgttatgtttctgagcccttgttttttagttgtctagagttctaatatgaattatatgtcttttggtttcacagatgttactagatacgcaagctgtgaagtcgattctactagaaattcctt

SEQ ID NO: 35827 - DNA, 561 bp, Arabidopsis thaliana columbia
caacgggatgatgaagtacaataagcaaatcaattttgtggataaagaaatgcatatgattgtcttaagtttgatttaatggtgtagaataaaaacatataaagacaaaagttggttgaagtgtcaaacagagtgaactccgtaaacagcctctttttcttcacaccttaagaaaccatagacgaaaaaaagtttacatatttttagaaaattttcgatctttaaaaaatttatgaggagatttgttaaccttacataatacttgacaagagaatgatgaaatttttttagacaaaaaaaaacacgttgaaaagtctcatatatgatgtcactgatttttagatcaaaatgttgacaccccaatttgatcgggaagcaagaaaacccggagaacagatataaaattaaattgttctattctacacaaaaccttgggcatttgttaaattttaactatttacggtttattttaaccatctccactgagaatttatcgttacgtttatggaaatgactacacacatcttcgtttttctaatcatttataggtgtgacttgttt

SEQ ID NO: 35828 - DNA, 603 bp, Arabidopsis thaliana columbia
tagtgtctcggatttatgcatacaaacttttcatggaagatgcttctcatttacaagctgatgataaaattgatcttacattttttaacaatgaaatgtcttctattttttgttatagccaaaataactcagctttcagttatatataatctacagtttagtgtattttgttaactttaatcgattcctaattcattttaatcaacacatctatatgtaggcaattggatgcaaaaggtacacaaaacaatgcaacaggaaggatcaaaggaaagatgttatatgacacgtcagcagtattcaaaagtttgaagttgaacaaatctagtcatgtttgactttgaccactgacttttcaaacctatcttttattagtagcaaactcagttccatacgtgcaaacaacctcacacgtgcgttcccaccgcaatgtttgaggttttcttcaacagaagacgatatttcttatcatgataacgttagattgagaattcaaagattctcgacaaatgaatgggtactctgttctataagaatcacaataattagttttagttatacaattttataatgttggagtaattgcacatagatgattggttg

SEQ ID NO: 35829 - DNA, 863 bp, Arabidopsis thaliana columbia
taaattatacagtgtttttaccccctagaaacaatgctgagtaattggatttcgagcagatttgtagatacatcatcacattagaaactaagaagttactgatattgttccaacaaaaaaaaaacaactaaagtaaaactggacctcaagtggtgtcttcatcctccttgagcttgaattctacagtttcaaaatgccatggcaaaggcgatgaaggtaacgaagaatggtgatggcttagtgagtctggtggtgagcgccattgagttgagcattccagcagatcggaaaactcctccattggtatctctttgagttcatcccagctgttctcagcatcaatcttaggcacaaaaacaagtgaaagagtcatgaaagttgctcaaaaccggagctacaatacgatgctatgtgtttgtctcctctaaactcttatggcattaaccaacgatcttagaagaacgattctcttataactcaacataatcaagatagagaaagacaaggtaaggtaaaagctaatcttacctcttgaatattattgtattgaggaaccccttctttgatgtttgtctctgaaaagcagaacaaaaattaggcttcagagaattaagccaagcaaaggaaacataagatagagaaaaagggttctttcttcataagtcattattaccatgtccatgcaggatgatgtgttcagagaagtagctatcccactggtcttgttgttgttcttcaatgcatttgctgtgatcatgcaagaaaccttcctttgctatgtcaaaatccactccctcaacatccttcctcgtcgtggatgaagcttgaggttgcaactttgacttgtttgtaatgtcatggag

SEQ ID NO: 35830 - DNA, 376 bp, Arabidopsis thaliana columbia
tatatagcaaagagttcgaacataaaagaacatttgagtgtatgaacataggacttccatcacaatctcgtgaagagaactctaaatcagtagttgtttctcaagacatactgcttaatacacacgatttaaggttcactcttcagcggtatttcatcacactcgtactagcacatcatttctacattacaattccactcacatagaacctttatttatggccacacctaagctcacctccatgccaggacccatatcccatttcgtgatcaaagtgtctatgcatgcaagctcaatgtccatagggttcccattagtaatctcagtcacctcggcttcaagacagagtctgcatcggtgatgaccatttgtctgt

SEQ ID NO: 35831 - DNA, 551 bp, Arabidopsis thaliana columbia
ttctgtgattttatggctttatcggtttcctaccaaaagagttgttcaatcttctttaaagtgacaatttatcaatgttatctcgaaaaacatggggatcaagtatcatgaactggattcttttgaatcagcagcttgctttgtcggattcagctaaccatctacttccagataataatattttaatattttattaatgttaatcaaaaactcattccaccaaaaaaactcattttattttattaatgttaattttatatatgatacgattctaaattattttttaaatattttagttaatgtcgaacattgaacatatctattttcgtcaattgaatattatgtatccgtttttaaagttttgaatcataataatttttgattagaataagaactagtgtgtagttgtcatccggaattaaattttaaaaaacttacagagttggttttgattaactacaattggaataacacaagatataacagtaattaatctatgttatgatcggttaactaccgattaaaaaacataatataaggccccaaaaaac

SEQ ID NO: 35832 - DNA, 411 bp, Arabidopsis thaliana columbia
  unsure (1)..(411): unsure at all n locations
gatagtgatatacttactcacctgaactcagggagatagcacgatagaattacacttttcactatagaatacgtaaggatcgtgttgatcgcgatataattcaattgtccttatttactcatagatttgattagactttgagggatcgaatacttaagtaagcgattacactcaggggtnactttttacgtaagtgtcgccagaaatttagggcggttcatctggagaatgttcgaattctgagactttgaagtttactagtatattaatctgnctaatgtaaaaaccttccaatattaagaatggtcttaaggctaataatgataaacgagccataagcttgaaacagagataggaatagttggtaaacccatanactgttaaaactgattcgtatatgaagacaaaaag

SEQ ID NO: 35833 - DNA, 544 bp, Arabidopsis thaliana columbia
ctaaaacaccaaaaagtatattatcttgtaggaatgtaagactagtcgttaatacgatgtcgactgtccacattaatgtaaccccatcgatggagacaaatcaaattactagtttccaagtcatattgaatattaatatgaagttaaaaaacatgtttgtagccttatgtaaattatatcctttttttgtttagttacgtaacacaattgcataacaacaaccacaaacaaaaggttatagcttttttaatgcaaaccaatcaaaaatctttgcaattttctaatgctaaaagtatgaaaaatcgcagttgatattaaaaacaatttaggggatttctcaacaatttacaagttaaatttgttaataataaaacgacttgactttaccatatatctttttcttttttaaattagaaacttttaagaagaagaatacaaaagaagtagtggcactttatgacattttccacaaaggttaaaaaaatcacattcctttataaacaacgatccattagtgtcggaaaacgaaagagaaagaagaaga

SEQ ID NO: 35834 - DNA, 489 bp, Arabidopsis thaliana columbia
tgctgggtgctttcataggttggttgatatgacatataatgtctctctactaaactatgcacatccattaaacctcaaaagttacatgtgacgtaaaataaaattggaaagggatagaagaaaaaaaagaataatggtagtgatattaacatatctttaaacccattcgaaacggatgggaaaaaataaaatcgtaacttttgtcctatgtgtaccattcagagttacacaatgataacaaactaaaatatttgatgacacagtatataacaaagattaaaatattcgagtaaccaattttaattgatttctttccaacggtttaatagaggagacatgcgaacgagacacgagtcctatagggtagtaaatgaaaagtgattagtaggggcatattcacgtaaataaatcaaaaagtaagggtaaaaatccacggacgtgagagcaattgttatatccatttgaaatctcgtcaggttcacgaaacga

SEQ ID NO: 35835 - DNA, 499 bp, Arabidopsis thaliana columbia
taatttgaaccagtatccgaatgtatatcctaacatacctacaatttaagtacatagtaataaattattattagcatttatatttccccccccttaaaagtcaaaatattaggacctcaaaatactttacatatttttggctatttaatatatttttcaataaatttggataaaaatgttcaaaattattagatgttttgtatactttctaggagattagatagattcgtttataaaaaagttgatttttgggaacttcggataatccaaattcgaaatattctgacccaacccacaatatagaattatccgaatagattttatacctctaaatttgacaacctaaaactctaacatattcgatctgaattcaaacggatactctaactcccaccctttttgctagtgttataattctctatttcctcaacggatgatcataaaccacaaaagtctactactttgttgacgggtaaaatagattattttattttatttt

SEQ ID NO: 35836 - DNA, 493 bp, Arabidopsis thaliana columbia
cgacactagaccatccccctaagaatattcaaatattcggttttggtaacccctattaatgtagtaaatgtttggtatagaatattagattaccattcagagaaactatatttcgcttttattaattaattggaattttctagttattttctcctttgttaatctaacctaatcttttttgaactttataatataaacacaaacgaattaaaaaaatataccgtaatttaactgattaaaagtctatataagtttgtgtttatatgacgtatatttcattttgctacgtactactgtatgtatacattcatgttgtatgatggagcatgcctcttttgcacaagaaaagtactgaaatctctttatttgaaggagtccacatccacctcgaaggctatgttcgcagtggttcgattgctatacccgagattgatttaccggcgattgatgtcgcatcatctgctgcgtcggtggtggcggaagagttaggtaa

SEQ ID NO: 35837 - DNA, 554 bp, Arabidopsis thaliana columbia
tacatttcaaaaatattatgtcaaacaatattagaaaaacaaaacttcacaagttactacaaaattatatataaattagaaaaaatataaaataaaactcgtgtgttcatgtttataattattattgaaatgttaattataatgtgtattaaattgttcagtgtgatatcattgttgtataaaatttgttttgaaacattatatcttttatgttttaataatttcaattttaaatttcaatgtatttgaattatatggttatatttgaaataattgaactaaatataactatttgtaaaatatataactcataaagactaaaatgaaatataagaccgattttaagggtatttgaggttgtactattcacaccctaaaaaaataaagggttgagggcttgttagagttcaaaaagccctcaaatttaaggatttgaggtgttgttgaagggttgccacgcttctcttccttcattctcagtaggttccgtccttggaccaatgcctaagatttgccttgcggtctggcttagtctaaagcttataactgtttga

SEQ ID NO: 35838 - DNA, 386 bp, Arabidopsis thaliana columbia
  unsure (1)..(386): unsure at all n locations
atccagaaatattagcctaccgaggacattaaggagtaacgaggtcgtggatagagaaccatgcctgagctatggttgcaagtcggtgagccagtgaaccatgggcattgtagaagttcttggcagcaagtttgtcggttgctccaggaagcactttaccaccgtatgttttgttcatnggcacgtattgctagtcgatgcttgtgaancgagatgggtcccatccataggaagccagaagctgtagtttctccgttacacattcattcgttcngttgagttgtcccgatttgattgctgcatcaactgcatcttccgccattctgaaacaaattactnattagcaatgatcacgacaactttaacaaattgctgctatattgtac

SEQ ID NO: 35839 - DNA, 455 bp, Arabidopsis thaliana columbia
atatgtgaagtgtcttgaaatgaagtttgactaagcttaaattaagagttttacacatggggtctgttgcttgttaaacccggataaatgtagcacttttgttacagtgcatgcaacctctctgtttttatttgtttacagtatgaggagaacctttgaaattgagcttattcaccccattagcttgcattctacttgtagtactacaacgagaagagcatacttatcagtttaaccttgtgagaattcatgattctaagtcatcattacagtcaccactttcagaaacacctttcataaacaactctaacttctagatgtatagtcccaattcgaaggatgcaggctagttttgtcaacatatgaaaattggaggggatgatcagtcttgctaaactcattctgattggattttacatgagacttcttatgttgaacacttgaacactgctggg

SEQ ID NO: 35840 - DNA, 610 bp, Arabidopsis thaliana columbia
gttgttcattgttcctcgcctaaaaaaaacaaaacagattctttaattttcctctctctctcgcgacggtggccggtgattgtgtcgtggattactcgtaccgatgatttcgagtggtcgtgctcagaatctgcggctcatgttgccagacgtgggttgatctaccgtggaattgttccagtgatggcgacacgggagctttggctaggtcttcgaacaaggattcgacggaggagaagggaatatgtaaagcgggagactcgattgtggcgttgcacaagatcattaaggtaagaggtattcttgagattagcttggttgaacaccaatagtggcaagaacagaggaaccaatagcgcggcagctaatatgtgttgaaggaaaaataagcattgtgagagagtgatcttattgatttagtggcgttacatgaactttcaaaaatcaacaagctctcagtcacaacatttgttatcttttagacaaagaattttaagagagaaaatgtccttgttatttttgtagaagttgaattggatatcttcagataaacgatcattagaccctaatcaattttgcttgggaaatcgaccttgatatggagatttta

SEQ ID NO: 35841 - DNA, 602 bp, Arabidopsis thaliana columbia
gattgcttatacatcattggctgttgataaagaggtttgaaatttctcaattcacttccaacatatgaatacaatctaatttccaacaagcttttcactgatgttagagtttcttctgttgtgaacattaatgcagttgcagcctgataaggtgagaagagttatgtcagtatcaaacaacaagctttctgtgtgagtttcttcaagtccttcttcgtcgttgaatcacttatcgatttgaaactggctttagttagacatctcttgtccatagaaccttttagcttacttcttacactagttttgatcttttctcactggataattttacaggcactttgaagcaatagaggcaaggctgcttcgcgcttcgttctctgcatttgtagacgttcttacactggccacaagaacaattcaagaatttggtcaaaagtaaaacaccaatatgaagagaaaaaagcttgattctttctcattactcttcaagaactcaaaattacattgtgttttggtgttcttcttcgagctcaaatcatcttggggtttcacagatttatcaaacaatgtactccaagattattattgggagctatatatgg

SEQ ID NO: 35842 - DNA, 609 bp, Arabidopsis thaliana columbia
taagaagttaatctagttctccaaattctctatctgcaaatccatcttgtttttttaacaaccggacataccctagatagtaggcgagaactacaaaaaaagtttctcagtacatctgtgctaatctaatttttcaagtagttggaaattactcatattttctctcatcttgtcttctgcgcaggaacattacgacaaattggctttgcatccgcgattcatccgccatgaatctactgtaggtgaaacacagcttgtgtatagagtataacactattatatcacattttagtactcatttgaaaatgaaactagttgtaaacatgtggtggtattgttggctctatacagtaggtagtgaaaagcttttgcgcctgacatatgtttatttataggttggtgctggtcttcctgtcatcgcatccttgaaccgcataatttcgtctggagatcctgttcataggattgtcggtagtttgagcggtaagcagcttcagatgtttatcgtttttcttacccaatatatgcatgtattatttatttacgtatctttgtatccgtctcgattaatgataggtacttgggatatgtaatgagtgacttgaagat

SEQ ID NO: 35843 - DNA, 583 bp, Arabidopsis thaliana columbia
atgattaagctcaatagggcattgagttttctcaagtaaacattattcagaaagggggtatcataggagagcctcagactagcacatacgatctaatgagtgtcctaccacattcattccctcatcagcagaggaaatttttaaagccttttagctaattctacttaacataactaaatgttcaatacattctccttagagaaccaaaccaaccttgtcaatgtatgaagcagactgcaaatcaaggatctgagtttcagcaacttggatcaacttctcacgctctttcaagtaaagggtcttaccatccaacttctgtattgtcgcctcaagaacagcttctacacgatcagagccaatcgattcccagcaaacaaaacaatacaattagcaaaaagaaaaagaaaaaagagaagccttggtggttcaacccaaaaccaccacgaacaaaaagaaacaaactttacccaattgagatattctgagcttagctgagtccagatcattgatcaagttctgattagaaccgatctgctgctggacttgagaggagaaacgaagagtggtgaaatgatgaaaacag

SEQ ID NO: 35844 - DNA, 562 bp, Arabidopsis thaliana columbia
gttacaatactttaaattcaatttgtgtcgtactgtccaaaactttgggtatttcaaaggcaatgtgaagtagtatcaaattccatttttatatttttcaccggttacatcactttatcattcgaatgcttagtggggaataaactttcaatgtatgcctcactctcaagtctcacccactaggtaaaagactcattttacccattttactctatatagagatattcaactttatctagcttttgccaacaaaaccaaaatttgtttttcgtgatcttgtttcattctttcttaattttgttcaagacgattttttgtttcttttttcgacgagatatcttgctttatactccattaataataatccattagacccaaaacttttacccgatcgagacataagacacaaagcactaaaacgaacaactcaacatttttattctaaatgagacaaatacaaatcagttcaatcatctttgttatcccggagaagtaaactcacgagacctaggaagaaacacaggcaacaagagaccaacagattataaaacacatcaccgtg

SEQ ID NO: 35845 - DNA, 528 bp, Arabidopsis thaliana columbia
ctttttggttacaaaaaaataaaaactatatattttcatgttctaataaataaacaggtccatatcgatgtatgcatcatctttgtctctttcgaaatgttcttgatccctgtctgaacttgttacgggtctataaaccaaatatttccaaaagaaagtgttcatatataatctgacaagtctttatctactaacgatatttagattcggctcaatcaacgactattgtaaaatttctaaaacaatagtcaaatcatttatcacattcccataaactgactcaattttatccaaagccaaaacattaattatatccttatcactatagttttaaaaaccgtcgtcaaataatttatcatactcccataaattgatttagttttattcaaagcttgacaaactatatccttattattatgatattaccataaaataatttgaccataataatttggcatggacattcagtttttatgtttagtttggtttaggctttttggtttagtacaatgaattttgaaaataagt

SEQ ID NO: 35846 - DNA, 479 bp, Arabidopsis thaliana columbia
tatccgtaattatcatccctagagtacctatcatgtctatgtgaatcaacacctcctctaccataacgactgcgatcagattcccatctatcctctttcctcacatgaactggttcagaatctttcctagaatgctttggattagggctctgattacgttcaggacttcctacaaaacaagaaccaacagttctaatttaagctatggctacaactaaaagaggagatgctatataaccaacaggtcttaagacccatcacttaaaatgctataaccaatcaactaagctaatgttacagtctatataataattaagctaatgaaaatttcgagatatgagactaaccatcagatgaagatgagccatcgtcagctaaagctcgacggcgatattttctgctagtcccgtcattggaaggctttcgaaaagcggtagtggtatcacaccatcatcatgcggaggagaattcagttcggt

SEQ ID NO: 35847 - DNA, 577 bp, Arabidopsis thaliana columbia
gatctttatcccttttaattaattaattagagtgatatatatatctgtacaattgtttaaagaatgcatttttaaaataaagctttaaactgaaatatgttagaatatatacttgtatcttgacaattacaaaactaacagtctaactttagcatatctaattttacttagtatacacaaaattataacactataacacttcgttgattattgtcacaattttcacgacttattagcaactcttaattctccgacttacttatagtcgtaacgtagtcgttacctgacgactatttggacgactatttatcacagtcgtcatttagcgactattgaacgttccttttattttagtcgtagatctgtcgctgaatagtcatttaatagtcgctaaatgctacgactacttataccatcgccagatgtagtcgtaacacccgtgttttcttgtactatcatgcgctctaataccacctaacatgactttcgtaagatcgatactcttgaggttgaacagtggatgcctttgcatcaaagcaatcgggagattatgaggatacaggatgtggggggaatg

SEQ ID NO: 35848 - DNA, 451 bp, Arabidopsis thaliana columbia
taaataagttttacgttacattgaatttataaatcggaaacctaatcgtattttccaacttaaacaaagtaaaagaaaaaaaaaagaaaaaaaagaaagcaaaggttaacattatcggttactaagttctaatatttagtaggacgctccgcaacagtctctgaacactggtccattagcataggagtaataaccggattgaacggtagttgcagaataccattggattcggcttccaaagttgcgttgctacaagctgtaccgatcttgtcgaacattactacgagtaaggtttgcgagagctctccgatgcaccctggtataattatcagagatgagtaacatcgtgtcaaatcaggtaatccaggtacaccgggactcggtagcaatggaaatggcatagctcacagtgccggatattgtggtcaatgggcatttacggacaatgcaa

SEQ ID NO: 35849 - DNA, 587 bp, Arabidopsis thaliana columbia
gctttctttaattaaaaacataattattggtaggaaaatgggaggaactgttttctcttcaaagagaatggtaagaaattcgtcgggaactttattaccatttttcttccacgttttcagtcggtaagaaatttgcgacgaacttcctgtcattctcgattttctacgtaacactacttatacatatttttttgtaagaaaaattgtaggaacttgcttgttcctactattatcataggctttacacggtaggaaaatcgaacattttcttgtaatattcaaaaattacaaatcttagctcttttcgcctcttcattcttacaatgagaaaaaggtgatattgattcaaatcaagtatacaaatcctagggttaacaaacatagactaaaacgtgaaataccttaatgaaagcgtcgagtgtgtcttgagagattatgctccataactcaacacaatgaaacttttcattgagaaaaaaaaatctctttctggactctctattaaattatataaaaacgtgtcacctcacataacacttacacacatatttattacactaaaaatacgtagcaaatcagacaaagat

SEQ ID NO: 35850 - DNA, 419 bp, Arabidopsis thaliana columbia
ctcagatccctatatactactgacttgctgttgcaggtatcataaattagattttatccaaaaaaaggtaacgtataactaacatataataacgagagggttattgaacgatccataacttttgtagagcctttttgatattgatgctacacaattgtaaatcacgtatgccgctcacgccaatattctgattattaactacttcataatttatagaaaagattcttctcttttcgttaaacatacaaaaaaaagaaaaaaactctcttcagtcttcacatatttttctatacaaaaggtctctcatcatatatattagtacccaagaatgactctcttttttcttcgatcacaaatgaccccttttctagggttgtagctacaaaatgatcatgatattcagattcatcaattaataa

SEQ ID NO: 35851 - DNA, 453 bp, Arabidopsis thaliana columbia
caatccggtgtgatgcaaacagatgagagatgatcagttagtaacttgatttagaatggtttttcatctaattcacccttcaaataaaccaaaaaaaaaattaaactacaaataattacatatgtactaatatacaatattactaattaattaattaaataaacatatacggttattggatcggtttggtttaaaacaaaccaaaccgaaccatttcagttgagtgagaagaaacataactgaatagtttgagtctaagattggatttggtttgtgtcggttctgtttggttcggttcggtttggttaaaatgtccattcctcaattagcagtgccatcaaactagttacaaattataggttcggtaggttcctttgggtagttgggtttaatgattgacacatcaccgtcaataatgtctcctttgcctatgatcaattaatgacggtttaa

SEQ ID NO: 35852 - DNA, 364 bp, Arabidopsis thaliana columbia
tattttcgatttttccttttgccgtgatattttggatttctcttaagaaaagacagtaatacaaaatatccgtgcatgccaatcgcgtcgtgtccctatgtaatcacaggcaactgaatgtcactaagataatagctgaccagtccagattttgcagaaaaacaaaaagtggactatctctatgcacaacgcggtatctaccacagttttatcgtgaggtgcccgaaaaaagaacatccgcacgtaatcacacttgtatatttcaatttcgtggacatgatcttgatgatgggaccacctaatgcaggacttatactcgataatacccatcattactatattaactaaagaagctatataggtc

SEQ ID NO: 35853 - DNA, 590 bp, Arabidopsis thaliana columbia
gttgttatttttatgacataccagtcattgttaattttaatcatttaacttatgggttatctaagtttattcagtaatgacatcgtatttgtttatgtaaggcagtcaatatgtcacaattcaaaattgaatgatatggaatggagtctatatgattggtgattttcagtatatactattttttttaatcaattggtgattttcagtaaaacaactaaacagaaataaatatataattcattttggtatttgtgataaagacatccacatatgctttgacataaatatatatcaaatcaggatctaaaggtgggcactaccaagattacattaaaaatgaaacggatatttttttggtcagtaccataagtatttacaaaaaatgatctttatcaattatcgacacaatacacacctatttatgtacattattacactgatgttagtgatcatgcatgtagtattttgttgactctgatttaataatgagagtatttggctgactttagtagtgaatttgatggatctcaagtaaatttacactatacgtagttaactttgatcttgttgcctaaaaagttttaaacgtg

SEQ ID NO: 35854 - DNA, 495 bp, Arabidopsis thaliana columbia
ctaatgaaatttttcgtcacttatggcttatgcgtccgatggagattatggtaaaaggcccatttattcaatccaaagcttactgggttagatgatgattgtggtaaaaaggcccattatagacccaactaagtatcttagggtttcagtttccactataaaacttgttgcggcgtaagttagggttttgagaatcagcggcttcacctctccaggttcgtgtctcgattttgcaaactatctctcgaaatcgtcctacatttctttctacagattcattactgagcttcgctttctgggtttctatctacaaatttcacagatttcgtgtgtgaagaatcatttcaagccatgtctccggctaaaggtacgatcttttcattgataaccacttgaatcttcactggaacatgatggatttggatcttcttctactagactttagttttgctgaacccgctagtatctggtctcgattaatgtttgctaatcatg

SEQ ID NO: 35855 - DNA, 448 bp, Arabidopsis thaliana columbia
cagcccagcccaggcccaataagaaagccaactacaggcccacctatcatcaaacagttttaccttgtcattcaaacaaccacagacctcaacgaagacaatgacaacttcttctttttttgacagcgacgacttcttcctcttcttcgtcatttttttcgattaaaaattgaaggattatatgtgcaaaaatgcttttgatttatcttctgattatgactctcgcaggaccggcttaatagaaccggagtcccggtacaaaattttaaaattggccttgtttagtactaatttttttgtatacacaaccatatacctacatataaataaaagataaaaatatatataaaaatttgggccatcttaacaacataattacaaaaataagaagagtatttgggattttttaaacacataattacgaaaaaagcatttgaacctttaaatt

SEQ ID NO: 35856 - DNA, 1143 bp, Arabidopsis thaliana columbia
tggatttgatgtaggactttgttttttgttctaaagttaaaaaaagaagaaaaaaagaaaaagaatctgttttctcatccaaatctacccaccatttttgttgtgggaggtttttttttttattattacaaaaagaaaaatatagagagaaggagagatttgttttaaagtaaatattttgattgtttatgggaatacctgatggttcactgctagatctaattgataaggttaggtcttggataacttcggattcaagtgattctttgttcttgttgtcttcatctaaacaagactttggaattatgcctatcgtttccaaaatgtgtcatgactgtggaacaaaggtggaacaaggatattgttgtcttagttgtggttcttgttggtgcaagagttgttctgatacagaagagagcaagatgaagttgtgtagagaatgtgatgctgaggttcgtgagttaagggttaagagctatgataaggttcatcctcgggatagccctgatccgccttcttctcttgctaccgaaagcgagagtcttgcctcgagtcttgaaatccgtgattgtaggaacatggcttctattcgttgctatcctagcaggtaaagtttcgatttttacattcaattatgtgtgaaaaagattcaatttttatgttcaattatgagtctttaaacatgttggagtaagtgaatgatttgtgtttgcaggggagaggaagaagaggctagatattgtggtaaacagttgttaagcccttcgagtgataactatcaggacagttcagatatagagtcgggtagtgttagtgctagacatgagctttttagttgtaaatcttctgctgggtccagtcctcacgacagtccattaaggaacaattttagtcctcttgggcgctttgtacagcacgcgaaagacctaagaagccctactgtttgttcttttgataatcatcaagaacaactcttggctgataatttagttaagccaggtcagggggtattggaacaggaagatcacgaggaggaagaggataagttgcaacagccgttggattttgagacaacggccgcatctggtaccctccacaccggaagatgagatgatgatgctgagagtaatccttccatatgat

SEQ ID NO: 35857 - DNA, 1003 bp, Arabidopsis thaliana columbia
ccacgcaatcaaagccatgacgattcttctttcctatgatcaaacaaggggcacaaaattcaagaaccgtacacaataaatccgaatgttaagattccaaagaaaacatgtatgtatcttatgagattgagtaagctctttttttttttttaacaaaagagatttagtaggttaaaacttgcaacgtagtgatatatgcaagcactgacttgtatcagttggattcaaaacaaagtgcaagtaagcttattaacattctttgaattagtatttagtaatccatgttgttgattttgtttcaacagaacatatagaaaattcagaagaagctaaaactatataccaattcaaactatctagctcgtcactcgtcagatcttgtcctcctaagatttgtctcaatcagcagatatatataaagcaattgaagctaaattctggaaacttacgtgatgaggaacaaaggtagtgcccatggagctaacattcgacggaaaaactccggcggcgggaacgaagctccatttggtggaattggcaaaacctagggttgttgttgttaagtgacgactcggagaaggagaatggtgaatgagacggtgaggagaagcaccgtaaaaagagagattccgattagattggagagaaatggaacgtagcttagtgcaaaacctctgcattgtcgtctccaaggggaagaacaattttctgattgaaatgcgaattttataaaagagaagaagtgtgtgtgacaaagctttggggtttttgggaaatgattttgagtgtttggttattaggataactctattcttttttactcgtgttgtgttcttgtcatcattctcttttactttgataatggtaaaatgtctttgggaaaaaagccaaaaaaataccaaactaatttgttttttttttgtaggcgaaggggacaacgagtcccttcaaaatattattataaaattaaccagattacaaacaaatacgctgtgaatacgag

SEQ ID NO: 35858 - DNA, 172 bp, Arabidopsis thaliana columbia
gtacttctgccgcaagagccactgtatgttcctccgttcggagggagcgttcggtgtttccgttgaccgtgatgactcctcgagggcctgacatcttgagcttgaggtatgcatagtgtggcaccgcgttgaactttgcaaacgcgtttcgtccgagcagagcatgatagcc

SEQ ID NO: 35859 - DNA, 370 bp, Arabidopsis thaliana columbia
catcatcctatctttaaaacacacatccttggtacgttgctaaccaaacacaatttctgtatctcttagtccaacgtcagttcctttggttttacagtttctgtgtgtgattattttctatgtagccttcaggccaagctgcgaagaccttgactcgcaaggagaatcaacaatgtccataagcctccttgtctatatattccacgcccatcgtttggatgtgcaagaagagaaccacatagatgaatgatcagatggatttcttgtctcggttttacatgtagaattatactgcagcaatgaaaattaaaatttgttgaacaaatgagtggtgtgcatataaggatcacatgaatatagaatcacattt

SEQ ID NO: 35860 - DNA, 575 bp, Arabidopsis thaliana columbia
atgaatattctacattaggatcttccattagattccataaactcagatcaaacgacgcacacgttagtagataactctatatctacgcaaatttgctcccagcagacttgttgggacgatgaccgttgttgtgagttcccaaattattatcatttttaacttttctatctataaacaataagaaaccaatgtttattttgttttcgtgacctactctacagtcaacaatgataatgtacattgcgttgtttatgtgacgcgtgaattgatgtggacctacttacctgacagacagtggtattcgtccacaaagggtattaacggcgtcaatattgccgttaattgcgctgcagaaataatttatccgtttcagtgacattacttaccagtgggcaccatcgagagaggtccaccggctacttgatgctgacgtggacaaaagtgtatacgtcagcactcacaggccattcacgatagtagtcatattcatgtaatgtatgatatgtatcattcatagttcatacaaagttactcgttttttattttctgtctgtttaaggaagagtttggaggat

SEQ ID NO: 35861 - DNA, 372 bp, Arabidopsis thaliana columbia
tgatctcttgatcatgaaatgactcgccgcttacgtccgtcgggtcccgacggcagagagatgccgctttcgtctgcctccatctccgtctctcactcagaatctctctctcactcagagtctctctctattcccaagttttactcagagcaaaatttgtgtcaacaatgcctgagaaagtcattactaggagttgtgggcacagcttatatatacacgcacattaatgattacttacattattatctttgcgttaaaaatttaattgtaataattactgaatgttaaactaacgatcgattatataattccgaattcgattctaacatagcgaattatgtctaacttgtgttcctaatggtagacaatgtt

SEQ ID NO: 35862 - DNA, 541 bp, Arabidopsis thaliana columbia
cataattccacaaaattataatgtagcttcgaaatgaaataatacaacccaaatttcttgcgttatatatcgacgatcgtaggcataaactcgtaatagtttttctctccatctccatgtaagcaagtcggtttctgattggttctctctataaaagagtatccttcgattacttaatagaaatgatgttttgacgaaaaaaaatatatatattgacgatcataattttttaataaaagccaacatattacgtttcttgaaaatttcattcatgatttgttgacgttgtgttgttagtatattttgtgcatctttaaactttaaaagccatccaaaaccaaaattaatgaataaattataaatttataaatttaaatatgtcttaaattaaaataaagtaaaactgaagtcaaccaatatggagaagtcaaacacctaattaataagatatttcttgttaaaggaattgaaatacagtgttaaatacgttaaagtggactaaaaaacaacagaaaaacatcttcttttatatggtaatgta

SEQ ID NO: 35863 - DNA, 406 bp, Arabidopsis thaliana columbia
atgtatcaagttgatgtaaaataattgaaaaacttttatagagactaaaaagaagaggtagagagtccaagttcgacatggacactaccatattgatcgtattaaaaaatgttgttacaaccaaaatatatattagatatgaaacatcattagagattaataaatcaaacagcccactagttggatattaaaaaaattaaacgaatgttattgtatgaattttcgtaagtcatttgcatataacgacaagcaaatccttaagctatgattaaatttttatgttagagtgtgatttgtaaacatttttaatttaacaaaaacattagaatcatatttgaaacaaaaacggcaacgtttgttaacatggagttctagacgagacgacaccgttttgaaaaacatagag

SEQ ID NO: 35864 - DNA, 511 bp, Arabidopsis thaliana columbia
gtgtaagcaggaatgcatgagaaagaagacagtgtcttgcattgttatttttaagaattcttgtatttcaatggtttttatgaactctattgtctgttatcatcttgtgtatgagaaccaagtttttttagagaatgagaataaaattagctgctttctattatcttgtgtatgagaaacaagttttttatcttgtatatgttctgttgctcaggtctgcttaggtcagaggagtgtgaggtgaaaagattcttgtcggtattgtaagtttatcatttccttgttatgcttctgattgtatcgttttagtatatcatctgatttgagttttttatttgtttcaggctgatttagattcttcaaagcaatcaacttcacagtcagttatgcttcaagaggtacatttatgagatctatagcttgtacatttctgattaatggaatctatttgatgggcatgaatgtgatcaattgatttcgctccgtttccattatgatcttgttgtgcttt

SEQ ID NO: 35865 - DNA, 524 bp, Arabidopsis thaliana columbia
tggagactgaggattattagtgtataatataatcggtcccgaaaaaatatgcaccgttgtctttatgtatgcaagaatctcacaagctcgtgaacacaaatcccatctaagcgagagagataatatgaacatcgcaagtactaattactgaaaatttcgtgaaggattcaaaaagtatatggagtcatttattttgacttctaaatttgttctataatgcaagttgtatcatcaatagttgttaatttcttttagatttgaagatccttttactaatgctcgaatacacatcatatcaaattatcaatgatcctttttacagtgaatcttagtaagctattcacaagttatgccataaaacaaaaacaatgtaacatttcttttagatttagagattaatttacaataaaatttacattgttttatgtttgttttcatattaatataattaagatttggtctatgcatggtttcatacttatggtctatttcgagagttatgcttgttatttttgagcatggac

SEQ ID NO: 35866 - DNA, 524 bp, Arabidopsis thaliana columbia
  unsure (1)..(524): unsure at all n locations
cgtggaggtgtcaaagagagtgatgcagggacggtccagagtgcagcagcaagaggccgtgaggtgaggttcttctctctatgctgcctcctggtgctcctgaacagtttaggaaattgttcccaccaacgaaatgggctgcagagttcaatgccgctcttacagtgcctttctttcactggttggttggtccatctcaggtcatagaagtggaagtgaatggtgtgaaacagagaagtggagttcgtatcaagaaatgcaggtaacaagtgaattccatcaaaatgactattactagttgtcttgttcaaaatgtgacagacttgctcctactgttgattgaaggtatctggagaacagtgggtgtgtaggaatgtgtgtgaatatgtgcaagattccaacccaagatttcttcaccaatgagtttggcctcccactcaccatgaacccaagtatgtaacatatctccttttgaccatccttatacattggtgtttgtttcattagccacnctccattttggt

SEQ ID NO: 35867 - DNA, 418 bp, Arabidopsis thaliana columbia
ttcggaatttcaacattacccatcttaaattcccaattccgtaagacccagcacttcaaacaccaaaatcagatcaatcccacaattaacaagatcaagaacagaaacctagtggagaaacccagcactctaaaaccctagattcgaaaattccgatgccggtttcaaagatgtatcttcctggcttcttcaaatcgggaccaaatcaacacaatgaaattttacgtaacggtacgatcaacaacggcaaaagcagcggaatcttcatgaggagaagaaacgatatgaactgtgcggttggcaacgacggagaaacggaggagaagcaaagagagagaaagttgtgtaaagaaattgttaaatcttgaaaattcctaatttactttaatgtttgccgttgcggcatgttagcgtggga

SEQ ID NO: 35868 - DNA, 620 bp, Arabidopsis thaliana columbia
tagagtctagaggatcacgacttggcggaaattactttttttttttatttgactagtgaaaccggaacgagcgagacgcaacagaatctgaagatcgaaggacagtgaaatcgaagaattgaagcacaagcttctccatctctgcaatctctctatccatctctcgtcatcgcatgtttcgcttcccaattcggaagaaagagagacgacgcgtctgaagcatatctccgtaatcggggtgaagaaaaacgcggcgagaagaagaggcagattttcgtttttggagggtagacaaatctggcgaaagtggagggcctaagggcgaggccgtggcttaagccaggagcttgtataaatggagatcaatatgactacgacggttcggaagacgaccattccaggccttggtggcgccgtcgtctcagatccttgtatatggcagccatgtcctttactccgtccacttttcgaatcgctatctcgttgctccttcttgttgctatcgtctccgccgtcatttttctccggtcgaacaggcaatttctccctcctcctcattcgcgtgtagctttagtgataatgtagcaacgatagtttctgtatatctaagtttagaaatt

SEQ ID NO: 35869 - DNA, 530 bp, Arabidopsis thaliana columbia
gacccaggactactcggaaactcctcttccaaacttaatgaataatgttccgtttcctcaatcaaatcctccgaacccaagtgctaaagatagaaacatctaatatatatatcactagctgtactagaagaaaggcgtcaatattttctgtctcacagtggacaacactagcgctcaaaccaccatcagtcataacctaaatcggactagtttacaaactcaagtggatctaacaatcctagcacttaaaaaaggtctctttcatgcatatattgacacaggcaatgaaggaactcacgagagctagcctgggcggacgaacaccgatcctgaccgctgaacgcaagggatcaagcccttttccttcaatcaatgttctcgcaattcctccaggaacatacttcaacgtactccccaatccaatttgacttctaactctgcctcctttcacattcccttgccaagtaatcgaattctgaagcaacagagatgacatgacaaacgcacaacacgtaaacgcgacgagaaag

SEQ ID NO: 35870 - DNA, 522 bp, Arabidopsis thaliana columbia
ttttttcttattgtcttcttgttatataatccttttctcgtctacaataacgggatttttgattggttattaatcctttttgtctcttcaatctatttatagaaacttagttgatggcacgacacctttccttctcttctgtctgcacccacgtctctctgtctcaatctccttttttattattttcttaattaatgacttttaaaagctcttcaaaatttcagtttccgcatcaacatgttattagaacaaacaactaagataaacaaattctggttacacaaaagtaaacataacttctctgatttgtgtctttttggagatttgtgggttcaaatttttataaaacattattatggggtggaatgtataaatattccataatatagggtctgtttaattatatcaagcatatatgcacatctttttaaggaaactgatagtttgacattaattgacttgacactatgaccagcgtaatcacctcacgtgctcgtcacgtggccgtgatcggactaggag

SEQ ID NO: 35871 - DNA, 541 bp, Arabidopsis thaliana columbia
ttatgcagagaaataatcagccaattccatctgcaataaacacctcgtccatgaattttaaatcatcctctatcgtggttatgaaagcagctaccgctccagtcttcaaagacacaggcattgcaggttctgcgtctttctccccgcggaatgttgctttaccaaatgtcaaggttggaaacctgaggcaagcccagaaagtcattccgaggaagcagagtgctatggatgtgaccccgaggccaggatattacaagggccagacagaatccacaatgaaaaacactagtaccagaccattacaatcgaaaagcgacatggccaagtcagggaagatccagaagcctagtgtcagcctaagaacaccaccaaagaagcttgggttcgagaagcagtctcggccaacatccccaaaaccagaactgaacaagaaccagagacaacaactcagtaggcaacagacagagtcagcctccccgagaagaaagccagggataaaatctcgtggcctacagcaatctgaagaccgtttaagtgatga

SEQ ID NO: 35872 - DNA, 952 bp, Arabidopsis thaliana columbia
gtttgtgtctctctcgctctttaaagaaagagcgagaagcaaatcgcctagtgcgggaagaaactgctccgggaatgaacttgagttatctgaatctaaagtcaatcgagccttccttgttttgtaaggcgcattcttcagatccactaggacttgcttgatcatcttaagtacctcatttgttcttgctacaggtaagccgtcctcaacgaactgagtaaggataggtagaaacgagtcataaatgttggtcacatggtcatcaacgcatttgcgaactgggcaagaggaagagctgacagatgagttttcgtctgaaccaaattctgatctcataatacgccattccctgtccccactttgccttccgggtaaagaaactgaggcattatctgcggaatgcagatttctctctagttcttcctgctcatttctgtctcgtaattcaagcttagatagagattcaaacattaagctacgtcgtcgttcccttgtcagggttcgaagaccatcttgcaaagatgattcagttgtgagagttcttctagataaaacctacagtggaaaacaacagcaagaccatgagtgattaatagaagtcactgtttttggtgtcgagaaacaaaacagtcactgttttcgtgtagcattacctcatgccatttctttgtatatcgcttggtaacatcacaaaccccgtccttagaaatcgcaatgacataattcaattttttattccatctagaaggcagagattttgttagaatatggcactatggcagtccattatggggattgttcgatgagaaacatggaaagaggaagtaactggtacgcaagaaatcttaccctttctcatataacatgggtttatcatacactccttcacaagggtcaagatggatccactgcagaaataaacaacggcacaaattactcggtataatgaaag

SEQ ID NO: 35873 - DNA, 563 bp, Arabidopsis thaliana columbia
ttttattagaataatagaggtgctatgttaatggcagttcatgtataatgattttccatgtaataatagtttattcccacgagtcttttttttttttgggtcaatagatgattaattacctccactcctacactatcataaatcaaaaactaatttcacaaaattcacattatgttaataaaatatgttcccgctgtcccatattgtaaacctttatagctaaaaacacagtttaaaaaaaacataaatgttttattattttacataaaatataatcatctaacatttatttaaaactttttaaccaatagatagtagaatggaaataatcataatatactaaacaaacataaattatgaaaaaatatttatgttttatttagtaaaaaaatctaatagaatgaaacaagattttttttaaaaaaatatatatttatgtagttgtgaagattttttcctctcttttccgatgatatatagatttttgattagacgaaaaaaacaacaatttaaatttgttctatttcaaggcaaagtgtaaggcccgtgacccggaaaattgg

SEQ ID NO: 35874 - DNA, 621 bp, Arabidopsis thaliana columbia
gcattgggagaggacgagattcttgtgtattaaaaaaagattgtcctctaccatatcattataattttctctttttgacaactttttacactataatcaaataaatttaaatgttttaaaaatattcaaataatttgagagagaaagatttggtgagaagtcagcatttgccgacaggaaattctgtcttaccaccaaaataccaaatcaataattccaactacttttttgaggtcacttcttgttttggcgtctacgcattttctaaaaattgttttgattcgttaaatactgatttatgtcataaatgtattaattgaatctagaatgacaatgttttcgacaacaaaattgtagacaaattcaaaaagcattaatttaaataatttaaagaacaaaaagtaaaattttcagattggtattggacttttttttttttgtcactaaaatttttattagaacttgagatggaaccttacatgaaaccaaacgccaaggaaactaagtcggcagacaactaaaagtccccaaagtcataagccggaagaaacagtgaattctccgaaaactaaaatggaatcaagatacactaaaaatacaaagcagaaagttcaagtcgat

SEQ ID NO: 35875 - DNA, 492 bp, Arabidopsis thaliana columbia
tgactgtatatcttctttacctttaggcttttatccagaacttggcactgtttttcacttcgtttttcaaggtaattctctttctttgttgagttagatatgtcaggttgttttcctggtattttaggctttggatgtgtaacgagggatgatggttggcatttgtttttctagtcttttatctttcatatattttatgcatttcaaacacaataatgtgctctatgttttcgtttgcagttacatataaaaatcctagaatctgcagccgaaaatatttctctattacttgcgggtctgggatatctcattagcatatcgtatgttgatgacactgaagtattcaaggtatgtgaattacagttgttaatacatttttctgttgatacttgatgcagttttaggtttcagtatatttatattacccctcagactggtgccatgttatctgttgacgctttggaaactgacagcttttgcttgcttacgagt

SEQ ID NO: 35876 - DNA, 579 bp, Arabidopsis thaliana columbia
  unsure (1)..(579): unsure at all n locations
cgatataccaaagagagggaagaggaagagcggcgtcatggaggtgatcggcatcggaacggcctccgtcaaccaccacgcgaacatccacaccaaaacaccgagcatgttcctcgccgtcgtcgtttcatctcccccgagatctacgcatagacacacgacggcgcaaagaagaggaccaagagcgatgtaacagtttttgggcgtgaatattgtccgaagttgttgtcccaccgtttgtcgttcgaatggttcatcattatggacgaccggtaagagcggagatttcagatcgtcggatccggcgacggtgacatcaccatcgttcattctgtttattccgtttttaatggaaggacaaaaaatgatatagagaaatgtaagaaccaaagaagaagagaaatgagcctttttataaatttatttatttcttttattataatgtgtttgggcaaaacataaaaataaatatacgaaatgtgtttatattaaggttatttatagaataattaaagtttgtggtcatatgacganaatattcggtgtaagaccgtgagtgacacatgtgacatgttttag

SEQ ID NO: 35877 - DNA, 552 bp, Arabidopsis thaliana columbia
tactagaatgcaatagagatgtagtaatcataccgacttcagaatgagcgtgtgaaatattagggaaagatagatagatgaaacacatagccatgaagaaaattgtttttgcgttggtatccatgtttctcttctttcgagattagattttgcttaatggagtatgttattatgttttggagattgaagggtttagagacaacctatttaagaggaggcttttgggggatgtttgttctgctgttctgatatggtttttgccgttgctacgattattagttaataatctgatgttactattggaaacatgaaaaaaaaaaaaaaaaaactgaatgcttagtaaaaaccattttggttgagttttctaatttggggtttataataataaatatatgtgaagtatgtcggtttaacagagattaaagccgaccaggacaataggatctatgtcagtttaacagagataaaaaccgaccaggacaataggatcaagctcataagagaatcgccaaacgaccgaaacaaacaaaagttggaccataaaatccaaat

SEQ ID NO: 35878 - DNA, 516 bp, Arabidopsis thaliana columbia
gtcccaccgttactacctgctgtgataaccttacataagtttctggtagataaatccctgccctctttgaagagtaaaagaggtagagctccatggccaaatattatctttctaaggtatagagctttctttgtagatgcgtagtttcttgatttggaagatccctgattatctggatcggatccttcatgatatgtattttagttgaattgtaacaatggtgtaaagtattggttaagttggtgtgaagtattggtcaatgtagatattagttgtgacaatgatgtaaagtattggtcaagttgttggagtaatttatctaaataaaataattagcgaacgtgaggtgattagccactatgatttcttataaactcacgttgacttctgagaatttttgaaagtctgacatcagatctatgacaagaggagcaggaggggagacagtggcatggagttacctttgcagagatgttgtgccgctcactgcaatggtcgcggtgaagtgtgttcggt

SEQ ID NO: 35879 - DNA, 616 bp, Arabidopsis thaliana columbia
tagtaacgcccgccagtgtgctctaaagtcagagctacgacattgaggagtaggctaccagaaactgcctctagcggtctcatgacgggctgtggttagtcgagactgttcgttgctgacaaggaaagtatatcgtgctgttctgagaagcaatgtcccatatatgaaagactacgtcctcattcaatatagagaatgcacctgtcgagctatttaccctggactgcttactcacgaaccattgctggcctgtatgtttgccctcggtcagctaggcaacacgctacctgttaccaatatcacaatgtgattgcgctgcatcatctactccacggccaatgtgactggctattcaagcctgtaatcactagactatgatctcagctcgatttcctattgagcttgaccaaggctgtccgaaatggcggcgacagactattgggtcctgcgtggaccgatctgtacctgctccaagttcttcgttcttggacctaggtcttcaagctgacgacgtacctgcactctttaaacacgcttgatcgcccaaagtgctgagattcttgcttgcaatgtcctggtatcttcgcttgtgagaaatggcaagtatccgtaatct

SEQ ID NO: 35880 - DNA, 722 bp, Arabidopsis thaliana
gaaagtgaggagtgacagaacatgttaaggaaagctcaagaaagaaagaagacgccacttctggttctacggaagaaaaatcaatgaaagaggatcatgcgggacagcgtcagttactgggtcacgatattgttgagaaggtttctgactatcatgcgtctgaaaaagggcatgatagatcgacgaaagtgaggcgtgaagaacgtgttaaggacagctcaagaaagaaagaagatgccacttctggttctagggaagaaagagtagataattcaacgaaagaggaccctgttggagcagctcagttactaggtaacgattttgttgagaaggtttctgactatcatacgtctgaaagagggcatgaaagatccaagaaagtgaggcgtgaagaacgtgttaaggacaattcaagaaagaaggaagaggctatttctagttctagaggagaaaaaccgattaaagaggatcatgtgggagcagctcagttactgggtaacgatcttgttgagatggtttctgactatcatgaaactgaaaaagggtatgacagatccaagaaattgagccgtgaagagcgtgttaaggacagttcaagaaagaaggaagaggctatttctagttctagagaagaaaacctagataaacaaaaaaaagacgagtctacttcaaatagaaaaaggaaagcagaaggagagtgttctacagctgaaacagaatca

SEQ ID NO: 35881 - DNA, 573 bp, Arabidopsis thaliana columbia
tagattcggctgatatgtccgagcctactttgcatcatctcttctaaatttgttcaccattaccttacctgattctttgcattccattatcagtctatatcatgacgtgacgtagagttcgggccgggtcactgttaactttaaaattagaaactcttttatttaaatatttcgaataaaaaaataagtgttttaaatttaaatgatcgaacttcaacccaacttccaccagagtgattacggccattcgtcacatcaatcttttaatgacctattggcctcactattttatctaataattacactttatccaatattaattattgagtatattatgtggctttgataattggccgagttggataaaatagtgaggtttatactaatattgttgttaagttactattcagattcaaactcgtaaaattttatgtaattgacaaaagggtaagttggtttgatataactacgccattattctttccaagagacaagaagtttgcaagggcaagataataaaaaggtgttatgggtatggttgcattgacaatttaggtttagtatggatataag

SEQ ID NO: 35882 - DNA, 537 bp, Arabidopsis thaliana columbia
aattatacatgagctatatattattctgctaaagcatactttaaataataaaaatttaaattctatagatatattttgtgtttcggattaaaaagaacactccaaatcatagaactaacaatacatgattttgattatataaaaaagaaaatcaataacacatgattttgtttcgatatcaaactccatgaaccaaaaaaccttataatgtggaaggattactaagatttaaatattttttttttctttttaaaacactttattaaatttttgatatcatttatattaatattttgttgattttagtttaataaataaattagtatcaaaaataatattgtagaagataaatgttactttagatcctatttctttcactaaaataggtacaagcatttatagccattaattattctttgtatagttaaaaatcccataataattaatggtggacccgtaaaggttgcgaaaagtcatacacgttccaaaacaaaaagtcgcaagtctacattttccttcttccagaaccataacacg

SEQ ID NO: 35883 - DNA, 462 bp, Arabidopsis thaliana columbia
gatggtgagatgaccatagtagccaactagccatatttctccaaaaaaccgttgaatgcagccgtgcagggacggacgagactagcattaaagctaggagcatgaatccttctccatactttaaaaccaacgtaacggaaaataatattgagaaagcaagatatatagatagggttgaaaatgggcttcgttataatgggcctagactttggttgatttcggttcaactttaatttttgccttaattgaatattgaagaagtgactgttggataactcccttaagtcttaagatgcaagaaaagaagctgaattgattcaccaaatacacataataaagtttcaatctgtttcttctattagggtttgggagatttttaatcggagatctcgaaaagatgatagatttcagtcgaatccagaaagagcttcaggactgcgagagaaccaggattcttcgggt

SEQ ID NO: 35884 - DNA, 575 bp, Arabidopsis thaliana columbia
ctagtaacggccggctctcaaatctgagaataacaatcaccattcccgcaggtaataaagcttctattactttccggaggtttgactcgttgttgactttcaacaatttctggtaacttgaacggcgttttgcagtaagagcggcggcgatttttgcaagaagaagaagagaggagaaatggcgaacaaggtttctaacttctcggatctgattcaacgagttacggcgtcttgtttgttgcatccactctccgccggccggcaagatctcgctgtgaatcgccgggaagagtacgatactgaagaagaggagaatgaggaggaaggtgagattcagtacgaagacgcattggagaaggagaatggtaaagatgagacaattagggctaagaatggaaggaacggtgtgagtgttgagacggtgcaggagatggagatggtgatggacgaagttttcacggcggctgctgctatgaagagagcttaagttgcgcttcaggaagctcattcgcagtgggatctggagaagatgcacgatgctgatatggcgatggtggctgagctgagaaggattg

SEQ ID NO: 35885 - DNA, 545 bp, Arabidopsis thaliana columbia
ccagcttcattagggtcttagaacgatgtcatgaaaactcctcttgaccatagttttgtcttttgtgtttcgcagcttcaaacaatatgattcaaccacatcatcatcaagcgagctttaaagtgaaagatggtgattttaagcgatcattcttctcactttctacattccgcagcaaaggaaacgactcgaagccaagataacagagaaacagaactcaagtctctatgtttacatttacaacaacacaagtacaaagtgtgtagtattgaatgagaagtacttgattccatttaaacacagtattgttgagtttataatatgaaatgagataaacataattttgagaggtaaaaacttcaaattataatggttctacataagatatacgaacttacgacccaataaataagattaagttagagaaagagaaagagaaagaagttgaagatgtgcaaaaacgtaaaccgtagtagttaacaaaagaaaaaacgtggaacacaaaccacaaaccccacagctacatgatacatttatacaagaca

SEQ ID NO: 35886 - DNA, 656 bp, Arabidopsis thaliana columbia
actctagaatattggtgaaatcccttgctcgattcaagtactttttatattgatgaaaaatagttgatgtttataagtttattagtggtataagtagaatgaagaaaatttcattaacccttttataggagaatcttcgagtaatggatattgcttatatgaaaacttcttaagttctaattgatacaagcaacttttattggttacgttatttttatttttgcaatgtgcatttgcgcttagtattttgtctcttgaatttcgctgatctcgaaatcagccaagatttcataaaagtgttacacaaaagtttatggtcataattaagaattttgacttgaatattagtgttccgttgtggttaaacagagtccaaatggtgtgttccaaatccagaagacaagaaaagctgaaatggtctgttttaactttgtcgcaagatcctaaggagggacacataggaagagggattcaacaaagagacgaaaagggaaaaagaaagctcggcgagataaacaacctaggcgcatgtttggctattaagttcattgtactttagtttattcgcttgagtttattagtgtctcttacaataaattaggcagtaattcagtgacatggataatacagcatgacagcagtctgatgatgagaga

SEQ ID NO: 35887 - DNA, 578 bp, Arabidopsis thaliana columbia
tggtttctctgttatccatagtaaaatgttgtcttatgataatgggaatttcacggtgtacttgggaaaagaattagtcgcaaactcgttgattgaacaatgaatcttcatctagacagccttaagcctttagttaccctacagaatcattttgatgatttccaatattttcttgtaagcaatgtggccatgtgggtgtattattatttttgtattttcatcaaatggttcacgagaaagtttacaggacaaaactcaattctgtctcatttttccttattaccaggcacgttctttgtctggttcggtcttgtttcctgaagcttttttaaatctattgttttcgaggtgtacgaagaatctttctaattgcttttaaagtgaaagttgtttgaattattcaaaactaatgaataaataaggcatatttctcaaaatcaatcaagcaaagttaggcagagaagattcattgaacagatagagaagtccaaagagactttattataatgctaaacaagtttgggggtcaaaacattacactttcgagggtgatgatcgctataacaagatcaaaagag

SEQ ID NO: 35888 - DNA, 433 bp, Arabidopsis thaliana columbia
tgtatctttcacagatcacattcatctagtaactgtgactatatacacaaaacttcgccaatataacttgggtattgtctatggtactagctaataacaagaatttggtatagtggtatgatcatatcaaactttaagacaaagaagagcataatgaatcgaacaactggagagttatgaatatttgatgtaaaagaggccaactgacaaatgtaggatgagaggaccatcctctactaatgatttttcgcggaagaagtttgaacaagtggatcaatatatttctcgggtgttcccatctagagtacattgcaaattagaaatccacatactaaagaccacatcattggaatgagctgaaagagatctgatagcatatagatccagaaacatcgtattaagactgaattgtttagtaagaagtcaactaaga

SEQ ID NO: 35889 - DNA, 515 bp, Arabidopsis thaliana columbia
attaaaaaattcgaatgcatttaagtcaaaaatgaattaattgaggagcatatcatatgcaattgattcctcaaaacagctcaacaatttcaaaatgtcgaatcatccgctcctcctcctccagtagagttgcctccttccttctcttccaatggcgacttctgctttcaattcaacgatgaagcgaacgacgtctctagccaaatcctccgagagtggcgacgactcttcttactctacacggaggtcagcttctaggagacaccggagtttgagccgtttctctcaccgcatgccggatccagacattgaagtgactccgatgaggaagggaaagtttgttaacaccgtgagaggttctggattcggtgaaattagcctcgatgatttagctgtcgagttttttgaatcgttctccggcgagacggagattagtagcggagaaagaggacgatctggtttaagaaattccggcggcggtaccggcggagaggttacgaattcgcaaaggaggg

SEQ ID NO: 35890 - DNA, 365 bp, Arabidopsis thaliana columbia
  unsure (1)..(365): unsure at all n locations
nnnnnnnnnnnnnnnnnnnnctaaaggctgatgaagcaaggttcggtgacagctaagggataactggtgcgtcaattagcaccaactatcaactcaggcgacaaggtcgcagttcaaggttcacgtatctccaacgaagaaaaggtctcctctctccttaagccantacgaggtgttctctccagtgcaacagatganaagggttgtacagacgttgtcgacgtcttgntcaatgttaaagagcgcacttantatcgtcgtagtttggactgcgccatctcagcagtattcattttgacccctgatgcggccttcanagangcgacgattnaccatggtaatgagattgcaccggtttatgttgc

SEQ ID NO: 35891 - DNA, 613 bp, Arabidopsis thaliana columbia
catttaattttttaatgtgtcattttatttgaattatattatatatgtcaatgaaaaacaggtgggagaaataaataaataaaaagacacaaaagaggaaaacacaaacaaaaaagatttagaaaagaaaagaaagtgaagaaagtgaaggaaaaaaaagaaagcaacagagaaatttgtcttctacacatggatgcagctcttcaagtggaggagaggatcttcaatctctttaatctttccacaaagtcaagttgggattaaagaaaccacatcgtgatcaatcaacttgaagcattacttagcttgtgtgggtggtcaaacgattaaaataatatcacaactcgttttgagtcgtatagtaaatttataatatcacatttgtttgagtcgtttagtagctaatttttgaaatgaagatatcattaacgacaaaagttgctgactatgaaaatgcacaaagagaccaagaacactgctaataaatgtcactaatgatatttctgaaagtgaccaagaatactttattgcccatcaacgagattgttagtactagtatcgtagataagaacaataagtttctttatttagaatttccggaataagcttggag

SEQ ID NO: 35892 - DNA, 608 bp, Arabidopsis thaliana columbia
ggaaagtttttctgtagttgtggatggaaacctgagctatcctatattatgcagctctacactgtcagtgaccttgtgatgtggctctgagttttcacaaggtcacccaggcccgacagaacacacaaccgaaggcgcaggggttgcggcacagcacatccgtacttgtagacatcgcgtggccctgcgtcctggcagggcagggcagagaacaaaaccactctcaaggccggcacagtcccaccagcaggcccttggaggagcgtcaaatcctgccacagacacaggacccatctacatggcttcttggccctgaggagatgggctgctgaagccagcacctccaattctgtctatagtggaaaacagagaggctgaggactgaatacctgctgtctgagttggttcaatgtacaggaacgggactttaattcagggaggtgagatgtgagaaagagcaacttcgaaagtcacccatctcacacctgtagcctgaacttgacaattctactcctataacaacaacaaccgctgcagcaacattcagatacaccactgtgaggcaggtgtgtctctcctctctgtacagttgatgctgaaaatgtgag

SEQ ID NO: 35893 - DNA, 479 bp, Arabidopsis thaliana columbia
aagcagaatctacaaaataagctgtggcttgagttcgatacttccgtagatgttttcttgttatatagtcactgttgtacttcagaaacccacacctagaaaagtgcatatatgaatgtgagatttacattatataaagaaaaccaaaatattcagaatctgtaatttcaaaagaatcgatctttgaatgtttccacggctcactaaagaagcatctaacttagtgctctatctccatataatcatataatcgaggaacatccgcttcacactaaattcaatattcacagctgacaagaaacatattggactcgtattatacactcaggactcaaatactagaatctatccatctggtgaaacgaaaactctcaaaactattttacaatttaatgacggaacacagtgaatttttcattaccgagcaatatggtggatacgttgaggctgaaaaacgcggcgggaccgataatggaagc

SEQ ID NO: 35894 - DNA, 613 bp, Arabidopsis thaliana columbia
taaaaaattaaaatattattattttttggttttttagggactgtcatcattccacccattggggttgctctaatagattgtgataaatgttcactcatgcgtacagtaagaatgttattatggttaacttttttttttttaataactccaacattaacataaattctattatgatatagtaattgtttgtaatatgcaagattaacaacaaaagaaaaagaaacgttctatactatcactctttctatttaatcctatctctcatcttcaatattttcttcactccaaggctaatttgtctgcaatggccttttgacgatcccgcaagacttgtaagtggctacggatctggtcaccagtgagaccctcttcagaaattagttcgtttatggctttgggtgttgcacctgaaaaaaaaaaaaaaaattaggaaaatagttaggagttgaaagaataaacaaaattaataaaaaaattataaagttgcatactgaataacccccaagtctgacaactgcgtcatcaaacactagttgaagcctatttgtcacaccaagtctgggtttcggattgggtttgggattgggttagggttaggattagggtagggttt

SEQ ID NO: 35895 - DNA, 536 bp, Arabidopsis thaliana columbia
  unsure (1)..(536): unsure at all n locations
tcgggtccaaatctacaattcaagacgaatcaatatgtgaaatccatttgttactcattagcagaacaaatcgattctaaagctatgcttaaactttcaatgtgggtactaaaacaaaaaacacaaatctaattggatttaatctcaattgaatcactaaaatttgtcaatccaaaaagagcgaatttgaagctctatgcagctagagaaatatacctaaactttcaaggtcgacgcagcttggcgaagggaacgaaacgacaacaatgcagctcaacgtaggagatgtcatcaatggagctcgagttcgaacatggcgtctttttttttctgggtttgaattcttttttttttttttttttttcaataaactattttcatattttcaaataaacaaaagataaatttgtcactgcatatttcatttatagagaggagggatacatagactctaaaaagatttaaaagattttgtgttgcaaaaagggacttaagagatcattcnccctattcaaagacttttgcacaaaataaag

SEQ ID NO: 35896 - DNA, 381 bp, Arabidopsis thaliana columbia
atgcggctattttactgtgaagggacaatgtaagcatatgttatctctcatgatggtaattgttgattacagtgaccaacttgtataatggatcacatgattggcgaatcatgtcgagataaaatgtattttgtgattgaaatatgtgatatttgcgacgttttcgtctcactcttaaaataaggtttatgggtgtgattgagcgtatgtctgctatcaataggggatttacttggacaattttaaaacattaacccatattggcgagtatacacgtatttagtatcttgtagagatatggtacaaccgttttggttgcggctataagatgcactatattcggtctcgcggtactccgtggggacaatttactttttaaag

SEQ ID NO: 35897 - DNA, 607 bp, Arabidopsis thaliana columbia
tcaagaacctcctcatctgttatggaggagcttatagaaggtgaaaatgaagacgatggtaatggtgaggatgaggatgatgatgacgacggtgagatgcaggatttcatgagcagtggggaagaggatgattatagagacaacattcgttcttcctaagtttttttttgttttataaattttatttacttctgggctctctacagatcactaagatggatttttactatccaaaattttgatgataagttcttgtattattttttctttgttcaagttccatgtctctttgattatcagtaatcatgatttctcttgtcccacatcataagagaatccattgatgcacagaatttagaagagaccatggtgatgaagataatgaacgtagagttctgaaaggagaaaagtatgcatcatcaaattcaaggaaaactaaaccaaacacttgagacaatcaccgtacatctaattttttcgttgttctttcttaatacaaaaatctagaaaatcagtagtctaaaatggttgggttacttcgcctatcttgagaaaagagatacaatcggatatatatatatagatagatagatacacacacaaactt

SEQ ID NO: 35898 - DNA, 220 bp, Arabidopsis thaliana columbia
acaattcagaatgacctttgaattcagtgcaatccctataaaaattccaatggtgtggtgcaactgggtggctcataggttgagtacctgccatcaactcagatggtgatcctggtgctctggtatagagtccccattaggttccccacaggaagcctgtttctccctctgcctatgtctgcctctctccctgtttctcatgagtaaataaataaaatct

SEQ ID NO: 35899 - DNA, 419 bp, Arabidopsis thaliana columbia
tttattcgaacactcaccaatgaagaaaccttagagatcccgaaacttgctgttgccattaaccacctaagtggagattacttctcagagttcttgccttactcaactatctatctagaggttgagaagttcaagaaatcccttggaatcgccatctagaaagcttcttccaggtttctggctacttccctcattaagaaagcttcttcgttttcggaatttgatctgaataagtagctgcggaacaagaaaaagagcagagctgtgtttcaaatgttgtcttctctgtttgttttgtttaagttcatatccttgtgttcaaactttctatgaagatgataatggtgaaaactggaaagtgtaaaacttctttcgtctcccctcacaattggaaaagctaataatctcgtagtgttagg

SEQ ID NO: 35900 - DNA, 479 bp, Arabidopsis thaliana columbia
ttctttggtttagggcctcaaatttggaaagaatcatttacattgacgtatgtaactcaaacccagtcctttggtttaacagaattgaaagaggaaacactaatgacttagtatctttgctcagtttgtttttgtttatggtatagtattattctttttgttgtctataatattactacaccaaacaaggattaaacaaacggaagaagcttgttaaaagtacgagtatatttaataaccagaacacatggaacactttttagatatctagctaaatcaagacagggattcaaattcaatggtcctatcacaataaggaagaaacattataaacctcttagagccaaattagctcatagatatttattgtgtctttccatttgttgtgatttcatatatttatgtgtggtctatttaatttcagattggttgcatcattgcttagtactaccgactgtttatctcgaaaacaaagaaga

SEQ ID NO: 35901 - DNA, 495 bp, Arabidopsis thaliana columbia
tgacaagttaaatcaatcagaagattagttttgttgttgtatgcttacctagtctaaacttaaattcaacaaccaccgtgagagacacagttgagccaccgttgttgctgtgtcccgtcatgttgttgtatttgaatgggtccgtgagttgttgagaaggagagatagtcgccgttcatcaccactacagccaccgtgtgtcaccggagagtgacaccacgagtcacaggatgtcaaccgctgtcaccggagtagtcgtagtccatcgccaaggccgttaagggtaaggaaaccctagatctattatgtaacttgctcaggaagtttttggctttctcttatgatctgtgctttgttttggttttgattgttgagctatgagaccttactgccgtgagcttaaaccgcctcatcgagccccgagcagatccacgagagtaatcgccgagaaaggtaacggcgaaccttatctcccgtgtttgttgttgattattg

SEQ ID NO: 35902 - DNA, 473 bp, Arabidopsis thaliana columbia
gctatctttggtagcttttgggaacgtggttgccgaagctatcgcggacatggaagagggtttaatcaacaaaccaggaagtcatatcaatggattcgtcttgagcatgattcgaaaggaaaagaaatccaagcaaatacttcccaaaaatatgagagtgcttgtttcagatgtggcacttgtggatgtcggaatccgcaattaggaagttgtggatgttacgaggaccttaaaccttgttagtcgagccaagattaaatcggacaatatttcagttaatcggaattcttttgtatagtaattttttctttcccccttacaaatgatgatcgagttctatttatacaatcaaatggaatatttacgaagtaaatgaacgcgtgaattacacgcgaatcatgcctcattaatgtttaagttttgaactgccacttcgcgtattaacacatcctcatttactccagtgatttttt

SEQ ID NO: 35903 - DNA, 511 bp, Arabidopsis thaliana columbia
cggaaattttccgatcgataacaaatggacagttcgggaatgtaggtccttcttgctgccatgcttttataggtctcgatactgaatgcatccctcagatgtttatcttcgctcccctcatcccgccttctcgcagactcagggatcattgttcccacaaaataattgtgccataaacattttgagactttgttagttgttacaaagagtttgttattctacatgttttagactataaatgtgcttatagtgttatgtttctgcttaattaactacgtacgttctctactataagatatcaataattaacttccatgtgaacatgtgtcatttagctataataagtgaatacgtactaggatacgttggtttatttatcaaaattgtacacattgcatttgcttcacaattgtttggatgactttacaaagcgcttgtttacttatggccttatgggttgtgaattttaatcgagcattgttcatattgtagccttcaaattttgagtttt

SEQ ID NO: 35904 - DNA, 620 bp, Arabidopsis thaliana columbia
gtatcaacccaaatgcgtatcgtcttctctgtccggatcacattcgcacctccaacgtcttcaatgtcaagtatttatctaagtaccatgtcgagaatgacgttccagattcagaggcaaatcttctcttacccggggagaactgatgcagcgcatccttatacctatactctgtttttaatcttctacttgggctttcttttatttctcttcttttacttacttgggctttaagctacgtcttagtcggttccttttcccaaacatgttagggttttctttcttcttgtcgcctctatataaagactctcttgtagttgcagaacttaacttattattgaatttaaaacagagctttaagcttcccttctctcttgaatctcggctattctaaggaattaacgactttcaagttcgtctttgttcggtattcacaagaatcaacgaactgcagacacccctttgtttgaccattcacatcgaatcaacgagcttaggttttctatcaagtcccgctgcaccattgtgtatcttctaggtttgccaaggttcagatccgtctattccttagtaaaaattgaatagttttatgtgttctatgatcgagtatgcgtagttgt

SEQ ID NO: 35905 - DNA, 437 bp, Arabidopsis thaliana columbia
  unsure (1)..(437): unsure at all n locations
ctcagctgttgtagtaaccagtaacgtaaacacacacagtgtgtgacgagtcgttatgaagtcgagcgtcgttanagtaccacagttattgatttcttatggctctttgtgtgtctccagacgcagagtacggngaggtnntgtnagaanctttacaagcctccaagtgcgtgatggctncgagctnttcggatgcataagtctcgcaatgcctcgtgatnattgcacatgagacnagtgttcagaagaaaacacggtcatgcagggtcgtgattcggtntgtttnagcgatcanagnttcgagcgntaacntgacctgtgaggttcgaaatagtnangtantaggtcaganattagatcaaaangaaagcatactttaggattattcagcttagaatngaaaaacactcantagcaaaggacaatcgcgcaaattt

SEQ ID NO: 35906 - DNA, 446 bp, Arabidopsis thaliana columbia
tgtcattttggacattgattttatctgatttatttgatgatttggttctggatccccaccttcaaacctctccttcagcttatgtctacttgtttgcttgagggcaagcaaagactaagtttgggggagttgatatgtctataatttgcatgttttacacatcctgttttcaccactttgagtctagtttcatccatctttcatagcattcatcatcattcttgtagattttgcgtccatagtcgagtctaggactagtcttgcgtctattggtgctcagaaagaggattaacagaacagctagtcacatttccagcaacatactctaatcaccagtatgagagagggaagcagttagctcaacagtccatccagacacttatactcgatcgcagagtagaggagtctacccaactgcagttctactcgatcacagagttgaagga

SEQ ID NO: 35907 - DNA, 538 bp, Arabidopsis thaliana columbia
atatagaaatatataagaacctactccatctaatctagaaaataaaacgagttatcatacaaaaataataatccgaaaattaataccaaattgttgtggaaatgtgaggatacgatcgaatgattatgcgaacgaaatattgtagtcatatagattattatagtgtaagtgtgatcggtctaatacagcgacaataccatatgacaagttaaactagtaaagtttattgtagcaatcaaagtatttttttttatttttttaacaatttaatgaggataaaaacacaaaaggtgtaatggaaatttccaaagatttatcgatttgtgtttatatatttcaaatcacgtgttcgatttaaataaatagatacgacgttaaatcaaaaccggtaaaacgtaaccttacaaaccttgaaaatcaacaaaaaaacttagaacaaaagggcttgatagtcaaaaggaaaagtagttgtcttcatattttccacataatcattcttacttgataatttgatgataatgttttgaaaatattagga

SEQ ID NO: 35908 - DNA, 768 bp, Arabidopsis thaliana columbia
gtgactgtgagaaaccaaactgtggcgtcaactataaaagaagcaaacacaacaaatgaagcttaagagagatttcgtgaagcagtgagagagaatgatagataaagagagaagaattactctgaaatcgaactccggtacagtcaatgacatcgataaccgtcgtgtagccaccgtgaaattgacgccggagatcgatagagaaagagacagattaaactttttcaccaaaatccaaaaagattaaaaaagtgagtcaaaagcagtgaatgtgtgtctctcttggatagatctatcttggggagtgaacagacaattaaattaaatcatttataattggtttgattgtgtacgtaacggtgcactcaatgtatccgtgtttcttcacgtgattgtttagtggttcgatttttgcttacgtgtattattattagtggtcgtctatagtttcgttgggtctatcgcattactgagaataactaaacagcattcaataactaactttgctgaattgttgggcgggagatgccacgtaagacttggcaacgttttttactctagctagttcgttggagtcgtgcagagcaatatcttcgtcgtgactcgttgtgtattataaattaaattatgtatcattttttgaaaattgtagtatatgtaacattatacaaatattatactatttgtatatatgctaaatgtgaaattgggcattggtatactcgacatcgcacattttgatatttatgtggcgtaataaagatagca

SEQ ID NO: 35909 - DNA, 271 bp, Arabidopsis thaliana columbia
ctctctctgattagttttgttaactctgagttataaacatgagtaatttgagagtcatatgatcttgaactagcaatctctcattactcaagtctcaacatactgtttcgatgtttctcgctccattttgatgaacataaattgtaatgtcagcgtcctgcattagatgtgattttgagttcagagagcagaatgttactagttacataacttgcagagacagagtttttaaatgataactatgatagagacagactactaactcaactat

SEQ ID NO: 35910 - DNA, 641 bp, Arabidopsis thaliana columbia
ctaaacccgtcccgctatatccctaaacggaccaggcccgtggaccttaggtccgattgacatcccgacggagaagttggcgtcttggagaagccccgacacggaagcttgaatagatgtgctttacacggctaacccacacatgtttgttcctcgctgcttacctggactgatcgagtcgagctatataaactcagattggtatgagctatgttttaaaatatatattgttaatttgttatagatttcaaccccaaatgaaacaggggacgtcggttgtatggcagaattttctaaattatatatacacatgaggtctgatttagccatttgtcgtttcgaaaagaaaagaattattctttgatagcatgaataaagattagaatgttgcgcgactatatatatgcatgaatcacaatgccaaattttgtgatcccatttgaagattgatacattcttcttgttctattacttgagaactttataaaatgtattttgactatttgagttagactcttattgtagtggttttttgtattactggacacattatttatttggtattcatgtaaacaaggtgtgtaatggattatactactgttgttattgtccatattcgatagttggccacaacaaaaggg

SEQ ID NO: 35911 - DNA, 337 bp, Arabidopsis thaliana columbia
tcccaaatgtccacatagttttatttttggtgttttccagtttatgcagtattacatatccttcaaaaatgatttaaatagttgtacagttgagggaagtctatcagtattgaattctaaagggttaacgtaattatatgtagacaatatatgaaattataaaaattcaatcctaagttggagtttatatccaaagtaagcttaaaagtataaggaatatgtagaatatagtctactaacatgtattttaaccacatatttaaatccttaatttaattcgttttaattcatttgtaagaattcattatctttacatagtctatgtaatactcggtgt

SEQ ID NO: 35912 - DNA, 456 bp, Arabidopsis thaliana columbia
gtgtattaaattgtatgattttattatttcgtgtatttactttccaaccaaaaacaattgagtattaaacgtccaaataaaaattaattgaggtttgttttggttttttttcccatctatttataataaaatagaccaattttaaatttatcgaaccgaactgggcataaatgtaacaacgagttttaaaaggcggggctatatagtgaaattaatatactttgggtacagaattcggatgttttctttttataggccctttaatgaaatgattgtataaaagtaaaacccttaatcggatcctccagcaattttccctccaaaccagaaaaccctccaaatctcaccggtcggagattccttctcttccgactgataatggcgtcttcttcatcaacctctaccggtgacggatacaatgaaccatgggtggagaaatacaggccgagcaaagta

SEQ ID NO: 35913 - DNA, 412 bp, Arabidopsis thaliana columbia
taacgtggcaaagctttaaataatggatatattttatgaactgcgaaataaaacatagaaataataaaatagtagagcaaaaaaaattttggttacaaaataggtatggactcacgttatcaaaatgaacaaaactctcattcgtttgtttcaaaattaatattatgcgagacactttcatgagattttacaaaataatatataatatttaaatcttatatgttatatttaacgaaaagatataatatttcaaaaaatatagttaattttttataaaaaatattgtcacatagtattctttgaagaaaaaacattgttacgaagaaattaacatgaatagaattttttataaaagaaatcaaatgccatcttaataaaaaccgtatattatcaaaagaataagacattttat

SEQ ID NO: 35914 - DNA, 478 bp, Arabidopsis thaliana columbia
tatttgcaaccacaaacaataaaatttaatttgtgttttcattatttatttgtgttttcttattaaacgaagtttttagaagaagctaatgttttaattttttaaatatgttcaacaaaagacttgtaaatttcatcgaatcagaatagaacgaagttgatttggaatatttccaaagtctataaagattttaatcatggagagaaagatcaaagttttcataatctcatgaacaaaatatagagacataacttatttttcttttctgtcaacgaaagacttcgaaagttcgacgaccaaagacttctaagagggaaacaacgtgaccggtaatataataaaatgggaaaaatgtattcatatcgtgatacaaggaaatgtatattataaacacattcaaaagtccacaagcactacctcattgcgtttgctgttacctaaattaattattatttgtttagtatagttttcttggaca

SEQ ID NO: 35915 - DNA, 171 bp, Arabidopsis thaliana columbia
  unsure (1)..(171): unsure at all n locations
acagacagatatatatacatcacaagacacagatatacatacagagaacacacacacaacatagacataganacatacagatacagacagagacagacacatagagagacatatagaccatatagacagatagagagacatagacacatatatacagatatacatatacag

SEQ ID NO: 35916 - DNA, 982 bp, Arabidopsis thaliana columbia
cgctaagtattaacgttttgggtctgtgggtcgaagtgaaagtttgaagctttcttggactggaattggatatgttgcaagattagggtttggttttgttgattgcatgatctattagttttaaacacatttcccgtggatatagttttgatgtttgtaggatgatttacagactttgaatggaattggaagatccttttgtgtgatcttgtccttgatgggtttttgttgtttggattacgttgcttgtctactaaagtttagatttgtctcttaaattccatggaacttcacattccaagtaggcttatcaatgttatcatgtacttctgttatttcgtgcatattttaagaaatttatgactgtagtgtctctgtaaaaattcaaggtagtttacttcagatcaacgttccattttaaaaaattatgatttcatagattgttgatgcttgcttgtgttcactttctttacagagtaagtattcgaaaatttattgagctatttattcatttttggctaaacctcctgggctgcaggttcctcttataaactactttcaagaccttgggagtacattatcagctcatgacatatgcttcacacaagctgcggattcgctgttttttatgcatgaaggtctacagcaactcgcgctcctgtctatgacgttccctctgctgttgagattttgctgacaggttcttatcagcgcctgccaaagtgtctagatgatgtgggcatgcagagctctttggatgagcatcaacagaaaccagctctaagaaagctggaggtacttgtacgttccaaactgcttgaaatcacacttccaaaagaaataacagaggtgaaaatttctaaaggtacagttaccttatctgtcgatggggaatttaaagttcttgttactcttggttaccgagggcacctatccatgtggcggatattgcatttggatctacttgttggtgaaagaagtg

SEQ ID NO: 35917 - DNA, 469 bp, Arabidopsis thaliana columbia
ttttttttttttttgttaagaacgagacgtgtagtgctaattaattatttcaatatcttgtgtagaatgttattatatggttgggtttattggccagttggctactgaacactttcaagtataaagaagtaaagaactatattcctcggaacccatgtcacgttgcaggaggtttgtctcgttgctacaccaaagttttattttggtcaaggtggtatacgtttacatcatttaaaagtattagtggaaaacatactttttaaaaattcataggtgattattttggtcatggagtcaaggttccggtatatatatatcagtcgtatataaaaatgaatttatgtaaacaccagacaagttatttaaataagtttgcgagaatgtgaatggtaagcactataggaattggcgaaataaagatgcatggactgctgatcagatatgagtaacttttagttcataggaatgc

SEQ ID NO: 35918 - DNA, 564 bp, Arabidopsis thaliana columbia
atttatacttttggtttagatctattgaaccagaccggttcaggatttgattagtctttggttctgtccggttattaagaccaagtaatttatgggtttcttaaagatgggtgttgattgttgaatactgaattgtttatttacttggtgcatacttactgtctcaatgcaacagcgaatttattaacagctttgtttttaggcttcatgtaggagagaagtagagactcacagtagtgaaagactcttgaaacaaagggtcaggttatgtaaatcaataataattgtgtttgcagagtgctacaagttttggttatattatataacgtatcaaacctcaaaaatcatgaatttgtcaccactactcactacaagatagtttttttacaatcttgatgtttgttacttgagtctttcgattgttctcgagtctttagactgtgaaagtgtgaatcagtgggatcgccattgaagcatcatagattaggattgtttgattaatacttaactaggctgaccatatctaacactaaaatatctcgtcctctgtgttttggacctctt

SEQ ID NO: 35919 - DNA, 354 bp, Arabidopsis thaliana columbia
gcaacgtttaatcttgtacatatttcgcattttcaattttcagtttagtttattttaggtttattatattgatcttgcttccatcttcttctataacctgttcaatccacgtcagctaaacaaatttacaaacaatttcgtactcagtaaaataaattgatacacacaatcacaaatcgactcttattcgtttcttcaagctcaaatcccaacgacaatggcggttccgattcacttcctcatcaactcttcacgtgaatcatccgacgaagagtacaacggttccgaaatttctaattcatctgaagaagaatcaatggaagacgaatcgtccgagttagtaaacacaaacga

SEQ ID NO: 35920 - DNA, 581 bp, Arabidopsis thaliana columbia
gagctttatctgtttacattctccaataatgtgagatcactgtgatgaattaggttgaggcttgtcacttaaagttgagatataatgttgattcgaagtgtagaaatgtaggtttcgatttgatttccttttgtggtgacagttccatgtgcaagctatgaaatggtaaaagaaccatttttctctcattgattcaggaactaagttttactgcaagaactgtggacaggaaggccatagacgccattactgtccagaactaggcactaatgcggacagaaaatttagatgtcggggttgcggcgggaaaggccacaaccgtagaacttgtcctaagtcgaaatcaatagtcactaaaggcatttccactaggtatcacaaatgtggaatatgcggtgagagaggtcacaacagcagaacatgccggaagccgaccggagtgaatcctagttgcagtggtgaaaattccggggaagatggtgttggtaaaataacgtatgcttgtgggttctgcaagaaaatgggacataatgtaagaacctgtccaagtaaacaagtttcagacagtgattcttgtttag

SEQ ID NO: 35921 - DNA, 497 bp, Arabidopsis thaliana columbia
tgctataaatatggattattaaaaaaataaaacatgtatttggatatttcccttcaactccacaatattttattatttttttgacataaaaagttgaagggaattctatgaagagataatggattatgggagtgtgtgacttgaactattgatcgggccgtgcagaaatattactttatctgctacattggaattcacaaccaaatgtgtctttgttccaaccactgtgtaagccccatacaggggataggctggttcacttgaagagaatcttttctatgatcgtacccgacgctgtcgtggatgagtgggctccgtaaaatccagtagattaagggatggaacaaaatcctgattatgtttttagttatgttggactaaaaacaacatcgagaataattattaatagtaatagtatgtaaatgcattcattttctctgcatcgactcgattcatgataccatcggagtgaatacaggatctaatgcagagtagag

SEQ ID NO: 35922 - DNA, 518 bp, Arabidopsis thaliana columbia
gaacaacactaagcaaaatgaacaaatcaacgtggaataaaacaccattctcaagcaaaccaaacacagaaatcgacaaaactaagctaattaattctccaattcacagatccaacataaccatcgacgaaacaaacacataaccttaaaatctattagatcccacaacaaattagctgcgtttcgttctacattaacaatgaatttcaccagaaacaaatccaattacagattgatccatgaaacagctcgcagaacggtagacgaaggaaacccaaatcgagaagaggaagaagaagaaggaagaaatcgaaatctaccttggatcaatgaaataatgagggtttggatctaagatctgagatccgagaaaatgagcactttatcaataaacacacctcacacttgaatttactaaaggaagaagaagcttcgaagtgttaatatcactgcttcaatatcgctatctacttatttatacctgcctctacaaagcgcgtatggctacgagtctatga

SEQ ID NO: 35923 - DNA, 477 bp, Arabidopsis thaliana columbia
cagttagaacaaacaccaaattagggtaataatgcaaccaaatttacactcacaaatgcaagccgcaacagtacactatatcaccgacccacagatactcatactacacttgtaaaatcatgtgcacgaaacaagactcaaagaccttaattgtgcttaaacatgaaacaatcctgatgcatgatcttttcaaagtaaacccacctgtgtgttatcggaaccttgggcctccagccgcttaaaaaagaactgaagaagatgctcaactatgctaacacctttcgcccgccaatttactcacagaacaaagacacctgagaattcaaaaggttgcattagtagtctcctggaaaggatgagtgattttactcgactgcatctgctatgaagacatgcaatcgtcccaaaaacaatgaacatatgtgaaagagaatacgatgagtagagccaggagtgatggtagttgcaatatagagg

SEQ ID NO: 35924 - DNA, 528 bp, Arabidopsis thaliana columbia
gaccttgttcaagtttttctccactgaatgtgttttggttatggaatgtttgtactacactaagcttgattctaaattaataacatcttacaagtactgaaaatagtagacagtagacactatggtttatcttccattagaaacaattaaattataaaatcatttttgttaaaacagattaaattctctctttacacaagccataatactaattaattaagaatagggttacgctacgttgggagttgtttaaaagtacatattttcgtcctttttgcttctcccactaccatcaattagtggttgaaacagaaagcttatcagacagaaattggcattttcggatatgttggatgcacaaagtggtatataatacgtaagacttattcgtgtcaatcatgattcatgaagctatctaacctctacaagactacaaacacgtagaagtttggactactcatttaataatcgacaacaacccatgagctgaccataatgaatattattaaacaaccccaagttgtttat

SEQ ID NO: 35925 - DNA, 279 bp, Arabidopsis thaliana columbia
tcacgtgttggttgatatagcttcggtttgatctattgccacgtagggggttgaagaatatggagatgggttcacggacctaacgaggacacaaacttgggttttctcgatattgagtgttatgaaatttgtattttctcgatttattcctgaaaacgaaagtatgataagataatagcttgttttagagtcgaagatctcattctctaataagatttgtattaacaaaaattagaatcagatctttagaacaagcttcagaatctggatatagatata

SEQ ID NO: 35926 - DNA, 550 bp, Arabidopsis thaliana columbia
atttaaaattgtaacctaggcataaagggcagcaatagttttttttttgtaaatcggggaattcaattttaacttaaattcgtaaacccaccacgccaaccccaagagcattatatcaatttattcactcattaatttatctgttcgtaaaacaaaatgtataataacaatactcacaaaccaaaatgtcttcataatgaactcataacttgtagagtaggcgaattacatgtcttgtaaattagtatatagtttttttttgtcttattttaacaactactatatgttatattcctgaaattttgtatacttttatcatgcaaatcaccttttttaaaaaaacgtaaaagaaaaagagggaaaatggtaacaacaaattcgaaataaataaataaaaggtgagtccctgacatggtaattatagctaataataaagggttaaaatatctacgcaaacacaaaagctgtcttcttccccaccacttctacagcctgtcatcactcctattggttcataaaacgacaaaatcctacgtggcatccatttttt

SEQ ID NO: 35927 - DNA, 524 bp, Arabidopsis thaliana columbia
tcttccctctccctccattttttttcttctttcttctaactacaagagattgggtcataaatagagttcaaatcactcatcatttcttcttagtcaacttacagcaattacattgagtggttataactaaaatatgataattaaatatactaatctgattgtaacagcttatcggtcgcatctattcctatattgcatcttcctgtttacgatttgtttatgtcctgtactcgtgtaaaaaaagtagtgaaattgaatactatatactcgtctgtggtgatcataataatataaaccgaatttgaaacgtgaaaacaatccataatactgataaacaaagtataataacattaattagattatattgtcataaatcgtaatttgataaacagtttttggtctaatcatcaaacgattttgcacttttatgagtcattatttactgatttacatgtacatatgtaacaatacaaacgttgactatttacacaataattagggatatgtttatagaacgtagcata

SEQ ID NO: 35928 - DNA, 339 bp, Arabidopsis thaliana columbia
ccctagagagaaaattcaatatatgtgaagattatagaagagacatgtgtgcccatgctagagttttggcactggaagaggcaattgatacagaatgggtgtatatgtgggacaaatttggtggttatttactactattgttaggtttgacagctaaggcggagagagttcaggtgaatcctgattctaaattttcatatattcttctctatgtatgtctaacacgggattattacaatgttgtaggatgaggtacggttgcggctcttcttagatagcattgggttctcggatttaagtgccagaaaaatcagtaaatggaagccagaggatagacga

SEQ ID NO: 35929 - DNA, 542 bp, Arabidopsis thaliana columbia
tgtttactccatttacgttatttttcttttatcaaaaaccaaaaaccgtttttgggggtttttaaaacaaaaatctaacaacaaagtctataactaaaatctaatagtcaaaaactaattaataaccaaatcaaaaactgaatttaaaaacagcatccattcatggccttaaaactatttggaattagaggtaagattctgataattggaacaaaggaagagataggtataaatatttggtaaaggagttagctttagaataaattaaccaaaaggaaagtgagagatagagaaagtgggaacccaccatagacgattgatcggccaacatagtaaagaaagcctttttttttgtatgtctctctctcttcctttttctgttcttacaacacagaggagtaattctaagtgtgtgtgagagggtgtttccatactactatatattcatgtgctcacatggtttccctttgagggagatcaagaagaaagttaccaaagccacttgctttttaagctttcttaccattaggaccattaagagc

SEQ ID NO: 35930 - DNA, 472 bp, Arabidopsis thaliana columbia
ggagtttgaaaaactaagaaaatatctcaagatacaactaaagaattgcaagagtttgagtattctgtacctgaaaacgcactgcgtggatcaaattcatcgaaagtctcaactttctgagaaggtgattcattaacaaaagtagcagttgtattggctgtgttggttccagttggaggagaagcagcctctggagcagcaacttgtgggggaggaggagaagcagctcctggagcggtaacttgtggggtctcccaccatccctggcatagaaagattcatcagcaccaataaaaaccaaggtagctttcaattttcaaagcagaaaatgatcacctttcactatatacagggctgcgtgaatcactgacagcttcttcataactgggtggagcgccaatattttgttcagaaaacttcctctggagctctcctctaccattataatcctgaaagaaggtgagatgagttg

SEQ ID NO: 35931 - DNA, 605 bp, Arabidopsis thaliana columbia
gctattaaatgtcatccatagcgtttttataaacgctttcttatgcccctattatgttagaccctccatatacgatagcgttttttccatatgctacgataaagtactataccataacattagtaaaacgctttcataaatcaacttatactagcgatatatagacgctatgatctataatttttatgatgctataatattcagtgccataactctaattttatgcgattggttttaagctatttgcatttggtggaacctatttagttttcaaaatatctgatatatataataaaaacatccaaaagatatacatcatttcataaaccaaaaattaattcatacataacacaagtctcaatccaatacttaacctaatatcctaacttttatatactacttctgctaaggaagttattgatgagatcatgcaaaatccttactttgttttctagatattggactcggttcttcaaggaagttagctcagcttcataggttctacaagaaaacctgcaatttgggacggtttgttgtgccacttattcagcacaaattatagtgcttctttgtgcgattttgtgccgtacaccacgatataggta

SEQ ID NO: 35932 - DNA, 577 bp, Arabidopsis thaliana columbia
aggctacatttcggaacttaaaaatatttaacatttactggagtattttttggcccaaaaataaatggagtaatcatttaatctttccttggaagccttgcgtgatttagtgcttttgatttgaactgcattatcaaataaatttaaagacatacgaagaattgaatagaagaatgtattctatgctaataaatcgacgagaaatatatatataattcccactatttgatcactattggtagtcaataatataaaaaaagaattataattaaaataaaaaacttaggtgaaggtggatgtaacgatcaaaagcaggttgaatacactaactgatttcaaccacaaccacttgtagacaatatacttgtagtacaatataattgatttgcaataattataataccttatgattctaagcaaagtttgtccatctttaagcatggataatcaacggttttaactactttcatgttcaccggttgaataaattattttacgtgaggttctgatcacatgcggcaaccacatcggtgaggcgatgattataaccgttggatgaatgtcacggaccgttata

SEQ ID NO: 35933 - DNA, 563 bp, Arabidopsis thaliana columbia
ttagtggatccagtgtcacgaatcgatttacccaataccctaactcctaataagaactcatctccatacaaaagtgtgacataagctactttacttgattcagatccaaacgaaccatttaactgaattgaaacgagggcaaggagaagaacccagagactcgtcttgagtctcaccatagttattcggatctcaattttctcgaaaaccaaattcctaatttaaggaaagtatacgttgaattgaaataagattttgaattttcttcgttgtttgttctgtctgtgtctgaaacctcacctttgttccttgtcaccgccgtcgttttagaaaccgagaaagtttttataacctacgacgaagctaccacaacatattctagatccttatgttaattattaaactacgtcgtttcctcgtttcgataagtaaaaaggcacatgttcactaatccaactttgatcacttaggaatctatctatctgtacctcacatggatttaagggcaatttgaatatatatatagagttaatacaggcttgtaagatcgaaatgattaatat

SEQ ID NO: 35934 - DNA, 556 bp, Arabidopsis thaliana columbia
taagtaatcaatcttctctgtttacttatctctctcgaattccaaagttcattgttgaaatttcagttttgtgtttttgattttttggttgagatagcgttcttgtcccggacttgtttcgtggagatccatggtcgaaaaaccgaccaaagtccgaatacgaggaatggagaagaggacatgaccctaaccgtatcagacaagacactactaccttcacaaaatggatggttgaggaatttgcagcggctggaatctccaagaagctaggagtgatggggttctgttttggcggtggacgtgtggttgacgtgttagccacggatgagagcggttactttagcaccggtgtctcgttctacggtacgagaatagactcggcggtggcgggagatgtgaaagtgccagtcttgtttattgctggagatagagacccgctttgtgaagtgaagggtttgtatgaaattgaggagaagattggtgaaggttcaaaggttgttgtgtatgaaggaagaggtcacggctttgttcaccggcccgagacacccgaagatga

SEQ ID NO: 35935 - DNA, 561 bp, Arabidopsis thaliana columbia
tttttgcaaaatcttccacagcatattgtttttcaagttcctctataatatgctgcaaccattaaaacaaggggttatatttgaaaaggaaaaaagagagtaaatcttccttctttttcagtttgctgcaacaaaaagagtgaagatacagaactaacaacttactactgattcatcaatggcgtataagtcatagtcccttttccatactagatttgttaacagctcataggcgtattgtatctgcatagtagcaatgatggaattagaagaaacgttacgcacataaaaaggctgaatgatttagcactaataagaagtcgacggccaaccttaacaaaatcagctggaagagaaactcctgaacccgaatccctgtcacgaccagttgttacaatgtgtcagccacacagtttctacttagaacacctaaagtctagttatcaacttcaattagaattacattccattctttacaatgccaagcctacatatactatcatctagcaattagttatatagaaaaaaacaattcatacaatactcgtgattgattgtgga

SEQ ID NO: 35936 - DNA, 504 bp, Arabidopsis thaliana columbia
atgtctacaatttcaagaaagcttatcaaacgtttagaatttggcaataatataatttaataattatacctaaacttttcataacatttcttaaatgttgtttacagccaacaaagagtaccttttaaaggtgtcttatgttcatgtttcgggtagattgtatcccaacaaagcttcaaaattgatccgacaaagatggcatcaatttgtttctagccaactctccaaactatcacaaaaatttatagttttcacatctttttaccattgattccttttgcatttaaggatcattataacaccaatcacaaattgttttaatgaaaaaaacagtttatgtcacaagttcccctcttcatagaccacaatgcattgaaacatatggattcactagctaaaagtctcatcatcatatgtctctctattggtttcaatatccatttataatccaagaaatttatttcccgatttgggacttaaacattcacaactgcaaaagttgat

SEQ ID NO: 35937 - DNA, 470 bp, Arabidopsis thaliana columbia
gaaatagaaatatccaattaggaagtcaataagtgaaattttctaccgctctatagttagaataagatctcggcaaaatgtttattataatagcaaatatgggtgttataaaaaaattctaaaccttagtatattaaaaaaaatctaaacctaacaaagccaaaaaaaaatcaaaaatcaaatgtcaagtgatgtatatgttaaacctaacaaagccaaaaaaataatgtatgcatttggtaaaccaaataaagcaagaatagcagccaagcactagcagttcataaagggttcagaacttggagtactaatttgcatgcaagtatcaatatctcggtttgatataaaactaaactgaaaataaactcaaaatagaaatttcgagaatgggacatttctttagatataaactttcatagtctggcttggtctatattaagagcaaacatccaaagttgtttatggagaag

SEQ ID NO: 35938 - DNA, 486 bp, Arabidopsis thaliana columbia
agttacacataagtcgatttgggacctcttttggtattaaacacaccacaacttaaaagaattttgtgcattcctccttttagaagtggattccccattccctgaagaaagataacaaatcatatattaaggagggattatggaaattgattattaaaacaaaattggtgcttacagttgataaaatcataaaaatttaatgtttaacctaggcaaattactattaaatagatacagaaatcatggtatcatcaaatagatttataacgccatgggtttctgtggtgttttgtatgaattatcatgttactatatatcgaatttagattcagtttttgtgttgtggtgttgtatcgtaggaactaaaaattaaagttacgggatagtaaaagtgatttttgtaccaaaaagattaaaaatattcaaaagaatcgtagacatacttggctttatcacgaaccaatcgaaacggatttgaaggtggat

SEQ ID NO: 35939 - DNA, 532 bp, Arabidopsis thaliana columbia
tatatattcggtatgccaatcataatattgttttcctttacagaacactttgtgcaaatagccctggatatcgagcaccgcctaaccacaccgatcagcctaacaagtgactcgaatcagagacgtaaccagtgggttaccatcatcatatgcaccatcttggccgtaacaggtcaatgcatcgctagactcctcgagaactattacttcctccacaaaaacctgagccgccgccgcggtatcttgactcaaacacttctccaagtcgtcggattccccatcctccttctccctttccttctccacttcctcatcaagaaacagaaacaacttctcattttctccggtgaaactccctcaagcacttagccataacttactctattctctgcatctacatgttttgtcaagcatttttctccgacgttagaaaccagataccctatagagttttcactctcacttacacgacgcagctattattcacctgattttcccaagtatacaacgatacaaatttaatagatgacgt

SEQ ID NO: 35940 - DNA, 491 bp, Arabidopsis thaliana columbia
caataataaaaagaaatttcaagttcgtagataaaaaaaaagatacaatctgaatcctctcttttattttcatcactgacagagaataccactgcactttttctcatgcacgcacgcatactcagatagaaacaagagcccattcctcgtttctttaataatttaattcaaagaaatacggacacttcatgattaattttaattttgtaattttaaaacaatctcgagttatgtaaaaaatatatcgataaactcaaaaatgtgatgtaataatctgctttggctttgctctctttactacaagacaaggcagagaaaaccacagattcctatgaaagagtagacgtacctgtctttttattattactaaatttataattatcttctctacgactttctggtttttaatcttttaataattattttactttcactaccccaaaaaaaaagcttccctctatttcgcagttttagatttccaaatcccaatg

SEQ ID NO: 35941 - DNA, 645 bp, Arabidopsis thaliana columbia
tcccctcttattaattgttagaaatttgattttatatatggctcaccaaattttgaaacattttcagatgataaatggttttatactttttcagttgattgataaaagagtttgattcacattgacagtatccagctttctgggaggatagaggagaagagaaaaataagaaacacaaaaggtataactttataataaagattcaaaaataaaaggaaagaaatgcccaaattcacaaacatgaaggacatttctgtcattctttgtcatatataagaagagatcacccaaccaacctttcacacttaaacaacaccacacttttggttttccttcttctaccaactaccgaggaactctcttacggctcagtatttcttgttccttgagacggtgttggaaccgagcaagcctggcttgaagactgactagccctgctgctttccgggacaacacaaagctcagttgcgtcacatagttttctatcatgcttcccggttggtccacctccgctagaagtttcatttcctgataatgatataacagaaaagaaaattgaatgatgtgataacattctacaatcgttttttgtgcgctgcaatgatgtgatttcatacctcgcgaacaatctccattgtacctcaa

SEQ ID NO: 35942 - DNA, 279 bp, Arabidopsis thaliana columbia
gccagtgtgctctaaagaacaataaatttatgagataatctctaatgagatttattttgaagaaaaataataatagtgaatatggttctcgactttggaagcgtcaatctcttctataactaattagtagatgtgatgcgtgaagccgagaatacccagggtacaacttggagtatccacagtttatctagcagacctccgcttggataattgattccactcacgtatatggattaaaatatccctcccaggagttgcatagacaaagtttggagctga

SEQ ID NO: 35943 - DNA, 147 bp, Arabidopsis thaliana columbia
gttttattgttacatttaagatttccgactttcctagataaatagacccaaggaaaatcggactgacccttagatgattttgatgttcaaagaatctgctttggctctgtttctaactctcataattttccttcaggaacttccttt

SEQ ID NO: 35944 - DNA, 442 bp, Arabidopsis thaliana columbia
cagattttaatcaccaatttacaggatatcccattaataacgaaagtaaaaaattctcttatgccaaaatgttataaccataaacttgccttgtttccgaagaaaaatccaaaaaaaccaaaaaaaaaaccaaaaagacataatcttgggccagaagcaaggtatctgaagccctttcctctctctaacatttacctatggaacacgaaactggcaacggggagtaagaaacaagagaagaatcttcagttctgctcagcagtcaccgccacagttggctcatcggctttcttcaatggagatgtttccatcacaacatcgccgtttttctccttaggagccaccactatctcagtcggattagggtttaggtttggacctgagggattcagagatggctcttccaattcaggatcagtttctatgctctgatcatcatgtg

SEQ ID NO: 35945 - DNA, 512 bp, Arabidopsis thaliana columbia
cagtttttcttacaagattagattctcgatttcacaaaactaattagctacaacgtacggtttagattaatggatatatatatattacgttcttgattgtacaatctagtgaccgtcctctcacgtacgggtttccatgaagcttcatatacacttaatctaattatgcattaatcattgtgcaaaccaagattgagaaattaatgttaagcttatggtgaaacatatccactctataatatatcctatagtaatagtatatcaattgctatataattctttttggatttatggatttggcaatcgcgtctgactaatcttattgtagaaaacattaatcgatttttactaaatacttttaaatcgatatcatatacatataaagaggtatttcatataggtggtgattgctactaatgcgataatgagatgcagttacaaaaaaaagattgtgaaggatgcgttgaatcaaaggcacaaagagccacagtgtcccatgctgatagatatga

SEQ ID NO: 35946 - DNA, 534 bp, Arabidopsis thaliana columbia
actaagcctactttttgtttcctaaaaataactgtgtttttgttatcattttgggtgaaatgctttaataatggtatccttaaaacaagttttcttttccttttttttatttttgttattctttttaatgaaataaatatctaatagttatagtgctgccaatatattgtttctattttggtaacaatatagaaataaatatctaatagtcatccgtctttctaggagttaaatcagcaggagtatgttttgttcgtattactattatcgcacctgtagtcagtaggtgatattttcttgaaattcaaaagatttatgttctcttgctacaagttttttttatcatgtcacttcgttagtccgttatgtatatctactttagcaaataattttgtgtcggtaggttattgaacaatttgcctttattcatatatgggagctcaagtatctacatataatatgatacatctttcatggttcatgtaagtgtcctagcctgatttctaggcacatatcattagttttttttttttt

SEQ ID NO: 35947 - DNA, 632 bp, Arabidopsis thaliana columbia
gttatggcaggttctggcttggttcttaaggaaccgagcactagctagttgcttacacatgttcagaaatagtcgtctgtaatagcatctttatgatagtcttgaggttggatatggtagtgtgaaagaattggtccaaacgagaatgtcggagaatatggggctcttcgttttgttttgtcgaaggaaaaataaaaaatagtagcacaatataagattactggaaaaaagatggtcttgatctcctcgacataactagatagaaaacaagtttatatttcaaaagcaataaactacatagaaaacaacaacaatagacatagaaggtacaattttacaaagaatctatgcttgtgaagttttcgttgtaattttgttctgtttctgtttgtattgcgttgtgtttctgtaacttttagtcttatatattctttattctttgtaatttctgttaaaactgcaaaaatagtataaacacttacattgatgtcaaaaataataaaattgcaaaggatctcagtacatgtggctactcatgaagtaaatgtgtcttttggaatatgttatgtaaaatataccaagatgaaccaaagactaccaatgaatcgtaagtacatgtggctactgtggat

SEQ ID NO: 35948 - DNA, 500 bp, Arabidopsis thaliana columbia
tatctgaagaaatttgcgataactactcaccggttaagcatttttacggtttcttcaacaatctttagctttcacatgaccaaacaagaatcatgcggttttgaatctttgacaattttattccttgaacttacttattcatgatatttaattgagtcgttttcttgttagatggagagcttcaatcgacaatttaattgttgggtctaatattcaagaactgaaaaagatttgtcaaaaataatacaagacgcaccaaatgttctcaatctatgtctaaaaatatatgtatctcaacaccacgtttctacaatgattcatatatctttttgcacttatgaggactaacacaaagaaacaattgaacagaaaactaaatttgaaaatggaaaaattatagtaactagacattagttgaagaagaagaatgaacaaccttgttttgtctccctgcaagccaaaggcatagcctcctagcaaaagatggtgtttagtcccaa

SEQ ID NO: 35949 - DNA, 474 bp, Arabidopsis thaliana columbia
ttctccttcagaatcttgagaatcatccttgtaactatcgctggaatcgtcgcaatcggaagacgataagatctcttcatcttcttcctccattttcgttacacctacgagcccagagctccgcttttgaccaatcctaaaactcttttggcggcaagaaataaaaccaaaaacaaaaacaaagaaaaaccaaattatttgaaataaaataaccttatcagaaaaggactaaaatatccttcagagtatatgggacgctacaatttttcctaacagttagtttcatgaagattgtaaatttgtaatttccccaagtttttaagtatttacacacaaaaacaaaaatatccgaatttttttaattcgtcgaggttgattacttcacccaatttcatggccgcacctgcaaacttctcgtctcaatgttccgattataccctaattgctctctgccttctcacagacctctcgttt

SEQ ID NO: 35950 - DNA, 473 bp, Arabidopsis thaliana columbia
ccagaattagaagcactttcacggcttgactttggagctgctatgaaggttttccttgctaagagattgacatccgagtaagtccggtcttgttcatgattctgaagttgtttttcttttgctgatctaaacttgggatatgtgctctacttgacacatttcttaccatttgaattgtgtatgtgcttcaaagatagggcaaggcagagtagtttttttcttattttcttagaacatgcaaatatatgtaaggctagtaggaagttaactattctattattttttgttgttgttgtgaaggctaacactagagacatcagatatagaggaaaaatctgtcatcattggtgagagaaaccgagcagctacggaagctttaagaagagcaatagagcaaggacacaagattattggaattctatattgcggaggccacatgcccgacctgggaagacgactgagagaagagtttg

SEQ ID NO: 35951 - DNA, 860 bp, Arabidopsis thaliana columbia
ctaggttttgatttggtacatgtagtctgttctcattgtggaacttcgttttgtggaggcatttgttaattggaccagaatgatatttgtttcctaatactagaagtgtattctgagatctccattgtttatcatttgttgcttgcagctctgagactaatgaagagcctagatattacgatgatacgcctaatccattaggccctcagattcacccctcagggtatacatcaatttctactcttatgtgctcacaattatgatcaaaaactaaaacttatcggttattgacttgtgtatttcctagcgtggtagttcctccgatacctggtaatggtggttacagtgatctcttccctggcccaggtgctggaatgtaccctggcaggtttgttatagacatttatagtttctattatacaactgtatcactttaaatcatttataatgtcactcaccacatatattttctctcccaaggggtggttttggggatggaagcatgcttgtaggtatgtacgattcttcaatccctcttgagaagcaagatattataacgtcttacttgattataatttgttaaagtgattctgtttggttgcaggacctactgatcctcgctttttcccatttggtgatggttctgatcgacctggcttcatgggaccaccacacccgtaaaatcactctttctttcacacacacatagagatacacagccatagatttgaacacatgaaaagctctctaaattgtttctgacaagttaccatggatttttgtttgtggttttgacaggggtatgccactcctggtgcgcgttttgaccttatggtccaccggtgttcaggttttgagca

SEQ ID NO: 35952 - DNA, 531 bp, Arabidopsis thaliana columbia
cgactctagctaacacaataacaccgtatagatagatagatatgacacagaagttgtgatcttaaaaggtatactcggctaaaagacgctacaagtactcaaatggtacgaataatgaatttagatgcacaaaacgtatatattgatcaatatgtataataattttctaaccttataatgaatactacattgaggttgttaaaaagttgaaagaactatattatactatgattaaggtaacgtattgacgtattgtaaaaatattcaaatgagcgcctgagatgtgcccacataatatttcatcaagaatacgccgtgaagctcaaaattcttaaaagaacaaacgaactcattattgaatagtctagacctatatatctatcaaatcgagctaattataataatagttatagggtacaacacgaaaccctagctatgaataaaagaaagccatatatggaaaggaattttcctaacatacgagacacatgcatttctctaacatgtaacatctaccgaagatatgagaag

SEQ ID NO: 35953 - DNA, 1522 bp, Arabidopsis thaliana
ctagcatagctgagcaatttcaattatccatcctgaaaactcatacataccacacatagatgctaatacgactatgtgaacaaaagcaataggaattactcacgcttttaacaatctcttggctcagttgattccaaccactagataccaaggttcttcttgaagttggctttgtatatctctgaaacagcactggcagtatcagcaacaccggttttgatctccgatatcttcgaatccatgtactctttctgtttcgatatcgaatcgataagtgcaaagagttgtgcagcacatgcttggacctcctcttcactctccttcactgcttcttgcaatctaagctccgaagcttttacaaactcagcagcttctttctccacaacctccagattcaaagcctcagctttcacactctcaaccaatgttttcgcctccaaatcacattttgtactcaactcctgagtttccttcttcaccaacttcatcttttcttcgaggtcattgatctgcaactgaattgacccaagaagactccttttggattcgatcttcgaagccatttcagacttatggtgctgtaaagtgaccaattcctccactttctccgccgagcttcctttgatcccatcgcacaacgaacacagagctggcttcaccaccgatttataatccacacccatcaccgctgcaggtgtttcccctctctcgttaacagcgaactgaatatcaagcttcaatctcctgagagcttggttgcagtcaatggcaagtgtctgaatctgatgaaactgattcctaatctgtgaattgagttcccaagctttctgatcccaaccatctctagcaacctcagcatccgcaacatctctttccacagcttgtaactctcttctcatcctatttacatccgccgcgctaaagttctgaagctccacactcttcttcaactccttattctctacagagattcgctctctctcttcttccttagctttgagctccttagctttctcctccacaactttctccatcgctggattcctatcagtatactccacaacaatagttcggaacttgtttacgtcattctccaaatcggctttaactttctccagagactctttcttcgaaggacctttcctcagtgactcaagtctagcctccaattcaccggagattttctcacaaccagagatagtttcagcgacgctagtcttctccgcttccaatttacccaaaaattgagaatctaaatcgttaaccttatcatcctcgccgcgaatgaagtgaccaaagctttgaatcgcgaagaaattcatggagttatcttcgggtacggaggtggaattagatactagatgttgatggaaacgagcaagctcagctaaccagtgaacaacggcgagaacagtaggccaattgtgaggcgtatttggagctttgaggctagatttggtgatcttaaaaggacatttctgcgatttgagacagacgacgagattctcgtcgcatttgatgg

SEQ ID NO: 35954 - DNA, 613 bp, Arabidopsis thaliana columbia
tttttgttaatcaggttttattcaaactacaagcttaatccccataggaaaatcacttaatctaattcatttttgagatccggaatcagtacaagaaatttaccttgaagtggaccctgagatcggctcctctcgccttgcaagctgcaaacgcaaaaccaatcgaaaccatttcaatgaatactcattgcatagcttgaggtaagccaataacagtgtagcttgaagcaaaaaataacagagactatgaaagtgttcttacatttggtgatattatcgggctcttgagagtacttcacctgaagaaaaacaataagaagacgaagaacataagtataggagcataagttagaagtgaaaacgttgtaacgacgagtctagtgtaacgcatttaccatggcggccaatgagaagaacagaggacggagaggatagagatctcagtagttggagacacttaatatatagtgaaacagaagaaaccctaatcggcgaatacattagttgaactagtgtattaaagtactatttgttcatatgggccttctgggccacttatcttgataagtaggcttaaaaagcccaattatgtgctggtaacacccgacttgta

SEQ ID NO: 35955 - DNA, 832 bp, Arabidopsis thaliana columbia
ttccagttcccaaaatttttgccgtatcaacgccatttagtaaagaaaggtttgagagcgattcaagaatctctagagcattaattccaagaggtccaggtatgtcaacctacaaacaagaagtaacacgtgagctcatctctgcataaataaattttagttaactttgtacagtaacctcaatttgtatctgaataaggacaacttccaacatttacctctaatgaagacagtgaagggaagagcttcaagacttcaagtagttctccaacagaattctgatccaatgagtttccacgaatatttaaatgagaaagtaatggcatctcgtgcacagagaatgcctgaaaatgaagaaagcaaaggcagataaatcaggcacgtaaaatacaaaattgaaacatacaccttcgtcaatgcttgtagcctctacggtcaataaactacactccctgcctctctgagagaaagtagggggacaaaactgaccttattgactagattgtgtattgaccggtttgaaaggtcaagtgaggtgacattgcacaagggttgatcctgctgaacacaaccaggattatccttcccaaagatatctccacagaaaccaagtgcccataacccataattaggggtaaaacacgagttgtaaatctcaagactcggacagccttgcaatatttcgtcagccatctgacgttcactgaaaataatcataaaaaagaaatacatgagaaattaattatatatccacacacatccatatattttgtaaatgcatgattacctcttctgaagaacaggattgtcattcagccacaaagccttcaga

SEQ ID NO: 35956 - DNA, 542 bp, Arabidopsis thaliana columbia
attgaaaatttcggagttgaaacacgtgaaagtcacatgatcggtttgttctggtttggtttattccggttttatcggtttatttctggtttggttttattacggttaactgtaagcagcatcataaaaagacgaagatggatgatggtgaaatcaaaatcaaggaaatggcgcttgatgtgagaatcttcgagaaaacctctccttctcgtttcatctctttcactatccctaaccctaattctccgattcatctcctccgcgtcgccgtcctcgactcgcctgttcattccactgagtcttctcctccccgagtcgccgccattctcgtccccaagcaccgagaatccgattggatcttctccactgagtccggtcaattacagcttctccttaacatgccagaaatctctcgattgatcttgatcggtgatgatcacgatactgactctgatttacctgcggtttatcaccgaccgaacggcgaagacgacgaatctgagaaactcgagataagattgaaacatcttgtggtagctttg

SEQ ID NO: 35957 - DNA, 762 bp, Arabidopsis thaliana columbia
gaaaggtctaatgacagctcatgattttagaaattatttaggggaattcaatagaactaccagctagaatttgcctttcaaaatttaattatttgcgtcttggtgtcacttaataaagcatttagtacacttaccagctagattttttgattaattgacttagctttcatgtcattaatacgtgctataatatttctatgacttatttgatcaaaatgtagtcactggattggtttttagttgccgacttaatatggatgcaactttattctatatgagttgtatgaaagcataaaggccaaatttacgtgtaaaagtcacgtgtctatgaaaattctgacagtgacaggctttgtagtctttaggttggtggtagttgtgaaaatggaaaaaccataatgttgttttaaatgatcaatgttttattttataaaggttgattacatattttttcctttctcgaaagtattcatttattacgaaaatagttcatgcattaggaatttaggattgatgcataattacaaatttacattcacttttacaaacataattaaattgtagatctaagaagcgaacgtggaaacacgtgcttgcaagtttctcgaatctctaatgtggttggcaaattgaaccaaaggtcataaatgtgctacaacataatgttgggctacttgaatagaatttacttacacttgagacatatgcacacacatacctctgcatttatatatttgtgtttaatgccaccgtataacggtt

SEQ ID NO: 35958 - DNA, 558 bp, Arabidopsis thaliana columbia
tatgatacattaccgatacgaaacatgtcagtactaagcagcttatttctgacctgaaagtatcgcatatcgttataccgatcaaagatgaacatgtttcctccatatatgtaccccaatgccaaaagctgttgaaacatcacaaaggtcaaaacttgatatgaataaatgtcctaaagctattgaaacatcacaaaggtcaaaactttatagctcagtttacctcatcttcctgtaattgatcattcatctttagttgctcctctgttagctctggctcactgacactagatcgcaaatctttcagaattgtcaacataatatcttccttcgtctcatattcatcaacaccatcagcaatttcttcactttcagctctctttaactccgattcctcacaattcgaatgatcactagaactgtgatgaaacttctcctccatattcaccgaatgcgaattctgtttcacctttaacctactcaattcatcagccaagcaatcaacaacatcggattcagcaaaattcacctccggtttctccacgggacgaggttttg

SEQ ID NO: 35959 - DNA, 623 bp, Arabidopsis thaliana columbia
ctttgcgtaaatctaacatggttttgcaagaaggaacatcatcttcaaaaggagggtcatcagtttttaggtggatattatagatcatactctccatttggaccccaaaaaaaaaccccattgtaaccatttatttacactctagtagtctagttgatccccaacgattaaaataaacaagaactacatgatgagaacacctaaaaattctgcatgaataattgccatttttaattggtaacaaagtaaacagttgtctaactaatgtggatcgattataataagaaaacttagtattatcattggtaacagtgatacaatatagtttattatcagagtttgtaacttaatagtagttcatacttgttaccgttatgttatcaccttgttcaaatcatgggaaatttgtgtatgatatagatggaaaaatactagctactttttgatatttgaagtgatccaattaataaaatatttcccacttcgcaccatgacttttgattgcatacgtgaatgtcaaacctaataaagtagtaataaaaagtgatcactaaatgctactaatttatttactggaaataaatttattttttcttctatgtttagactttttttttagagat

SEQ ID NO: 35960 - DNA, 1104 bp, Arabidopsis thaliana
gaagtcattttccttcttctgtcttattgaggcagggactaatgtttgttttatctttcagttgtttcgtttaaattccacatttgtgcaatgaactggttggtgtttctttaagatataatcattttgccactgtagtgagatcggaggcatgcattacagagataagaaaagtttaatacaccaacataattgaatgcaatttattagatttatgactttgcaatagtatagctatgttacaaattgtaaaaccgaataatgttacagtcaatactcatcaatcttacagccaccagtatatagttagttagcttatgttgatgataatcttcacatatgccattaagtttggaggagacaacttaagggatggaagttggagttccagggagagaggggggagcagagagggccgtaacgggcgatccaggcattgcgggcttcggatattgagagaaaggagatgagaatgggaattttggaaaactttgccccggaaactgaggaaactcgggtgtaggattgctcggaaaaccgggtctagggaattgagggaaaggcatgggattagttggaaaaccgggtcttgggaactgaggaaaactgggtaatgctggattgttcggaaagccgggtctcggaaattgagggaaacgcggtctaaaatacttcggttttaacgtttgtttcttcgtaaattgttgtgcagcgcggcttgaagtgatcatagaggagaacatcagagccatgaggagagaagcgactaagaacattttagatgaggccatagtgtttaataaaagagctcttcaattagttgtagtgtgttttttatttgattacttatttctctgatggatttgagttatataggaggaaactcaatagagataacgagtacaatttgcatatcatttgactgaattttctttttatagatttacccctgatggtttcattattaagaataggaaacggttgatatggttaccattttgttgctattagttttgaatacatgtttgttgtatcaacaaaacaaatccataagacttagaactgaccctgcctcatcaaattgtcatatggttataatgtaga

SEQ ID NO: 35961 - DNA, 670 bp, Arabidopsis thaliana columbia
ctgacatggtgtgtgtctgagtcaggtccagaagataccgaagaagagctgtctgtcattacagatcatggagtcctcccttgctccgtatctgcatactgaactgaatagatcaacactctcttcaggtacatgatacttttgcgtcctttcaaccttgcttttatgtgggagcttcatgaattcgagaagtgacccagaagatgacagaattacttgagctgtgagtggattcacggaaggaaacttggtgagaaatgattctgctagagattctgactcgggcattttgacatggagtttggacaacttaacagaagatttgatacacttcaatataatttcatccgtgagattagctgacgatgagcaaaacatctgtaaactgattcctaggctaccagctgctgcatacagttcatcagaggagtccattacggcagccaggaaggcgggtccccctcaaaaacctgtacgaaaaataacaatcgttctttaagttctctggactcagtctacagtttagaagaaaatgttgcagagactttagtatatgagtgagtattaaacatctagtaagtttgtaatcatcaaattagcaaaaataatagaagatgattcttaaagtgaaaggtccacatatatactgcaacgttcccacaaaagaacg

SEQ ID NO: 35962 - DNA, 564 bp, Arabidopsis thaliana columbia
ctaaagaaatgacagtgagcttgacactcccgccacacagggcatgtgcaatgttgtggaaattcgaatcgacaaccaacgcccgagggatacacaattcaatgaatcagacttcttggacgatgaattaagtggggacgaagaatggacaggtcaagacgttgacctgggcgacggaggccatgcctggtgaatgctctacaaggggccaatccgtctttactcgcgctcgcggtctagttttaccagaccgtcgcttctgtatatgccctttttcatgattattggcggctacttctctctggaactctcgatgttttgagctacaggggcgggtcatggcgtttccaagtcttgggggttacatttcatggttagggggctcttctactctagatttattagttatacgaagttcttacctcggttgttgttctctatagactgcaactaatgcaatactaaacttcaattctagctctagcaaggtacggtaggccttggcgcaagttccagttattcgtcgtcaacctcagtgcatatagtggaagtctatggtgcggt

SEQ ID NO: 35963 - DNA, 712 bp, Arabidopsis thaliana columbia
tagccactcagtgagagtgttaaaccttttctttgctctgctgctttggttgctcttgtgccttataattgtgcaaaggctcaataatgttcaatgatggaatatcatctatacgagtatggcccggttcatctgaactaccaacactatcagtggagctcgaagtgtcttcgataatctgttaaaagccaaaattcagcgtgtgagatatagaagcgatataggttgtgattatatatgagtaaaaaaagcttaccattgatccagtttcagtatcactgctatcatcaggcaaaaccccagacacaggttttttgggccggtgatcactgtaatgctgttgcatagatgtcctttcatctaccaaaaactcaaaattttcttcaatcacatgcttccaaatcatctccgactcattttcataaggtgccaagtaaggaacttgctgttgcaggtcgatatagtcactcagccactgaccgccgtgatttgcaaaatcatactcaaggagagggttgaatgatccttgaagtggttgctgctgcataatgttagagttttcattaaactgctggccatgatttgctgaatcatactcagagtaagtgttgtaagatcctgaatttcgttgacgtgattggttgacctgaaacgaatcaacagtttaggaaaacatcaaatcagtagacacaagctcttttttgatctgcct

SEQ ID NO: 35964 - DNA, 556 bp, Arabidopsis thaliana columbia
tggacttgcgtctaggtaacttgtactattacgatatgggcttcgaaataatttcggtcatagtttagagagagtgtgagagatcagaagttccaaaaccaataaatttacatattaaaggatcaatgaattaaaaaacaaataaataaaatgtgattcctcgtgtttttcagtccaatcgtacacacaattataaaattatatattttccacagacaaatatgaaccactcaagtaaattaaagccaccgacaatgcttcttttcttcgggcacctccacgtggctgccccaacaacccaaaatgctgcccgttgagctgtaaaatcacgttactctatacgacatcgtattgcgccgactaaaaagtttgttactttttcttttgttccttccttcaaactgtagtgacggtgcaattcttggtgatgactatatgcttattaagattcttgtgttcgaagttgatgtcacactcgattttcttatagaactttggctgcactaatttccccaacacgtatgctcgtgatcggacgacaaagctgagcgtcatt

SEQ ID NO: 35965 - DNA, 802 bp, Arabidopsis thaliana columbia
  unsure (1)..(802): unsure at all n locations
ttgtgtttctgttcattagattacttacaaacaactcaaacttcttcttcagttctccatagtcaccatcttgtcgtccagaagctcccactgacaccgcattctatgtttataaatggcaataatataaatgtaattagataactaactcatcaatataatagacaaagaaattctagtggacttggaaatacacaaactcttgaactttgactgaattaactaaatttctgcttaaaacagacaaaacttgataagatgtctgtctcaaaagataagttcatatgtaattctcacacttcaactgaacaattattggttgctaaagcgagccacctaccaagttgctcttgattaccaaacaaagagatatcttagattaatagtacaccacaaaaccagattaagtataggccaaaagcagagacacgaatataaattaaactctagaatttatttagttagatactctctagtctccacacacacgctcgaaagagacaatgttgagaatggaaagtgacatttattcacaagacaaaagttccaacttttattctcttatctatttgactagaaatattcaagttctctataatcactgtgtaatcgcagagacaaaaaggaatgatattttacctttctgggtcttcctacgggttttccagtacgagcaaagcttctcatcggcttcataggcttcctgataacacctccaatcttaggaggccgcctcttcctcgtttcttgactgcaancatctctcctccactctctacgttagttggtggtggtggtggtg

SEQ ID NO: 35966 - DNA, 611 bp, Arabidopsis thaliana columbia
caactttgaagatttatctctgtctgctgatgcacaggattatgctgccccaaaagaagatgaaacgaactcccaagacggatcttccatgaatcctgcacagtcaaaacacatttcaacttctgaaatcagttcagaaaatggaactctgatgtcagatactccaagagatcttcacacaggatacgggagcctctcagcctcatcttgtctggaagacggattggccaaccctgatctggctgagatatcatcatattctggacaggaggatccacaaaccatgtctattgtttcagatgatagtagtgaccctgaggtaccaattcctgatggtacttgttttgcaggtgatgtcgatcacgataaccagactggcctgaataataaggccattgagaccgtgccccagaaagaattggaaactattagtgatccacaggagagtcttttaggtacagaagaatgtctttcatctgagtattgcttacagatacagaaccaaaggcaagaaagtcgatcagaaacagggtcagcaaattcaagaacatcatcagacgagtctcgtcctcacaaaatggatctgttggtgtcaaagtcacctttagatg

SEQ ID NO: 35967 - DNA, 431 bp, Arabidopsis thaliana columbia
acttctgatggatattgtgcctcgttcgcttgaactgatccattctgtgtgttttcatccctctggatgttgaaactgttgtttccactgcctgcaagtgatggcatttcggttgattcaaccagcttccccatccaccattgtgtcggaggaagaggcggaacggaggtgttatctccggatttgcctgaggtgtttcatggagggacgtggagaggggtagtatggactcaggggatacgttcaagaaatcttcttcatcagtcagacccttggaaagaacagactcagagatatgatcatttaatgatgtgaaaatttcctggtatggtgcatgaagagcttctatttcagttatgcttgaaggaaaaacatctaaaggtgaactttgaacaccaacagatccattttgtgtaggaggagactcgtct

SEQ ID NO: 35968 - DNA, 540 bp, Arabidopsis thaliana columbia
tagtcaactgatttttagttttctactaaaatcgccatcttattttcttctagattcaatttgatctgaatgtggcatgtaggttgataaaacttatcaaatagcatcaaatcagtattttctaaaactttttacatcatcataaatctttcacttataaaatataatatcttgggtacaccaaagtaatcctgatatatactacaaaatataacattttagttgttttcatatgtggttaatcttttttaggtcgtacatgattcataaaccttaccgtcataaaaagaaaaataaattatatttaaactaagaaatgtgatatgatgcaaaagtgacaaaatttcgatgaatcatgtgatgataatacgaaatgatatacctaacctacactgctcattctacatttgaagaatatatacctaaatatacataccaattctgggataattacataatatacagtttcatattagtctcacgtaattacgattcacgacagtaagaagattagtttaacggtcaaaacaattcatatat

SEQ ID NO: 35969 - DNA, 579 bp, Arabidopsis thaliana columbia
taagaacatttatgctctgcttttttcctctcctctcctattttaagaagtttccataacagagaatgaaaagaaaagatctcgagctgttgattaacaaaaccatctcaaaaagttcacaacctaacctgacctcgtctcaaaaacatctcaaaaagtaacaaaaccatccgttacacaaccaagtttctgaaaaaccaaacaccaaagaaaaaaaagaagccctacgtaaaaccgcctgagaaaacttcttatgttgaagccgaacgcctccttgtcacctggcgcggcacttggaccgggaaagctgcagcttcgagaaccatcgcttccacttcactcatggtaggccgttcaagtctctctgcctttatacacatcctcgcagtatcaaatatcttctttaaaccttcaaccgagtacctattaccgagcgcaacatcagctttcacaggcgcatcctcgatcctatcccatactctcaaaaactgcaaaaaaataagaacatccaaacaaaactcagctaatctacgtaactccataacacgaaacgtgtaaaaggttctagatacaaagttt

SEQ ID NO: 35970 - DNA, 502 bp, Arabidopsis thaliana columbia
tcgtttctcccatacttttttcctctaagaaaataaccatcaactttaatatttctgaaataaacaaatttctcactaaaccatgttaaacaataaatttgtgtttactgtttcacgttacgattacccacataattacccacgacccgtttcgatacgatgtcgtttccttcattggttttattcccaaaattacccagaaatgacgttattttctatgtgtgtataatcaaaatcgatttgaggtttagggttcatattcacttctgaaattgaagaaacgatgagcaccacgagctactactcgtctgcttcaagtctggcacatcgaaatgctggtgttccgtctccctcatcgccacttttacttccacgtccgccgtttcgacctcactcccactctccggaccctcaagatcgaggatcatctgggtcactcgtgatacactaaatcttccctatgttcataactcgacgatgacccataccagaatgacataat

SEQ ID NO: 35971 - DNA, 1285 bp, Arabidopsis thaliana columbia
taaatcatttatcttagatttgaactcagatccgataatactaaaagcaacatctaactggttcaattggccgcacttgcactgccaactttcacctttaactgaattttaattaatagagtaattattatggaccctgagtatgaaaccaattgaaccatcacacttacatgattatatgtatttttattagataaagaaaattatccgaagaaaaaaaaaactgtggtctgacttaagtgtgagacgtcccaccattgtcccctccactcccactcacagcaaccttagcttttcccataataaaacatcatcttacactatacacattccactctctcctcttttgtgctcccaaaccaaacataacactcacaatttaactctctctgtctctctctcatatctctcacttcttctctttctttttaagtccccaaaataacctcgagatcgatggactcaaatctgttcataactcccacttcttctctcaaatcccaagccttggtctcttcatcatcctaactatataaggtatgaatattctttcatctttctttattggttttctttggaaatctaagactctcaatttctatgttcttggattaattgacaattctttctcaatatttgaagttatgatgtttgatcaacaattgttagcatggttgtataacttttaaattagatatgaatgggtcacatatattattgccatttatgtgtcagcaacttaagtttcaactttttcttttttacctctttttcgttttgctcaaaaacattggataccctaaaaattaaataaataaatatatttccttggagatgataattgtttagttgatggatctgcttcgtaagtaagttgattttgctgtcggtgatcttttcgctatatatgtttgtctgttttttgtttattcctttgagtatatgtgttttatttgtcgggttttttgtttgtttgtcgctttgtgtatatttatgtttttttctttgttgggttctcattgttaatgaaagcaaaaccaagtaactgaattacaatttttgtgatctaaagttttgtgttatttctgtctcaatagaaattaaacttagttgctagatgataaaagaatctagaaattatttggaaactatttaagtttagtttagtgagaaatagaagaatgtaattagttagagttgactggttgatatatggatggatgtgtcagtactaaatttggcacttctgatgttgtctactcattgactcgttaggaccatttat

SEQ ID NO: 35972 - DNA, 770 bp, Arabidopsis thaliana columbia
ctatacctacgtaaacaagggagtttcagaactaccatacggttaatttttgtcggagggaagaagacatcatgataacttttgatgtaaggtcggagtcggagtgcctttaagcgtgagatcatctcattctcactgagatgcgtgtgcatgcgttatgtggtcatttctgcatggcctaacataccttagaacggaaagtgagatatgttggcacagtagaaattgcccatgaggtttaatagtaattttgacatttccatacgtaagattaatcagcaatctacatacttacgagttacgaataaataataaatgtcgacattcctattgattttagaattagtcgttttttatggaagccggagccggaccaagaataactaatatatattcgattcgatcatatcgtgaattatttatactgctcctaagaaaaaatcatcatcgtgaattatattatatgggtttaatgtggacccaatatctccctccatgtgtttaacgtgcatctctacgagactacgacattccatcgtaaggaaaaaaaagaggcactagtcgatttactagtaattttactatagatacagtttttatccggttaaaaactaatactatagtcttcatttaaagaaacatatgtagaatttagaaaattaattctcaaagtttccgacagaaaggaaaaagaggaaattgccttttacagaatttaaaatcatttgacaattagaaaaggtgaaaagtgaactttacatagtttgatg

SEQ ID NO: 35973 - DNA, 852 bp, Arabidopsis thaliana columbia
ctctttttaagatttgatttgattttaaagaaaaagaaagagaagaaaataggggagagacatgggttttgatttatgtacaatgcaatcatcttacgactaatgtttctccacatctttttctactgttgcttagtggttgtcatttcctctctgcgtttgttcccttaatgggccatgcaatttccacgtgtttaactttttttgggagatgtacaagtctatctactttttttttatcagtgcatgttgtctctttcgcattgtcttgatgttatataggaaccaaattcggctaataggtaaagaacaaaccgagttactattgcacataccatcctcaactagcaaagttttcatggatagggtgtgaactatattttgtgtgatttgtctaaggatcagctcattagtggtgtagcaaactacaacctaaactctttagggagactttgaaacgatgtctttctgtaatcactaagttgagaatactaagtgaaatttctattaatgcaaataatttgaccattaatcatgtttaaactcccttaattaggctcccttttagtcgcagtaacataggggtcagtatggtatggtcataaatggggcattatgagaaagttcataaatgttggggaagcgttttttccgggggtcactcaaacaagtgtcagaaaggtgatacgtgtcgtgactcaggtggctagtggtaagtcccaaaggagcacgtcagtggcaatggaagctaaactattcagtgactgcgaaagtttttgactgatcatttttgtgcccgggtcttgtaaaacctcgatattatctcgctatccttgtttttccccttttacc

SEQ ID NO: 35974 - DNA, 560 bp, Arabidopsis thaliana columbia
cttctatcatgtggctatctcatgagctcgtaccaagaggtagaatccagctctgtttcaagtatatctctttttatgtacttggggttctcttgatttattgctcaaaaaacgtggctgtgtcctttacaggttagatctgtagtattgcatacactaaaccgtgctagatttacagtagcagtggagtcctttcttaagacgggtaagctatgtcactttgctagcatgcacttgagtgtgctcctagagctctgatttcccaccccttttgaggtttgtcatattcaaacttcacagattgaactttccatctatctgcagggcgggttccctcattgcaggaaggtaatatccaagaaaagatattcacttttccatgggtggatgatcggccagtgatgcttggtatgtgttatcaagcattccatataaattatattcctttttcattacccttactgattaggtttttcatacaatttgacaggagccagatttaaggatgcattccaagaccccagcacgtatatggctgtaaagccttttttcgatgtatg

SEQ ID NO: 35975 - DNA, 678 bp, Arabidopsis thaliana columbia
gtagtaactagagaggtccccaaaatgattttatatcattgcatttcgctgtgcttgtgtttatataaacatcaaggattcaagatggtcaaggaaaaaatgaagagacccccaaaatcaaatgaggacttcattattggttatgattaaaaacatacaagtgaatattttagtttgtaatgtataagagaaacaaagtgtagaagttttgactttgaccacattattagaatctttattcacgtatgaaccgattctcaatgcaaagaagcacatgtatccatccacttagagccaaacaaatgcatacgtggttaatgttgttgaacttctactctacgtatatgattaatttgtacgaccatcatcatcattaatatcttctcgaaaaaacccaaacaaaatctagaagcttatgtattgtcatgcacattttatgtttaactacaagaatgtcactgttttggtttgacagtgaccataaggttcaataaatatgcaaaaaaggcaccagaatcactgtctgagattttggtgcgtgcatgaaatggagcaaggtatcaaatccattttttgttttagagatggttaacgattttttttgtataaatgttgtgcaaatccacaatagccgaaccaaccttcatgttatgtactagctagtttggactagttttg

SEQ ID NO: 35976 - DNA, 1157 bp, Arabidopsis thaliana columbia
caacaaatattgattaaaacgagtacatttttgtaggaaaccttagtttctctaaacaagtaaattttaggtccaataaaaataactcaagcgcatgtatgacattgatctaaattgtttacgaaacgctatgtatgagtttggtaagacttctgctttaacccggaatatcttaaatcatataaaaatagaaaatattaaatcctaatttattgaagaactaaaaccttaacttgatattagcataattctactctttgtattagaaaaaggctaaactcctcaaaagatttctttccatgatctcaacaagtacgctaaataaagttggtccatatcacacacatatacaaatataataaatgaaaaaaattaaattgccaccacctctatggctctaacatcacaagagtaatacaaatccgtgacacattatttatagttatagtaataatgtgatacagaaatgttggcggagtagagggtgctagtaaattaaacattatatgtctttttttttggtacggttgaccgtatttgataacgtataatatacgagatgcgaccgtatgcgtatctagtcggtggaggattagcatgtgcacagagaacaggtgagagagggcgcgggtgacttgcgagcaagtaagagcccatgttttccttaggacccactcttgtctaaaatacgtgacaagatacgatttttttttataaactgttttacgtgttccttgattaaacaaagaagaaagattagaagaagattcaagtttgaaataataatatatcattcatcagcaatcacgtggttttgcctagggatcggttctcttctttctgacaaatgaatatttctaactggaacgaatgggaatctaacacgtgtccaacaatctccacgttagatcatgtgatggtgtgggtcctagtagtgtgcgagctctactagctcttggggaaggaaggaacggactcacttgggtttactccataacaacaagtcctaggatcaacggatcgatacaataattcattcacttactactctataaccatatccacatgcactgcttttttgttttggaatacacaactttttttttattatctatacgatttatatttgtatatattcgtttacttgatgtgatttg

SEQ ID NO: 35977 - DNA, 582 bp, Arabidopsis thaliana columbia
cctgttattgggagaattcttttgggaaaaatgtcaaaaaatacgcgaactttcaaatttgaaacgaaaaaaacatgaactttcgaagggtcattttaatcacaaagtttcgtttgattttggattaaaattgtcaagtttcgttgacttggtcattttgggcacgttgttaaatttccggggttaaccttctgttagaaatttctgttaaatcgaaacgacgtcgttttgaaacatcgttttggacgttttggagcttccaaaacgacgtcgtttcgttagaaaataatgatgctaaatccgcattcacatggaatcgaacatctgacctattggacttctaaaggacaatctaccgctgagctacgagaacagtttgttaaaaaaaaaaacatagcatatatactaacaaataaaactacacaattaattgaaaatatatacaataaattataaattacaaaactacaaaaaaacaaatatatacaaagtttttaaatatcctaccatacatatatattttgaaatttgaaatattaaattctatatagatgttttttatatttgggacattatttttag

SEQ ID NO: 35978 - DNA, 609 bp, Arabidopsis thaliana columbia
taaataaaacacaaaaaaacataaataaaagagtaaataaacataaaataaaatgcttaccattgtaattcttaatcaaaaattacaatggtagcattttatttatttttgatggaaaaataaaacacacaaaattcaaatcaaactccatagataggttgagatcaactgcatttattttctttcttttattccttccttctcgatgttttctagtaaaccggtattgttcgacactcttgaaaatgaatcagaaataaaagagtaatcgatggtggaatcaccaaaactctgcgtttttggttgtggcgaggatagaaaattgccgagagttcatcaaatggagtgaacgaggaagattttgttgtcgtttcttctcctgcacccgaacatgatgttgttttggctgagtattcatttatctttgttataattaatgattacaaagtttttattattattggtttgtttatagcacatactttagtctattctatatataaatgtatgaaatggtaatgtattgaagatcaaagtcttacttgatatttttgtttttggaaatttatacactaaacattaggctttttcctttaattcaagttggat

SEQ ID NO: 35979 - DNA, 621 bp, Arabidopsis thaliana columbia
caaaagaagaagagcttatataggctcgaaacaaagagacctccaacggtcaagaaatgaaaataaggaaacaatattcgaaataaatgataacttggagaggatgtgatcttctagccgttgggaataagtggtggtgatgcgttggtgccggatatggaaagaagtgggatgtgtcttggagaaggagatataatctcgtggcttgagtcttctagttgaaaaggaggcttagatgtcttgagaatattcgcagcttcaatgcttgtggccggaatcatggtgtgattccctcgggtccggttatggtaagtgtcttcaatggagaatatttcttctttaaaggataaggagcgtgtctttagactcttagaagcttctacacgagctagaggcttcaaaatagaccaataaagacgtggtaagagactttccttgtttggctccggtttggttgtcgggtaaggtaaattgatggtttctcaaccatcgcttgatccatctttgtaatgactataggtggctcgatggttcttcataaaatatccatattgacgtttgtatttcaagcccgcaatcagttgatggttggagttctaggttgtagaatggtctgtcagc

SEQ ID NO: 35980 - DNA, 548 bp, Arabidopsis thaliana columbia
caaatgagagtagcttgcttttctcgctaattaaggaattttatgatgttgcattgttttctaacttgtcgtaaggaaaactgcgataacaaaagaccccagaattttcactatttataagaatcagagggtcagaacgaaaataaggagaaacatggttgtgtttgaagatcgattatgtaaccacatttgtgtaacaaaagtctttgtgtgatgtttgtgcagatcctggcggcacttaacctctacaggtttgcactgttatttgaatcgagaggtaaaaagtcgtataccctctaaaatgttaaaatgtcaagttgaaaatgtactttgctttatctcatttccttccaagtaaatggaggaaatctgactatttaaaatattgcaaattagtaggcagtgcggttttgtcatttcatctctcttgttcttgtggttgtttttctgacaagacaaagctatagaatgtgaagcaggtaaagagagaagcaaagtcggcagtgatattttgtcaagaagaatctggagaaagcgtataaggaatg

SEQ ID NO: 35981 - DNA, 512 bp, Arabidopsis thaliana columbia
tgttcttgttatttctttttaatttacctacacaatatcagatcgatagttctttggctttatcatattgtaactctattttctatctaagtattcattgaaattatacgactatgcaatttcccttttttcctttaacttttatttttcatgttcttcgacttcgatattcatctcataggtttatatatggaacaagctaccaccggtccacattaactaacttatacaatacatttacatatatatatggtcaaataacttctatactgtaatatctttccccaattttttcatgttcgacctaaattattacgtctcatatataggatttggacttgtgtagtataatttcacatgcacgttaggaacgatcattagaaaaaattgaacctgtctatctcacccatattcttgatagtaactttttaaaaacgtatttgaagaaatagatattaattttgtcgaacatttgtgttatatatgataacaaatgagttatgcaaaaggta

SEQ ID NO: 35982 - DNA, 1022 bp, Arabidopsis thaliana columbia
agactccccacaacttcaagattttcattgtagatctagtattgatctgaacttcaacttgagatattccagttatataaaataaatgcaaaaaactatcatagtggaaaatatagatttaattttgaatcagatcttttagttataaaaaaggaaaattttagcaaaaattattgaattcataaatacactaatttgactatgagcaatatattcatacaattaatttattgtttctcggtattcaatgaaactgcaaaaatcatggtaatttgtttatgaatttcttgttagttttgtttattagggcttgaaacttgaaagaaaaaaaaaatctatataaaatgaacaaaagaatatagaaagatcttatcttactgtggaaactggaaagtagaaaggcaataaacgaaattaactcctgatcatccataatacataaattataaagaataaagaagattaagaataaacatccaaaaccaatactaattaattaatattaaacatatagtttagggcaaaattcaaagctttcaaagtcgatgtaaaattgtaaatctctgaaaaagccaaataataataataaacaatagatatactaagaaacttaaatcacataaacaaaaaagttactcaggaaaccccaaatccacaaaccccacttgcaatttctccccacatctctctcccatcgccctctctcctctctctcgtcttcttcggctgtgaagcaaataaagcaaattcctttcttcgatttgttctgaaagttttcaactttggtgagtttggagaagaaagaagacacaaatctctttgaatgcaatgtgaaaaaaggaatagttttttccgacgagaatggttgctgcagcgatttcaaccactgacccaagatacccagctcgagatcgacctcaatctcttaccagcaatggcggacaaagaagacccagaggctgacaagttccttctcgctacttatctcgttctccgtgtcactctgtctcttcaccaccact

SEQ ID NO: 35983 - DNA, 1453 bp, Arabidopsis thaliana
tgtcattaaatattttatcaaatttgttctctacacaaaacaaaaaaatagtgtacgagcctgtgttttaaagatactgtagttgacaaagacaacaagaagaaataaaatagtacaaacaacctgtgaagaatctaaagcaaatacattggtaaagttactgctttaatccaaacattgatttggcttttacacataagatattcttgtgaagaagagtgaatagtaaacgtatataaaacaaccagattttacatttaaaagaaggatggaaaaaacaagaaaaacaaaattcaaaccaaaaatgaaacaaaaatctaacaaatgtagagagatacagagaagagtagtgattgttgtattcctatgttttatataagcaacgaacaagaagagagaacgagataagagatatcatttgcaacccataagcatggagttgatcacgtgcattatcagtctgatggctgagacatcgcttcccggtgcgttgcggtgatggtgcagaatctgatatacctgttcaaagattggccgagcgtggaccgcaatcatctggtctgatgggtttatggctgcaaccacatcagtcatccaagccagcttacgggatgtgtccttgctaatgtcacaggctagctgctgcagcagtgaaagaagcacgccttggctcagtggaagcggattcatcgccagtaatccacgtagatccacctgtattggcacaatcaatctcatgggatcttatgtataactgatgggttatgtatgagatcttatgatgcacaaaatccaaacaaaaatttcacctgtgagcaaagccatgatactatagagacatcgcttctctgtagggccgaagtgaaagattcttcgtacttccgttcagatatcaacctcgatagttctgttgttgggtccataggtgcttcaacctgaaaggacatatgttgcgatagtcaaaactcagaaaatgacatcagattaggattcggataagagcagaaatggttctctaattatatgctctctgactcaattacaaaagatgaacagagaataaacttaagccaagaaccaaagatagagaccctagggtgagcaccataaactctcctaaccccaaggcagatcctagaccaatccagaatgctcaattcttctgcctaaacttccttctaagctgttagttctcttctctagttaaccgcctcaactatgattgctaagcagcgaaaagccaccaagagtaactaaaatgctcatgcactaaacaaaaacaagatttatggttagtgattagttccagagatgtgcaaaccttttcaagaagagcacccaaaggtccgccacttagttgagtaaccaaggaattagacccaccagaatttgctccagcagctcacagaaccacacgattatcgtccaaggcctatggagcatataacttggc

SEQ ID NO: 35984 - DNA, 1067 bp, Arabidopsis thaliana columbia
tattccagttatatgtttatatagtaaactcttttacagtaaaatgttgtttccaatcatgttaataacataaaagagaaagaaaaccacgatgaatttcgccaacacagaaacgtaattcatatcctaaaccgtactttcgatcagagaacagaggatcaagaaagtctttttcaaatcctaaactgtttataaaataataaaacctgtgaattcaggcatgacgtcttatacgccccctgattaacgcttgaagctgatctagtaactcggaaagagtacattctcttccttcttcaagatcccatggtttgaaatcaacactcgtccgcacagccactcgcgcttcacgaaagcccttcctaacaagcctgtaaaccttctcacccgagtccgttttgagtgcctctaattcggtttgatcgtagggacgaaacggcatctccttttccccttgtaagtaagccaaacgcacagagtcgagaatttttttttgccacagagttctaatcaaatccgctctctcgaaagtttgctcctccgtttcgttcaccaacactttgtggccgagacagccggctctgaattcttcaacttgtagtcgtcccatatctctttcattgccatcaaaggagtgatcaagtccgctaatcatctgatgaacagaatatatctggatagatatatatatacatatatctgatagaagtgagtcaaatattaatcaaagattaaccgaagaacttacgttcagcagcgtgcaactcgcagcaagaaggatttcttcctttctatcgatctcgtcttcgagaaactccacagccacagaactactcggaagatcgccaacttcttcttgtattgctattttttcctcacaatcgctgttctcagaatctaccatatccaaaagtctctcaacttctctcttcaatccttcaaattcgtccattcttggatagaaacaaagggattcttgaacaaatttgagagaaatataaaaaaatgtggaatggccagaaaagcaaacgcctctgtatttatataccttcatgtgtgtttacgcc

SEQ ID NO: 35985 - DNA, 529 bp, Arabidopsis thaliana
cttcgaattctccacctattggtccatcttccatcttcgtttcacttttctccatgcttccaaattgatcctcaccgccaaattggccaccagcagtaaactgggtattgtcaccaccgaactgagagctgttgccaacagggcttcctccaaactggctgtctccagcgaatccaccattgctgctaccataagtattggcgctaccataaccactacttccattatagtcaccaacagcacctgcgcttgcacttgaaccctccccataagtgttgccgctagatccaaagccaccgcttgaaccataacctccaccagcacctccgtgaccagtagcatcgcctccatagccaccagcaccactgcctccatatccaccagcagcattacctccgtagccaccaccagaattacctccgtagccaccagcaccgcctccatagccaccacttcctccgtagccaccagcacctcctccgtagccaccactaccaccataaccaccaccaccgcctccatagccacc

SEQ ID NO: 35986 - DNA, 720 bp, Arabidopsis thaliana columbia
tgcaatgagattgctgaacttgaatatcgttatcaatcagaatccttgacacgctcaaaatctcaactgttgcagttgcaggcactctcgagcaaagcaataaagaaaaatttggtttttaagtttgtttagaaaccctttaacttctactaaattgcataactaccccttttattactggaaaaaatgtcataaaaaccatcaccagtttatcaaaagtggtgaaacaaagcaccaattttgagtaggatgactttaattttaaactttagttgattttcaattaaatcgttaattttcgttaattttgctaaataaggtacatccttagctgacggaccaatttagcaaagataagtcaacatttacatttttattatgttcacaaaccgacgtcgttttgtgtttaaaaacaagacaaaaatctgttcaaaaaggaaaccattggtaaataccacatgagcgggtacacataacttagctcgttaatgttaagccatggctcgtcttatcccaatttctcaacctttcttctcttcaaacactaaacctccaccaccaccaccaatcgccgccgcacaaatctccgaccacctgccacagattatctctcgccgagacgccaccgttcttctctcctccgccacttctcttctcctcactctctcccccaccaatcccgctttcgccttctccttaggaatctgtacacaacacact

SEQ ID NO: 35987 - DNA, 987 bp, Arabidopsis thaliana columbia
ttcgatcgtttatctactcatgtactataatatcccaaagaaactatagcaaacctcatgattgttggtgacgtggagtaagatttatgccagtgcctcctattcaagatttaatttcatatgccactgtaaagactaattatttctctcataaagtcaaaagaagacatgaagtggcaaagaaagacaagtgagagtaccttggaacttttcctcgagagacaatatatccccactttccttgacagtaagactaggactcagtgaatgcattgacccacgctttccaattacacccacagtcatctctacccaccgcctcctacctttccaagagagctgctgcttggctttggatgaaactatgatttcatcggtttcgacaaatggttcaaaaatcaagaattctggagtaggatttggcatctcaatcattccatgtgtctacacacacaagtgaagatacggatttggataatcctaacttaataatgaatgcttcacggttgtactaacaaaattatttgttttttaaccttagaaagagtgtttggaggaattcttggtatacaatctttcaaagcttgtacatatacagcaaggtcttcagaggaactgcagaaaaacacaaaggtttaatcacacacccaaaaaacttagtggtaacgataaaagaattttaaatacaagttaccataatcttgcaacgccagtggaacatccatcctttgctggtttaacacatagtgtgagacactgaagcttcttgattaattcatcccgaacatttgggaaggtctcatgcattatatcctctgttctcttcacatctttgcttatggtatgaattccaaactctgaaagctattgattacaagaaacacacaacaacaacaacaacaaaaattgttacaataatactcacggtttccaaatcggcttgaagagtatatcgattggtttcatacattactaagagcctgagat

SEQ ID NO: 35988 - DNA, 505 bp, Arabidopsis thaliana columbia
cttgattgcatttttatttacctgttatttgtgtcatcttgttgagttaccttttattgcatatccgtacttaaatttgttgcctatatggttctacacgaccatgtgatcgagtagggcactttcgttctcgtttttattgtttgaaacttgaattaggattgttactagaaacccaccatctttatatatggcttaacttagttgtttatgtatacatcttgattgctagcaataatagtagattggattgacaccccctatagctgcatcgacatgtttgtgtttaaggggaaattgaacatcacatagctaggtgtaaaaatctagttatcaatttggtgtcgttgctaattcattgttgcattgaccatagcgaaagaatctttcaactctagtgatccacccatatatacccgatccttcaaataatggcatctccacattcttcagaaggtttcacgaatctcaggcctaatagatctatcgcaaggttccgggacag

SEQ ID NO: 35989 - DNA, 469 bp, Arabidopsis thaliana columbia
cctaggcgggtggtgtagtattcttgagcgtttgggtcaactaagtccttcctggggtccttgattcgactatccatctcctttcgagattgctctccccccgagatgacaactagttcaccaggtgctttccctttcgccttaagatgatcattgattggcttaagcttggcatcaattattttctccatttgtaatgtgatagcatcgatgatggcttggttattaacactcttctccgagcttgattcggttgtcatcattttctgccaacaaacaacactaaaccagtcactagttcaaagagaatactaaacgttttaataagaacagaggcagaagatcgaacagaataaattatcaaatcatgctcaaaaatttcagaaacaattttatacaatactacactcgtcttacattcagatccagttgatttcgcaattttatcgcaagccattatttatgaaaa

SEQ ID NO: 35990 - DNA, 409 bp, Arabidopsis thaliana columbia
cgttgctttttgatccttcgatgtcgataaagtaaatcttgaagatttgcacctgctcgaccttaggttgagttggaccaaaccgcctctctattttgtcttctagcgaattaggtcaacctagtatttgctataaatagaccccttccctttacctaatggaaattccttttttatttcttttgttctagagatttctttgcctcttttggatcaatcttaaatatgttccgttaatttcctattgaatctttaagtttttgcaataatggtttctactacaaagttgtttaccttgcttacatctattgcatactaaggttataatgatttttgggtgttatgagtcttctgagttttgttctatgttgctctcattgtttttgaggagtgtcttcagagttcgtga

SEQ ID NO: 35991 - DNA, 499 bp, Arabidopsis thaliana columbia
ctaatttactgctagatctactattctgataattcctgagaatttccctaaacccgacgttttaatcatttgaatctacaaccaatctattttattgctttcttgtcttttacttttataatattttctgtttagctttattcaaaattgttattctattgtgtgatccgagaactttgtggaattcgatcccttagtgctataacaacatctttatttgagagagtagtcattaggataatttgacacacatcaaatttggcgccgttgccgaagttctctttgattcaccattagataaggtgtagaatttagtctaaatttgtcttttactttgttactcatggttctttttcttcttattcttgtgactgcagctaataggaattcgaacgcaactaccggaaagctagcaatctgtggatatgttgagactgattatcagacctgatgttgcatgagtcttacgagacagagatggtcatgcatacaatgaaga

SEQ ID NO: 35992 - DNA, 582 bp, Arabidopsis thaliana columbia
ctaaagggacccttacggccgccgcgccgccgtaatgatgcctccgcttcagccccaatcagtgcagtgaataccgctaatccaacgccggccccttcgcgccctgacgaccgagactccgccgtagtcaatcctgaaaccgacgacgcgccctcggaacgcgtgcaagttctgggacttcatactcgcaacccgatcatctcctaccagaaccaaatctttagtggagcgtgggcagatcagattggcacggaattgttctttgcgcggcctgacacgactagtactgaattcaacgagcccggtaacgcgcctgcggaggtcactccattgaaacacaccaaggatttcgacctcattgctgccaatagcgtcaagattcttggtcgaaaagccaatctcatctcaagctcaagctcagcggcagaccagcgggatggtttgacaccagagacgtcaggactggtgtacaagccagcgcatcaatcgaaccaggcccgcttcttagagcgtctaaaggaggtcaaaagaagcaaaggcgagacggatacggtacgcacggtgtttagcacgtcagaaggg

SEQ ID NO: 35993 - DNA, 531 bp, Arabidopsis thaliana columbia
tcacttcatttatattttttgatacccaataacaaatgatgtggcacgtgctgattgttgttagaaacgcgtttttgctaaaacagaggaaaaaaaaaaactttcattttttctcacctatctctcccgagaaaacctagaacttccctctcctccgccgatttttcctctcgctcggttcaccctaaaggtgagtcgaaaaagtgttcaaaattttataaataaaaaaagtgaatacaagagttcacccttatttggtgaacctaagaccatgcccagcggtgatatttatttagtatcaaaagcccaaaaatatttttaaatggataaaacaatatttttgggtctaagtcttagcacttgattgatatttttgatacccaataacaaatgacgtggcacgtgctgattgttgttagaaacgtgttttggctaaagcagaggaaaaagacctttcagtttttctcacctctctctcccgagaaaacctagaacttccctctcctccgctgatttccctctctgccgatt

SEQ ID NO: 35994 - DNA, 443 bp, Arabidopsis thaliana columbia
tttcaaatggttatttaattattataaagtttatatattataatattataaacacgtcctaccatctagtcctactatctaatcatgttcggtgaaattatttttttattttttttaataatatttttattataaaatttataatttaaatcaatttaaagttttctttcaaatggttatttaatttttaaatattttaactattttgacaaaaataattaggccatgaaataaaagcatattcttttgaataagatttgctttgatttggtagttaatttttgcatttaataagtcagtggcagccattgtaaataagttctaattgcaggatttatttcacaaaatggctgcaaaaatgtatatatagatttgcggtcaaaaaagttaagcatcatttaagatgaaagagaatgaaacagtcgtaatgtgttttaattttt

SEQ ID NO: 35995 - DNA, 597 bp, Arabidopsis thaliana columbia
caaattacaagataatatgatggatctaacagtggatgagacagaaaaggaatcgttgaaaaatttacctagtctgcataagtctcatcaacctgacatcaataaaactcttctacctatcaaaaacatctcccagatctcctctctgaagaagagtacttctagtattgatgcttcaaagctttcagcgttagttctttcagagagagatgttacagttagctccagcaatattgttagggatcttcccacaacaaacgctgaaccaagcaaggctgctggtatgagtagggaagcggaaaaaagacagaatgtggaagatcctgtttcatctggaatcagacccaacttaaagaaggctactgatgaactcggccctcgtggtacttcaaaagaggctcagaaatctgcgatttccaacgccaaaggcatggatttgagaaaggtggtaaatgagacggaggttgatccacttgacttggctcttaaatctctgaaacggcagtcattacccctggcaaaatcagggcccattgttcccaaaagacaagtcattcaactttgtgcacctgtcaacaagaaatccgatcgttggca

SEQ ID NO: 35996 - DNA, 544 bp, Arabidopsis thaliana columbia
gttttggttttagggtttatgcaacatgaggtgattttaacaattcatgcatgcaaccatgaaatcaatcaaactaaacaccctagataacttcaaacaatcacgaaatagaattagggttttgatccgattatagtgtttttgatttagggtttatgtcttttagggtttcggattctaggttaagatgttttcgatttgcaagtttaggataagcaataacaagacaaacaatcgagcaaacaagcaatcatattgcaaacactaatcaaccgggagccgtttgttagatccatgttcgattagggttctttagttttagggtttaatgaattacctttctcctttggggttgtacggactggaaccgggagctaaagaccttggttatcaaacggtggtcgctggttgacagtcggcggtcgacggaagtatcgtcggttgacagacggtcagcaaacggtcgacaggcggtcgacggaacagcggacggcggacggcggacgagctagggttgagcgacggctgctagggttttgttaag

SEQ ID NO: 35997 - DNA, 545 bp, Arabidopsis thaliana columbia
tctggattaattatttaagggcccgtggcattggatgataactcgatttgcgtgttaagcaatgttgaaaagttctcattttgtttgttaaataccaattccagtgctttgtccaccaagtgtttgtgttaattcctgaatgagtttaacggttcacaaaacctctggattagtgagaattattcagtatatttatttgaagtggtgataattggaggattttctcttgtgtttgtagatgaattctgtgttactgttttataatggagtgatagaagaaaccagagtttttcattgtttttatgaactgatcttgtttgtggtttatatggttgtaggataagagaaagaaacacagttggagttatactgatgaatggaggaggctcgagtagtttgcgttcagcattgtcctattgtgtgcagcaagtacgaaactatgactatcatcactacctctgtctccttgaactcccaactgagatgcgtaaagcagcatttgctctccgggcttttaatgtagaaaccgcaagagccatggatgt

SEQ ID NO: 35998 - DNA, 1045 bp, Arabidopsis thaliana columbia
ttttcaaacattttggatggttgaattaaatttattataaaatagaattgtgtatgacaatattcatctaacatatttctttgatttgaattgttttcttaaagaatattatattattctattcatgatagatgtttgcaataatctatgaggagaatttgaagttaatttatttcgactaatttttttacagagaccatctatgcctctggacaaaagagagagttttgattgtcaaaacacaaatcaaaaggaagaagcagatccttccaaaagaatagttttcatatgttgaatcagcccatccatctgctctcttgaatgcaatggcgaaggatacacaaacgcacagtccaattttccatccctaagcgcatcgaaaaccgcaaccgacggtccaaccccgtggatagacgcgcatccaatgtaatcttgcaccccaagagaagccaattcaggctctggagactcgtcgataacaggatcttcaaatatggagatgaaagcggttctcagagaagaggaaggcgtgagattaggattctctatggccttgcacattaagaaattgagatctgacatatcagtgaactgcttgttcgagttcttggaggatgtgaacgagtcgtagcatcttttggctaggtcccagagcttttcttctccggttaaatcgtgtgtatgaaggatccctgcatggtagaaacctggaaacaaaataagaaatatatcaagttcaaatcataagatcaatactacaacatccaaatcaaattgcatttgtccattgttagtttaacgagtttgaaaatgtctagtaagaactacaaaaatgcagtcttgaaccgtatcatcactagctcataaaaaatttgttgcaatcatgagaagataatctatgaacatctattcctcatatatatcatcaaaggctatagtaatcccaaattttcgagcttaccaaagtcatttgaagtaagaggaggttcaagaatggaacgacaatccgaaagagtcaccacggcgtatttctctccttggtatg

SEQ ID NO: 35999 - DNA, 587 bp, Arabidopsis thaliana columbia
acaattaacttgtaatagagaattgctcaacgtagcacaattagtgtagatctttaaaattaaatcatcgagcgaattttagaattctcccaaatagttgttatctgcaaatgtcatgttatttacaattcttgatacataaaatagttagttttccatgtggtaaaaacaataaaacatacgaccaatcgaccattgacataactcttctaaatccacgatgagttatatatataaacttataatactaatcacaattattgttattgaggaatatacatcgtgagtatcatcaaatctcgtcatcgcactttgcttgaacgtgcaagaaacttggaaacgcgtttagagcaaacaccgggacaccgaagtaccgtttattgaattcctttttttgtgtgtgttgttcaatacttaaatcgactaaaaaatcattagcctaagattcacatatcagaacgtgcttgggccaaaaataaaatacagaacgtgcatggaccaaccaaccatatatatatcttcatagtattattgataatggcgggtccattatgtttgatatattttcagttttcacatggaagcat

SEQ ID NO: 36000 - DNA, 444 bp, Arabidopsis thaliana columbia
tcagaataaccggtggtgttccgtgaaattaactatgcttggagctaagattcccggtggcgtgcagtgaaaccctattcctaaacatgcatgctaaacgagttcgataagttcaccttagtagatagaccgattcttattacacacctattaaccaggctcatcaaataatagttttgataatagatacctatggcgggtgtaatacccctcactaagactacaaattgaccgagggatggctatcgaagaaccatcagccaatatagaagagaatgattgttggcgatgagcgaagtattctaggatactttcaagagttttgatcgagggggttaactattattaggcgaaccatgatagtccatccgtctgttgtgcgttgcgtgaaactccgtaacgttatggcttacgaaggtttggagcaggtcatgcccgggcaag

SEQ ID NO: 36001 - DNA, 524 bp, Arabidopsis thaliana columbia
agaaagattgttaaatgtcaaatatttaattcgaagtttttattctaattatcaaaaacaaacattaaaatctagtggcaaccattgtaactaagtcccaactacacgatttatttcacaaaatggctgcaaaaatgtatatatagatatataatttttaaaactatgtgaattttatattttttgaaaaaactctttattatatactttcacacattactattttgtatttaatattaagtaaagaaaaaaaagcataatcctattaggtcagattgggttggccttgggtacaattactaaatggccacatgcttgtttagtaatggaaaagacatagatgaaagtgtgtttcaagatttttcctttgaattttgtggaggatttggaaaatagagattgacctttgcttttatttaatgatcagttttatggcatgagagtgttggaaaaaaaaacactatatttgatggacaagaatgaaagtaaacagaaagactgaactacctaagacgttctgaaca

SEQ ID NO: 36002 - DNA, 744 bp, Arabidopsis thaliana columbia
tccttgtacatttctgctatagcgacctatcactcgccacacccaggcttggaacaagctgtgtgtcgaggctttctattcttctagttttctgttcctgcatgttcacttaggctgctagacaccccaaaacctgttattgcttggcttgattctgtgaactctgattgcatcttgattgctagcatcacatccatttggattgacaacctaaaatactacaacgacatgattgatgttttaggataattgactagaaacctattatcacttgacattgtccgccgtgtagcagatcatgggttttgggaattaggttctttgatagcctctggacctgacttcctgactatggttttcgatcgcagtgttcttgccgaagctgatattgatgagtttgttttcgtaacttcgcatgccaatgtagattctgtgtaccgccctttgtttttgcgttgtttggaacgtggcaaccagatgcacagtttgttgaaggcttacgcgttcggttgacctccttggtgcgacatgtccagccagcatttatgcaaggttttcactaggtctagttcttgtttgttcaggttcttatgacgagggtatgcaagcgatgtaggcctttttctaggattccttctaatgaggcagctgtgtcaattgctgaaatggttttacatcaaactgctaccttccgcttaccaaggtgtggttggtttgactatacgtttgtatttggctatgatc

SEQ ID NO: 36003 - DNA, 565 bp, Arabidopsis thaliana columbia
ccataaatactatatgtaaatatatatatatatatatatatatatatatatatatattatttttaattttctttatcgagttaagaaaaaaatagtttatatatgtgcgcccatttagtattatcacttctttctatttctatatttaaatatattcacaaatttaaatttaatacgtatcgatatcttatgattcacttgacatgtgttgcgatcacgtgagtttgcaactttgaaaatccaattttatacaataagataggtaatttctttaaaaaaaaaagttaatagtagagaaaatatgttttatctgcacctatgcgagagagaccgtgagacttgcagaattttaactggaaatcaattcttataccaagattatctaagaaattttcgtacgtttgttgaactttctaagtgctggtgtattttcttaataaaaatccctagcctaccatattcttctttcccaacccttaagaatatgaataagcaaaacttaagaaccattttattatgcagacagcacagattataattcagactgagagatattctattatta

SEQ ID NO: 36004 - DNA, 550 bp, Arabidopsis thaliana columbia
tgtgtatatttttagttagttcattagcttagttcaggaccggtcctgctcttgtaacacagcttctttaaattcatgtacctggctccttatgaagatgctcatagcagcaattcattttttaaggtggtaattacatcagtatactccctccgtttcataatataagttgttttagatcaaattttttgttttactttataagttgttttcaagtttctataaaaattatagggaaaaatgttatttaatacctcaacttacaaaaaatggccaaattaaccgtgaactcgtgaaatggccgttttaactctcaacaaaaagttgacttctgttttaacctttaagtttgcgttgactcggcctaattaaccaccgttaaaaatccttctaacagcgtaattgacagccgttttagtccgttaagcatctgttactatagtcttacgacgccgttttcgtgctaaagagaaatcaaaatcgagaatataatttctcaaaacaaaatcaattaccctaaacccaaatcgaaacctaatcctgccccaaa

SEQ ID NO: 36005 - DNA, 662 bp, Arabidopsis thaliana columbia
tttccattaattagtaagtgatgggccaagttcctgggcttcttagggagggttgaagttggcggcaagaggaagggaaggagtggttgtgcgccgtagtggtcgatggaatacttgaggggacgtcagggttcaagtctcttcggccgacaattttaaattgatcatttctaaaaccacgattctagaacatgtcttcactcttcgtgccataacttctgaacggcttcatggattgctttgattcgacttcgatgtaaatattgactcttctagctttcctatgacaccgagatacctccatgccaagatcgtaaagaccttaaacggatgccaaacatctgaggcacaaaaactgttctgaaacggaattttgtcgatttctactccttttagcatgaaaactcataattcttccttgaagcccaaatactcgaagtatgccttgaagtgtcctgtaactattgatttcccatggaaacccaataaaacaatagtaaaagttggagaaatacgatgttatcccatgggggactgcaccaagatttaatgttttgaagatcttagccgacttagtacgagggttgtaccaagtgagggcaagtgggagtgggtgagtgttcggagaaactaggaatagtgagaccagttgaggagatttt

SEQ ID NO: 36006 - DNA, 526 bp, Arabidopsis thaliana columbia
  unsure (1)..(526): unsure at all n locations
ctgcctttcatatttttagtgtaagaaataatttttctaaaatttcactgtctcacaatctatacatataactaaaaaagcaaggatatataaattcaaaaaaaaactaagaatctaaaacaacaataaaaaacaactcaagcacattcgtttttcagatgaactaatatagttggacttttcaaaaacaattacaaaacatatttatgtttcaaaacctatgcattcaactttactttatataaacagacattatataaaacaattagtaaatagtaatacgtaaacccgcacgtagtgantctttcatctaatttgtaaattaataattcctcaatttgcacccaaaaaaagaattccttaaccacgaaaaaaataaaaaaacaaaattacaatttaagggggaaagttatatgaaattgcaaatataaccaccaaacaaacaatcgactatcgaggttcccttaagaaaatctttattcgcaagatctctctctctctctctcactcgacgcactttagaaag

SEQ ID NO: 36007 - DNA, 457 bp, Arabidopsis thaliana columbia
  unsure (1)..(457): unsure at all n locations
cctgtcgacgattcctcttcatctataccatccaattttgagtcatttaaaaatcttagatttttttccttaccattcaatgtaacattgactaccaattaatgttgtcatatttttgcctgaaaaaataattaacataaatgtaaaatatctttactttcctattttaattattatagtataaacacactatctttaaaaggttatatacacccaaaattacccatgaatattgtattacatcctatgacttatttataaaaaaagtattaagtaatacgtctgtcattttccaaaacatatacatatcggggtgtcaaaatgggtaacctaactcaactcacctcattatccaatgagtttagagttaaatgagttgggtcaccaatgaactcatttatcttgattggttgaatggttaacagagtttcncatttaagtaatgatttaattaata

SEQ ID NO: 36008 - DNA, 879 bp, Arabidopsis thaliana columbia
gatcccccgaatctataaactattctataattttaaaaatcgtaaagatttccaaatttcataagtttgaaatcaatttaatgcataaaccataaaagcccctaaatattttattaaaatgtatttttatacaagagataatttcaaagtcaaaataattttttttttttaaagtattttcgcaaacagccttacgaataatctaaaaggctctggaagtaaatcgtggacacagcttaaaccctaagaaccctttcgttgaataaacaaaaaatcaaacgccttcaaaaatcaaaatctcgatccagatctcatcttccgccacaagctatgaggagagtcaccggacttgccgcgcgcacaatctcatcctccgtcgccatcaattcacgtctcactcaatccatggcgattacaaccatttcatcctccgaacctatctcccgaagattcggtggtcttccagagattaaaactccgtctttcgccggcggagtcgctggggttgtgttcttctctgccgctgctgtatcgtctcttggtcaagaagttcacgctaaggaaatggctcagaagtttaatcctaaagaagttgttctgtatcagtacgaagcttgccctttctgtaacaaggttaaaggtaatcttatcacactaatctaaaaattgctggatctgatcagaatttgatcttctactcatcgattcttgctttagacttaggttgaattcagtaggattgacttgaatgtgatggatttgaatggagaatggttctcattgtctatgattcagtaagagattggtgattgaatgaggtactattgttgctggtatgatatttgggcgattgtgtattttgtttgtagcgttttggat

SEQ ID NO: 36009 - DNA, 1853 bp, Arabidopsis thaliana
tggatgtccatgaaatgggattgctaaaaaaacatatgaatgggaatcattcatacgtatgttgttaggtacgtgtatacgcacattcatatcaaaacacaagaataaattctatacaataaatgcaaaaattcgtttgtattgtaatttgcctcataaaacaatggtgggttgagaggaacaaagaaagcttgtacagtaaataaccaaatggctgaagaagccaaatgtgccaacaataagaggacccacttcacaccaacaccttcacgcttctttctatcttctctttgcttactagattttctcctttttaatctcttccttaaacaaaaaagctgttttcaaacttaaactaaaaagcttcatattgtcaccacattaattccaagaaaattcgcattaatgctctgcaaaatttaatgattttaaaattaacatttgttcctttattcaagaaaaattcgcattaatttatttatttaagagatgattacctaaaatggtgtgtataaattgcaaaattagctctgttgttctgctaggagagttaatggagaaagagggtgttaccattaccagtacaactatagttgcagagttcaggggttccttggagtagcattaaagtctcaaaggagagaaaaataaaaaaaaaatacattaaagacaaattgagtcttttctcataaatggtttctttgtagtgtttatgatttgtttttacagagaaaagatctaaaaagagaacaaagatatggtttattttcgtcagatttttctcatgatcattgtagtttcattacactgctgcaaagttagattcttttgcattgttgctaatgctaaagagcttgatgactggaaggtgttaacggtggaaaacggtgaaagataccgacccatgtcggaagatacgccggagaagagggcggcgagaagataaagcttcgagttttggaaaagtttcgagctttactcgatttgattaaaccctctacttcacggagaagaaatctcgccgagtctgcttctttctctccttaggccggcgccgtcgccgtctccgtttcccaacggtggtccaatcgaatctccggcgtatcctccagctcctccacgaccgattcctccacatctccgtcgtccgttacctcaacggacccatccattggaacaacccgagattcaacggcgaaaacatgagaaaggaggaacatttaagaagattcttgtacctgtcgttgcttccacagcttctgcaatcggtttcgtagtatgtgtcgttggagtgttctgtctctgcgcgagaagaaaaaggaaaatgaacggtaaaacgctgtcgtttaaaaggaaaaagggaaaatctcaaagctcgacgaggaaggttagtgtaaaccctactctcgatttcttgtacctaaactcactaggagttgacttggagagacaaaactctgtttctgttaaagaaatacgagaaacagagaaggatttgaacggtatcaatggtggattgcttgaagaagaggtaaagagaagtatagaaacagagatctcacatgattgggacaatgctagtagttattcgaccaaagagattgtgtcggtgcacgaaaatgatgaagaacaaacagtaaactctgtttctgttcctgttgttgtaatcaatgattcttcagacgatgatgagtcttttcattccgttggtggtggctctcagtattcaaatccaagattgtcaaatgcttcctctgcttctggtagtgttaacgttggttcctctcaacgcttctcagaacacaaattggatattcctgaatgttctagaagcgacttcggaatctctgtat

SEQ ID NO: 36010 - DNA, 543 bp, Arabidopsis thaliana columbia
taaaaagcggggagaggagaagattgtctcctagagcgacttgaatccttgagctttcaaactcatctcccggagcttcccttttctctttactctctctctctctctctctctctctcacttttctctgttttttttcttggtgtctgtcttaattccaccattaatgctctctaccttcccttttactcttcccctgcttttgtgttttctctttctcttttctaaaccctttcaaactcttcttcctcttctttctttttctccaataacagtttcttgtgctcatgttaaaactgcagctcttttccggtaaaaagaaaagctttttggtcagtttagttatcctcaagcatcaaaaccttacttgagctctgcatcatcatccatggccatggcgactagccttctttcttcgctttttacctccttaatatctttaaaagcgagaggaaatgttcaacggcgccgtttcactactcttcctcttccttgccgtcgtttcagcgagggcagatccgacattcaacgacgacgttttgg

SEQ ID NO: 36011 - DNA, 573 bp, Arabidopsis thaliana columbia
tttagtagaagtcaactaagaaaccgagatcagaatgtgaccaaatcttaaactttttaactacattgcttaacaagagggcatttggtctagtggtatgattctcgcttagggtgcgagaggtcccgagttcaattctcggaatgccccaatgactttttatattaacatgttatatatctgttttaaatgccagcttgcttaaaaaccaactgtagaccatatgtttcaatcctaacatttttcacaatcttagagtttcataattaactacataatgcaaaacaaataacttaccacagttccgcgtccaatctatatgtctttttaattaataaagacagacgttttgtatgctgccagagattgtgctgcagaaatagcaaaacaatccttaataagcatctaacgaaagcaaagggaagcaaatattctcgtgaagaaaaagtagaatgcgttaatttaacaagaataagaacagggcatttggtctagtggtatgattctcgctttgggtgcgagaggtccgagttcgattctcggaatgcccattgactttttcaaaaacatttg

SEQ ID NO: 36012 - DNA, 461 bp, Arabidopsis thaliana columbia
ggcgaaacaacaaccttgtcatatccaaagtaggagcacaagtctagatgattgttcggatacattgcatgtagaagatcaaagtgtcaacatttcgattttcttcaaatgggataagttgatgaacaaatctactgataccaggatttttttcttccaatgttataagagtttgtgatcaatatgtacgtagtgagcaatcaggatgaagcaattttcaaacaaagtatctaactgtaaaatagggaggatttttcaattaccttcaaggactgaatcgaaaaccttttcttcaaaagtcataaccacatcaaacacaccatcaccagcattatcttgccatctttgaggagcaagtttcacggataaattcctcttaatcatctgcaaaataccattccgcttgtatctgatgaaaacagttaagtgcatctaacttcaagcttacaaatctccctata

SEQ ID NO: 36013 - DNA, 581 bp, Arabidopsis thaliana columbia
tatcgactcgaaaccagaaactaggacttcataacccggcaagccaaaccacaagaagaaactcgaaaacgcttccggatgcgacgacgacgactgaggcgtctaattgcgtctagttagaagccttcaaaaggctaacagaaaagatctgaagcaagtacaaggagtgaagcctaacctctcgagaaccttcatcgagaacaagcacgacgaaagaaggaggaagctatcaaacacagaaaccaacaccaaggaggagaaaccaattgccaacaaagaagactaccacaacagaaacagaacgaaacctccggaaaaaaaagggacgcaattcttcagtagaaactatatacgtcattctttttcattcttttattcttatgtggataactaaaaatctaaaatccgtatgggtaataataataatagtctacttgtaatgtggacgcaataaaaccacaagtactaaatggtctgaaaatcgaaaagataaaaaagctataccaatctaccactaccgtacgaactaacatatccatcaatctaatagtatatcaaaattcttgttttgtagtacgaat

SEQ ID NO: 36014 - DNA, 457 bp, Arabidopsis thaliana columbia
  unsure (1)..(457): unsure at all n locations
tnnnnnnnnnnnnnnnnnnnnnnnctaaaggctgatcaagcaaggtcctgcgatagtctcacagcacgacagtgctgcgtgaantaccgacctattatgacctgaggtgacaaccgtagacagttgacggctacaagtacctacaacgaagaaacaggtttctccctctgcttaacaaatgacgccggtgtccctctgtagctgcaaccgatgnanaaggcgctggaagacggttgtnganatgctgaaccatgtcaaacacagcatctancctgtgcgtcgtctgcantcggacagatgcgcagtctcgacctcgagnaatgatggggactttagcgaccagatgattgatcgtagtactgagattcacacggtttatgtaccgcgtcttaaaggtgtgggnaataagcatcatctctccgngttgagtcgtgctgttgagatcgctggtcagaaa

SEQ ID NO: 36015 - DNA, 526 bp, Arabidopsis thaliana columbia
  unsure (1)..(526): unsure at all n locations
ccatgtatataactttctatctttcttgttatttttgatgtttttgtttaaatgtttcgggtttgttttagtgaccctaagggagtcaacggtcgagtaaattcaaaccaagtcaagaaaaatctcaaccgttgatcgagtagaatgaggaggagtatttttagccattgatttggatcaccaaatgagaggagcatcaccgctgtttgatcgagtgactttctgaagtttattttggtccgtttatcgagtaaacaagaatgagaagctcaccaccgttggatcaaattttttgctcttcaagaggttgctcgatcctttactcgagctctcattatttgaagaccatggaataacttcgagacccaacttgctccccaaacactcttttactcaatggaaaaagcgattacccatgcccctcatcatttccaatcaacttttctatcccttcccaaagaaaccaaacaccattctcctccacccatgtgatttcgacaanaccctcattgaaactctctctttc

SEQ ID NO: 36016 - DNA, 441 bp, Arabidopsis thaliana columbia
tcacgaactgaaattggtagagaaggttcacttacatagttgcagagagtttgagggagacagtggagagattgagagagattgaggggagctgagatttgagatctggaagaaattaaaggaaaattgagatttgagaggaattgagagaatattaagagatatttgagggatagtgagtaagatttgagagatctgaaagaggaatttaagggccttgttttggagagatgaagaagcgtaaaaattaaagggaaaatagaacattgatggtaataaataaaatatttctgacggcaaaagtagagggaaatctgtcggaacccacaaaatattgccgcataattgtgtatgttcccgacagatttttaacggataaactttaaacattcgcaaccccattgggaatatagaatattgttttgcatgcgaagtttatag

SEQ ID NO: 36017 - DNA, 408 bp, Arabidopsis thaliana columbia
tccaagtatctgaaacagttgcgtcttagggttttaaggaggcatttccggtcactcctaagcatagatagaccaaaagacggttgtatccgatagaggaagtgttagagaagccatgggacccttcgtcgtcacttgaaaaggtataccctagctgccacgtcgattgcttgttggacaagaatcacatgttttaccaaaactgcagaaaccctaatttgtcattgtgctgtgttcgtctgctgcaagtttcagatattgtctaggcatcttcaaccattttctcccagtttgcgtctcattccgagttgctaatgtgaaggtgtgatctgcggaaattcgattaccagtttttatttgtatgcttcatgattcattgcataggaatagacttcgttgcttagtaat

SEQ ID NO: 36018 - DNA, 603 bp, Arabidopsis thaliana columbia
  unsure (1)..(603): unsure at all n locations
tttagccacacttccattttgatataatgaaaaacaaaagtaagtaaatacataaaatatcatcttcttcatagttcttcttctcattcgtctcctccatccattcctctagagtcagagttctctctccgtaatctagatccgtcggggtttgagcattaaccagctctgtgattattctgttaacggaaatttgacggcatgtcttaaacggctcagtcaacgaaacttacctattttattgagaagtcaacaaaaacttcatgattaaaatgacatattcaaagttcatgcttttctcatctcaaatttgaaagttgaggcattttttaacatttttccctatacattatgtgtattgacacgaatcatacagagcttttttcattgctatcatatttacgtctttttttgtataccattgtgcccctactaaacattataagaaaaacgtaattacaaggaatgccactaccacgtcagaaatcgctgacgtggattaattactcagccgtatgcgntacaacggccgttacagtatgttgcggttgacttatgacaaaaatatttgagtcatgagagatcgggggaattatgagtata

SEQ ID NO: 36019 - DNA, 510 bp, Arabidopsis thaliana columbia
ttttgttctcaatcgaaatcaaattgagtctctctcaaccacaaaaaatgattgttcaccgtataataccttcccgcgtaaaagaccctctcactcgatttaaacctctcaaaaacttgacaacttcttcatctcccgtattcgaaccctcttcttcttcttcttcttcttcttcttcggcttcgttttctgtttcagattctttcttggtggagaagatttgttttagtttgaagcaaggtaacaataatgtgagaaaccacctgattcggttaaaccctttagccgtcgttgaggttttataccgctgccgcaatgatttaactttaggtcaaagattcgtggatcaattaggtttccattttccgaatttcaagcatacgtctttgtctttaagcgctatgattcatattctcgtgaggagtggaagattatcagatgcacagagttgtcttcttaggatgattaggaggagtggtgtttctagactagagattgtgaatccttgga

SEQ ID NO: 36020 - DNA, 450 bp, Arabidopsis thaliana columbia
tcaaatctaccaatccctttaacattcattagttctggaacgtgaatcaagcagtgcatcatcaatgaactcatttcgctaaggtgaaggtcaagagacagagatggtcccttatagaataggcttaagtaacaggggatccctcaagaatgattgagctttagtagaatgctaaaggtaagtcccaagttatgcatacacagataagatcccatctacccagagtataacaatgaagttctaacggtaatcccaactcctgtcccaacttaactctaccctttgcactcatgaatctttcaaactctttttcatatcattcttttttttcacttaactctaggagaagctttctcaacgctctgatacatctagcgggtttggatttctttaacaactaaggctcctgttttttttttttttttcctttaaaaccaaaggcttttaacc

SEQ ID NO: 36021 - DNA, 989 bp, Arabidopsis thaliana columbia
ttttttatgtgtagagtattcattacttatttacaggacaaccaaataaatagtggtcccatcatattccaaccttcattatcaggaaaatacatattccaacttttttttctttttcttttcagccgattccaactataattcagaccaatgggcttcaaattctgtcaatgtcaaatgtatggataacgattctctacaaaaagaccaaacccaaaaaatggaccccacgaaatgccagcgtggcatcacataatatcatcatcagcccaccgtttcaatcgttttgctccggtttcccaattttcttcacgcttctcccataccctcttacctatcttcttattcttcttagatttctccatcgatctcgaacaaaggattcacctttgcattcatattctttatcttgacttcaaagtcaaacctccgattcgataaacaaattggggaatggatgcttgctttcgtctttctcaccagatctgaagcacccaagttccaaattcatattcgattcaccggcggctaggtatttctcaaatcggtcagatttctgagatttatttatgagaacaatggtgacgaccaaattgggaatgctccattatgtaattgaccatatatatggagcgtttatgcaccgcaccaagatgaccccacccttcttctctcgaggttggggtggtcccaatctcgaattgctcgagcgtatggttcaacgcctcttccctcttgaggttcaaggtcagaattggccaccgcctctggttcgtccagtctggagaactgtttgggagacaaagaccgctactttgagagaaggtgttttccagactccttgtgccgatgagcttaccgctgctttgcctcggagtctcgacagccagggttgcttggcttgtcccaaaaacgttcgtcccaaaagatggcttgtgtggttcacttgcaggtacattattgatcatctctgtttagaatagatatag

SEQ ID NO: 36022 - DNA, 216 bp, Arabidopsis thaliana columbia
atagaggatcaacacagttgatgtaaattatgactaaccattatatgaatgttttaaagaataattctcgtttctattataaattttggtatgaaatctctatttataaaaataatgtgtatgtttatcaacaaaaaagaagaagatatgtatatgttttcttgataatacccgtacatagaaaggctattactttgacttcaagtaaaggtgtag

SEQ ID NO: 36023 - DNA, 478 bp, Arabidopsis thaliana columbia
cttactctatttaaccgtttcaataaactttgataattgattaacacttcccttgatcaccactagtttgtcccagtccaagaaatatttttctcggcaaaatctagttttctcggcaaaatctagttttctccgatcaaaactggtcttcagcacttcctttaattttcttcggtagccttgatctttcccttgaccaaattgcctaaaataaaatccatccttaaaatcttcatttttatcgttaatggtttgatcgggtccttcgatcaaacgaacgataacttcctcgatagcatgtcaaccacattgccgtcatttcttgataattgttcgatcatgtcctctggatcgaactaccaatgtcctctatagcctaactgcccaatgccggtaataacggatccttaacatcctgactcttagcgatacgcgataaatctgaactcactcgtgattgctcttgaaatcctttgat

SEQ ID NO: 36024 - DNA, 435 bp, Arabidopsis thaliana columbia
attgtcctttgattctccaaaatagccaaaagctttgcatgtagtgtttgctaaaccaaaaaaaaataaaaaaaaaaatacataaatgaaagagaatattacactcaaagacacttttctcaaacaatttccaagatacgacactttcagaacatagggcactttcaataaaaaaattgtcccttttacccttaaaccaatttcggtttaattctctaatctcaatttataaataaaaaccaatttgtaagaaacctctctttctcacccaatccctccacgacgacttaacaatttcatttatctaagcagtcaatactcttaaatcatcacaacgctaacatcatctcgactccggcgattatctcggcgagttttttaccggcgaatccatttccccgtccctcacctgtcgtaaaaaaaaaactttaatcg

SEQ ID NO: 36025 - DNA, 498 bp, Arabidopsis thaliana columbia
cagttcgtgatttagttatgatttgttaacatttggatgcgtaggttgatagatatagattgttagtgatacgttaggttcatagatttgaactaaatttaggatgtttggactaaaacctagatgttgaggtttttagatgagaatattacactgtgggacaacttttacaaaaatatttgtcgtttatgcccttctaaaagagaaggcactttaccttgttaaattgtccaatttgccctcaacattattttctctctctttagcaacatttcttctgtttttcgccatctcttttacgaaatcttctcttcttaatatctctctttttctagaatcaaaatcaaatattataagacaacctcaatattcaaaattcaaatttgaatcttatagggtttatcatcttcttccctatctctcaacaatctaacggtgacaataaactagactatctttaccaaaccccactccgcttcctccgtaacttccagcgtc

SEQ ID NO: 36026 - DNA, 663 bp, Arabidopsis thaliana columbia
  unsure (1)..(663): unsure at all n locations
aaaataaaactctactcatatttcaccaagtgaccaaaaaattcatttcagtatattcatttcagtaaattcattacattttcaactttttttttgtatattttcacttagtttatatgtttatattcatttgttaattttgtattataatgtaatgttttattaactaatattgcttttaagatttttttaatgtatgttttatagttatgtaaattttattgatctgtcaacagtgaagactataatgcaaaaatactaagatttttaacacctttctacctcaaatttaaggttttggcaaacataataaaaaaatcatctttagaaatgcttttattaagtttttttaaaaaatgattatttttcttttctttttatcattgtctaaatttagcctcttcactattattaatccttgtaaacattaattttttgttaacaacactttaactgtactagatgagtaccgcactacgtcgtntnntatgtattactatttacaaattgttttatataatgtctgttcatataaagtacagttgaatgcatcggttatgaacataaaaatgatttgtaagtgtttttgaaaagtccactatattagtcatctgaaacagatgtgccctgagtgtttttattgttgtttagatttcagtttta

SEQ ID NO: 36027 - DNA, 365 bp, Arabidopsis thaliana columbia
aatcatgtttgagaaatgacgttgttgggtttagggattcttaatagggatggagatggattggtagatcgaaaagcccttaggattagtcttagagttcttcatcttgattgttcttagtgctaattttaaattgatcacctagaacttgatattagacaataggtatacgcgccataggtacgtgttatgagaactatcatagatgaggctaggtagttaagaaagaacaggtaggctcatagaagggctgtggttagatagaaggtggaccaaaggcatctgataactcatcctgtggatagatgggcagaattttaggttttttcatgttgtcaaagagttgaacaatggttttttcgtgt

SEQ ID NO: 36028 - DNA, 401 bp, Arabidopsis thaliana
ctagaggatcaatgtactctttattatatgtcaaaatgggctttgttttttcattcacaatcccgagaagaacttactcatttcataagcaaatcaatcattcacattttcgaatatataatttagtcatctttgtatatcctagtcatttttgatttgctatacaattataattccaagtctatctctttatgataattgccaaaagacatttctaagggaagacacggataaataccatttctcgaattgtaatctcaataactctcaataatagagggtcaaaacctctttttcttatgccaattgccttcaagctttcaatataaaaaattgtattcatatatatatatatatatatatatatatatatatatatatatatatatatatatatatat

SEQ ID NO: 36029 - DNA, 848 bp, Arabidopsis thaliana columbia
aaagtctcctctcctttcgaggaatcgtaatgtataagatcatctatctgtgcaagacacagaaaccatctgccagctgatgaagatagataataagaagataaaaacaacactagactcaattgcattaccagagctcccaaaacagattattcaatcataattcagacattattacaagccgctgttctaaagatttttgacaagtgaaataacttttatttagtgtacatgatcacagacgaaccaaaaaccataagcattatgaactagttcaacattcaaggtgattacaggacctgaaagatcattattgttcgaattacaaaaagacgaattcatagaatgaaaactaacctcgctatctttggcaagcacaaatttggcagtaacaaaaccaataagttcatcagagtgatcatcaggccggctccgatcaacagcagcccatgagacgatatcaactccgttcacaacactctggaaaaactcagactcatacctgacaaaacaaaaatcaatactttagaaatcttttcacaagacaccaacataggaaaatccaagtagatggatgcatacttgatggggaagatatcgcgatggatttgctccaaacgatctagatcattagggtttataggtctatagtgaatacttgggcaaagagagattcctgcatcttccattgatgaatcatctatgaatcttcgaggaaatcgcgacattgtttggtatccgagaccagaaaagccctcccattgtgaagtgcagatcctggatctgcctgttgaagtaatggatcggatagattacgaatctggtctatgggttgttggattgatggt

SEQ ID NO: 36030 - DNA, 511 bp, Arabidopsis thaliana columbia
tatttttatggaaagtttttttaactatttttgtctaatttatttttttcagtgatttaattctgaattagaaatataacttatgagattatagttttacttaaacggtttagtctaaaaaaataaaaaaaatggtttagtctaagaagactttttttaatggtaaattactaagaatatattaatattaaaatgacttttaactataaagtctataattactttcaagtaatatctggtctttatttttaaaccatttttttctgtttttaatattgtatcttcacaaacaaaacaaaattatatatatgaaagttggccaattctctccatataattgacacatcatcactttaacatttgccatgtgtctattaaataattaacgtaagcttttcaacttctaatttataggtaaatgatatatttattattttattttacgtagttaattgtactattactaaatttattttaatattatatgatttttcaataaaccattttaaaa

SEQ ID NO: 36031 - DNA, 470 bp, Arabidopsis thaliana columbia
ttgtcccacaccaccgggcggcttctaagagcttcttctttgtcttgttcaccaggctgaagctatcaggaaaatactcggacaagattctggtagaaagaaaagagaggagaagataaaaaaacaacaggaagaacgagctcaggtacctttgattacagatgaaattttattaactcctcctctctgtttgttctgatttcatctttcctcttctcaggagagagctgcaagatcaagcacactcgcatcaaacactatcagattggttattggtccaagtggaacaactatgacattttctgaagacattggtcttccagaatcttcaagccagttacgtacaggtatgctaacatctgaggatatatttatagaatcatatttatatatgtggaattgtgagatttgaagtgtgtgttttgatggatctgtgtgcttcagttatcctcctccgcgagagaaatgtg

SEQ ID NO: 36032 - DNA, 501 bp, Arabidopsis thaliana columbia
tgtagaaatccccatggaagagatcgttgatgagccaagatagcgagagaaagagaagaaagaaagagagaagagagagtaattttcacaaagggaacagatccaaattgagaaatttaaaaaggggaaaaaacgtaaaccaccagcaaagcagcaacggtcgaatccagatgctgccacgtgttgatacatctgcatcgaggtttttattttcaaataatttgtctcccgagatgatacagtcgctacaggcccagatattattaagcccacggtattccaacttcataatcactaggataatatacagtcactacaagcccagataatagcccaataagcttcaagatcgtttgacgatgagattttaattcggaactaagtaaccacgtgtcagtacctcgtcaaagtagctccatgcagaactgacacgcccgcgtgacactcttctccattgcctaacacgcctcgtcgttcgacacatgtctcgtttaagtttag

SEQ ID NO: 36033 - DNA, 564 bp, Arabidopsis thaliana columbia
cacttaatggttttgagacgtcagacataacaaataactaaaacatgagattctctcttgtatggctatatgtaagggaggagatctaaaatgttgactaaaattactagcatatcatgatgtggttgacataatagatcaggaaagaatacatgaaataaagaattgtttgttacaattaaattagataaattttaaaccacataaataacataactacatacattgtatcaataattatatattgttgttgtatgtgttcatgaacgtgaaagattagaataataggcatatagataattagatttatacatgcaaaatgtagaattgatattttgagtcatagtctcattgatgaatctaatcataaaaattataactatataaaatagatatcagtttattaattacataataaaacacatacaaaaataatcaagtgtcgttagctcaattggtaaagatcctaggcgacgttagagagcgccaattcgagtgacacttgggatgaaactaatattatatgttgtggttctgatctggagggatacgggcttttgctag

SEQ ID NO: 36034 - DNA, 483 bp, Arabidopsis thaliana columbia
cattattgtacattattaagaataatcaattacaaaggatgtaaatatgtcgagggtgtcaatccggtattcgagttcccctttgtttactcttcagaaagaataagtctaggggatagaaaaaataccaaaaaaaatatataaagaatggtcgatttattatggtatagtacatgaatgagtctagaaggttcttgaatattagcttgcttgatgagacccaacgatgaaaatctggtggatatagtggtggaacttaggtatggaatctagaatgttgtaagcttgtagagaagtacatgttggttaggatttgattagaactactaggcatatggatttggttagtatgatcatggcaatagactagagaatgttgggagtcctgtgttttcaaacctcttccacgggttcggcttttgtgttttgcttgagggcaaagaaaagctaagtttaggggatgcatttgatttaggtataagt

SEQ ID NO: 36035 - DNA, 260 bp, Arabidopsis thaliana
attagttcgaaaattagacatttatatataaaaaaaaaaaaaaaaaaaaataaaaataaaaaaaaaaaataaaaaaaaaaaaaagatcaaatgatcaaagtcaaaaaatatatagaaaaaaaaaaaaagataaatgtctataaaaagaaaaattataaaaggattaaataatcagctttagtatgattcaggaaaagcagggacttaggttgcttctcgtgaatattctctactttaataacttatattcatagatattt

SEQ ID NO: 36036 - DNA, 478 bp, Arabidopsis thaliana columbia
cagaagatctcagcaatccatctcatccaccagacctaagaagattcatgaagatcacgccacaagccaaaggagcgtcacttttaatgcccaacgactagaagacatcaatggtgacaagatcatggttctctctaatttatttgtttcctttctaaattttagacctttgctacacttttctatttaagctctttgtttctttactttgtattcacgctttgattaataagaaaattcagtttgttttgcttcaatactttatcttgaatcaaatcattgttcttgcgagttctaggtagtttgtggaatcaaaccacttaggtttcgtgtagagtctctgatcctcgcgaggaatagcccttggatcatattctctagccctcggtgttgtctattcaacatcaattcggttacttcatcatcattaccacttctgcatagtttcagtctttgaatcgctgagtcttgtcttgga

SEQ ID NO: 36037 - DNA, 554 bp, Arabidopsis thaliana columbia
taaagcaaattagaagctatcatcttcactttttccattaagtcgacgtagagactaatatatagagttaaattgtgacacaaaagtatatagagtatgaaccaaatgacccatatgaagaaaaaaaataagggaaaggcgacggtttggggtcaaggagaagcaagaacaaaaaataagtcttcaccataacgtttctactaacctgatcccaagtcttgtctctggacaaggtttacttatccactcttctttcaattgcaaaattattagcctttttttttacttctcctaaatacatttttgagactcaagctgtgtcaaattcaccagtattgtggtttgaagggctgagcaggagccccttgtatgtctttttccgacagcaatttcagcttctgcgacaacatttaaaacacagttggattaagaatttaaatcagtcaccagtctttgaggttccatggtatttttttttgtatttagcaatcagcaactcttaaaagggatatgttgtgttccgtgatgtctgtgggggatcatcgaactagtgg

SEQ ID NO: 36038 - DNA, 583 bp, Arabidopsis thaliana columbia
catcaaggttgcaaacagagaagcttcaaagctccatgttacaaaacagcgatggtggacagactattgatgacgtggaagacggagcattaagaagggaaaaaaggatcagaagatcatcaggtcattctgaatcagatgatgtggctacatcatctttaaattcccatggaagtgacgaagaaaatgcctctgaaattgcaacggttgaatctgataataataggaatgaaggcaatggtgtagattctggttccaaagtcgaacaaattgatattggtggaaagtttctcgaaggagactatgacctcaacaaggggctaaatttccaaattaatatcatggttaagagaaagaagagaaagccgaccagaaaacgtggaaccagtgatgttgttgatcctcaggctaaagttgaaggagaagcagttcctgaggctggagcacgtaataatgttcagacatcacaaaattctcatgaaaagtttactgagaggccttgtgaagagaatggggatgagcacttacctctggtgacacgagccagagtcaggatgagtagagcattttatggtaatcatga

SEQ ID NO: 36039 - DNA, 524 bp, Arabidopsis thaliana columbia
  unsure (1)..(524): unsure at all n locations
agtaaaggcaataatagaaacgtcctactaattcaatttcgggtcaaaaattgaaaataaaaatcgagctaatagatggttagcgtagatggttatcataacacatctcatttaacttgtcttatataggactaagatattttgtgtgtgtttttagaccaacccggaagaatatataattgtactaagatattttgtgtgtataaccctttttccatgacatgacctgtgattatgttcattttttggtcatatgtgtttttttaaaaacttattggccactaaatatttacatcacatatttttgctttcgtaaatataagagcatgaacatgggtgatatttatatagtatcataaagaattttttaatattatttataatattcacccaccantttgagattttttatgatattcttaataaatacgtttgtattggtgagaccggattaaatatcattaaaaaaaaaaaaattgcaaaatcaaaaattcatatatcagaacaattataaaagacaatat

SEQ ID NO: 36040 - DNA, 476 bp, Arabidopsis thaliana columbia
aaaattatatgtatatatacatgcttatatataacgcttccaacacatatccgctttctatatgttttacaaaacccgcttccgcgattccaaacgcttccgcttccgcgtacccgcttatgattccatgcagcttaggttttgttgcaaaaagaagggtggtaaaaatctcattttgatgctttgtaagaaaatttgatgggtgaaatcttaacaacttttacaatttcaaaaatgtagcttatgaacgataaccatgtgtttaagtgggtagatgaagcttttacaaatgagattgaacagttggaatttgaaatcggcgttcttgaagtagaatttagagtgatagatggaaaggaaccaagagaggatggtaagcgatctgatggaaagggaaaaaaaaggaaggatattaagatggtaattgtttttagttgtggctgtttaatcaccatggcaattagaatgttgtgtgt

SEQ ID NO: 36041 - DNA, 590 bp, Arabidopsis thaliana columbia
ttttctcatactcgaagcttttttcgtaatcttaactcaaagtatgagtgtataatagccgttgattttggtttgagtagactattctcttaaatttatatctataaaataaaccactgaaggtgaagagtacgtaaagaggtttatcaacaaattcttaggtttctagatacccaacattaccatatattaaattggttaaggacgaacattgtttaaaaattgtatatataatgcattgttaagaacattgttagaaacatatatttgaatactaagaattaggcctgggcaaaatacccgaacccgaaaatccgaaccgaacccgacccgtaagatccgatccgaatgcactttggttccctgcctaatacccggtcggatctttctcttttgtaacttcggttctgggttcgggttcgggtaatacccaagaaccgaaagtacttttctcgatccgaacttatatacacacaatagcattaacccttacttgccttagcttgttcttcttcccaatttttgatttattaaccctagagcgtacaacacaaatcgcaacaagctggaaacctaactcatttgttctg

SEQ ID NO: 36042 - DNA, 619 bp, Arabidopsis thaliana columbia
ccgtaaacatgggtttgtaataatttttgaacatggctttttagactaattgcagtttttttatgctagactgtgcatctagatattttctatttgttgtgtgttgtgtctcctgtttgactttcaggttagttcaaaagaggagtgcttgagtatcaaactgagtcaaaaagtgggagattgaagatgaagattccgatcaaccagctgatagcgatcaggacgctgttgggtttcaggaagctgcatcgaatcacatcagacgtttgaatttatgacatggaggcgggactgacgtgacaagctaaggcgaatgatgtgataaaccaaggagggaagctgacttaacgctgtatcaaagacaagattcatcgagaagatatggaagatatcctctcgaagaataaggacggaataagcttggaaaacaagaaagatttcttttaggaattcttggagatcctaggtttagggttctggagaatatgtataaatattctagagatgagcgtggaccgcttgagcactctagaatactgtcatatgattgtaacttcgaagcattgtaaagcgttgaggtgagtgtgttagtctctttatctttaagtgtgtgtgagag

SEQ ID NO: 36043 - DNA, 564 bp, Arabidopsis thaliana columbia
atcattatggttcctcgtatacacgaagactaaaaagacttttctgttatttaaggatatattttgacgtaagattatttctgaaaggtacgttttattatttctcctactatgaaaatggggtaaagtttggcctactaaggaacatgaggtccaaatttgaaaatataacaatagcaatttgaaaatgttatattactaacatagatataaatgttatattatttctcctacaatgaaaatggagtaagttaggaacgttttaaatgttgtaatgccagacattcagaatttataaataccatagatataaaactgtgaattacttcctacagtagaaaaaaaacttcggtaggatttagaaatacagcaagatataaatcgcaagggattcgtttatcaaatacagtaaaacctttataaattaataatgttgagactgcaaaattttattaatttatagatgttttaatttatcgataaattaatatttattaatttatacagagattttcttaatttagtaacttttcaaaaatttctataagatttttttcattatag

SEQ ID NO: 36044 - DNA, 575 bp, Arabidopsis thaliana columbia
  unsure (1)..(575): unsure at all n locations
attatgacaaagcttttacaatgtgaaagcagattacaagtgtaaaagtatgtgtgtgaatgtaagctgaattttatgtctcttccaagtcgtccttgttcccttatataggtctacgcacgtggtaggtccatccgggatctgcggagatctcctggatattcggcaggttagttccgagaaatcaggtccgctctacaaatatctcctcatcagttcctaagttgttattcgcttttctcgcttcatcaggtgaccgggcttatctggcccaagtacccattcgcgtatgtgggctcatcagctgcgtaagtcctctacttggtgggcttggtgggcttttaaactgtttaaatatgagttcgaacggtaaaaccagttcaatatatgcagatcaaattattaaatagtaaataatacacaaaataataaaataataataaccgggtattttgtgaagctttacatatatgcggatcaaagtattaaataacaaaataatacatattgttataaaatttactanaaacacgtatatanaatacaatttattttatttcgtaataatgttatta

SEQ ID NO: 36045 - DNA, 512 bp, Arabidopsis thaliana columbia
ggctcggaatgcttcaccgttgatcttggataactcaactttctcctcaagatctccctccgccttctccttgaagcctctcttagcttcctctaaaagctcgcacgaactctctcaaagctcactaaactctcagaaacttcaccacaaactcccaaaaacttctaagtattttctggattttccaagaggaatgttcggaaatgattgggagttatttatatagaggatccgcccatgggcgaaagctagtgtccgatgacacttggcttgattcgggcaacacttggcagggcgcgtttctaggcactcgctcatgcagcaggacttggacgcgtggcatcgacaagtggcgaacgcattgcatggcatccgaccaaagggcgtgggaaccacgttttgttcccttcggctccacgcgagctaacttggtcaccaagtttactcggatgggacttgcatggcttgcccgaatggattcggctccaaatttccttaccctctatataaga

SEQ ID NO: 36046 - DNA, 514 bp, Arabidopsis thaliana columbia
aatcaaaaacctaactaccattttgtaaattgtaactgcgattctatttacatcttcaaatgttgtttttccctactaatccaattaatatttcttactatactttatatataatatggaaagaaatcaaattattggtatattccctagaagtaaatcgtggcgtttccaaaataatcagattgtgttgttgttataatagcatcaaaattaatatagaagacagacaatgacagcttgtctttatttctccgtaatcgttacacttacacaaaatttaatttgttttcttactatattaaaaatatattccaagttgaccataaaaataatcaataaacaaaacgagtaattacaaataaaaataaataaacactctctctttctctctttcctcgtcttcttcttcttcttctttttttttcgtaaaaattcttcttcttcttcgtcttctccgagctccgtccgagcagagaagaagagtaaggtaagttttagagtgcacttgtgtggc

SEQ ID NO: 36047 - DNA, 450 bp, Arabidopsis thaliana columbia
tataaatatttgctataaatcggatttatgcatattttgtggagcaaaattcacgaaattttgtttttgaagatatatggaaagattgtgttagagatttttagaaacaaattaggcaagatatcgtttggttaataactttttaaattttgtaaaactaaataataaatgttagtggcagccattgtaaataagtctcaactccaagatttatttcacaaaatggctgcaaaaatgtatatgttgactagggagagccaataaataaataaccaatgaacaccatatgctcatttttcttagctaaataatctatccgaacattggcacaaagtagaacatgacataagctaacagatagtcatgcggactaccataatgataacatgttccactccaatggtaaagcagttgacatagcaataggtgccacacagttgtggactagtg

SEQ ID NO: 36048 - DNA, 530 bp, Arabidopsis thaliana columbia
tttttatctttcaagtgaagaagatggacattatttatacagtgtaaacacgtaattttataaaattatgtttttgttatccacaagcaatgtgctttcttcaattcaaaggtattttcgtaaataaaatgtattatatgctgaagttgaacagtaacattccgaaaattcaaaagaatctttgaagcattactataataaaaatactaaaatttgcaaaatatacaaagttgaaatcttgtgtaaactccaaatcttaaaaacaaaataaattaaactttagaaagtctaccaagtctcgctctacgaataacaaactctaaacctcagctgcataccgcttctcgtcaatgctctctgcacggaatcagaacttatgtgagtgaaaaatcgctcagtaagactacaaacccgaagaacaagtaccaacacggtctgatcccgcacagaataatatttacgtgttggtactaacaaacatagtttcaattcaattaattttaaataaagtaaagcacgtcagaacttat

SEQ ID NO: 36049 - DNA, 505 bp, Arabidopsis thaliana columbia
gatccaagctttgaccttcttctggtaaccatggtgaagaatgggagattaaggattaggttttggggtccgacgaatcgtaacgggaaagaagcacaagatatcggagaagagtctcctggccgttagattaggacgacgacgactgatccaacggtgatctgtgatcgttctcttggtctcttcgccgttgaattttcagattagtcataagcaaatcatccaaagaggaccggttcggttttatacggtcttaaagttattaaattatactattaattacgatgatctaaacggcgtcgtatcaaatccatctcatatgcttacgataacgtcccattgccaagctggttctttcactcttcaggagaaagagagagagagagagagagagagagagagttatcagagatagcaaaaatggaggctttggtttgccggaaattgggagaccaactgcgacgaatccaggtagtccagaatctccggtagaagtaagcaagac

SEQ ID NO: 36050 - DNA, 399 bp, Arabidopsis thaliana columbia
tagtaacgtccgccagtgtgctctaaagagaaaatctaagaatgatagggtcatgatttccaaggctctgttcgggaatgaggagtggtatcgcatcattgatgttgcagcgatatgttcctgaggatatttaccgagatacgagatgaattctcggattgattatagacctagaattctagagttgcaagaaatgccttatcattcgatatattaacatgggggctgaatgtaatccagaggaagcgtggtattgccatcgcgcgatgtgcatgaaccgcggtgagaataagccacctgcattagccatggatccaccagaagccgtttatccgcagtgcagcgcaatcagcaatcgattgataggctgccgaattcccgccagatatatgatgaagc

SEQ ID NO: 36051 - DNA, 413 bp, Arabidopsis thaliana columbia
tgaagaagaagaagaagagtgcgcagacacgaagagagagagagagagagagagagagagagagagcgggagaaacagataaggaagatgaagaacactaatgggccgtgaatgggcctaatctttattaataccttaaattacaatttaccctatttcaaagtaaagtacacctttgtattagaggttctctctctatactactataaactcgaaagtgtacccaaatgagtattatcttcatgtacatattaatttatttagtacggttttgatttatcattgaaatatgagagctgaagagacccaaaaaaatcggaataaatttgaacaccacaatgtgtaaagattttttccctaaaatcaaacacaacttagacgaaaaatcttaaaaattcaattacgaaaaagac

SEQ ID NO: 36052 - DNA, 604 bp, Arabidopsis thaliana columbia
tagtaacgtccgccagtgtgctctaaagtggtgttattggatactcatatcatggggaagcacgggtatggttttcctataaaccgttggacaagtcaccccaaataccggctgtcatgcaatgcaacttgatcaaaagcgttgactgatgagacggttgcaattcgcagaaagggtcctgggccacagttctggttccaggttcaattcactaatagaccttatggaaaacagggtaagaaaataggaatagcgggacgcaagggggtcagaccagggctggaactcttttgtcgacttcacgatcaacgaatgcaaaacaatgcaaacaatattattgatcgtgctcagcctcttagtggcatagttggaggcgcaactcgtcatagaagcttgacgcagttgaaactttcgctgttttacttttgcgaaccatgaaaataagaagagaggggtttgcctcctttctctgcttgactgttctggggaagaggtgagaaactctgtagcgaaatatacgatttggatcgaaccaatgcacaagggaattcagaagatccggtagcctcggacggttaccgcgctttggtcttcgaatataaat

SEQ ID NO: 36053 - DNA, 503 bp, Arabidopsis thaliana columbia
ctgcatctacagctaatcttttttatttttgacatatcccagctaatcatattccatagtttcttctatccttttattttaaaaaattgattatattcccatgataatcatttcaattgttttacctaatcctatatttgttcggagtttctactagaatttctatctacatcaacatcaaattgtaatagctttatgtctttgctaaagcacattacctatgtagcaaacaatcgtattaaatataaacgaaaatatagctttatgtcttttcactaaaatcaacaatactaatccaaatcggagatttgctttcggtaaacatttttgttcgactttttatctagaatattataaagtaagacattttgtgaataagttactaaaatgaattcattacaaaagtagataaagtataaactatcatgataatttagaagtaaaaggattatttttttgtgaatagtaattttagataaataaattatatatctactaaagag

SEQ ID NO: 36054 - DNA, 459 bp, Arabidopsis thaliana
  unsure (1)..(459): unsure at all n locations
ccctttggagatggactgtagtatggtgggggtggggagctgtagacgtatgggggtggtggggacttgtagtcaacctttggagttggactgtagtatggtggtggtggggagctgtagacgtatggtggtggtggagacttgtagtcaacctttggagaaggagagtagtatggtgggggtggggaactgtagacgtatgggggtggtggagacttgtagtcaccctttggagatggactgtagtatggtggtggtggagagctgtagacgtatggtggcggtggagacttgtagttaacctttggtgaaggagagtagtatggtgggggtggggaactgtagacgtatggtggtcctagtgacttgtagtcaacctttggagacggagagtagtatggtggtggtgcggaactgtanacgtatgatggtggtggagacttgtaatcaacttttgga

SEQ ID NO: 36055 - DNA, 347 bp, Arabidopsis thaliana columbia
agaggatcccaaacaatttgaattacgatcatatacagaaaaaatataatattttattaactatttttatgttatataaattcaaaataaattagatataagatcaaataaatttgaaagaagaatcatatatttatgtttaaattaggtaaagatgtgttaggaaattagtttaaggtatgtgtcagatatggttagtctagttagagtacatatgttaaatttggtaatttcattaatttcgtatataattatctttttgggagaaagtggtaataagaaccaattatgggagatccgattagcgattttggggtcaaaattgaataaaagatccagactcaatt

SEQ ID NO: 36056 - DNA, 406 bp, Arabidopsis thaliana columbia
ctatcttaaagaaaagtcaaacatgaatatacggttcatttcatttgccatcacatgtctaatattatatgaaaattaatttaataatctgatcaagttacacgatcgatgatgacttatgctcatttgataaatttattgcttcatatttttttatattattttattgactggtttagttggtacaattgtttgatttggtttgataaattgaaatcacaatctgttatttattgataatataaatatgacatcgttattcatttatttttatatacaattattgtaaaaatatatatatatatacccatatatatatatatattagttgtatcaattaggacatttagctcaaattcataatctctcagtgtctcatgtcgagactcatgagccttgaatttgg

SEQ ID NO: 36057 - DNA, 555 bp, Arabidopsis thaliana columbia
gaagtgagtaaccagaaagaaggaaatagaacttgatcttaataactcagaaatcctaaatgtaacaagaaaacacccaaacggcaacggcgccaaattgatacaagggttttgtgtgtcaattccctaaatgcatcttatgtcattatagcatttaaggtgtcaatccaattgggtggaattgctaacaatcaggatgtgatcagagaatactaagtcaagccaagtgtgagtaggtttggtgtgtttctactaaacctaagcaacatgttaacatgcaaataaaattcagaaatgaactatactaagcagaaggtaaagaacacaagtgataaaagcagaaatgaagctaaagactaggaactgtcaaatgcaagaacaagaaagtaaaccaagcacaaagtgaagtactcggccgagcatactactaaaacatgtcgagtagaagactaaaaacaccaattttgcacacgaactaaacaaaacgaacagagtactaaagacacgagtttagcacaataaaatgaaccagagctcttaagaatggggtaattg

SEQ ID NO: 36058 - DNA, 557 bp, Arabidopsis thaliana
gcagatggccgcattgtggcagagttctctaagaagagacatgaccttacgctggaaaacggcacgctgttcgggctgagatccgagagacgacaacatttccatcgctctcgccacatgtaccagcaccgttcgtccgtatgaatcttccctgagagagttcctcagaagcttggcgatatcgtcggcaaagtcagggagctcgccaagttccgagtcagaatccgagtcggaaccagaatcttgatcacaccagcatgactcatcatcaactgtatcaacttcatcttccaagaacccttgtactagatcagagagacaaggcgagtcgtcgtcttcgtagtcttcaattccgtcgccggtatgttcgctgccgctgctaaagctgcatccaacgagacgagccctaacctcttctgcaagtggatcagtgacacgttttgctctagagaaacgcatatcagagaatgtatatattataaaaacacttagctcgaatttcacagagaagtttgaataagagacaggaggtggagatggctgttttcaaaggagag

SEQ ID NO: 36059 - DNA, 608 bp, Arabidopsis thaliana
  unsure (1)..(608): unsure at all n locations
tagtaacgtccgccagtgtgctctaaagtttaaagttcgcagaccagggctgcgttgtatgtgggattatcaccttatcttgctccaaaggcgcaatcttggggttcagtgttgtatggttggcctgcattgggatcaatccacgctgcagcatcaataccgtcttgataagtgatgccacacccgacgcgccttctgtgtgcccaatgtttcccttgaccgatgcaatggcgagagggttggctcgattgctaccgccgaatacggttcgaatactggtgaattcgataggatcacccacaggcgtgccggtcccatgggcctcgacaaacgagacgtcatgtggatgcaagccagcctcagagacaacctttctgtaaagttcgatctgtgactcagaatgcggcaccgtgatggcggtcgaattttgattctggttgactgcggccgcagcaatcaccccncatgatgttatcgtgatcggccagggctgaagataggggttcaaaaagaccaaccccaccccttctccacgacagtaaccatctccctttgcatcaaatggcttcgttgggccagtaggactcaggaaagaagnggctgagagg

SEQ ID NO: 36060 - DNA, 517 bp, Arabidopsis thaliana columbia
gatcgaacaagaagaatatagaacaagaagaaaatcgaacggatgttgaagatcaaagctcaatcactcgggtttcgccacttgagagagtgagaggctgcgattaggttaagaatctaatgtttggtttagtacttatatagttagggttaaaattcgggtaaccgtcagttatctgttttccgaaccgaaccgaatgcataaccgaactaattttgtaagcattccgatcggttctaattcaaattaagacccaaaccgatttgcccaaatctcggtttggttcggttcagacaaatcggttcggacacaaatcccaggcctagaactgtttcccattatgaaatatttgatggtgttccgattgctgaaaacttgggcctcctaaatatggactgccataagaatgtccggagcctaacctcttcggcaagtcttggttgttccagaaaacactagtcttagcttctaacaaatgtatattttcctcgtcggttcctcaagtatgtcaagaaaa

SEQ ID NO: 36061 - DNA, 460 bp, Arabidopsis thaliana columbia
tatctttataacttataagaaaaagagaaattcttaaaaagaccacattttcaaattttgtttcaaaaactattactcttagtttattgatgtaaaaatactatcgaaagttttagttttccaaaaatatcacaaacataaaaatttaagtttgaattaactatttcagattcaggatatagtttttagagtgtcagagttagcgttcagagttttagaataccaccgaaagtttttgttttccaaaaatatcacaaacacaaaaattaaagtttgaactaactattttagatttaggatagagtgtttagagtgttagagttagcggccagggtttagttttgaaaattaaaagttaattttagttttgtggtattattggaaaatcaagactgaagtggtatttttggaaaaccaaaactaaaagtggtatttttgataaatgtctttaaaatagata

SEQ ID NO: 36062 - DNA, 535 bp, Arabidopsis thaliana columbia
ggcacagtgagtatgagttgtgaggatacagagacgcatacttggctttcgaccattgcaggaagttgcctctcatccccaaccaaaattaaatgccggagtcctggaagttgcataggaatggatgattcacattcttttaactgagcagcttcgtcgatcacaagaagctgtatcggtgttccagtatataacctagcagagcatgatgctgtagagaaaagcaggcaagcatgccctaagcaaagttctttaataagatgcctatcacttacagctggaagtgggaaaatctcagggattgatcttaacagctttagatagtcatcctctactgtcacatgttggctgctgaatctgtcacttccttctccattagggataaggactgactttactccttcaccagtcacaccatctagtatagctaaaattgtaacatctctaacaaggtcaatagcttcatacatacgtgttgcagcttgagatgacagtaaagcagttggcaaatgtgtgcataaacttgagaaatgaa

SEQ ID NO: 36063 - DNA, 312 bp, Arabidopsis thaliana columbia
cactcataacagagtatgcaggagcgtgaccgatgatgatgaatcagattgagtaaaataaaacatgataattatgaggccgaatactcggagatgaattacgagtcaggggctcacttgactatatgaacccaaattacgtacgacataccaaagaattaagctatacggtcagatattgtagccgtcatggggtctagtgatcgcctcctgaaggtgtagctccggtactgcgtctcacagcttaattatacagaaatcaaagtatcgatgtatcaaagtagggggaagtagagtcacggatcacgccaa

SEQ ID NO: 36064 - DNA, 254 bp, Arabidopsis thaliana columbia
ctagtaacgtcagccaatgttgtcgtgacagttatcggacaagtggtgcgtgaactagcaaccactatcgtgtcaggcgacaaggctccaagttgacaggcaacctatctgcaacggagagtaggtctatcagcggcttaacaaaccactaggctctgcttagcagtgtactcggtgtcatgtgtcgtgagacagatgtcacctgtcgcccaaggtgagtcggcctattgaccagtgtcagagagcggattgac

SEQ ID NO: 36065 - DNA, 585 bp, Arabidopsis thaliana columbia
gtcttatcgaatagctaggagagtttgcgactgaatcaccatttgccctaaaggagtggttgtattacaagaagcaccattcgattgagagggatggttgcgttgtctagacaccgctcgctagtatttgatagtcaaagtatgagaacactatgattatgtgtgtggagaatgaaccacatgtttcatagtgttgattgagtatcgtagcgtgtggagcttgtgaaagttatccaagttgatccataagcatgctacggtcaagtgggatgtagcaggccttgccttgtgattccgttctttcgtgaggtttgcttgacgagatgcaacaggcctcatggggatcaaaggacccgaagagactgggctcgctaccaaagggtcggggtcgtttacacgacggtatagccaaggtgatgtttcgattatgtgccattgtggttataactcgggtatcacggtgtgtggaggaagcaatgcattgggcccagtaaaactttaagaaaacgttatatttcttgattgttttatgtgttgtgtactactctatgcgtactctattgtttatgtatgtttgtggggata

SEQ ID NO: 36066 - DNA, 540 bp, Arabidopsis thaliana columbia
tgaaagttataacaaatttgatagttcatgtagtttattgaaaagatgtttagttagagattttttcatgtgtaaaaatattataaggaaatcatacaatgaattactaatattataagggcaattgacaaaacaaaaatatattattttagaaaaaggtatatatatttctaatataaataaatacaattaattacaaatattgtataacgtgtaagaaaataattgttttaaatatatatatatacttctaagattaagtaaattatacatttaatcactaatacagtaaaaatattaaataaattattaaaattagtaattctaacacaagaaggcttaaatttttcttttcttttttttctctcttcagaattggtttcatataacgatctgtgtgatacacagtttaattgatatatgaatcgacaaataccaataaaaatcgctgagaatgaatatgtacagataacgaaaaatacgacgggtcaaggtcaaccacgacatgccatattgccatgtggcttcacccccacatat

SEQ ID NO: 36067 - DNA, 554 bp, Arabidopsis thaliana columbia
gaagactatatgacttttgttctgtgtatagaataagattccatgattgatgaatgtgggttctgttacctaaaagaatcatgctttcattctttgctttggatctttggtttcagaatcatcttgaagagcattgatctttcctttgtcatgttgtttggttctctctgattctttgatgtctattgacccaaccttatcaacattgttgtcctgtggtggttgttgaactatctttgtttttagatgaataaagtgttttagttttcagtattctaaattagctttgtgtttgtatttatttgaatttggaatcattcttcttagttttggtaaacaagaagatcagacacaagtttctttggtacattcttttattagtcttggatagttttgtgtgtttctggttaagacattgttgtgctccattgccttcactttgagttcacataatttgacttccttttcttctatatgcaggagctgcaggtgactcatcgaaatgcagtgaaatgagtgttgatgagaagagacagcttgtttatgaactgtcg

SEQ ID NO: 36068 - DNA, 519 bp, Arabidopsis thaliana columbia
tgagctgagtgttctgatatcttatctttattgggctgatttatgatcataaaggcccatatatgtgtcagaactttgacaagccagaaaacttaaacgacgtgcagtttgatctcaattacactaaaacggcaagtcacaatcgtgtaactacttgcagacctccttcagtgaaacaacccaaattgctaagaaatagaacctcaatggcggcgacagaggaagaggtgacgacgacgaaggaaggcgccgacctattggggaagccaaagtataagaaactcgagaacgggagatttaaatgcgtgcagacgggtcacgagctactcgagaaagacaagaaggtctattcacagagtaaacgatgccgtttagggcttattgaatatgccttatctcatagcaagcctcctcttaacttgttcgaacaagatcctaacgctcggtaatctactgtctactgtactccttcgtctctctcatgtcacaagttgcgatttcaatcctgactgattttgt

SEQ ID NO: 36069 - DNA, 583 bp, Arabidopsis thaliana columbia
taacatttttcttttcttaattttgtttagattgccttgctagttgctattactattcactcattaaattaatgtgtatatataggatatgaaattgtctccatcaagttttgtgttttatatatctaggctgtgtaatcgatacaaatatacaaaccagagatcttgtttttaaaaaaaattagtcagctcttttctagactaagctattggatgtatctcctttactattcttttcttcacattgaaaacatatggaagtacttttattatcatgagatcttctatttttttttttctcttttataaagattattttccattcatctcagttccacgtattattttaaatgtttatcataataacctcgctctctcaaaaaagttagaaatcatggcatggtcacactgatcatccctccacttatatatagaaactttagtaaatgttgtatcgacgatagcagtggatgattcaccacttctagaaactattcataaatgcttgtcttattttttgtgcatgattcaattcttaatttatgtttcacaccataaattgttttttttctaaataagtttt

SEQ ID NO: 36070 - DNA, 282 bp, Arabidopsis thaliana columbia
aacggccgccagtgtgctctaaaggttgctggagctgcggatttaatgagttcaaaatcaacaaaacatatgacacttatttcaagctacccatattgtagatgctaatataattatattccataatgacattgaaatttttattcaaaacaacattaatttgctctctttaactgagtctcattccaactagattttgaaagctttattaacaaataatctatgtaatatgatatgcacgataaaaaatttgtatttcaatagctacaaatatttcattat

SEQ ID NO: 36071 - DNA, 567 bp, Arabidopsis thaliana columbia
gtatggcaacaaatactaatcaaattaaagtatgaacttaccctattttacaaaaattgaatacacataattttcccaattcataaaccctacttataactaattttataaggctcaaacaaaatcaattcaaacatgcagagagattcataccttcatagaccgatatttgagctgacgacgaatccttctgattgaacacaaatcgtcgaatatcctcgccgaagtaacggaaagcatcgtgaaagagagagagaaagaagaaaataattcttcggctcacggttatattttgttttatatttttctcttatcatttcgacacctgtcccgttcttaactaattaattggctcttatattagagacgttcttaacaaatttattattaaaaacattaaagttatatcctaagaagccgtgataatgatgctcttagaattggaaagagttttattggaatttgtaaaaggcccaaagctattacctgaccctaattactgtttacattgatcagtaagatagaaagaatgatgcaaattacgaaataatttttgaacaaaagtag

SEQ ID NO: 36072 - DNA, 468 bp, Arabidopsis thaliana columbia
attccctctgaatcgttccagtttatttatcttatcttatgaatttccctttatataaactgcctgtacttttttatgtttctgacttttgaatgaattaccactttaagtattactagatgtctttgtgtacgtacactatatagtacattaaacttggtttatcgtacattgggaaattgtgtacacaacataagtataaatctaacagtttttgatgttgaaggcaccaaaactaatatacgtacacgatagcgtacaccagaaactatacgtacattgcgagaggatttgaacaataaaacaaggcacatacataaaacaacaaattagattaaaattaaaacggaaacaagaaacaacaacgactgaaatgtagtttggttcttatggaaacaacaacaacaactgggaaagaagacataattgacatgtagtcttatattatattaacacggggaataatgg

SEQ ID NO: 36073 - DNA, 604 bp, Arabidopsis thaliana columbia
cctctaagtgccgccagtgtgctctaaagctttagagcaatcttgatttcacgcattctgttgcagtagttacatgactcgtaagtaagagggttgggcatagaaaggatatgttttaattaacgatgcccaagcccaccccaattctggtgtatgctgctgctgccaaagacagtaggtatcaactgcccagtctattgcgctattcctacatactacgccgccaatttcatcatttccttaacgatcggcaagccacccatccaactccggcaggcagattctctcctggccttccagtagtgacgctttagccatgtccgtctcatccatcccagtacaggaacagagtcaagaatgacaacgccgagggtgcattgttcaggaaaataccaatgaagattcaccctgcttggctaatagacggcgatccagaagatgaggattaccgatgcataattgttcatggttattggtagcttaacagcaatggtaggcgcgaacgatgtgaggaggatagaacggtggagcagctagacggctgttacgttatctgaattaggtgttgaaacagaaatttgggtattgctgtacaatcaggagt

SEQ ID NO: 36074 - DNA, 579 bp, Arabidopsis thaliana columbia
tgagagatttttatcaaaatcttatcattttcaacacatattttttaaataaatctaacaatcattcgtatagcaacaagtaataatcaaattaaagtatgaacttaccctaattttacaaaaaccgaatcataaatacgaaagttggctaactctcaccatatgttttataacaaaacaaacaaaccaaacaaactagctttaactaaacttttataacaaaacagacacaaattatgtttttaaaactaaagtcttacctagattatgagttaagaaatttaaaaacataacgattcattacctttattcaaggtgactaatgcaacagacatccatcgcaaaattatccctccatatgcctatatataaacatcaaaataaaagtgagagattttaatcaaaatcttatcattttcaacacatatttttcaaataaatctaacaatcattcgtatagcaacaagtactaatcaaattaaagtatgaacttaccctaattttcaaaaaccgaatcataatacgagagttggccactctcccatatgattgcgcatcagtaattagcatttgtgatgt

SEQ ID NO: 36075 - DNA, 500 bp, Arabidopsis thaliana columbia
tggattttatgttggtatggaatattgcttggcttgtatgtggttgtctctactcttttgtaggttacttgaggtgtcacactctgataaaaagggggagattgaagaaacagagtgtctgaagttcaataggcatgtctgaagcaacatagagcagaacagaggaagagggaagtagtagttgcttttgccagcgtgacgtgttggttggagtgaagaaaagacgtatcactttagacaaaggagacgaagcgtataggtataggacgtgggcctagtatctagaaaatgatgaggagctattcttgtacctgttggataaagtgaagcatcctccttttccacgacaagatataagtgaagcgttggtctcttattagggttagtcactttacttgtgaaaagtggaagattaggagaattaagaagaacttgtcttgtgggtatcattggtgagtgacaaagagagtacacggctgttgttgtgtttgtgactgggt

SEQ ID NO: 36076 - DNA, 490 bp, Arabidopsis thaliana columbia
gtgtttgaacgtaaaaagaacgtatgtcaatccggttatcatatgaacgattcctgaataagaatgcctaataatttaaagatttctaagctctacatttatgacgagtgcacacggcacaaggtttttccatgtaggttatgtcattatatggacaaaaattatatccacaaggacacaggtatattcaaaatgagttgccttacttcagttaaacttgaacaccaaaacagctaactgatagtttgtgtgagattacaatcaataacaaccttacacgaaaaaagagagaattgatacctcagtttcagataaaagttggagataagaattcatcagttcatccactttgggtttctcaactcgctcaatcaccttgacatcatgctttttaaagctaccaccaacaagtttcttgtgcgctgcaggtaaacaagtcttaacatccttggcaatggacaataattttttgtccctatacatagcagct

SEQ ID NO: 36077 - DNA, 445 bp, Arabidopsis thaliana columbia
cattaaagctaaaatccaggtggtctgggtctttcaccatcaaagaggtatgataatagttttttagtcaattatcctaaaacacatatcatgtcattgtagtattttaggtgtcaatccaaatgagtgtgatgcaaaaagatgagatgtgatcagaagtcaacccaaggaataacagttttgggggttctaatagtcttaagtgaaaatgcagaaaacagaaacaataacagaattactaaaatcactcgaccacaacaggctgatgccagaagtgggatgtggtcgagtaacaggtaggatatgaaacagatatactcaactgcacagtctgttgccagacactgggtgtggtcgagtatactggtcgagtaacagacaggaaatgagacaattgtactcgactgcacagtctgttaccagacactgggtgtggtcgagtgat

SEQ ID NO: 36078 - DNA, 557 bp, Arabidopsis thaliana columbia
cttattgtctatataattgcaaatccaatactaattaaaaaaaagaagtgtgaaaaataagatttataagcaacaaatacaaaaaaaatatcggtgctaaaaaatcagagagaaacaagaaccggatcggtttgtttccaaatgttacagaagaagaagaagaagctggcaagcgcgggaaacttacttaccgttaagagaagaagataactgcttattcttctttacgcggttttggtcttgaaggttttgcaggcacaacgtaactgaggagaatcaatccaacaggtatgattgttccaatgtaatatacgcttccgtaggcggtaagtgtttcgtgcaagcttaacacctgagacattgtgattgaaaacaaggttaaaaaaggcgttaagagtgattcgatcaatgagacaagagataaaagagttggtaattaccatgaaaccgacggctgagtagttgagaccaaaacagtgtaaaggaagttgatgaagaccattatattctcagcattccattttcggactgatcgcttgttgcaccggtaaatactg

SEQ ID NO: 36079 - DNA, 349 bp, Arabidopsis thaliana columbia
tctagtagctgccgccattgtgctctaaagagtgccataaatagtatatttgcacagtgtgattaaaattgagcatgatagtctacacatcacactataatccgtacattataccataataataacaaatcagtgaactgccatggacgtatcaattgtgcaggagaagaaacctttctgtcacctagtatgccgtcttatcgcgcttacagtcccgaaagttccgcagtgcaatagctgtagctgtcttgaagaaaatagtctgtgacatttcagttcttgcttcgtgcaatcgttcagcgccctttatacagtatcgtctgagccttggagggagtaatctagacgt

SEQ ID NO: 36080 - DNA, 581 bp, Arabidopsis thaliana columbia
atcccccttgattgagtttgttagttagctaaatggattgaggagtccattagaaccaattaccccattcttaagagctctgtttcgttttgattgtttaaatttcgtgttatttactctttagctcgtttgttttgttattctgctcgacttttttgctcgaccaaaattagtaatatgctcggtcgagtgctttacttcttgcttagttcacttcttggtttatacatttgatagctcttggtctgtagtttactgcttacttttatcatttgtgtgctttactttatgcttagtgtattttcattttgaacttgaattgcatgttaacatgtagcttaggtttagtataaacaaaccaaacctattcacacttggcttgacttagtattctctgattgcatcctgattgctagcaagccattcatttggattgacacctaaatactacaatgacatgataatgttagggaattgatcatctgaattaaaaacctgcgtaaaaatcctactataaatgcaccacttattatttaatattgtagatgattatcaatttaagataacatcgcatgtggatc

SEQ ID NO: 36081 - DNA, 198 bp, Arabidopsis thaliana columbia
caaattaaaagggcttaatcccctaaccaggtattcaggcagtcacctccgtaaatgcaattaccatctcaacccttctatctgtaagacaaaaatttaacaagggaaacggacatcgcatctctcatctccgaagatcagctgcttacctgacagtacagtcacccgtcagtatcgagcaggtccctgctcgatgac

SEQ ID NO: 36082 - DNA, 567 bp, Arabidopsis thaliana columbia
ctctgtatactatcccattcccacatatctcgggaactgctttgtatgcataattgtatgaaaaaatagctttgaggactggagaaaaggaacctgatatatctagatctcatgaggtgatcagtgaattttcagcttaaaacttgaaggctcataaaaccatacttttggaagctttttctttggtttatgctattacatttgtcatgtaaaaatacctctttgctttcttcaaaggttcaaatgattagcttagagactaaagggcagcatgatcttactttagattaaaatagctatgcacttagaggctcttaatgcgactgattaggtgaagtaattactatgttcctttagtgcttcttccactacttctgtgtggaatttctcatgatccttccaaatcctcctgcaatttcagttgctataaaacttaggttccataactagtagtatatgcatcaactcatcactcaagaatggaacccatgttttactcgcatttcctcctagtctctgcatctcagccttaaaccatggtttatggggctggagaatgtgggagaa

SEQ ID NO: 36083 - DNA, 557 bp, Arabidopsis thaliana columbia
  unsure (1)..(557): unsure at all n locations
ctttcactttcgtctctctctcactgagaatttctgacctaaaagaattgaagagaaaacaaatcagtgaaaagaaggaaaagttgagaattttgagaaatgggtcagaagaagagaaagagtttggcatttggaattgggggacgatgaaaacagatttgatttagcatttgcagttttgtggatttgggttaagagtagagaaacctaaagaactaaagaagaagaagaagaagaagaagaagaagcggcgtangagggagcttgtgaaaacgaagagatgcatagtgtgtgtgtgaattgatgatgtgacaagaaagagactttgaattttccacctctgtaaattaaatgtgacattgttttctgtaaattaacaagactttttctttgttggcttacagatatgaatttttaatgtttttcattttttctgttcaaccgaatttaatgtttatgtcagacaaaaccgagaataagaaaagtttttttgatatttatggaccaaaaaacacaaagcccaaaattttccatcaatttaaatacttttaccttta

SEQ ID NO: 36084 - DNA, 186 bp, Arabidopsis thaliana columbia
acactcacacgcacagcctcacgctctcgcacacgctctcgctctcgcacgctctcgctctcacacacacgcactcgcgcacacacacgcgcactcgtccacgcacacacacgctctcgcgcacgcgcctcgctcactcatccgacgcgcacgcgctcgctctgcctctctctcgcgcacgcgcgc

SEQ ID NO: 36085 - DNA, 221 bp, Arabidopsis thaliana columbia
ttttatgctttgataacagacattgggggacttcatatccgttgctgagactgaagtggcaactgtatcgagtctttactcggtcgtggtaatttgtcaacctctactagattccaagcgcctttaccttgacaatgtggttgatcctgaaaatgatttttgtgttgtttcttatgttggacggcagggaagaaatgctgatgctcttgctcactattttg

SEQ ID NO: 36086 - DNA, 958 bp, Arabidopsis thaliana columbia
ggtatttgtaagcttttccagctattttattttgttatcttcttcttcggtctgtttgatttctttttttgtatatgattttaaaaagcatgctactgatatactaattcttttcttttgtaattggggtagttggtcattttcatagtttggtgtgaacgttggtatgaacatcactaatttcaaggaaacactaaaacggctaattgaccctttagtgcaatcagaatagtacataaataaagtaattgtttcttaaagaaaaaaaaattcttagatagaaggaaaaggagtattctagaatatagttttgatgaaaaatagttctccatataataggtttatttttaattaataaaatatatgtttattgaagaaaaagaaggaaatgatgcttagtaaatttgcttacaaactaagcaaaatctctataaattaatatttttgtgcgtaaaatattttattaatttataaagatattaactgataaaagttaatctaagacttgatccactttataatctgtggatccgcgagattactaagtggattaaattctatgattatatttttctaataacatattaatgtatttgttataatttatgagtgtactctccaaataatagtatatgataaaaaatttttaatacactaaaaaaactatagaattttacttagctcatctcaatctcatctagagtttggttattaatagtactaagtaatagctaatcttttaaataagtagaataaaaactttttaaatacaccaacaaagttagatgtaacttcttatcctttgaacaactcatgtgaagtcacaaatacaaaattcattacaatcaaaacaaaaattagtaaaacacgtttttgtgaggttggaaagaaaaaaggacagtggttgagaaaaagaagaatgtggtttgggccaagagacagccaatttgccagctgt

SEQ ID NO: 36087 - DNA, 160 bp, Arabidopsis thaliana columbia
gaactgtatgtagatttctggttgaaacatctacatggttcaccattggactttatggcccttactacatttcagggcccaatattgtgattcaggtgatggatggaaaaccggaatcggatctgtatccgctccattctgaggtctctcatagcgaaag

SEQ ID NO: 36088 - DNA, 1752 bp, Arabidopsis thaliana columbia
cgacattacaatgcatttaaaatctatataaatcacaaaccaataacaccctctaaataaaaaatatcaaattaaaatataatcgtcatcttcatttttttttcgttccgcatatggtgccgtgtttttatttctttgatttgtaaatccttctatggtttctcaatcgagaagaaggaacccaacactgagatccatggcgatggtatttgcacaacccaagaaaaacctacttcctctcattctcttcctcttctgtatctccgtcatcattctcctcgttctcgtctccgagaccactcactctaacgccggacgaggaactactttccggcgaaattacaatgatcccgctcctttcactttcctcatcaaggtcctcacctttaaccgtctccattctctctcccgctgtctcagatctctctccgccgcagactacggcgtttccggagacagaggacgcattcacctccacgtctacattgatcatttcaacctcgcgaggaacgatacacctgtggaagataacttgcaaatcgcgagggaaatcctagggtttgtggatagattcgagtggagatttggggaaaaagtagttcactatcggactgataacgctggattacaggcgcagtggctggaagcttggtggccgatctcagatcacgaattcgccttcgtcgttgaagatgatcttgaggtttctcctctttactatggaattctggaacgcctgattctcaaatactactatgatacttccaatttcaatccttccatctatggacgtcgcttcagagaccaaggtttgttccaggtaccattttctattctgtgattcagctatggagattgtagaataaacctccaagaatttagggatcgatcatcgaaggagattgctatatacattgtagttgaatctggtgatacattgttcaaatagagagtagcagaagttgattgaagaagtgtgattcttatatgtttcttggatatacattcccagatgatagagctatgcaagtgtagatcagtaagaagtaggatacatgagtttgttagttactagaagtgtctcaaatagtgattgaatgatctagtggtcaattgcaggtaaacatgggaataaactacatgtagatcccaaaacgaatctgatcttatatcagttagtgggaacttggggacagcttctcttcccaaaaccgtggaaagagttcagactatggtatgatgagcacaagtcgaaaggcaagaagcctttccttgatggcatggtaacagagatgcacactttcgtcttcatggatttcattgtttataaattctaagttatctgtcatttattatcttggtggatgtttttctcaggtgtcaaacggatggtacaagaggctgggagaacgaatatggacaccttggttcataaagtttgttcattctcgtggttattttaacatctatacaagtttcccgaatgagggggctcttagtgtctctcacagggatgctggtgttaactatggaagaaccgctgggccagactcacagttattgaataaaagttctctcagttctgattctctgaagctccaacccttgagcaaccttaagtggtacgatttctgtttcagtgaagttgttccggtagagttgtgagaaacctgaatgaacttggcaccattcttccttctgtgcagagagagaaaccataattctggtcagtctatatggtgcagcaagatg

SEQ ID NO: 36089 - DNA, 161 bp, Arabidopsis thaliana columbia
tatacatatatatatatatatatatatatatatatgtataactagacctatttccttagcttaaatttacttttatcatctacaacaactaggcttcaaaggacgattacactagctttttagttttcttttagaactactagcagagaatccggagtatg

SEQ ID NO: 36090 - DNA, 956 bp, Arabidopsis thaliana columbia
tttttgcaactctcttaggatgtgcttttgatgaaacaatccgatctattcattaaagaaaatcttacatataaatttatattcttaaccaaacaaaacatgtgttatattattaaccatataaacgtaacaaatttttgttttatcaacacaggtaacatatttattgtttatcttaaacataaaaaaaataattatttctacatgggttttaacttttaactcaattaattgaactgccggtctgattttccctgacttcaccaaacctatatacacaattcgttagattgactgatatcattagttttcgacataaattttctattatttccactctcacgttgtttaatcggtccgtgtttcaatagtttttgaaacgaatgaaaaaaaaaaaagaataattagacacatagattttccgggtgacacgcaaatgccggtttagctagcattcgaaggtaagtgatgaaatgactaaagaagaaacgatgataccaaacctaaccatcaagcaaaaaggttgatatacctactatttagatgtatcctcctagaccttacattattgtatccactttaagaatttggctttcgtttcaaaagaaatacaaaagaaatcctaacattattgtatccactctaagaatttggctttcttttcgaaagaaatacaaaaaaaaatctgaaacactttcgaataatttgttgattaccttcttcttttatattccttgtgatctgctttacagttttatacatacacatttgattggaccattggttcggtattcttaaacgaccggagatttatccacacaacgtcttctcgcagccaaacacatcaaactacacatgttcttcttgtgtagaaaactctcactttcacgattccgacaccattttcctctcagactccgtcgttttcttggggaaacccaaatccaactacccat

SEQ ID NO: 36091 - DNA, 458 bp, Arabidopsis thaliana columbia
cccggctgtgatgggcggttcactgaccgacgagtcatgtccggccctcgccgcccacagcaggactcacacacacacctaatgccaagtctagcacacagatgacctgcatggagcacatcacagctgacactgaacgtcaaaaggagagataatatgcatgtgattctggagaacacaaacgtgaccatcaaaccaaatgaaagtaatcagaacgttagaaaaaacttaaagacaaattgattgattgattgatgaagtaatttattgatgagaatcagaaagagtaaacataaggattgatttagaaagagatatgttaacttataagagaaagtctatagaaagagtgaattttagagatgaaagttaaaggattgagaaacgagaaaggatttgatgatatagacgttgaaatgaaattggagataacagaaagacctaagataagttgaaat

SEQ ID NO: 36092 - DNA, 578 bp, Arabidopsis thaliana columbia
catacaaacaaggattttgcctcttacgtttgtttcctgttttgttttgattacgagaaggttgatcttgacgaaagaagaaatggaccgacaaatgcaaactagttaacaaggctcaacgtggggtataaaataagggagatttactgtggtgggtaacaatttaggtgttattaccagaatcagacagaactttttttaattactgtgatattttcgtctttttcttaatacccagcgtgcccctactaaacgttaccggaaaaaacataattacagggaatgccactgccacgtcagaatttgctgacgtgtattaaatgaactcagccgtaacgcgatacagcgacagttacggctgagttacggtatgttgcggctgacttacgacaaaaatatatgagtcataacaaaacggcgaagtatgagtataactcagccagacgttacgtctgagttgtaaaatgttgcctgagttatactataactcaggcaacggtatggttgagttaaggaatgtcggccgagttataagaagttatacgataacccagacaacgttatggctgagttatgag

SEQ ID NO: 36093 - DNA, 473 bp, Arabidopsis thaliana columbia
caatagtatgcaattatgttatttatgtggtttgaaacttgtctaacttgattataagcaaactattccttgttccatgtattctcctaatctagtactctgatcacatcatgataagctcatgactaaatattgaattgtaataatttgaataacaaaggtataactaactactcatttacttcaaaagtttcataaggaagagaaaaataataataattaaagagtcatttaagtcaacacttttaggtatctctctttgcatttgcatatacccatgttggagaaagtgtcttgtattgaattctttggtatatctaagatctcaaaaaaccttacttgaaaaacgtgtatgtcattattaatgttatcggtttatcataaggcacaaaaaagaaatcatatatcatgtacaccaaaaaaatgtaataataagaaaagactaagttaaaatactaaactaaaaaaggtta

SEQ ID NO: 36094 - DNA, 543 bp, Arabidopsis thaliana columbia
actaatataatacacaaaatcaataaaagagttttaactttttaagtcatgacggctctaatcagtcacatggcatctaaccatgattatcgaaaacgacgccgtttctatcatcttctatgtattagtctttagacctctcggtacacggtacttactttgtaacctttttgagtgttgttactttcaagattttccagtattaccttttcgagtgttactgtctgtctcatgcatgagctaccatatacaatgtcaaagaaaaagagattgatgagttattgaaaaatatttatttatacactttaagtggtaattcgttcttcgttcttttttggccaacaaatggtatttctatatttatgagaaaatgtagtaaaataaagaaatctgaagtttaggaagcacaatttagtttgtacactttgctgtacacaaaacaaaacaaaaaaaactcaatcctcaacttctgcaaaacaaaattacagagtctatttgtttttatgaaactcactaaataaaaatttgacttttgaaccaaat

SEQ ID NO: 36095 - DNA, 462 bp, Arabidopsis thaliana columbia
ctagatgatagcattctgagagtaaaaaatgctccaactagacctggacataatacccggaactgaatacttgaacaaaaaaaactaaaaatattctaaccgaacccgatttttagaattacctgaatgggtcctagatctcactatccgaaaaaacccgaactgaatctaatacccgtgggtacccgaatacaaaatgtatacctacaaatatgagttctatatatacttataatacctcaaatacccaaaattaaaattataaatccgaatatactacatttcgtctagtcattcatatacatttggatatatttgggatacaagtatccaatgttatagttttctataaggtaatttaagtattttgttacattcagttatatttgagtaaaagtaaccaatgtatttttggataattgggtatttcagttatctttgagtatatatgagtaaaaaact

SEQ ID NO: 36096 - DNA, 552 bp, Arabidopsis thaliana columbia
gtaagttaataaacaacttgtattatctgaaacttacattctgaatgattgaatatcgtatctcccaggagccactgctaacatcatctgaggaatttgacgtgtacgcgacaaagtttgtactctgaatgctgtacatatgatgctgcaaatagctcggaaacgtttctatgtgtaggtatcatgtaatgattatgttgcatagcctctctcttcttacgagcaataaagctatgaaataattgattcgctaagaaatttaaaatgaaatgaaatgtgtggaaagtttcacaggaaacaaacaaccataagaagtatacttaatccaatacacaaggtctattgctggattacacatgatggacacaatttttctagttgaaaacaacacgagagatacagaagtttatgtaccttatttacattagatgagactattttcatcccgaatccaaaagcagtaaagtttatgttttctcatgatttgaggctgggactgcatcatgtagtagtagcattgttgaacttttggaggatcagagcctgagcttc

SEQ ID NO: 36097 - DNA, 702 bp, Arabidopsis thaliana
gtaagcagagtgttcaagaagaagaatcatttcagatgatttcaccaagaacaatagcaacatcatcatcatcatcacctctacctcagcaccaactctgatcatgatcaccatcatcacattgactccaattcaaacaatcattctcctaatgatcctacatcctctggatcatcatcaccaccatcatcacattggacgacatcatccacatgccattacatgagtttgcaaacactctgagccatggctcaatgcatctacctcagctctttagccctgactcagctgcacgggcgcgtgccgcagcagcatcagcccaaccatttgtgtcgccaatcaacactacggacattgaatgttcacagaatctactgaggttgacttctaacaacaactatggtggagactggtcgtttctggacaagcttctcactacaggcaacatgaatcagcaacagcagcagcaagtgcagaaccatcaagcaaaatgttttggtgacttgagtaacaacgataataacgatcaggctgatcatttgggtaacaacaatggtggttcttcttcatctccagttaatcaaaggtttccgtttcactacttgggaaacgacgctaatcttctcaagttcccaaagtagatcaatcggatttgttgaatctcaatgtttttcgattttaatatcaaaacagaggggatcc

SEQ ID NO: 36098 - DNA, 466 bp, Arabidopsis thaliana columbia
cgacacatatatatatatatatatatatatatatatatgtcgaggtaaatttgaacgatatataaggggttggtaaaaaaactaacagagacacacagcatataggattatggtttatagttttcagattgtgtattaaaaaaaatgaaaaactaaaaaaggttttataaaaagtcaagtcactttaagaaaattaaaaaccaataaaacataaattttagattttctttaaaatttgacaaaactatcagaatctaggtttcctattttttagaaaacacactttttcacaatcttggttcggtataaagtagatttttagaaaaactaaaaccaaaaacaacatcaaaatctacaaccattcaaagtatcatgtatcaatttacctactttgggtctggggtcatactcataccatatgtcttttatcatctgtcctttatttatattttcgtccatcagtcag

SEQ ID NO: 36099 - DNA, 488 bp, Arabidopsis thaliana columbia
aatgcttgagagtgcccaattcacattctttgaggcattctatcgaacacttttgatgcatagagaaacccagaatctacaacagggtgatcaatcctattatagcattaagaacatgtgaatcaaagaacctaaagaatgagaattccaaacaccaattattccattaatctattgaatctcctaattagaaccctaacacctaattggaggattactcgcacattgcaacaaaaatgaaagtaaaagatattaaagaaaacatgattcaaatggaataaatgagaaaaaggtttagaaatcttctccaatgtgtcaaaatggatgaatctctaatccaaaatgtgcttacaaaggaaagctctcaaaatgttgcagaaaaagaagcgtaaaaagaaaaattaagttactgggattcttatacccaaatacagaaaagacagataaatccggttaaggaataccggtctggttgtcgagagggttgg

SEQ ID NO: 36100 - DNA, 345 bp, Arabidopsis thaliana columbia
atattttactcttatagaaataaatctagagaaaacatataagctcaatcgttagaaagaaccaatcattatatcatatacaaagtcaccaacttagtgaaactcacaagtatcatcaaaaataatcagtcactcttttacttcacaaatccatctacgtacggaaagccataagtttcacaattcaagaagaccaattatatctttttgaaaaattcatgatttccattcttttagccgtacatattaggggaaaaattcgattttacaaattgtttacttttttatttatgagaaaattgttgtgtaatcgggttctgttagtatatctcaataggaccaaaa

SEQ ID NO: 36101 - DNA, 528 bp, Arabidopsis thaliana columbia
gtattagatttagataatcactaaattacttgcttcttttttagcgtgggaatattttattttttaatttttagtaattttttgtgtgactaataatatttaaattttttgaaatatatgtttttatatgtctacttattgttaataatttaataatttaaatttctttaattttaaaattaccatggcaaataaattcaatttatatacacaactgtttttaaaaactctaatacaacttttaagtttttacaacattttatcaaaacaacatatttttctttataaggaaacacccataaaaagtggacctatccagttccaaaataatatgaaaaccaccagaaaattaatatgtaaacaataatactcaaatccaaataatattacaaaattaaattgaatacccaagatttggccttctcacatgcacatgcatacgtgatatttgcggttcaatacctctccttggacatcattatattcttgattagagtctcatatcgagagacacgtgattgctgatga

SEQ ID NO: 36102 - DNA, 549 bp, Arabidopsis thaliana columbia
  unsure (1)..(549): unsure at all n locations
gctcgactcgactctatccccacgtgctcaagcgaataattatacatcgatctctgttcaaatggtccacttattccccaccttgatatttttgcaaatgaggcttttgtcttactcataaagaagatccattcgaagacatatttttgtttctttccgttttttcaaaaacaataaaaaagtttttgttcacattttagaagagaagcaattcaccaattaatttcgtaaggtaacatgaaccaaagaagcaaaacaaaacatcattataaatatatttatactgacaccactgaaaggtaacttgaaccaaagaagagaacactgcatggatatgattctgtgacattatcaaaaggtttaacgaacccaaccaagaagtaaacaaagcataattatgataggataataaaatagttaaataacgaaggccaggtgtaattccctaccgngctattattttccttactagtagtatagatttttcttatctatcactattcagtaataaactttttttggagaccacgtagcaatggaaaaccttga

SEQ ID NO: 36103 - DNA, 587 bp, Arabidopsis thaliana columbia
tagtttggaaaagaaaatgagtttgaataacgacactccatctctcgtcacctttcttgattttgaagagattagttttctctattttttttcgttttttcttttataaactccatatcctgatttagtttaatgatctcttgaaggggttttcctaagtgtggttggataccattagttaaacattttcacacaactctagctataacacattcaatatttcaactgtgaatactagaaaaaggttaaaatggttcaaattaaaatagtcataatcaaaatgttgaaaaatgcatttaaaagttatttgttgcaaaagtatgtacatacaccattcataaacttgacgtccacgcaacctcccaaaaatattattttattacaccattttaatttaatatactataattaaattttagttccaaaacttaacattcacttgcccctctttctatatcacctcctcatctttagctccctctctctcgttttatcttttgatagttctgattgtaattagattgtggtaggcacttgtatagagagatcagtaaaataagaaggatgagttggtgtgatggtcagat

SEQ ID NO: 36104 - DNA, 629 bp, Arabidopsis thaliana columbia
  unsure (1)..(629): unsure at all n locations
gtaccgagctcgaatcctatacttgtatagtatatgtgatttatgtatattatttggtttaaaattattaaatgaatcagaattaaaaaaaaaacaaatattagtgtggatgcgtgactttttttttagaaagacgcaaatatacaaaatttggttgattggttgctaaggtgcgtttttgaaaaatgcagcttgaaatccgcatttttctcttcaccaatcacagccttagttatataaatttatacttttcataaaaactgctcacatttttcaagacacctttattactcagcaaacaaaaaaatgcacttcactttacactgcatttaagggtccgaatggtaaccgcgttttttgttgtgcgggaaaagcattattacagtgcggtacggttcaacagcggtacgtgcgggagaaatatatttgcgggagaagtgcggtttaaacaaaataagcggtatagaataatgtttgattggtgaaaaaatacttgcagtgcggattatagattatatatatattaatacttaacgagnatcggcatgttaataaataaacaataacagatatttataaccaataatcaaaaattgacaaaatagaaatttattttgtacatcatattg

SEQ ID NO: 36105 - DNA, 569 bp, Arabidopsis thaliana columbia
gactatgcaaatttaggggggcatacaagagcatctccagttacgcatataacatatataggaatgagaatgtgttaaaccatgttaattttcattattgttgcttttttttttttttttttttttttgcataaaagagcatctccaattttgttattgttgttttttttggttttctaattagcctcttgtgaactttgggggtgtcccactttcactccactcatccccacttctgccgacccacttctgccgcctccatacttactcacggtcacgggtgcttatgcttatcttacttttcagttttattttaatacaactctctttttctttctccgattgtttttttaatacctctaatctactatttgtaataataacgaccagaacattacacctagtcagcactcatatacttttgttccaagcttcattgatttgaataaaaacatgttatactgaatagtaaatcaaaatacatatacatttatctttttatgttggacaaaacaatggttttatatcacgcacattacacaaaatgcagagtgtttttttcaatttat

SEQ ID NO: 36106 - DNA, 528 bp, Arabidopsis thaliana columbia
catatccatcaacaataaaaaaataacaacactacaaccaaagatatcccaaccgatatcaccttgctcacttgagccactctgctgctttccaacaggatcctttgatggaatgcactccttccaaccccaagtaaatgcttcaccagtctctgttacacagcaacacacaggtcatggacaaaaaatgacagttacaagtatcattactccatttcatgtttcaagtcatagaccagtgtaatgtaatagaagccaaagtagagaagttaaacttacctgttacaaccgcacaatgtgcccatcctgaagaagcctgaacgactggagcctccgtaggaagaggaaacggctctggagtttccttaaccaatcgtattcaatacaagacaacaatcgaatcaatttcgtaaaaaaaaaaaaaaaggtaataagaagagacaaaattcaatcatcttaaagaaatatccccatgcttcccagaagcacatagctctgtccttcatcatcagtagaccccaagttata

SEQ ID NO: 36107 - DNA, 562 bp, Arabidopsis thaliana columbia
agattcgtggctctgtatcaaggtattggttacatagagcgttttgactttaacttgttgattcgtaatgcctgttaggttagctcttgtcaatggtgattgagtttaggactggtttaacttgagggtctctattgcggtggcacttagatttagttatcgaacttgttgcctaaggataatttattgagcatgtcaatcacctgtaaatcaactagtcaattacctcatcctccggaatttctcatctaattgatttctttgtttactctgctattgtttactgcatcttgctgcatgttgtttaatttttgcattttttgcatgatactcgaccaccctgatgtctagcaatagactgtgcagtcgagtatccattttacattttttgtctgttactcgacctgtcactcgaccacacccagtgcttggcaacgagctgtgttagtcgagtgttttaactttttctgcttgaatttatgtttccggcatgttcacttaggactgctacaaaccccaaaaccctgttattgtttggcttaactgtggtttttttttgttg

SEQ ID NO: 36108 - DNA, 435 bp, Arabidopsis thaliana columbia
cctttcattgttaagttgtgcgagattctcaatcttgacagaatagcaagaaggcgaggatgttccgtgaaaatgctcgcaatcgtagaagttggatttgagcatgtcgtttcaccgtatgataacgttgttgcattcgaaattgtgttacccattcttcatgatactgatttgaaaagcagaatgaatgttgccagatggcgttacatatagagaacacaaaatctcttatgatatcgtttttcaacttttaatgtgatttaatcaaagattcatctttatcacttcgtgatatcttagctaatatttattttattgttttgaattcaacatagaaatcgcatcatctctaccgttttttaatcaaaacaatagtagcgtttatcatatctagctaaagatttactgccaaggttttggtaactaattttaaat

SEQ ID NO: 36109 - DNA, 765 bp, Arabidopsis thaliana columbia
gcatgcatagttaaatgctaaatgcctaatataggtttgcaggtttttggaggtttcgatgttgtcattctcaccagagtatgggcccaaattgaaagaagactatatcatggtaaaacatctaccgaagttttcaaagagtgatgatgattctaatagatgttgtgggtgctgttggttctgttgctgcaacgataattggcaaaaggtatgaaaattctcattttcttgctcatactcgcgtactatgtattttgctatgaaaaattggtttacctctggagttaactctgggatgacgtgtatgctttgtttatgtgttcttttgttattcttgtccgctctcctactcttgctttgtctctgaactcgttgaatgccatgaatagcttatgtatcagaagaaacaaaattcatctttagtagttcttttgtaatgatttttttttgttactactctcactggagaggtgttctgaaacaaacttatctgaatgcttcaccaccgttgggagatattaagttgatgaagtaaattgtttttctaactctactttagatccatatgttcttcaatgtatgtgccatcgaatactgttgtctccttttataacttctgtctttgcttctgatcagacattctaaattaatgtgacgacaagatggtatctaaggtttcttttcgccagtacaggtgtggggggactaaaccaggtttctcgcctattggagaccattgatgcgcgattagatataatgttttga

SEQ ID NO: 36110 - DNA, 528 bp, Arabidopsis thaliana columbia
gtggtgatcgaatagctagtgttcgtaggctccatgctcgcgcatcgaactacctaccacctatccttctcagttaattcacgggcgatgttacgctcgatgatgagttccggggcctgtgtttcgtacctaatttgaaggaattgttgagtttggtttacacttttgcccgcggcttctccttcgtggggaagtcgtgggcacaaacatcggcgcttgttcacctctcgtcatcgcatttgttgccttgctcgcattggtgctttaggcggaaagtgcttggctaaacaaaaagatgttggtcttattttggtagttttgtaggatgatgacattaagtgtgcttgaggttaattagctgtgagcacatgaacgccatgttactcttcacttcaatatgcatatcgatcctacactctttagctttctacaaatggcatatgcctaattacttgatcaaccttatctattggttgtgtactgtacgccatggtttgtgacatatatagttacggtgcacgtcatgat

SEQ ID NO: 36111 - DNA, 515 bp, Arabidopsis thaliana columbia
tactaaaagtttcaatttttttgacatttttttcaaaaaaaaatatattataccacaactattaaaagtaattaacttacttgccaacaaatgacgatttctttactcattttgtttccgtagtagaaataagtgtttttttagcagagtttctttttgccccaaaaaaaaaggctttattgtcgaaaaaaaaaaagagaggctatggtgtaaccatttattaatagccttcattcacactaacagtacaggcacgaccgcacgagcacacacgtgtggaaggagacaagagcaatgaggttaatgggccctttatgaacagtgagactacgtgagtccaaggcatgaggcatcgtggtccgcaaacggctcattttctgtcatgtgggtgccactcttttttgctcactttctcgatcccttcaaaattaagcaaattcaaagtctactattatttcttaaattttgtgtagctatcgtcaggaatctttagacatttttacacaactaacatt

SEQ ID NO: 36112 - DNA, 251 bp, Arabidopsis thaliana columbia
ttttaaaaaatttcttatttcaaacttggttccttttctccatgggattcatctatatataaaaagaggtcctaaatcttttgtaagagatatctcgcattaagctttctctctttctagtgatttagggcttggttttctagggttttgcgaacgaaagaaaacctccttctcaaggtttgtgtagatgtatatatatatatatccatatatatatatatacatatatacttgtgtctctgtgtgtgtgt

SEQ ID NO: 36113 - DNA, 1086 bp, Arabidopsis thaliana columbia
tcatataacacaactgtctcaaataattactactccataatcggtagataataaaaatcctaaaacaaattaatatttagttccttgttaaagtcaaaattaatacgtttcttctttcctgtgatcctaaacccaaacttggacctttaaccaccccatttttagaagttgaaagcaaattagctagcttctcccatttcaattctcttacgcgctttaacgaaagtgatgatgatgatccattccacgctaaatttttattagtactcaatcatcatcgatagaaaagagatgtgtgagtgtgacataaaaaaggttatggcaaacagaaaaccttggtaccagagagctatggcggttgccagattcgcaacgaattggagaacaatccctaaatcatcatcacaacaacaaccagagaattttcgtccgtctcgaaaccctagcgtcaacagcaagtcatccaatcataaccaaatttatcaccagctgagaaaatgctcgtctctcaaggtagctgcgaattctttcactagggtttgcctctgcgctccgattggtccatacgacgacgtttttcggattcacgtcccgccgagaagaagttcaagctatcctccgtcgaagcctcttcctatggagacggcagtggcggtggcgacggcgaggatgagtgtggattcagggaggaggatatttagagggaagtcgttgagggaaaacgcgttgatgaggagattcgtggtggcggaagaagaagcgataatggagaatagaaagagagatcaaatggagattgtgaggaagagaaatcagatgaggaggaagaagaagcttggacctagtcctcttagtcgtatggttatcgctgaagatcaagaagtttgtcttctttgaaactttttcatcaagatcagagaaacaaaaaaaaacattggaaagatttttttggttattgtaattgtgcttttatttatttttggattcagagataattaagcaaaatacgcagccgtttaatacctctttgtaaacggtgcccttcttgtttatttagttgttttccggagttttgaatgaaggatg

SEQ ID NO: 36114 - DNA, 878 bp, Arabidopsis thaliana columbia
tattttatgacaaacttgtccgttgacttcactaggtggcgagtgaaggagtaagattggattgagtaaaaatttaagcctagcatgaaatctagcgccgaaaccttaatgagtgaagatcatatagatacacaaatcctagaatgtgactgtaattgaatgaatcacttaccagactacaagattttaaatgaaatctcaattctcaaattcacaatttccaactatggtgttttagtggttgcaaattaatctgtcagtccaagaacaagaatttgaatcatcctactatgatttaattcattgttggtcattattatgtgaattttttttctaggtcagcctatgattctcccgttaacagaagaaaattcactatgggactccgaaatctaatatggaaccggttaaccatctaaccggaccatgtaaaggccagctttgtagcaaataattattagattatcagcccaataaaagcccaaatccgtaatatataatctaatcgtcttttatccgcagaaaaccctattgctcccctttgctcaagctcagtgcctctttgcagcgaaagtcaaccaacaagacgatggtatacacatactctgcttctactctgtttctctaaatttacatatttactgaatgtaatggaaggaattatccgagtattaattgtgatcttgttcgtccttttatcagattatctcagagaacaatcgcagagagatctgcaaataccttttcaaaggtttgtgagtcatgctctctttcatgtccttctattatcagctagtggaaccaggtttaagctagttacatttctatagggatcttcgaatctaagcttgtagtgagaacaattgcattgaaatgtg

SEQ ID NO: 36115 - DNA, 450 bp, Arabidopsis thaliana columbia
ataactgccaatcagttttggcagaaggaaaccgccaatcagttttggcagaaggaacccgtcattagagtttctagaaacggaaacacgaaattttatggtcagataactgcctcgccgaggaggaaacaaaaggcgacgttcgccaaaaaaatcgctcttccagagtttgaaatgttctcactcaagtaaacgtaaaccaattaacaaatttagaaactaaaataaataacaaacaatcaatttgcttatgtcatcaacttaaaaaccaaaaacacaattattatcatgatccaaatcagtcaaacaatttcacaagttcaaagattattcaatcagtgaaccaaatcatattttatgttaatcctaataagataaataacaaagcacacaagtaatttttattcatgttctatagaaccagagacacaataatgatattgatcgata

SEQ ID NO: 36116 - DNA, 194 bp, Arabidopsis thaliana
aaataaaaaaaaaaaaaaaaaaaaaaaaaaaaaaaaaaaaaaaaaaaaaaaaaaaaaaaaaaaaaaaaaaaaataaacaaagaaaaaaaaaaaaaaaaaaaaaaaacataaactacacccactaataaagaaaataaaagaagctttaaacactaaataacccacacccaaacacataacccaaatccccaaat

SEQ ID NO: 36117 - DNA, 592 bp, Arabidopsis thaliana columbia
  unsure (1)..(592): unsure at all n locations
aagcccttgtttttcatgcatttatcttagtttcatgtctcttttcatgcattcttagtctcttttccttcctttgtacattttgcattgcattacatagcatacttgcatttggagtgttttacaggtaaataaggtacttttggactcaacttggacatttctagcacaaagagtggactagctcgagttcgtgggatcaaaggaaggacttggagtatactcggctttcttactcggctggagatcgagtggagcatacaagggagaagcaaggactatactcggccaagacactcggctgaagctcgagtggtgcacatgaggaagaagggaagctgctcgatcaagctactcggcctagacccgagtgatgtgaccaaaggaggctactcgacttttctactcggccaagacccgagtgatgcaacaccaactttcctattttgtctttttccaattagggcacctagtattgcctataatagactcttatgtttttgccaaaatatcttagctttgtctgctggantattagggttctagattttttttgcattttctggttgttgtgttgagaatttggatttga

SEQ ID NO: 36118 - DNA, 286 bp, Arabidopsis thaliana columbia
aatccatttgatctcccctatgattctgagttcgactcaaatgacatggtatgtagagccttgttcatgcatttgtcataatctcatctgatctcacaccatcatttgtatgcaatggtgtaatgttgtagaaactagagaatctaaaatatctaagttgggtgacgacttcaaatcttgttcagtggaattatcatgttctttttgagagatagtatatcatatggatttgataggaaaagaacattttcctttctcaattatccaaatcaaagaagctaggcag

SEQ ID NO: 36119 - DNA, 385 bp, Arabidopsis thaliana columbia
atttggcttagctgaatgtttctggcgttgtccaaatgtgggtgcccaacaggcaacgctcacgtggttctttctcaataccccaacatttatatgtataagttatcctcttcttcttaatatacttatgcttcttaatacgcgtgggttagtttatttgtgtcagcaagatattttttagaacgagactagctagggataaaacgtctttgtggatgaataatgaagttaacatatataagaaaccatgggattttaacaatataagaaagaaaaaacgtggatcccggaacagtctgcgcgcgcccgagcagtacgtagaggccaagagcgaaggttattggattccttttgtttggttcttttgtcaacattcactctttat

SEQ ID NO: 36120 - DNA, 487 bp, Arabidopsis thaliana columbia
gaatctgtaactcaaccttctcacccatgattgttattaattgataccataatcgtgtattagttacgatttgtttgtttttgggttatttaaaaattctttttaattgaaaagatgagaaggattaatagatttgaaatcatatgacccgatttgtaaaattacccgttaattaacccattttgactttaatttcagttaaattttaattttaaccgacccgtttatcaaaagtacttctcttttagatttcaacaccaatttcaaacctatcaaatctagctgaaatctccaaagtacaaacacaacaacacaagagtagatgaattaagatgtgaagagtagaagaagagaatggtaaagctcactttgagtaatacacgaagaacaaagatgagcttggtcgattggattcgacgacgaaggattcgacgatggctgcaaagtgtgatcgatttgtctcgatgaagataaagagaggtatgtt

SEQ ID NO: 36121 - DNA, 505 bp, Arabidopsis thaliana columbia
  unsure (1)..(505): unsure at all n locations
tgatgatatggttatttccagggacttgcttctctttaatgattgatgataaatcagatgcttccatttgagcaaatgtatacccagagaatatcaaagctatgggtaacacaggcagcacaaacctgtcattcataatcagagtaaacgacatggaaaacataattcacaatgaaaagatgttcccatgtgtagtttacatttattcaagtacatccatattacctgaattacttatggcagagtatgctgtatatatctgctaagatccattggataagagataaaagcttttgatttgtagacttgataattcccgcaatgaaaaaaagtgtgaaagtgaaaagcatgacaggaaatagtaccagtgccatgagcgagttccgtaatagtctccaccggatgagaggaagcttcagaaaattgagaggcacaatgacccatgagcagcatatcatacggtccaacagacaggtgaaccgaggaccanagacttacacagcag

SEQ ID NO: 36122 - DNA, 507 bp, Arabidopsis thaliana columbia
tattgttaacaaaataacggtacgttcgatttaaggaaccaatctttttgaaagtgtgaaaccaatctttttgaaagcaaaatagttttgattttgataaatctctaatctaataaacaaaagaaaaaccgcacgttcgatatatttgttttgggtccaaaggagattttgagacgtgacatgaatcttcaccataagttttgatataaaaaaaagtgtattaatagatttggatccaacgagagagtgatgggtttttatggtctccgtacgaacacaatttccttttaaagcgaaccaaccaaaagagatcgcatttatcaaatctgtgttgtttcttcttactctcttctaactttcataaaagtcatcaacttgtcagatttccatcacctaacctctctctctatctctccacccataactacaacatttagatcacaggagtagaagatttaagaaccagttaggacataaacaggccattaatgaagagatgaacaaagt

SEQ ID NO: 36123 - DNA, 511 bp, Arabidopsis thaliana columbia
agaagcccgtgacacatggccacctaaacttgggctccaagaaactcaaattcggtccccaagttagccgaccaacacgtccatggcacagtcaaatgacggtcaacgccaggcgggacaaacttttcccgtggcaagcccgtgttgcccaaacctgcccattcttacccatatttgcccttctttgcccacatggttatttcatttgccctttgatggtttataacgttttgggcacatatgggcaatcagccatgtatttggggcaactccctctcgttttggcttcgcccggatgacccggttttgaactagaattggccaagttcatttttaccttgctcatctctttggctttcgtccctatactatttctttgacttctagtacttcctcggtcgttccttgatgtttccctcttggccgcttacctcgtagcgagggtcactaaactcctcctaggcccaacaatgaaactctccttgcttatgctgcaacacaacaactgatg

SEQ ID NO: 36124 - DNA, 555 bp, Arabidopsis thaliana columbia
  unsure (1)..(555): unsure at all n locations
gatcacctggataaaaattgttctggatttcctttatatccaatttccatttaaattattaacaaaaatgatctttttccaaatgcaaaaattattaaccagccaaaaaataaacaagagttggtaatgtttttgaaaagataagcacaaaaacggctctattttatatatatatatatatatatatatatatatatatatatatatatcaaattttacattgcgattagtgattttaattcattaaaataaacaccgcaatatttagagtctaaagagactatatctgtcatttcctatcacatagaaacgaaaatatcacttaagctagatatgtcaggtagttttaaacgaaggaattttctcattataatttcatatgcgaaaacctatctcctcancncttttcatagttcagagaaaaaattatatacgtcttcggagatcctttgatatcattttggggttttccgaaaataataacacttcgatttgaattttttaatctttgctcggacaagatttggacttgatggcgctccgaagactttttgg

SEQ ID NO: 36125 - DNA, 450 bp, Arabidopsis thaliana columbia
caaaaggtaaaacctttattattgttattattatatcaagtttagagttcttaagggcgatacataaagtgttagtctagtaaaaggtttggaactcaaagagagttaggcattatgattcaaagaaaacggtacaacgccctatatgctataagattagaagaaaagccttaagtttgtcaaagtataaaaccaaacccgctagactcttaaatcgtttcaaagaagaacccctttggaacttgaaagaaaaagagaaagaatgagaaaaatggtagagttaggacatctatgggacagggatcatcttctgagctatcatactatatatcattgggtagatgggagtctgttcttgtatgtgtccattggcttttacctttagcattctgctaaagctcaatcttttctttgagagtccgcagttactcgaccaaataattagaggga

SEQ ID NO: 36126 - DNA, 689 bp, Arabidopsis thaliana columbia
aactattgtctcactgtatagatttgcaaaaacgtgaagtccagaagcagaatcccaggcaagagcaacaggtggaaacaacgcaatttgcagagctctgaaaattgaacaatgatcacatttataacatcgataggggaatgacaatctttaagcttaagaactgaagagtgaagactattatgttattccaaaagaacaggaaattacggcagatgctgactagaagattaacagacaaaactaaaagaaagacctctatgattaaagagagggtttggaatactcactatccttgtccaagtctcctgtctcgccgtctggtaaaccaaaagttttaattccgcatccagtagttttcagggacagtgttgcgggcaatagacctaagctggtagaaaacgatagattgtaagctagaggatggtcctccttcaaaaatatttcctgcagaaaagtaacccaaaactgaaatcaggtaactaatgacttcactagcttagttcaaagcattagagatgcaaaggaaaagtgtggcctcttttcagaataataacctttgcccagtaagtggataagagcattgattgagatgagactccacggccccgtctccgggattaaagaactgccctactgccatggaaactgctactggaggtttacagaaacggcctgtgcaagagaag

SEQ ID NO: 36127 - DNA, 523 bp, Arabidopsis thaliana columbia
atgaagggagaagaaaacttaggttaaaaatgtctaaagcttacttaaataagaaaagattcaaattaaacatgactagaatatgtgtagaaaactcgaaataatgtttttcaacacacatttatgggttatcacgattctcctgtacaatgacagaggttcacatttagaggacagggacataacgaaagacgccctactttgacatgccctacctgcttcaaccccaaacccacgtttactccaaattcatactatttgatattacatcaatcaatacaaatagatacatccaataattcgtacatactcgtgatattcacttatttagaataatagtcaatagttcatactgtaattcatacatcagcccattgacgacaaaaaacaatgagctcattaagttagctactagtatattatcttgatcaaatgttggtaattcaattagctagtttttggggagaataaagtatggaagaatagggtgcggttataagagagttactaaggaggtattgga

SEQ ID NO: 36128 - DNA, 240 bp, Arabidopsis thaliana columbia
aaatactcttaatgggatcaatcaaaccctacagcagtaggtttcagtttagtttctatgatatagtttgaagataacaagatcacataaatgatacgatcataccaaagaagttgacgccacaagccgacaaagagatggcaagatttgctagagtatctagaatcaagttcaaacttcattattcacttcatcatatatcgacatctctccattgaactccaaaattgacgaagaaat

SEQ ID NO: 36129 - DNA, 554 bp, Arabidopsis thaliana columbia
tgtgatgctaacaatcaagatatgatcagaagtcactaagtcaagccaagcaataacaggttttagtgtgttctagcagttctaagtgaacatgtagaaaacagaaattcaagcagaaacaaaagacactcgaccgacacagctctttgcagagactgggtgaggtcgagtgacacgtcgagtaaaagacataaagtataacagggatactcgactgcacagtctgttgccaaacagctgggtggtcgagtatctggtcgagtaacagtcagaaagtacaacatggatactcgactgcacagtctgttgccagacaactgggtggtcgagtatctggtcgagtaacagtaaagaattgccgaaactaagcaacaaatgacaagatgcagtaaacaacagtagagtaaacaaagaattcaatcagataaagaattcctgaggatggggtaattgagtagtttcgtttcctcagtttacaggtgattgatttgctcaataaatgtaccctagacaacaagttcatgtaccaaatctaagtaccaccgcaatagaga

SEQ ID NO: 36130 - DNA, 518 bp, Arabidopsis thaliana columbia
ccctcagtctaaagcatagacattatattacctctctcagttccacggcaccactttgacagagataaccccagcaagcattccttacacgttctccatgaatgcgatagtcttggctctcagcaaatacctaagtcacaagtcgaagaagctctgtatactcaagaatcacggagaccaatgaggctaaaataaacacatgactgagattctcaaacctgatatgccaggaagtttgaagtcctcagctcagaaataataaaatcagtgcatatcgcacacaaatcctgtcagacaaaagccactagttattagatcaattgatccaaaagacactatcttttgatgcaatcataagacttaatcatacctgaaggtcaagaaaagaagcagcagctaacacacgaaaggcattatcatcatccagcttaggatggtaccatacagataagctaaagcaacagaaattgcgtctccattaacatttttatcatccacaagtaagttacaacaggaga

SEQ ID NO: 36131 - DNA, 603 bp, Arabidopsis thaliana columbia
  unsure (1)..(603): unsure at all n locations
tctttgttccaaacattggttccaagatcgcatgaaagaaagagagaaggaaaacaaaatcaaaggcgctatctcaaagtcaagatagattgaacaagatatgatattcgatatgtaattttttaatttatatttttggaatcaaattcatctggttgtaatgaacgaatctataacttttttattttttttgggcaaacgaatctatacttttgatgcgaaatgattgagatattctataaagttattgtctatcagaatatgtatactaaaaagattattttgatgactaattaagaacaagataatgtatggaaagaaaaaaagataatgaatgacaacttggatatatttttatatattaatgtatgatctcaaccctcggttatgtaggttgcccatcgaaatatattggagattaagcctttaaaaaaaaaaaatatatacatatattggagattgggaaaaaatacttcccaagtttaattttttatcatcaaaagttcataaaatattttaagtcaaggcatttctacaaacgtaattaggaaactatatccatagctagctagcttttagccaagaanacatatagttgtgata

SEQ ID NO: 36132 - DNA, 558 bp, Arabidopsis thaliana columbia
taatgaaggttttgctttttgaactgggttcttaattccaactaaaattgtgctaaccgttgaagcatttgaaattgggtatagattcttatttatttgtaatttgtgctcattgttttcaggtgaactataaccagggaaaaattggaattcaagctccttctactggtataaattattcactaatgcattcttttttatttttctttcaccattatcataaaagcttctatactctccatagatatatcttattacttccatgcaggagccaatatcttacctgattaaatctattcattcgcagaaatcaataatcaaaaatctcagtctgatcctcgtgcagtccatcttaaccaactaccgtcctcagcttcaggcaccttaggcagttcagttccggtacagggacttaccaaacatccgcagcaccagatgcagcatccaccaagttcttttcctatgtataccacttctggtagtttcattcatcccgggtccaacaccaatgcttctggtccacgttgagacctcactcatgatcccatatgagcatgt

SEQ ID NO: 36133 - DNA, 522 bp, Arabidopsis thaliana columbia
gatatatttatagactttctgattcataatgttgtggttacaggtttatggtaataagcttggttcctttgcgaccaactttgagcaaacattcagcagtactctaaagatccttaaattgaccaatgaatgtgcaaatccacatcagtcaaacaataatgatggtgggagttgtaatttagatcgctctaccatagacggatgctcagacaccgagctatttgagagggagacttcatctgctacgtctgcttatgaagtgatgcaaggcagtgcaacagcaacctctttgatgaatgagcttgcccttttcgaagagactctacaactctcttgtgtccctcctagaagttcagcaatggctttgaccacagacgaaaggtttttaaaagagcaaacacgagcaaacgacctaaagaccgtggagattggtcttcaaataagagagttaaggtgcaaagagacggcgctaggattaaaatttgaatcaaacaacctggggaaagcggcgctagagttgga

SEQ ID NO: 36134 - DNA, 564 bp, Arabidopsis thaliana columbia
tttttaataacaaaaatagagagctattaaaaacacgacaattgcattaaaagaaactttatcattaaaacaatattaatagcaagagggaaaaacgctatagaaagggggagacctattatcacgggcgatgataaagcgtttaaaataacgatgtcgtttgatacaatagtgtttttccgatgctattaatacctgcttttcctgtagtgcattgatgttttaagatgtttagagattgcttcatttgaacatcattctgatatatttgtagagacctgcaattatatttgatttcgagaaaatgtgatttctcagaatttgtcgttgagactcattgatgcttactctaagtgtctaaagattagaacctgcagtttatttcagtagaaaacttgaaactaagttcagagtttgtgatagaagccgcaactctctttgcaaaatataaacgatcaagtaaaagtgcttggatggtagtagtgaattaatactgcatcaagacccattggttcggtttaatattctaaaaatttgaaaaattatattaaacctgcagtttgg

SEQ ID NO: 36135 - DNA, 497 bp, Arabidopsis thaliana columbia
tattccgtgtaaatcagtaatttcaaatgaatctgtttcttaaccgctcgtgattttgtatcgctaatcgtgttgtgtgtgtttagattttacaatactcagcgactcagggtccacaacattttcgtctttttgaagcagtctgtaattttgttcttcttaagaggttatacacaagaaggtttgtagaaaaggttacagtgcacatcagcacataaagctgcaaatatggatatcgtttgtattattcttcagaggctgctcatagagtacattattattttctttgacttaataacgcgttcagatacaggagggacccttttttgttcattttctcctcttgtataagtttccaaaagttacacaatggcttcgaaatatttgatacagacttatcttccagttctcagtaccccttgtccatgcattattatgtagttgacttcataacgcgttcgtcataagtcatacagaaagagaggaccactttttgt

SEQ ID NO: 36136 - DNA, 263 bp, Arabidopsis thaliana columbia
tatcagccattgcaagagctgccctagcctaaatcaaaccagagataactgtggaaatgagactagaggattcagtaaaaacacaaacttttttggatgtgcaaaaaaatcaaaattggtacctcttgttcctttttaaggtcttgttctggcttgatccagatacagtaagcaatagttccggcgacgacccaagaatctgtactgtgatcgccgctaagagcgctcaatgaattagcgatgaaagatctcgcgtttccaat

SEQ ID NO: 36137 - DNA, 854 bp, Arabidopsis thaliana columbia
ttgtgatagaatatgaggatatatcttatattaagccggtttattttgatcgtttatcattgaaattatgtttggttgattaaaaaatgaaaatatctaactttttttgttatgtattctacactaaaatttgaaatcacttgttactcttacaattttatgttttccgtatgtgtgtttcgacaacttctccaatcaaaatgcataataataaattaatcgatttagttttattccaatcactttgttactaacaaaatgtgttcttggcattcaagagacattagccatacatttttcttttttttcaaagagaaataatagtaaagttcatatcaacgatttaaatatatggtcaaattgaatgatatatctaagataccaatttgaaagaaaataaactaaaaaactgttaaactattttagtcgagtggttcattcatctttgaatttaagaaacaaaaaagttgataagaaaagtttttgaaagttaaaaaacatgtgaagagagtagaaaatataaaccaagggtctgtttgtaaagccgaattatctgagtcaaaacaaaaaatatcgcaactctaatagggtaaaagcgaaatcataaaaacataacgaagccctagtccaaaaatttctcatactataaaatgatttttttttttgcttcgctccctctttttcacttcgttaacggccccgcctccactctatcctaccgccgacgtccgtgatcgccggttagtctctgtcttcgcttcgccctctcaacatacatcgttgcagatatcaatcgtgtttcgagctgactatttgcattggtcaggtttaggaaactatgtgtgtttggtagt

SEQ ID NO: 36138 - DNA, 593 bp, Arabidopsis thaliana
gggtccatacggttacccgcaacagcaagctcatggtaaaccgcagaaaccgaagaagcatggtaaggctggagctggaatgggactaggacttgggcttggagctggtttattgggtgggttgttggttggtgaagcggtttctgacatcgctgatatgggtgacatgggtgacatgggtgacatgggtggtttcgatttctgattgctgtgttatcaagttttaatttcttaggataattgctctaatgtttttcgtttgatgaatcatgtgaagaacgtgagagatcaagttttatcttgtgtttatgtctccggttacttattttcttctaatgaatgtaacattatgatatttccaatctctggctgttgaatagaatgcaatgaaacattggaaatatagtgttgactttgtcacctttattaagcattagccatgccatagaaaagttccatataatttgtctaagcataatgtacatcacaaaaggtgtaaacaactagacataattgtactaattgttaaaagcttccgattactttgagcttagttaaagttaaagcctgcgtacgatacatagttttgtagg

SEQ ID NO: 36139 - DNA, 632 bp, Arabidopsis thaliana columbia
gtactgactcaaattaaagaacacagcgaatttcacggcttagggcttcgggtacttatatagtactaatgattattttccaagatcctatatttgccaactcacgttttaatgtatacctaaataatttgtttaaaaaaataattaattcagttcttttgtttgtttaattatcaataatcatctagagattcagacgtaacatattctataattattttatttttcagaaccttatctctttgttgaagatacaaatataaacgtacgacaaaatcgacctatatctactacacaataaacatatgagaaccgaaatgaatgatgttgtcatgtgtcgctatcgctccatgtatcgctttcgccttctccatcgtcgcttgctacagcctgatataacaagtccgaaatgtaagtgctttaatgaccaaaatggtacttgcaaactgaaacgtaagattataaatgtgaataatgtatggaacctgtcggatagagtttgcttctctagaatccgctaatattggtgtcattgtagttctgatgatgatgctttgcctgacacacgttcaagttgaatgctgtatgatcaaagggttgtgtggtaagaaaatgcatttatgctttgtgga

SEQ ID NO: 36140 - DNA, 634 bp, Arabidopsis thaliana columbia
acataacaggttttattttggaattgggttatatggtggatgtatttgaatcaatatttataaaattttaaaatattattaatatactgttttaataagggttaaaacttcagttttttaacaattgtctcatggattcgtggtatagcgttacttaataacaattataaactgtaaaatagaaatattttataaaaataaaatttgtaagttttaatatatattacctttaaaaaataaatcgtttcgcgtgggggcagcctaagcctgatagaggcagaagaattccaacaatttctcccgctcctcaaaagtgagttgctcctcacgtacgcatgttctaatagtcgagttgctgttgctaaagcacctatggttccatccctggtaacttcaaccggtatactgcgggttaaaatctagtaaataattagaaaggaagacatactttaacaaaatcatttgtgaatctacatcatcatcttccacactacctgcatgaatattaacaaaaaagtatgtcagagaatatatgaaattaaaatttttataaaatataaacaatataaaaataaattagagatttaaaacgaaattaaggtttgtagtagaatgcgctatttcacctagtgga

SEQ ID NO: 36141 - DNA, 427 bp, Arabidopsis thaliana columbia
ctagtaacggccgccagtcgccagtgtgctctaaagagacgcttacatggcaggctgctcttgatgtcttctgccgcgcttcgtctagcagacttgcgttgtctaggctgagctcgaatggtgcccgtgcatttcgaaccatgttctgcttggcagcggctgcgacctgggcgctgtgttgtccatacccccgcggctggtgtgattgccgcatctgtgcagcatgagtagtagcacccaagttggtttgccgcattttagcctccatcgcagcaacgtcgccagactgctgggtggacttttgcattttagcaggcggatggccctcttcgtcgatggtctgatacgcaattccatcctcatcatcgtagtcttcatcgagcgggttaagtgctgactggaacgcggcggtcgggttcgactgccg

SEQ ID NO: 36142 - DNA, 551 bp, Arabidopsis thaliana columbia
  unsure (1)..(551): unsure at all n locations
cgccagtgtgctctaaagattttcatttaaaatcaaaatgttgattgttaattcttaactttcatatgaaattttccttaaggcattgtctgtaagcgccttgtaagacttcgcgaaaaagacgattctatcttcgtcgacagggagtcagacaacgaagtgaacatcaggatgatgacacttctgcaggacacaccaggatggtgtttcagggaaaggcttctggatgaagcgaagaggatgacgcaggacgcgttaaaggacacctccaggatggagaatgagaaccggtcaggatgattcggtgggtcaggaaggccagggacacttcaggatgaagtatcacatcggggtggtgtgagcaggaagcaatagttcaggatgaacgattggccgcaacggannggaaaagttgtcaaggatgagcagggagcaacaaaagtagctggaatgctgcgaaacgaaccgggagcgctgtgaatacagtgctccctttttttattcctgctatccttcgcggcagtttttcttattgaggttgctttatgaca

SEQ ID NO: 36143 - DNA, 461 bp, Arabidopsis thaliana columbia
aacagtttcagcttcgacagccacatgtgcgatctcagcagatgtaccagtagtggaatttaaaagtttacatttattagttagtagacacatgaaaaatggtaaagtgatgatgtgtcaatcatatgaagaaagatgaccaactttcatatatagactcatgtcattggtttttcttatgtactaatatagctgaactttaaaaaaaaaattacaagtcatatttacgtttcaaaaacaatgcattcaaattactttatatgaaaagatattatataagatatttggaaaatagtaacacatacgtgcgggtattcatcgagataaaaatatggtaaattcacatataattttatgatgatgtgagttagcataggttccatatacatgagagctccagctagttctctcgtcagtacaagcactcattacgataagctctcgtcatttagatttacgta

SEQ ID NO: 36144 - DNA, 496 bp, Arabidopsis thaliana columbia
tgtaatatttttattatttcatatcatataaaaatatactaaatatatttatatttgtcccaaacaggatatccagaatttttgtttccgtcacctcctgtttctaatcgggaatacaaaatttatcttatattagagatgcattctcttatgagatataaattggagaacgggtaagatataatggaacatgataaaattgaatgggaattactctaaataattatatttttcgcaaacgtatttactcactttatcggttttatatatggtttgatagtttacaagtttaatgttcacaagtttaataaaaatctacctgaccattaactcgattcagtttgatctcggtccgattgtttgattgttacgaattttaaatattactaaaatcattattatttcaaatatttcaaccaactaatatgagtttaggttatagatactataactatataaataattttataaacatcaatctaacttatattatata

SEQ ID NO: 36145 - DNA, 309 bp, Arabidopsis thaliana columbia
taccattagagatgattaagtagtaaaaatatcatttattactaaacaaaaaattccaaatgtttatcaccatgctaaagaaaaagatccccaatgtttctcctccatttcatggtcacgtgtatttaaccatattcaattatgcatgttctcactactcattgcttaatttattttcctagtcgtccccattcttttgctttgggctgttagtagttgggcccagttctaacaatgagtatagtcgctttatgtgacgagtcgtagggaaagctccatgaagcagaactaccattttcgaaccagtat

SEQ ID NO: 36146 - DNA, 563 bp, Arabidopsis thaliana columbia
ccgagtgaacggagaagagatttacggttttctctcgagcctcgggaatcgaaatctggagagaaaagagagctttaggttttttttgttgaagaaatgaaaaaagtgagagtgagtgagtttttattattgctctctctgtgtttgttttttgtttttttcccccaattatctctaataagaggcgccgattttgtttttctcgaaattcaaaatttaaaaatggtccgtttctttctctatggtaactgtttagtttccaaattttattttattttccaatattaaattgagttttaaaatattattttgatattataatacaaattgcaaaaaaaagaatgttcattttgtttttgtttttagagtttcttttctaatattgtgcacatgtttgtggcaggctttgggcccattcataagggttgcaaaaaatgaaataatggaagagcacatgttattttcatattttgcttgttaacaaagggaagagaacgtgtttgaatattgacaatttccactttatcctaaagtatttatgtgaattggtaaagaaaataaat

SEQ ID NO: 36147 - DNA, 485 bp, Arabidopsis thaliana columbia
  unsure (1)..(485): unsure at all n locations
tcagattatgtttaataaaaagtaaaatcatttacaccaaaaaaaataatatatatatatatataatatataatatcaaacaataataatgtgattaaactttttaaatccaactaaatgtttaatactgtaacaaatatagtaggagattaccaatggcgccaatanactnatcnaataatgtgaattcacacaattaataccgggtgtctcactcaccattcgatttattttttaagacggcactgtgaagtcttcgtcgaaatttaaaatatcaaatgagtttaacaactgaaattttttttaaaaatgattaaataaagtataaaatcctatattttatttcaaaatgaagagagttttttaaaaccgacacccgactggttcaaccggttcaccaggtcatgggttaatggtgagtttttgtggggttttttcgtttttgaacttgtcgggttttagcactttatccaaccggaaaaatg

SEQ ID NO: 36148 - DNA, 483 bp, Arabidopsis thaliana columbia
tcattaggatgcattccatccaagtcaacggatatcatgtaataattaattacaataatgagtctatctatatatgtgtgttttcagtacataaactttacatcttctttttctttttaggatcactcacccataaaactttaattcatatgagctgtccgtatatatacggtcccccggttagtaaaggatttaatgtttaaattttattttgtatcaaatactatttactaatgcaatttatcatttatatttatttttctatctcattacccgagagattactctcaaatttgtggtagacgtgtaagttttatttacaacattttattattatttgttgttttatgttaacttaatactttctcttttcgttttctattttctagtcatatggaaaggatgatatttacaaatgccaaagtggcagcagcggtacgaaattatttgcccgatgtgctttttatttcacttcggaggact

SEQ ID NO: 36149 - DNA, 582 bp, Arabidopsis thaliana columbia
gaatggttttaaagcctatgaattaaagatgtcactttgatggataccccacctatatgactggagatcccaagaactaggttcaaaagggaaaactaaatcaaacgaaatatatttggagaattataagattactagtcgcagcctagtttccaggatgataaacagtgcttcttgtacatataaaggataagcaatgcttttaatgattgagtccaaagctttgatatataagtggagttttacaagagacttcttaaaacaaatgctagtgacaaatcacctagtgagtgtggaatgtggccgtttctaggagaatgagaggctatattctctaagttcactcatgaaatccaggattgttcaaagccaaaatgaacacaatctagagaacttgtttttacgagaaaaagtagttgggttttacctgttgtctaggtttcataaaaatctgggtggttaaagcatcatgttcactcctggccaagtaaattcgacaaatattaacagtgaatagtttaaggctgaaaaatactactatctcatacacatctattttttgcatatactcttgaaagttga

SEQ ID NO: 36150 - DNA, 449 bp, Arabidopsis thaliana columbia
cttcttctgcactgcgtttactttgtgtgaccaaaaatccaaactaaagatatggaggttccaatctggcaatggtgtttgatcgtcatagtgatcatattcttggcaattgcttcccattttctgggaagaatcttgtgtagccctcgagagagaatcgcagatagtaaagccgagaaaaaacatggaccagccgaagcagacaagactgcgaaaggtggctccgaccaactcgtgtgatgatctcaaagagcatgcatatatcgtcaagtttggtttgtaatttgtaagttcatttttttttttactattattgtaaaataatactaattgtgcacatccatatatacatatatgcgtaaatatatatatgtgtgtgatcaattccaatttaataaaaaaagaagcattggagagacacttagtaagctcttaaatttgttttcaat

SEQ ID NO: 36151 - DNA, 480 bp, Arabidopsis thaliana columbia
cgatgacatccaataaatttggaacgataaagaaagtttactgatttgtttcgacaaagtcaatatttctgatttgagacaaatcagaaacaaagtgaatttgtcaaaattccaagagcgatggcgtgacgaattgcgtgaagaacagccgtagcttcagccgtgagcttctatggccctgatttaaatcataattttatagatgaatatgaaataacatcatgctagaagttaaacataatacacactagcgaacaaaagccaccagccaccttctgccttttatgaagctattacctcctcgttaaccgaaaaagccacatggcaaaaccatcaacatcgcattcgtactaacgacacaatttggacccttaggatattctacagaatactcttaaagcatgtgttatagacttatagcgacgctaatttgtttgcgtatgtgaatttcattttgatacagaagtacagatccgggtg

SEQ ID NO: 36152 - DNA, 982 bp, Arabidopsis thaliana columbia
gattttcaggttacgtgtaacacaagagaaagaaaaatttattagtactctgtttttttattcaatcaagaaacctggtttaaggaatgaggatcagtgccatcaatcaagaactcaagattccactcctgttcgctccatagatcacgttcccttgcggtggtaaaagggtgagcaaagggttgccagatccagaccataggaaaggcgttggttgacataacttgacctttgggatcaagtgcaacgagtataggcctgttcttgaaaccccaccattccctcacaaaccttatcgcggctcgtcttaatttccgaggctctccaagaacgtaccacctcatgttcatgtgaagggcctcgaacttggcatcgtcagcttctgtccagaaatcttgaactggaacccaaagaatctcgaatgactgctgccatgcttctgtgtagagcgattccaggatgtagagctctttttcgatgttttctaggtctgatatcagaagcagaacgtgcttttgggtgagcacgttgatcccgacctggttaatgtttgaaaacagatcagtcactgacaagagacatatacagatgcagagatataaggaggttttacgcgtctctttgaaacaccagctccgtggtaaagaaaatcaatgggtctgagaagacgaagtagaggaggaacaacgtcgacgtgaatgatagtagtgaacgtctggatgagttcttgatactcttcttcgattataccttcctctgtaacagagtaaaaaaaacagagcttgagaacagaggaataaaaatactcttaaatatatagaaacagagagagagcttaaaacgacgtcgtagttaccgatggtcattttactcttcttgaattgttctaacaagtaagcattgatcttcctaagcctttcgctattctcatgtatcccgaaacttccataaacgacatgatttgactgaaaacatagatgag

SEQ ID NO: 36153 - DNA, 501 bp, Arabidopsis thaliana columbia
catcccttttttgtgaggaaatgattcgtaaaacatttataatccaaatattcataagaaaactcttatgagacaatggacctcatctttaatcatttttcttctctaacttttatcttagatataattaaaatgatttgagctacggtatagcccataatcagctatcaacttttgaaaacattttctcttcttttacgtttaacaaaaacataagaggtctttttttgctggaattcctcaaaccaatcctttttgtaatattagataccttagaaaataaatttgaagtagtaggataaatgtatagacagcattttaacttagttaatatgcaattattggttagcaattagagtgagttcggctgtttcatcatgtaatgattacaacaaattggttcttctttaatatatagtcttacatactttttaaagtcatttcgtgtttaattaaaaatttagttggaacctaaatataattataggtcttactaaaaac

SEQ ID NO: 36154 - DNA, 586 bp, Arabidopsis thaliana columbia
tcatcgtagaaaaacaactttacaaacattcctacgtgaacgcagttgatagacacagtaagaaaagtaaatttaacattataagcaattcgtgaaaagttgacatttgagtgaaatttatacaaccaaatttgcaaggagaaagtggtagttatatagatatatatgaaactggtagtaacttaatcaaagtcgttaatttaggagtaattgttttttagtcaacagatttatttagggttaattatttaagcactttttaattggtcaaattttacaaagttgttgcgagaccgaaagaataatatgtcgtccgctctagtatacatatctcccaaatccataaacacaaagcgggttttatataattcatttatacacaagcataatccttaaacaaagcaaaaaacacatgacagtgacacactgatcataccagaaaaaacacacaaactaatcacaagtggttggtattgtctcaaccattattcaagaggccatatttttgacactttttcttggtacaagagttgtgaatcagtagaaagggaacacctcagcttagtcttcaaatcagcttttggag

SEQ ID NO: 36155 - DNA, 523 bp, Arabidopsis thaliana columbia
tggaagtcccaataaaggaaacagacatagaatcattatagaagttgcattaccacctctaccatatgaagatgaaacaagaaaagtaaaaactgccagcaagaacaacaatctcttttgtcccatgttctgcaagaagacaataaacacaaccacatcatcctctgttcatcaaccaatgttaagggcaaaattgagctaaaacaaagcagaattcggaagcaaattagccaaaaatataccttataaaacgagactcacgaaacccaaactaatgaggattaggacaaaacccgaaagagatttcagcaaccaaaagtcccagataaattaaactgaggatccaaagcctaaattggacttcttttacaacaattcggaaatttccgacgatgatcggagattattcccggcaagaaaattatacggcgagcttatatattattatatagaagtcgtgatcttgcgagacagaagctaatagaagaaaagagacggcgattaaaatacgaatattcggttt

SEQ ID NO: 36156 - DNA, 552 bp, Arabidopsis thaliana columbia
agaggatcaggatcccctacggacgttacccgcgaacgaaggagtggataaggatgtttaagcctatccgttatggataagcacgttcatgcctatccattgggataaaattgttcaagcctatttgttgctaacggataagaccgatcgtgtttatctgtgcgtttggataacgtttcggataagaacgatcatgcctatctcgccacctctaggttccaaaccgacctaaccaccctataaataccccattttgtttcatttgttccttcacacccaaaaatcaccaaaacgctctaaaacccgagagttgtctgagagagttcccgagtgagtcgttgagtgagtagtcgagagtctaggcgtccgatagtccttagtcgcttagccgagctaagtttcctatgattagaaactaggtttagttaattactatttaagtaattaattatgaggttaagtaggattagtatttgttaaggtaggattagtattggttaattaggattagtaatagttaattaggattagtatttcgtaagtataattagg

SEQ ID NO: 36157 - DNA, 570 bp, Arabidopsis thaliana columbia
gatcgaacacgttgtgtgcagaaatgtgtttttagaaaacagagcaatatcaacctccttcagtttagctcaagttaaggcggggacttgtgagagaataaagtagcaacggaggtgacggctgccaaatggtgacgacggcgaaaaactcaagacggacgattcgagattagggcgttatttttaaaatttaaggttttataaactgactcgaggcaattgaacaaaacctgagttaaccgaaataagttaaaccaaacatttggtcagttagtttggtattgtcccatttaccaaacctgaccctataggctcatgtttttgtagtaagtctattttgataagctggtacagaattgaactaattgtgatacacatacaacaaacagttacatgaataaatgattaaaacctataatttgaaaagaaaatttgtgtagagagacttagagtaagccggttaagtgaaagtaatgtcttgacccgtttggttttttagggaccgcttaagaggtcctagattgagattgatcctttctttacatcacactagctgtgatattggcggag

SEQ ID NO: 36158 - DNA, 564 bp, Arabidopsis thaliana columbia
ttggtatcatagattcaacatttagaagtatttcaagtcttcttctgtctgtaaaaacaaagaaaaagggaattactcgatcatgtctaaaataacatgagtatacaagtgccacaactatcaatcaattatgatcataaaacattagctggtaactattagagtatggtctaactgccgtgcatatactcaattctttgctctaaaacaaccataaagacaatagttgattcaaagatcatggccaggaaaagaaacagcacttaactaatgatctaatgaattgtttcaattgctatagcttggatggaaataccagaagtcatgagtaattcaattctctttctcagctaatgaatagttgcttacctccttgtctagctgcttcctttgctctatctagccatgaccgagcaaatgatgctgcgctggtcgtcagttcccgcagctttaagaagtcacaaagaaagatatgaaaataagagacaggaaataaaatcactttagtaacagcagagaaaaatcgtacatcgtgcttcccttgctcgctttgtggtggtatac

SEQ ID NO: 36159 - DNA, 536 bp, Arabidopsis thaliana columbia
atatcatcactgttttatatgcatttctcatcattcgtcatcactttgcatgtttaggacaggttagcatcagatcatctcgcatactgctgttgatgtctcgccgcatccgagtcgccgccggggaatctccactcactgcatccccaaatatcctccccatacgacatccaggggggttacacgcagctcccacatgctcagctcgcacagactgctataccataccttgtgactcaacatctactctagtagtcactagactcactagaatagtccgtccggctgcacttgctgaaatcattagtcttcattctcccgtgctctagcaattgcgctccctagaaccactaccatgtagttacgtaggcgacatccgtaatgacggagaatctaggaatgaatggggatcctatcaataagaatatgaagaatatctaattagttacactacctttgtctcactccatagatctatctgcgcaggatacggtacagtgcaatccgagacgatggaatgctatgggatggatggt

SEQ ID NO: 36160 - DNA, 537 bp, Arabidopsis thaliana columbia
ttattcaagaaagctcaaaaactctgaactgaaaacaaagaactagtatccaaattattctggaacccaccgagtaaatttatgaccagagtttgtttcatatcgaaaataatcgaagcggtggttatttagttaggaaacaaatttgctcaaaaaaaaaacaaaaaaaaagttaagcaacaaatatgaaactcttgtgtccaaaattagcaattgccttaacacacattcttaaatgtctctccgcgtgaccaccaaattaaaccagaggctcatattaagacatcttcttttccaaccatcttcgtttctttgcattaaacttttggattttgatacttttttacagatttttcacattaaaccttattcgttgatcaatcttcgtctttgtttaaaaggcttggttgattcctagtttttttttctctctcgctgccttgcggttccagtaatcacaaggcggtggggaagaagaaaaagattgataacgatgagggctattgacgttaaaacggggatgaagaaccttgggac

SEQ ID NO: 36161 - DNA, 593 bp, Arabidopsis thaliana columbia
gtaaaggaggttgtgaaggtaccaaaaggtaaattgatgatgaaacaaagatgcaaggagatgacaaggagagtgaagataagcaagttccggatcaaaatcaacggttgtgctcggtttcgattcaatcagcggtggatatctctccccaaattctcttcgaaaccatcagataaatcatacacaaaattggactaagtaatcacttaacttggaaagtctcaagaaagaggctcggtgttgttgttttttttctttgtcaacatgctttaaaattgaattcggggagcaatattatacgttaatgaatatcttgacaacaaaaaaaaacgttatcagataaacttatggatataatttggtaaaccaaaaataaacctaatcaaaagttggcattgaatgcagcatgttacgtaagagctttgtacaagtaccattcactctttttacttttcaatgtatacaatcatcatgtgataaaaaaaaaaatgtaaccaatcaacaccctgagatacggccaaaaaatggtaatacataaatgtttgtaggttttgtaatttaaatactttagttaagttatgattttattattt

SEQ ID NO: 36162 - DNA, 543 bp, Arabidopsis thaliana columbia
cacctctctctctatactctctctctctctgtctcagtcactctcacacaagttacttttctccggtgatccaaatcctgcttcagtctctggacttgttttttttcttctaagtgaccctttttgaccagattagctcaaatacttggtaataatttcctctctttctctcagtttcttagaaatttttatacatttcgtacgttacataattcgtctgctctctctttacctcacagacacaaagagttccagcaacttcaatggcttccggtgatgtacttcctcgcttctacactgtctttctttcctgtgtcagttccaactctttggtaagatttttctcttgatttttagtttgtttctgaaacaaattaggttatgtgtctgagttggtttctaggaaaaatctatttgctttatatgttaagtctttgttgtgagtaatttacgtcagtaattctttaaagactttaacttttttacaacttcggttgatattgctagaatctgtcaagagtatagagctggatctccaagttt

SEQ ID NO: 36163 - DNA, 443 bp, Arabidopsis thaliana columbia
ctgtaaacgttacttcttggggattaaaagttaaaaagaaagcatcaaattctttcttttcttggcttttctgtgaaagtttggtgaggaataacaccaaagagtggtttaggacgaatccatattctatcctctctattaaatattccattttttcaactttctcacgatatgttgacctgtaattattacgaatcacgagttttagcaatttcgtgattcaattctaacttccaagcaatccaaccaaccaaatacatgtgatttttatcattacttacatgcttcttgccttgtctagaacattttttagaaatatattacaaaactactccgttatgttttctaacaaaacttataattcatcagtgatagtcgaaatttatttataagcttcgatgagtatttagatctctattaataaacttacaagtactgttttt

SEQ ID NO: 36164 - DNA, 761 bp, Arabidopsis thaliana columbia
tttgagcttttgaaagtcaaatattgtaatcctaaaccaattgtttagataatttttatttctatttgcgtttttccggcttttggtatatcgcaagagtcggagttacatagttgaagaaatgttaatggcgttattaatttattttagatcacatcaaatttttaaatatatgaaatctatatttttaagtatttaaaacatagtaatttgcagatgtcaaaatttagtaaacacaagatcttaataaatagtttaaatcagacttgaataaccataaattatgtttagatttatattttatttaaacataatttatggtcatgatccattaacatcttaaacttttttactttttacttttgagtcctgtaagattgcctacgattggcccaacaagaagcccaaattcaaaatagtatctggaggataaaacgacaacgtctggtacgaaagtcagctattttccacaatctgccacgttccactttcctaatcgaagaacgccatgcacaaagccacgtaaagctctctctttctctctgagtctctcccagatctctctctctctctcagtctctctctaaacgcataatcttacaataaaatggtgaaactcgcgacggcgcgtgagattagaacgtacggccctcggcttgggaggagcagagccgagtacatcaacgcaggtctatacttgtttgcaaccgtggtgctcatcggcggtttcacagcgacaggattctcatgggaaccaagat

SEQ ID NO: 36165 - DNA, 561 bp, Arabidopsis thaliana columbia
aatgcaaaactaatatggtctccgagtaatgtaaatcataattaaaaaaaagaaaatcttaattaatattacaggaaacacaagccgaccatagtggattgtgatacttttagcgtgcaattgaagtaatggactaaaagagtagcatcattatcatagaatcaacacttttattagcattaagctccttaatatctgtagcattaatgatcacattcattttagtactcgttattctttcttcttttttaggtactatttattgtatttatcattaattgaaggcagagttatgacacggaaactacatttgaacctacgaacaaagttaggtttgacctaaaatctttaaccactgggtcgaagctccatcagataaagtttttcagatttcaatcagtaactaaagaaaaaagaatcaacatttttcaacaaattgatcattaaaaaacaaaataatatcacatacgtcacgttttcttttttgggtttttgtaaaaggagagaggttgaaaaaatcgagaagagagaaggaaatagaaaaggaaagcaaagtatgta

SEQ ID NO: 36166 - DNA, 616 bp, Arabidopsis thaliana columbia
ttctgcatgtgaggaggtaagatattttcaataattatctctaaagttttaatttgtgcagtccatctttcttagactttttctcttcattaatttcttttgttcatcaggtccgtacttcagaaaagctaaaagagattatggcaaatatcctctgcatggggaacatattgaaccaaggaactgcggagggtgagtattacattatcttttggctttaagatatctcctaacgcaacacaataacattcgtgtgttcaatgtgagctaagttaacgaaaggaatggcgcctttgtttaatcgttgcattatgtcctcttttgttttatctgaacgcaaatcctttgcactgctttctgtaggcagtgccgtgggattcaagttgaaaagtttattgatattaagcgacacatgtgcacctaacagcaagatgactctcatgcattatctttgcaaggtaaaactacaatcgaaagaacgaagcatgcattatatttatgcgatcatgaaaccatcctcttttatttcccaggtccttgcttccaaggcatcagatctactagacttccataaagatcttgaaagtcttgaatcagcttcaaaggtttgcctttg

SEQ ID NO: 36167 - DNA, 471 bp, Arabidopsis thaliana columbia
cttacttcgcacctcaacaacgaagacaacaacaacaagcaccagatccagatgatccagcgaatctattgaaagaagatggagtatctctctgttctcagatgtggcttgagaatttcaaagaacctgacaaaaccgctactaatttaacctcgtatcttcgtagattcgagttatgggtattagcttatcagaaagtttgctgtgatgaattaggtgcttatgttcctcgtagctctattcaaagatcagctttagagaatttgttagctttaagaaactctgttctcgatgatcggtttaaatggggttctcggttggatttctatattaaatctcctagagataagaccgattacgagtcgttgtcgaagaggaagattaaagcgattttgactactacgcagcctactccgtttcaggataggatagttcaggaggttttgttgatgattttggaaccgatatacg

SEQ ID NO: 36168 - DNA, 519 bp, Arabidopsis thaliana columbia
gaattactagaaattaacacatactttgtaataataaccacaacttcccaatcttcttcatcagattttgctagttcgtcacacacacggatcatgtaatctgcttcttcttcgtttttacgatttgatcccaaagtttttcaattctataaatttgtgaaagcgaatcgtttgatttgacttataggttgactcttttctttggaaatggcagcgtcatcatcttctcttcttcttctccacaagcccacctacaatttccatttcgccgcttcctctgttcccacttacatcaattccgctcgatttcgaatttcgagctcaatcttccctttggatcgaagaagaagaagaagaatctggtctgtctctggctttaaatctatggccgatttggttaaaaccaatgctcgcagagacggtgaagatcgattccaagcgctcgagcaagaggctttcatcagtaattcgtcgtcggagctccagaacgagttggtatccgacgcggcgatggtattg

SEQ ID NO: 36169 - DNA, 245 bp, Arabidopsis thaliana columbia
  unsure (1)..(245): unsure at all n locations
cccacagacttgtcatcctagccatcggcttgtctgttctttattagcaatttgacacttttcaaagggcacaaggaacataacctgccatgtatcgtatgctgcgtgcaccataagaactgcgtttttcatttgacttatcacattgtctgggaangaacactntgcanagatagcacttatcaaaacacaatacttcgaagtacccgtttgcaacggcatcagaatgatatggcgaaagataa

SEQ ID NO: 36170 - DNA, 511 bp, Arabidopsis thaliana columbia
cctgagtcctgttagtaagaggctcaaggctttggagagccaagtaaagggaaggaagaagaatagcagcaagaagaagtgatttaaaacggtgcatactatttttgttaagagggccaaacgaaaaaaataataaagcttttgagtcgaaagtgaacacagaattttctcactgatgaaactactctgtgagctaaaaagctggaggcagctattgtaagtttgtcttgaccaattatagaatagaagattggttttatagaaacattttggataacatgtacttttttatcttgttgagtagcagaacttgaacaacattggatctttttgaacatcttggtaatggttggatttattcagcacaagcatcgcataatctttgtagctatgttggagtatattgttgatagagcagagttgtaatagatagggttaataaggaggacggcgtcgaggagcagtatcacgatgggcgttgaagtaaacagcggctacaggttgagaaaga

SEQ ID NO: 36171 - DNA, 512 bp, Arabidopsis thaliana columbia
ttatggttctgcgtttatggtcttcttttcgagttcttttcctttttccactgtcgataatctctgtattcattttaaaaaaatccggttaacttggttatttttggctaaattcgatttttttccaattaatgaaggtaatttggttcggttctgtttgatttgattattggtgaaaatcggtctaaatttggtataatccgtttaataaaaaaacaattactcgagaaaccgatccgtctattgtatgattatcctccatttctaacaacatcaaagtttatctctttgaatttattatctgtggatttcttgcacatttagacttaattacttactaaaaagaaaggtaaacaatagaagagagaaaatcttttgttttattcaataaatttaattgataaaattttgtgatatctttctttataaagaagaaaaatttgtgcaagactaccatttttttattaataaattaagaaactagcactctatattcaacctatagtaattaa

SEQ ID NO: 36172 - DNA, 540 bp, Arabidopsis thaliana columbia
tggtttaaaaccctaattttttcaaaacctaaattgcgcacaagactatgtaaattggatcgaccggactatatgaaaacctcaaagcatattattgcctcaaagcccaagacaatactgttaaagagaagaaggaaaaggtcaccaggcccattaagatgaaagtaattttcagacccaggggaccaaacaaccccaatcatgaagaccaaatttctgttttagtggaaaagagtacggaatattaaattcaactgtacaaaacaattataatacatggtctataaccaagaaatatactgcaggttttgttataatcaatagtctcattctcaatactgatgaattttagcttaatattgatttctttttctcttgtgttagatttaatattccatgtgaaactgttccataccgaacgagggccaaaatacccactccaacaaacaaacatggttctcttcaatagatcaacaaaacataagacatcatgaaaacaaagtaaaattcaaagatatacatatatatatgaacatttga

SEQ ID NO: 36173 - DNA, 609 bp, Arabidopsis thaliana columbia
  unsure (1)..(609): unsure at all n locations
ccttcatagaacggaccatcaggaccatctttaatacaaccattccaatagcagaacaacggaatctttcttgtatccatgaacaccacaaaaccttcaaatagaaataaaccctaaagattaggtttttttttgttgttgatgcaaaatgcgacatatatgaactgtgagtgaggttaaagactacaaatttgtacttagcactgtgaaaaatggtcactttgcagaagagagtttttgtaattttaccttttcttccgccgccggcttcggtgacttcgtcggcaaaagacaacagtttggtaaaatggtctgttcttttttttctcgtagttaacgacggtgtgtctacgagatagtgattataagctacatatttgtggtaaaataaaatattgggaaagaaaacaagtcaatgaatattcctgacaaagaaaaaatgaaatgaacaacaacacaatgtttctcatcactcactagtaaataaactttaacaaataaccttcaagctttagaattccatcttcaaatttcagataaagatgatgataataaaacccataaacatatatagtacagacganaaagttgatattttagacattttta

SEQ ID NO: 36174 - DNA, 481 bp, Arabidopsis thaliana columbia
cttaattgtgttttttttaaaacgaagaagattcgtcttcgagctgtgaaccccacattccaatcaaccaaaaaaaaaaactcgtctttataggggccgtgtagtccacaaatagcgaggtcccacgtgtcccccataagtcaagaaagcagccaatcctataattgttacaattttacacgactctctctctctctctctctctcgcctttatacatttatatatctccatttactccagcaactccaattatatatcccccaccgtattatcctttttctccatcttcacaaaaaaattcattagaaacaaatcaattaattagtcacgttaattagttctaaataataataacattgattaggcaatcagtttttggtcctttaatgccaagatagatatgcgtgtatctccgactttttgtcattgtcggtttggctttcatatacacgtgtcaattcttagtaccactcgacgttg

SEQ ID NO: 36175 - DNA, 518 bp, Arabidopsis thaliana columbia
ggtctacattccttcccgctccaccgccgtcactgcccccacgtcagccacgtcacgtcggtgatggcgtggcgtttggtcagtttctggatttgggatcatcgggacagattgatttcgatgcagcagcagcagcgttctttccgaatctaccttctctgcctcccacggttcttcctcctcctccgtcatttgcaatgtacggtggaggctcccccgccgtgagtgtgtggccgtttactctctgatcgccatgcggtcattaaactatctttactatcttttaatctaagagaaaaactaccttgggttgcttaatattagtggctttgtattagtctcgaatcatttcctcgtagcattttgctgttgtacgtgtttgtagtaacgtctttgtgcatgttttaaacatgaacctgctaagtacttatttgtagaggtttgtccttcggtgataagattttaaatttttaagtgatgcagaagcaacatgaaacattacaattgtaatatgacaa

SEQ ID NO: 36176 - DNA, 513 bp, Arabidopsis thaliana columbia
ttgattatatctctctcaattcaacagcgaactcgagagctcccataccatcttcatttcttctgtagacgagcaaagcggttgatatgttagatcgggttaggctcaaaacctttttccctgactaaatcaagaatcccaagggccttgtgacactgagacttcccttcttccatgtaaataaccatcaaagtattgtaagtacaatgtttggaacaatcccttcttcctccaaatcactcagtatattctgtacttctccaaacccactcgactgtttcatcacacccaagaggctgttatatataaaaaggtttggacttatgacacagcctgattcacttcttcagtctcttgtccttgccaaaaccccttatcatagcacaatacacttgtagagttaattctccattctccttgagaacaacatccacatcatcaatctctatcatcttgaattggttttttctctccatttacagcgtgtgattcataatgatcaacagaaactga

SEQ ID NO: 36177 - DNA, 278 bp, Arabidopsis thaliana columbia
tgatttttggttaaagttttgatttttagctaaagttttgatttttagctaaagttttgatttttggttattgtagcttcctgaagatatgatttttggttaaagttttgatttttggttatgatagctagctaaagttttgattgtagatattaaagttacgatatttggttattgtagctacctagagtaaatggtcttctgcttcttaaagttttgatttttgtttattgtagctatctaaagttttgattattgtttaaagtcatgatttttgg

SEQ ID NO: 36178 - DNA, 689 bp, Arabidopsis thaliana columbia
ccaaactgaaatcaaatgggcagctgaaaacgtgagaccaacaaaaccaaaaattacttgagcgatctaacatccgactaccgtcttggagacttttctgatgatggtctagtcaaaaccactcagttcggcttaagccattcaggtttgactttgtgcctctacgacgtcgtcttgtgactttgtgttctctctagctatggaatttttttcttcttgagctgttgttagattaagattttagaagatgactgcttctggagctcttcttgttgcacatattgattcgtttcttttggaacccagcagaagaagagtgccaattcatggcgcaatttctgcttactgtactacaagtcctacttgcattgaccttctggatcggaatcggatcaggctcgtcgaaccattataatgccggcgatcatgtccctttgttcgtcaacaaagtgggtcctctccacaatccgaggttgttctcaaattcaaatcttttggtaattcttatgcattttgctttttattggcttatgatgacgggtgagtaatctaagaggaggagatcaagttagagaatgtgtaagatatgtttttgttctagctttagtttgaccatggaactcaaagatggcacattttcttaaaccccattttaaagtttggtgtcttgttttgtttgcagtgagacc

SEQ ID NO: 36179 - DNA, 510 bp, Arabidopsis thaliana columbia
gtcaaacaaatatccaaaactcaaaaaagagacaaaactagaaaactcttgaacgaataaaaacttgaaaatccaagatccatgataaaataaatgaggatatatataacctaaagcgacatgaacgaaagattattctacggcaacaagttgctttgaagaacagagacaaaaacatgagaatgtaagatagatccaacttcattcaatgaccctggtcgctcatgcagcagcctggatacgtgctccatttgatctgttgaatccaccacggcctcctcctcttccacgacctccccttccacggccacgtcctgttccaacaatttttaaacatttacaactcatcattatttaatgagaaaacattagtgtaacaaaatcatcaacgtaccacgtccctgaggcggaggaccatcatatccatggtctgctggaggagcaacattgttgtatccatagtctcctccatcttgttgagcttcatagtaaggtggtggggggcattgt

SEQ ID NO: 36180 - DNA, 911 bp, Arabidopsis thaliana columbia
tcttcccggtaatgtggtacaaccattcagacataaaccaacaagaaggatcatcagcatcaataactggcggatacttttaccgttcctccactgatccatgcctttatggaacgtatgttcggctctttcctcttcttctctttatttaccataccagtattgtccatcaagaataattcctctgtttgtgttttaggtatctctttgcagacttgtacgctggaatgatttttggtggagctgaaactccagttggtagtggaaacttcacgagctctcatattccgttacaatgcgcttcggattcgccaatcccttgctcatctgaaacagaaccttcctcttcttcgtctccaccaattggctttgtattctcctttggagaagacgacaataaagacatatacttacttgcaagcactggtgtttacagaatcgttggcccgagccgctgtaacttccattgctctcttgaaaacacaacgtcctcacctccttcaaaacagcctgatcgttctccaccgtcttcgtcattttctaaaaaactacacaacattggtactcttgttgtaaattacttagcttggtgtgttcttttggtagttatatagagaaaaaagaacatgttcgtacagaaacagaagcacatatttaacgtaattctattgagacaaaggatgtgaagtgtcatacatcttaacaacaaaggaggcggcataacgagagtaacattggctgcgtcacgggcgagaagaacgattattggaaacaacaatgaatgtacatagaatcttgggagctgatttcgaatagatcaacctcaacactgttgcatggaacagattcatccggattgtttactcgagaaagcacaagaagaattatatgacattattcaaccaggaaat

SEQ ID NO: 36181 - DNA, 625 bp, Arabidopsis thaliana columbia
tgacacatacaaatagagaaatggtccccaaataaaccgagttattgtcagcttttcaaaagccaactttttactcgagatcatactaacagaaacatgctttataagatctcaagatctaacagaaacataacttgagatctaagaaacatgttggattgcctctaaaatggtacttaagaatcattcaaacacgcaaaaaataaactgctcttgttcaataaaagcagagttctgattcgaatggatgatcaccaaaatgatgtgaacataattaactaccagatgtgacaagccaatcacaaaaactcaaccatgtcaaaacctaattgtatacaatagagatgataaaccaagcaagtatggatcatggcatgatattggatggaggaaacaagagaccgtttcacaatctattttgaacaagactttagaaaactaataatcttagcaaagagcatcaaacaagaagattctccatcgaacctaatttctgagtacaaaagattcatactttttgaaactaataaatgatcatatataattttgttgcgatgaagccccacagttacattcaagattacaacacacaaacacaaagatacataagaaagagagagagaga

SEQ ID NO: 36182 - DNA, 569 bp, Arabidopsis thaliana columbia
ttaataaaccataaatttactacctgatatcgtaattttccaaatttaatttgactctgaaattatttctttttctggattcattcaattttgagttaaagatctttttctgaattcatatttccttaatgcaacgttatttaatgtgaagtgtgtgtgatgtgaaccaagattgttaccatgatatggatgtaacgacccaaatctatttgggcttaatttgggcctaattctcatcaaaagcatacacgctcctcttctcctctttactacgtgcgtgtgtgtcactgaagaaccctagcaaagacaagacaagagagaggcagagagatatgttgagtgaggggaagggagatacaactacgagccgatgccaccgagttttactgccgccgtcgcgttgtgtttgtataaaagtgtttggcgggatgaggagaatgagagaagtacatcatagtaaatgtatattgtttattaaaaaaaggtaaaagcatgtgaaacaaagagtctcaggccacattgtattagtaaatttaggggtaacttctaatatatggttgttactttct

SEQ ID NO: 36183 - DNA, 555 bp, Arabidopsis thaliana columbia
gtgggttcgagtcgagcgaatgagatttcttttggattttaagagctttagctcaaggtcagcgtgtttatccgagtttgggtccatggggttggatcgggcatgagcgggccgacagatatttcggtcgagtagaactgcgtatctgagcggacaaactgaccttatccgaatattccctagatgctctgactttatacgaatattccttagaagctcgtctctcttataagtgttttcttgagcagccctaaagcgttttcacgcataagaacgccaccattattcttagcattttcagatagaattcgcccgaacgattgctagaagcccgagtgttgaataagaatccgagtgtctagtcgaaggaaatctggtaagcatcgtgtagactcattaccaacgactttctattgatcatttatgtaaacaaacgtttatttggttgtttgtagggcgtccttcgacttgtaagttgttgggcaagtgcgatctggtttttgggcgacaaagggtgtctgatctgtgttagagtgacaatatggtgagtgtgtg

SEQ ID NO: 36184 - DNA, 394 bp, Arabidopsis thaliana columbia
ccgtgttgcctttattaagatgaaagttgcagtgcttgagtttagtagttttacttacctggattgtgaactcagttcatgttacatcgtgttacaagcaacttgttaaccatacaatatcttattcaggtaaatggctataataatttccgtgttgtccattccttctaccgatcaaagtactgcttgacattggaggaagatggaacttcccaaaaaagtcaacagtctctaccagtgaactacctagagagagctgttggggaacataggtccaaagatatcattgctagcagctacagtacttcacaggacatgcgagacatgtcgcgtgggaatagcgttcacaaggttacaattcttaaccttcctgaaacggctcaaacgagcggtt

SEQ ID NO: 36185 - DNA, 492 bp, Arabidopsis thaliana columbia
tctttattccgacaattccatcggcgatcaacaaataaaacaaacctcaagtcctcaccggttatttgctcggaggatcttcggtgtaacagagctgtaattaattcagcggcaccgtctccgttgccggagaaagagaaggtggaaggtgagagacggtgtcatgttgcgtggacaagtgtacaacaagagaattgggagggtgaacttactgtccaaggaaagatacccacttggctggtttgtctttttatcatttttctatattgctccaaatatataacttatagctatattcgtggaaattttatacaaatatgtatcgtgcacactaaacacactcacactggcacatgcatatgtatataatacaagacaaaccccattcatcatgcattatttatagttattctatatattacgtatacatttttctttccttatacatgatttcattactaagaaagagtaagagctatttgtccaaaaaaa

SEQ ID NO: 36186 - DNA, 566 bp, Arabidopsis thaliana columbia
tcttcgtaaacaactaggatgatgtgatgtgttagtaaatagattgtaacagcctaatatcagcaaatatagtggtgcatgaagatatcttaaaataattcatttggatatcaatgtcataattgttttttatattttcaatcatacatcatgaaaaaagtttcacaaataagcatgattgaccagaagtgatttcaagatcagttaacaaacatttaagtgattttaggtattgtgcaaggacaaacacaaagaaagattacgtggtgattgcataattggtaaacatgttgtgaaagactaaaatatagcaattcagcagtaggaagccgttcctcaagaaaggacatgggacccacaaaaatggaggtgaatttcaatgtggatagaccaatttgagttcaccttctttagactcttttcttttgggcagctttggcgtctccttattttaaaaatttatgttccaaataaatatttttgcatacttaccttattagtttatgcacatgtacatgcatttaatggaaagtaattagatagattgaagtgaaaaaattaagtag

SEQ ID NO: 36187 - DNA, 596 bp, Arabidopsis thaliana columbia
ttcaaaggttaaaattatttaaagattgtttttaggtttaaaaataaagtacaagtagaaactgataaaaacttttttttatatatacataacataacatcattaaagttttcttctataaaattcaaatattttaaacatttgagatatgaaagatggatttaaaaaaagaataatggatgattcataaaaactttaaatatccgttttattataataaaatcattaaatgatgctaatatccataaacatgaataatatgtgaaaccaaaaaatctaggagaaaaaaaacactaaataaaaaaggaaaaatcacattgttaatttcatttaaattgattaattatttattacgattaatgaaaaatgaccaaaaaagaaaaacttcagctactttgtgtactcactcacaaagcttccattgcttcactacttcacaaaaacggactggaaccttactagaccagtcactaagatcaggtaagcctcctgttaatgccacaaagttgagaccttctgaatctggtgttctcttccaactaacctgcaacaataaataatcgcgatgtttttctttttatcttaaacgcgtagtt

SEQ ID NO: 36188 - DNA, 629 bp, Arabidopsis thaliana columbia
  unsure (1)..(629): unsure at all n locations
ttccacctattttctccttttaagtttatgcttttacttgtttgaaactcctcaaccaaaccaaataagttagttatgaaaacttaattgcatagagattaacaaaattaaatacacatcgacgaaataaaataaaataactggagggacaagttatatggtccatgtgaacggatttcatccggtcggttcaatttgatctcatttgctaatttattatacacaaattcaaatggtctattttttataaaatatgacacctatatacttacttgcgtagacacgatataaccggccaagcaaagttttctaaaatatataataatctgcaaatatgatgttaacagtccataattatagactatagtctcgcagtggctagaaaagtcaagcatgcaatttttaattataaatatttgacacattttagtagaattataaacaaatatattgattgctgcgagaagaagtttcaactttgttcgtatgatgaaaggtaaattttgtgatcgaaaacgaaagtagacatgtttgaaagtcttaaaatattggtagaaaggttttcgaaattttcgtgacnattaaattgataattttgagtatggacttgatcgaaaattagagatttg

SEQ ID NO: 36189 - DNA, 508 bp, Arabidopsis thaliana columbia
actactatttgacatttacaggggaaaaaaagtagtatatgaggcaaaataaacacgtacgtatgaacaatgatttaataacatttataagaattcatcttaattactctatagattctaaaattggtgtgttacaccttggattttatctccaatatataatttattcatgaaatttttattggaatatatttcaaatgattagatctacaagaaacttggaaattttctcagcctgaaataccactatatattttaatgaattttaagaagttttaattgaataaactaagatttccatatattatatcaataaaattttgttaaaatttattttcagtgcattatttacatatattatagcaacactatatataagaatcaatgatttaataattaatggattgtgcttagatttaaattttattaaaattcatgattgcataacaataacacacaacacttccctcttctatacactcgactagttccaaagatatcctataat

SEQ ID NO: 36190 - DNA, 483 bp, Arabidopsis thaliana columbia
taaaataaatgtccagaactgtaagccaaaacccatcatgcaaaaagaagtagaaaactcaaaaatctaataatctcgtatggcatataaggtcagaacacaactatatacatatagtacataactatgatacacacatatttttccatatgaaacaaaggtagtaagtttgatcaaaaacagaggtagcaaaggaacaaaaccatgttggtgttcaatgctaaacccaattgactgcagtactgtttgtctacttttcaccaagtatcacttaagagctttacacagccacttttatcagatgtgcagaagctataccagctgatttcactaaatgctaccatggtggaagacgtttgactgaatacttagatatgaatgttacaaacgatcctaagacaaacaatgacctataaaatggcatccatgcttacccagttagttccttctagctggcaatagaaagaagcagcagtatatccg

SEQ ID NO: 36191 - DNA, 500 bp, Arabidopsis thaliana columbia
gtggttgtagcgggcttgacggtcaacgaagcctcctgatgactccacacgactcgaaaactccttgtgctcctcgaacccgaagcctgcgcttgcctggaaatgcccatgtccgcgccggagacctccgatccctctggtaagcttatcaagcatttttctgtaaatttatacttgtgttagtttctttgatagggataagtaattaaaatctttcaggtgtttatatatatacaattttgtactgtagtagtagagtgttcttttaaatttgtgttagatatgatcccatatggcaataattcgtaatatgctttgaatcttattctcttttctaccaccaccataccgaaagttgagtagacatatttattctgattccgttcttcctaattaatgattagtccaattcacgtggaaaatccgagtatttatggaggcatattatataatctagtttagtccactacggttttgattttggttatactgtgttttga

SEQ ID NO: 36192 - DNA, 592 bp, Arabidopsis thaliana columbia
agcaaacacacagaaataagccagccttattctcatagaccacactggaccaggttcaaaatagaggactaccccttcaaaatacacatgttttcagatttatttgaagtagttaataatcttaaatttgcagccagaagcaacaaaagttcacaaccaaaataagggatgatcaaccataatatgatggcaaacagggtgcagtagaggagagctgatggaagagagagatataaaaatctaagtttaaagctcatcacttccttactatattcttttttcttacgaaagagaatgatgtaacaaatacctgaaaaggctttacaactgtaagcaataccatcagagcgttcacagtactccagctagagtttgaactgctaattaaactgctcttctcgatagcagaggcacgtccggtacaagtttaggccatgcatttttcctaacaaattctgacacaacaacaatgtgcagctgcccacaagtgaagtaaaatgaagatgtgaacaaattcaaactaaaatctacaggacggaggggttataataagatttgcaacaactagtccagatgaagttaagcttgttga

SEQ ID NO: 36193 - DNA, 517 bp, Arabidopsis thaliana columbia
caaactgggcagcttgaacagcagaaatgtgtcctcccgcagctctggaggccagaggtccaagctcaaggctgcagggctgtgctcccactgaaaggaatgtgtccctggccgctcctagaccccggggctttgctggccagccttgacacccctggctgtgaatgccacaccctgacctccgcctccatctccatgtggccttctcctccgtgtgggtctgtgtccaaatttccccttgttctagggacagcagtcataggagatgagtgcctgccctgctgatgccggactcattatacctgcagtgaccccttttgcacatgtggtcacattgtgagacattggggatattggggattagggcttcagcatacaaatttgggggagttgacccctcccagagtttctgcacagatattgacagctggaagagatggcataatgtgtttatacatgtccagactaccagaaatacagacgcatctcattcctctcttacactctgcaggtgaga

SEQ ID NO: 36194 - DNA, 479 bp, Arabidopsis thaliana columbia
ctaatgaatcaaacaatgaattggacagcaatcccaagttagaacatatcacaaacaacatctttctaggtgagtctagaaacttattcacacaattagcacagccataagactgaacatcttaccaactcaattagatcaaagtgcacaaatttataattttaactccaaatgcactacgaaccaataaccccacgaatctctacaaacgaaaatcaccagaatcatcatcatcatcagagggagagaatttaccaggagctcggggtcgttcgagaaggatctcttcggtagaaaccatagtgagatggctaccagcttcctcattggctgcgtctccgaacttaggccagtatctcctctccatggctcgtttgttgagtcgagcagaagctagcttgcagacacgtgtcctagtcgatatcctaaacttatgttctgcatcgttgaatttgtactcgatcgtcgtcttcaaacca

SEQ ID NO: 36195 - DNA, 156 bp, Arabidopsis thaliana columbia
aaagaaaagacatcttcaccgatacgttcggtgttcagacttgagtctctctcggacacacggctcccgtcaatcccggtcacaaaccaaaccttcgcatctctatctgtctcttcagatcgacggctctaatcactccacgtcagcttggactca

SEQ ID NO: 36196 - DNA, 484 bp, Arabidopsis thaliana columbia
aagtatttgaccctattaacaagatccaattgtcttccccagtaacagcaattgaagaagcataaataaatgattagaaatctcaaatcagtacgaattttgctcaaatagtatcatcatcaactgaaaatggacttaaaaacgtaaaccgctaagaagcacatccacttaagctaagaggaagatcgtacatagaaacacacacatatatccggatctgcatcaaaagagggagaaatgggaccttttaatggatttgacgaaatcgccggcggagggtttgcgcatccgctccaggaaatcatgcagccccaagaagacgtccgtattctccatcgccgatcacccgattatctccgacgattgaccagtgagaagagtaaagttaatgagttccgtgtcgctgactaccaataaacaaacaaaaccacggtcgtttatttattaagttccggttattggtcctggtgttgttaagttagtg

SEQ ID NO: 36197 - DNA, 631 bp, Arabidopsis thaliana columbia
  unsure (1)..(631): unsure at all n locations
tggcctaattcataagtggtttacgcatagatatgcattcatgaacgaagaagcttctttagctaaatgaattctatgggagtgttttagtactagtatctacggtttttctaacgttggtagttgatgatatatgtgtgaatgcatatcaaattgaccacaacataaaaaaatgaatttatggttaaaaatgacttctgaaccgttggttggttacataatccattaatagaaacaaaaataaggacaatgcatttaatatattattcgaatacaattcttcgcttacttaaaaacatacatatagttgactacgatttattccactcagacaatacgaccctccaatatttaagttttattttctcacatattttgaaaaacaccaaaatatatttttgttctctttaatttccttcaaaaagctaagtgtataactcaaaaaaataaaaaagtcaaaagtcaaatttgtgttttttacaaatgataaaaattctaaatttcttaactagacactanaccaaagtatttttagttttcaaacacaagttataaaggagttaagaatggtaaattactaattagtgaagagtatatacaacagggtgggtgggtgacggcagtgggagag

SEQ ID NO: 36198 - DNA, 573 bp, Arabidopsis thaliana columbia
taaataaaagagagaataatataattatccagctagattgcttcgttgcctcaaaggaaaaagtaacaaaagacaaaaactttcaattatgtgaagaatcgtacacctttcttatcgtcttctccatcgtttctccctgaagatttgttctactactctttttgggtatatctgtttacttgaatctcttaccatgaaagttcttcaattatttccttacttaaatctaagttgctttatgttgcgtttgattaatgggatcgtacttttctaaagttctagccttttatacgaaaaagcaacttttcgtgattttcttcaattgaatagctaaaattaggaaattttcgttttcagtgttgtttttctttttctattttctttcttttctcttcttcttcttcttcaagcgatgaaccagaaaagttttgattttgattttggtgaaccaggaaagtggtactcgatctgtggtttgttgattctgaattagtatatcctggaaaattctgtaagtagatttatgataactaatctgaatttcatttagctctgattgttgtgaaaattgtg

SEQ ID NO: 36199 - DNA, 616 bp, Arabidopsis thaliana columbia
  unsure (1)..(616): unsure at all n locations
tgagatataattgttctcgtgtgcttccccgagttttaaatcaacggtctcgaggaatctacgtttgttcccgaacttttttggaccttccgatgcatttgtcggagtgccaggcaaagctagggtcagctcagttcctccaagatcaccggaatccggccaaaccctaacgtattcctccggtgacattaatatcttaatctatttatgaaagttagttaacaacaaaagtgcggaaagtgatgagacaatgtggcactaacttttggcttgagtgtgtgagactctcgaggtttccaactttgtatttatagtcgatctatacttgtcagctaaaaaactagtgaaccctacctataatgacacgttttcctgtaactggcggtttttatatctccacgaaagcaagtgaacagtttggtgattagcttctacttcgtgtggtgtgggctcatttatagttatagccacttagcatcttctaaactgtcattagtggatgtaattgcatgtgtacggatatcttttcagttttaatttctatcagcctggtatcaaaagaagaagaagaagaagaaatcactgtcgactannaaaagagaaagaagaagaagaa

SEQ ID NO: 36200 - DNA, 513 bp, Arabidopsis thaliana columbia
gattttgtctttaaaatttaagcaaaagtgttttcagtggaagaggtcatagaagaagatatcatgtagttttcttggttacatccttgtcacattaaggattatatgttcatataaatctatttcatcggtcatctctatagatcatatcatcattatacatatatcatatcttgtcaactaatgaaaatgaagtcagaagttaggagagaaattgcagaaactctaatccaatgaaatctctacatatcattcttttaacatttactatgtgactatgtagtagtatatgtttcttattttcttttcaatccgactgtgtttaacacttaggacttaaccgtaataaaacgacatttgaaattaggatttgtgatcgggtaagtgattcgaacattagaaagcaaactaacctatgaggctatgactttagttggtcgagagtcggctttcatatgcggcatttgcggggtcaatccgcaaagaggcagcctgaagcactcactagggata

SEQ ID NO: 36201 - DNA, 477 bp, Arabidopsis thaliana columbia
  unsure (1)..(477): unsure at all n locations
gatgcgtagtagagttgntgtaatactagaatgaatagttttaaaaaaaaataaattatttaacatatggcaaaatctcaaatcaagacttttgacacatatcacgttttcgtgaattaataactctaaaaagtatactttatataataaaatgtaagtatgatgttttaatcaagtacacaaaactatacggctatactaaaatatatttttgggtattaaattctaattagatatataaataaagaaattttatttgattagattttattaaaaaaattatatcaaatccgtgtgagtcaatcctaagaaaattaaacaccatgcacatgactatctttgtcttttgcataacgaaaatgttcattggcctaatttatagtcattgatactgatggacgtacgttaattctctaatattaaacattggattataatttagttggagtcattagcatagatagtagaagatgatgt

SEQ ID NO: 36202 - DNA, 597 bp, Arabidopsis thaliana columbia
aacggccgccagtgtgctctaaagaacaccaacctcaaacctctgaagttcaagaaaatcaaaggcactaccggcagaaacacaccgccctgtagcgccgattggctcctccacggccatcgaatcaaagcttccgcaaataattggacctccaaacctcaaccctcaactgacctccccgtcatctcacgcttgccattataacttccgcatacgccataattgctgggaagatgttgctgcctacagtccgaagccggatagcggcgctctcgtcgcgcgttgcctcgcgggccgcctactcgactaccgtccctcgcttcactgagaacgctatgcagccgaacgatccgaccccgcgaccggccaaacccaatgtctctgagactgatgctacgcctgttgactcaatgggagcgtgggatgctgcgctgcaggaatctacagacgccgctgagcgtgttcgaactatgcaggctcctaaccggaaggcacctgggcctcaaaccagaagccgagagcagaggcgatgagtggactcggtttgagcagacgattatgcatcttcaggttcgtcaatggctcggtgaatgtgtt

SEQ ID NO: 36203 - DNA, 566 bp, Arabidopsis thaliana columbia
ggaataatgaaaaagaaaaagaaaacatcaagagaaagaatatgggtttatagttaataccagtgcctaaatattatagaaggtataggggtagatggtagcatttgaatagccaattagcaacgcataacagaatgagggataattacatagtatgaaacattgtaatcatcctctaatacagaaaatcaaagtagtggcaaagctctgatgcaacagacaccaaatcaaatagaggacacagacgtaagtctacgtcttttgatatatatagtcaacgagacgaggtatagagtgcactacaagctaacaagttaccttatgaaaaaatttagaacaatgcaacatgagcatagctacaaagatgcaaaagtttatatggcacactacagaaatcgtttcgagcattgaacattgtgatcattaacactagaaaattttaattgccacatggggtggggcagatatacctcattcaatcttagatccggccataccgtagctgtgtgtaggagttgaagatatgctccattccatctatcacagaacgatccacagaatttgta

SEQ ID NO: 36204 - DNA, 585 bp, Arabidopsis thaliana columbia
  unsure (1)..(585): unsure at all n locations
atctaagacgacgtattagtttactaccactacattacgaaaccatgtttatctattgcttttaaaggattactcatgtaaaagaaagatatacacgcaagatactattcaaataacattatacactaagatatagtatccatttcgtaaatgtgagatgtagtaatgttacagattaaaagaggtctgtttttatacatggtgaacaaaaaaaaagtaggtttatatgatgattaagtgttaaatgcgaataggacacgtaagcagaagcgcatgtgcttaagacagtgaagacaacgggacccacaagcaatcatcggagagaaaatgccagcctggctctctttgacagtccatttttccattaaaaccacacattttaatttggttccagcacccatatttttatacagtatcaaacacaaacttatttctagaaccaaattaaaatcgaagtctctgattaatggagaaagaccanattaatgttgagacgatttcaattaattgcatatgattgtgtggaaatactaagatttgatttcattctgattgactatatagtttagtgttgtgacttgtgtg

SEQ ID NO: 36205 - DNA, 298 bp, Arabidopsis thaliana columbia
  unsure (1)..(298): unsure at all n locations
aacactcgcgtctcaatagaaattctgttgtgnacaacaaantaagcattttattagtatagacataggtancaatatttgatagtagagataacggnggttgagattctaaatgttcccgtaaaaacctnttaaacagctnaacattgatgaatnagagtatctgcctagacagcttacgcaccaaaaatgaanggacctaaaatcatggatacaacattcagactccgagcaatccgnaacttnttagtatttagannaaattnaatctgaaaggaagtcgacattngttnatttt

SEQ ID NO: 36206 - DNA, 418 bp, Arabidopsis thaliana columbia
gaatgttttaatggcttaattgagttgtacaactggataccaggtcccatatgattttgcctctggacacatctccagatgcactttatgatctcctggctacagtcaagacgaacttcttgctgttctcacacatcaagcatattctcaggcccttgtatatactgtatcttctgcatctatactcagtctttctcacttccatcaggtccttgcttggagatcacctctgcatgaaagcttgccctgacaaactctccaaccgctctatcctttgctgatatgacttgggtgtgtgtcccaccatatctgcctggcgaagtgataatctccagtgtcagtgctggggtctggtatgaggtgtactgagtcacgggagtcgatctctcatggcttggtgacatcgcctgatagtgag

SEQ ID NO: 36207 - DNA, 489 bp, Arabidopsis thaliana columbia
ctatatctagaatctatatcaccaaaagtattccatgaaatgtctgaattagtgtgtattgagcactgccattttagccatcgagaattatgctagaaagtattgtgaactacatgaacttgcttgttaatgtgaatttgattaggagatttcaaattacagtttagtaatcaaatagtcaaattttagtgcttgattccttgagatatgattaatctgattgcgttcatattaatggaacatggcgtttactctgacttgagtgatcacagctcaagactgtcgcttgcgcaggtgctcacactcttttcttcgtggtgttttatgtatctctaaatccctttgatatttctctttggtaattcatcacggtttaagatcttagagattgcaatgcgatttgttatatgactgataaaagtatagcaatatgtatatttacttacgttaggagaggaatttaatttattgattatttattatgctgag

SEQ ID NO: 36208 - DNA, 522 bp, Arabidopsis thaliana columbia
atagaatccatacatattccatgatctcaaactgataaaccacattgctgtcaaaaggggaacgtggtccagagcgagtgcaatcaaagtacttcatcatggaaggatccaggtcgccaacaatagtaacagtttcacctgtactagagagaagaactaaccattacaacaacattacaaacacacctagaagataatttagaagcagagcaacttttaagcaaaataggataaagcatagttatatatatctagaaatcgtagccaaaacttcaagcaactctgctctagtactttgaaacatatcattggctaaatttgttactctagcagcgaaacaagcaattaagacacatacatagaagcgggaaaatagagaaaaaaataaagacctgtagctttgtggcgtggtctttgcacgatattgcggaaaacaacacgaggctcagtttctcctgcccacctaaaaaaacgcaagagaatttcaaaatttaacacgatttttacgaattggggaagaga

SEQ ID NO: 36209 - DNA, 491 bp, Arabidopsis thaliana columbia
cagattagttcactcaaatctataataggcatagggatattggatgtctccacagattttaatcttgaaagagttccacaatttgtcgaagaaacgttttccttttggaattgacgaatgagtcaacttaattaggttagtctaaatacaagaaaattatcgagtgcccattcgaatttttttattatttttcaggaaatgaccaaagacttattagaagtcaagcacgaaattactcaccaaaatcccttaatctctgcattagtttatttctccctaaatttatattttctccatctaaatgattacggatccacctgccaaggacaaaaaaataactgtgttacgaaaaaattagtaatcaatacttggttggagtactagaactcaaacccgtcaacaatccagatatgacattcctattctaattcgacaatagaattaattattagcgttggaacaatcctcatatagatattacagctttgtgt

SEQ ID NO: 36210 - DNA, 440 bp, Arabidopsis thaliana columbia
actcggcactgcacttaacccatcggagatagctctataggcaggatgtgaagaacacgagacaaagtaacttttcccaccaacttcttcatcacacccaagctgtctgatgtaaccattggcaagttcgtctaccgttggaccagagcagttgtaataaaaggttcctagctcggtgtcttgaagaaatggaaggacttcttggttgattgatctgttctctggatgccaaggacaaagattgttgagatactctgttcttacaagtcgtattatacgagactcatagttcatctcgaggacgtggaacttaaccgtggatatagtaaactctgcgaaatctccgctgcagttgaccttgaaaaccgggtgaccgcactcatctcggtcaggtgtcaaaagggataatagagatctgtctgcttgccacatctaaacgt

SEQ ID NO: 36211 - DNA, 481 bp, Arabidopsis thaliana columbia
ggctgaaatagatacgtagctcctgaagtagtcccggttaagtatggtggactcagcaaagatagtccattcaccgttgaagatggagtcaccgaggccgtagttaaatcgacatctaaatataccattgatttgcctgctacagaggtatacattgttttttatgttatttttgcatttgcattatagtttaattttacattttatgtcatattttcaaatgacccccaattttagcattttctacttaatttatatttgttaatcttaaacgtaaatggtaaaccaaaacacagagagaagatttgatgattcgcgtttgtttatgcgctaagaattggtataatcatttttgcatgttaacataaacgtgaaaactagcgtttggcacaataaatggatggaacattctatttgaataaattggtataatcttgctagagattaatgatgtggtttgtgttgtttttgctacataggg

SEQ ID NO: 36212 - DNA, 483 bp, Arabidopsis thaliana columbia
catctcaagtcaatttcaacagaaagcagatgctcactcatgtattcgagtatgctggagtggcgagatcttaatcctcctccggctacaatgatgctcgtatccgatcagtggcagcatgtcttcgcttgggatctgtcccgtctacaacaacacacgaaatacaacctttttctggcttattcaactgagcctttcgcaggttcggcactgagaccttgtggagagtggatctggagaaatttacttgagaccaaaagggaatttgttcaggacaagtgcagcagcagttgtgaggtatctcccatgttttattgcaaatcttgctcttaccagggccaaagcgtggagggtttcaggaggcatgtctcgagtggaaagcatgcagtgaaagtaagtaaacatcctcctctagacccagtcaactataatgttgaataaaaatatagattttgatctctaaaatataaattctcgcaggag

SEQ ID NO: 36213 - DNA, 516 bp, Arabidopsis thaliana columbia
atacagcttttttgttgttgaagttctgagattgaaacttaattcgtttacaactttctttcttggatcagtttattttggcacattcttggaacaaaaacaagataagtggtctgaaatattttgtgatttaaaggaaagttttgactgtcattgaactgtacattatggaatatgattcaatcttttgtcggtgtgcgtcaccatcttacttcgtgtcccgtttttcatttcccacgcgtcaagtcaacctttacaaatacttacgccaaaaagatataaaaattgatgaatttgacgagtttttaaacctttttgatgattatagattaaaattttactatagtttattttctgcatataaaacgtgtctgaaaccagcttatgtatatgaatttgatactgattacttaatatgtgttacttaatattaacgcagaggataagagagagagagcaatggcaggagatcaactaaacgtgctaaacgcactcgacgtcgccaaaacgcaatgg

SEQ ID NO: 36214 - DNA, 253 bp, Arabidopsis thaliana columbia
ccagaaagtacccggttctagtgttactttttaaaaaacactattattagtatagatagtcgagtagttaattagttagctgtcgtaatattatagtattgttgagacatgtaactctgaatgaatcgttgacttcatatacggacagcctgtaagtctgagattgtctctaggatcatgtctgcgttacagctcatattatggcaagacccgtgagctaggtgctgaaatatagacattctcgtagctagat

SEQ ID NO: 36215 - DNA, 447 bp, Arabidopsis thaliana columbia
agatgccttttttatatttgaaatttgattctgatctctaggtaagtttttctattgcatgtgtttgtttaatataagcatttattatataagtgtagatgctatgactaaactaatttagatgctgtaaaccaaacaaacaaacaaaaaacgaatgaattaacttctagattattaaaagtttatccaagataatatggtcaaagatcggaaaggtttttttttagttaataattattgatgaaatttgcattaaaaaaattattagatataccccaaataattgaataaattttaggagtaaatgatcaaattaatccaaaacattaataaaacgatgggatatactgaaagagtaaatgaattacttctatgtattatattccgacgtctgccttgcatctcacaccaaagccactccagtgcctttcaacgtcgcctcaggtt

SEQ ID NO: 36216 - DNA, 560 bp, Arabidopsis thaliana columbia
ggcagtgacatcagcttccattatcgcggctttgcttcagaatattaatattatatctatattagtttattttcattcaaacaaagaagtaattatgagataatttagtaaagtagtagttacttactacaattaacatttgcctttagatttagcgccacttactaatcattcttagcaattttacgcttacaatatacatgacgctcttggttttgacatttgttaacttataaggaggtttaatcatgtaattaaagagataaattattgtttccgtaaaagcgacatgtgtaggacctgctggattcagacaaagaatttcagtgttagaaatttcgtgcaatttttttatacataaaaattagagagatatttcgtgcacgacaatatatcttgtataaattgtaatataaataaattgtatgtatacgttaacgttaaaactgataagttatcaacttatcgtacaaacacgaggatttcaactaagtgttatgaaatatgaggaaacttaaagtaagacgattataatgtaaaggaaaccatttggttagtga

SEQ ID NO: 36217 - DNA, 543 bp, Arabidopsis thaliana columbia
cccccacatcaaaaaatcgattactttagcaaagtaaaacaatatcaaagatgaaagctacaaaaacacgaagaaaaaagagacgaatatagccggcgattatgggtactgaagactagtttgcctttttatataggatgatggagcaaatctagggtttagtttgacaattaaagcatacgacaccgtttatttttaaatgggctcgtctatttatctacatgtctggcccatgtatgactttactagatctagttctgaaattgaaagttataaatttttgtatagattactttcttcttccttatttttaacacacaatttattatatgaaaacaatttaactacattaatgaaaaaaatacaattttttcaataatacaattttgcataacgtgctcccatatctctactctacaactgggaaaaaatatattataaagcttgtttttgcacagacatattcatgtgtatacaacatgtcaacaacatacattggcaatatatgcacatgcatgctccaagttgctaattaacactgaa

SEQ ID NO: 36218 - DNA, 564 bp, Arabidopsis thaliana columbia
attggttctcaatctgactttcctgagtgatgcttgtataggatctggcaactgttgattcaatcttattaagagagctaccgcctgtagatgatcaagtggctgtaagaatcaccctttcttctccatatcatttacatttaagatttgacatggctgagtataaatattgagttctgtttacagcgtttggctctaaaacggttgattgatgtcagtatgggagttatagcacctttatcagagcaactaacaaagccattgcccaatgccatggttcttgtcaacctcaaggaactatctggtggcgcttacaagcttctccctgaaggtgtcccaattgtttacctgaaagaattcataatatagagaacagttttctttcgttatttcttagcttcggttatttcaggtacacgcttggttgtctctctacgaggcgatgagcttacgaggagcttgaaatactcaaaaacattgatgctactatgattctccatgatgtacctttcactgaagacaaagttagcagagtacatgcagctcggaggtaataattgaata

SEQ ID NO: 36219 - DNA, 331 bp, Arabidopsis thaliana columbia
tgagccattaaataactaggaacatagggattaatatatttgtgcgttacaatcttaataattgtgaactagtactatcttattagcaaatacacttgttcaccatgtggttcattatttaattacttatgaaatcgccaaaaaagaccatagatttgtcataggaaatacaaaaatggataataaactttcacctaccgagtcaaaacaagaaggaactaaacaagaaaacagctccttcaaccaaaactttttgcatatctatcaaatatttgagaactttaaatttggtaaaatgaatgaggagcaaaataagataatttaacacagt

SEQ ID NO: 36220 - DNA, 428 bp, Arabidopsis thaliana columbia
ggaaacaatgagttgtataatctgtgatgataatgatattgattgatactctgcgtatatatagagaaggatatggaaataacaagacaaaatggaaattggagtagagtaacgaaaaatggaaatcgcaatgtgatgttgacacgtgttcaggtgtgacacttgaagccgttcaatatttgtttggttggtttaaatgggcctaggcctttgagtgaaattacataggccatctggttttacgttttgtaagatttgggaaactacagattttagtatgagcaccccattggagtaccttatttaaggaatccttagaattttttattattagattttgaataaatgaaagtttagaatttttgttgaatctttatatattttgttgtccgatggtgggatctttaagcgggcttttttaaaaaaaa

SEQ ID NO: 36221 - DNA, 563 bp, Arabidopsis thaliana columbia
taacaaaatgctctttacattggactcaagctgcaaagtataagtcatcaatatcagaccattaccctggcttcaacttcttcttgtgtttctttaacgaaagggtgctcacgaagagcaggccaggttaatcgactgtggggttcctgtttcgcatagtaatagaaaaacagtttaacccagtccagcaatggtctcaaacatatcaataaatggtaaaaaggacaacttaaagaaaaaataaatatatcaccttgttgagcaatcctttcaaaaagctttcgaaataagtactcatttcatcaggatatttgacaggatccttgaagattcactaaaacgttagctcatactttaagcatagactatggaaaaataaaaaaatattgatataccttaacaatgtgacgaatgagagcatacacagaattggtgtagaagggaggctgacctacatataactcgtacctgatgtattacaagagattaattagaaccatatcaagtgcattgaaatgtggatacataaagaatacagaaaacaaaaaactatgaaagaaaag

SEQ ID NO: 36222 - DNA, 499 bp, Arabidopsis thaliana columbia
aaaagggcacttggcagggtcttcaccaaaatagagaattaaaccatccacgtttcttccctgcaatacataatttatttattctgagcaagttctcaaccaacgatagaatagagcatgcaataatatctactgtacattagacttctgggacataccactcccgaataaagtgaagccaatgaccttacttctgcttccgcataatgaaggaactccttcaatatctgaggggaaacagcagttgataaaaatggtcaaacaagaatcaaatgaatcaattatcaactctttaattgtctatgcagtcgcactgtcaacacaatttgttagttagcaactgtctagatgccttattagttgttgtatagaacatttcactgaaaaatcagggatcaaagcccctacaatctatgagccttctattttgtccactttagaaagccttacagagacaactagtgatcaatgacagtgataccttgttaaagttatggga

SEQ ID NO: 36223 - DNA, 532 bp, Arabidopsis thaliana columbia
tcttattaatttatcgatttgtgttgttttttatagtagttccaactcggaccggaagaatttattaatttatagaggttattaatttatcgagtattaatttatagtgtatgtgtgaatagacacaaaagggaagaaaccagttttctttcacttgtctcatcaaacgaagtatctgacttgaaatttctagaaaaagcagtaaatcggatacatggtgtagcagctttctaaagagaggagaccagttttttcacggtttagcaaaaaccggccctaacctcttcaaacgaatactcaacaataacgtcttcctcatccattctcttctccacagcaggagtgaacggcgttgttgcctctgtcatagcgactgaagctgcaggagttgttggaacagctcttttcttttcttcgttggttttaggtgtcaagattctctcatttgttgtgtaagcatccttgtgatgatcttctggggaattcaagatattggaagtgacaggtgaaagaggcttcgtaagcattggag

SEQ ID NO: 36224 - DNA, 450 bp, Arabidopsis thaliana columbia
gataatttataaaaagtttctattttcgttctttttttttccttttctaaaataccagttgtttcatcgttggtaacgttaggcccatagagtccaaaacagcccattaaactaaatataacccgactcgtaatcaaaacacccgaacccggatccggttaacgaaggatctccgatttattctctccctcctcggtttacgtgacgagcctaacctccgtcgcaccgtgcttcaaagttcgatctcttctttaaccgccggttcaattattccgggacatcgcctagttcttcatttaaaacggttagtttatcagtcattcaataatctacatcttttgaatcacaagcttcacggattctgagcaaaagtttaaaaaaaactcatcgatattaccaaattaagctcttagcttcgcattaatggcgagatccaaaaactataaattg

SEQ ID NO: 36225 - DNA, 488 bp, Arabidopsis thaliana columbia
ttgtttctcttctacgtattcaattgaagagtcaaagactcaagaggcacaaagttatgtatatggaaggcactaaatcttcaggtactattatttagttttcggcatgttatcaaacttctcacgacttggtaatggagtcatcaatgacaatatgtattagtgtactcaacttttgattctgaattttgattagttaaaaatattctgttcttttctcactgagaattttggagtattcaaatcaaagtttccatactttggagatagaatgttgcaagacacagactaaatcatatatttacataaacatttgttcccttataaatatacagaattcaacatttcttttcagagaaaaataatgaacgtcagaataaatattcagtgatattaatttcgtgatattaaataatttaatcacctgttgggctatctgggccgaacaattgtgggccttgagaaactctattaacttttccgttttt

SEQ ID NO: 36226 - DNA, 897 bp, Arabidopsis thaliana columbia
ttcactcatattgattgtttacaaattttagtagtgaaacaaaaggcattagcgttaaagtgtgataaggctggaatattggaattgcatggttacgatttacgaagaaactaaacaattatagaaccatcacattaagaaatcttggcgatatttgcactaaccggttgcttcattgataaatacatcccaacttcttgacggaaacataacaatcatatcatatagtattttatacaaaaatgttatatctaaattattaattagttatgctgtcaaccaaataaacaaaaacatattcattaattatgatgcaacatctttaaatagtgctattgttcaaacttcaaagtcaacctaccaaccacaaactctttgtaaccattgagcaacctcaaatcgtagtctcttaatgttcctccacacaccatattttattttattttcttcaaaagaaaacagaaatatagacaagttattgtttttcattgcatggaccggagagccaaactgacgaaagtttggtcctcatgaaccccaaaggtagaaccaatctcaaccgttcaatcatcggtggtcatgatcatggctcgattctacaactactcctctttctgctactcctctccagccacggtggatttaaattcgtcgcgggtcaagccactcacggtggttcagacgtttccggagatagctctcggtttgacccaaccatggcaatactcatgatcgtcctcgtcagtgttttcttctttcttgggtttttctcagtctatatccgaagatgtctcgagcgagtcatggggatggactatggaaacccaacgacgccggaaactggcttgcacgaaccggcaacaggcgcgtgggctcgacgcgtcgatcatcgagact

SEQ ID NO: 36227 - DNA, 504 bp, Arabidopsis thaliana columbia
tccccagaagaagataaaggtgaaactttttagttctattgaggtttataaattataatatataaaagggaaactaaacgattgtttctctatgtctgcatgtccgtcaggtatgcatgtctagaacactaaacgcttgcttgttcctttataaataatgcctgtgagttcggttatttcggtttaaacggttcattgtctcgatttttgaaaaatctaatagtaactaaccgaatagataatctgtttgattcggtttggttatcagtttattttggttaatgaaattgtaccgaagtgaacctattatttggttttaagcaaaaaatttggtataatttaggtttactttttaaaaaatcggttaatcgttctgttcagtttaccgaactaaaaaccgaacctatttttaaatctctccgaattgaaccgactcgactactgaaccaagtttgcacctaaaaccggttcggctcggataaaaaatccaacactagatactgg

SEQ ID NO: 36228 - DNA, 558 bp, Arabidopsis thaliana columbia
tgcaatttatcaatgatttattaacaagagttcattaccattttccaagttattgagaagttatgcttctcttttagtgtttattttcaagttctatctcttgaagataatatgtgtttcagtggttcaggtggagggactgcggcggacacatagctgcggtgtctatgaatgatgaccttcaaagtgcgagacatcagttgcaaaggctgaggcagagattctttcaatgttaactgaaaaggtaattgttttctgcttattgttttctgcttgttgacatttttgttcattttgatgaaaagtgtattaatttttaaagttagaattctgtaactttccttcttattgttttctgcttgttgacatttttgttcattttgatgcaagcaaaacagatgcaagatggtctttgtcaaatcgaggtggtgttgagctactcgattcagctggatgtggtaattatactttaataccaatcatttctctttctattaaagcaaaactcagtaaaacaaatctcagcaacatgagcgtcaaacatgtggtttacagttt

SEQ ID NO: 36229 - DNA, 455 bp, Arabidopsis thaliana columbia
gttagtgaatttttgtagatagtctaatatatcgtcaatgcattttggtaaacggcgaggatatgatatctcggattctttgttaacgctccatgcgtttttataagtcattgtcgaaccctgatttaattcggactatgactgacgtgtcaacgctaaactctaatttcactgagactacaactaacgtgtcaatgctaaactctaatccttttcgagttcagtcatttcaaagtgtcataaaccaataatcaaaatctcgtgttagtgatttttaggttcttatcactggtgcaaaaccattagtgatcaataacaattttagttcttttttctaatgtaatttaaaattagaaatattctttttacaattggtgtagcgtttgattgaagaaaattaacaattgcattagttgtcaatgtttgagaatatatatctataattgtgagagagg

SEQ ID NO: 36230 - DNA, 513 bp, Arabidopsis thaliana columbia
  unsure (1)..(513): unsure at all n locations
gttaccacagtctctactttcatagttgttgctttctgataactcacattgttaacactaatgatcaagaccaaaggccgagtacaaatttaaaatagtaacaaaattactacagtatataatacagtgctgtcaagtatttttaaaatattctcgctctctccggaggcgctanagtataagaacaaaactaaaagaccaataatctttgacaaaagttacatcaactactacaagagtattctctcagagttatccttatgcgtattccctccctattcttacacaacttcgctcatcccacacatactctccctaaacacctaaataatctccattgagcttgatctttcatcgcattactgctacaactgctccgtgggatgggagaatctcatgtcatccgtttaagcatcgtaagctacattgagaatcaaactttcctcaacccagccaaagagggccacagttcatcgctttttattcaactccagtttatgactctcagctact

SEQ ID NO: 36231 - DNA, 519 bp, Arabidopsis thaliana columbia
tagatagaagaaaacaacaacaatacgttttttttacatggcaaaaaaaaacaaatcagtagaaaataggtatacgttacacacattattccatgtaattgggtctcaccgatcactgattgactcggtcaaaggctatggacaacttctgttacatgtctctgttaaacataccaaaatgttgctatttcacatgtaattacgcatcttcgtatatatagtaacacatataggtgtcgaccgttgaatattagcctctcattaaaattctactttaggaacacacagctacaaatactcttacatctaactattcaaaataaataaataaaatccgaaaaaatggtttatatgattttaaaaagtaaactataaggtgtgaggagcaaataaggagtgatggttaccctttaactgcgtatagaagaaagttataaaaaaaaaacatttgtacgttagatttgtataactagattaaaatgaatcaattactcagaccctccaatagtcacatatttt

SEQ ID NO: 36232 - DNA, 787 bp, Arabidopsis thaliana columbia
taactgttctttttgctattcttggagttgctggagatgatttcccggtaggagtagtagtagttgttgtttcggacaaactagttctgtttccaacaaaagacaataacaacagtcgatctcagaacaaagaaataaattgccgcaaaaaattaggacaaaacaaatgtagaaatgaatttagtagatccaaaactcgatcattgacaatttctcaaaatagtaacttggatcagatctactacgatctactaaaaaatttcccagagaaaataggataaaactaaaacagagtgaaactgagtaaagagtcttacttagtcttcgaagccataaccgtcgatcgctgtcaccgtcgccaccaccgtcgccaccaccgtcgcgctcagttgatcagaaattcgattgataattttgctggaattgggactcaattttcagatcaagaaagagagagagaatgattcgaatcggtgggatcgaagtaacggagaatgatatagataatggcaggtgtggttgtctccagagtggcctcactaactcgttaaaaagaagcttatttattctgctaccgatccgatgtataaaaacaaagaaaccactaataatctagcttcattaaataatggtaaaatagaaattaagagaacgtgaaggttggtaaaatgacgataatgacccacactcttcttttgtccaatcaaactgacagcgaaactaccgtcactctcttcttcttgttcatatcattgcggcttctaacaagatcaacggttcttattgt

SEQ ID NO: 36233 - DNA, 530 bp, Arabidopsis thaliana columbia
attggtgaaaatatccacatattgaaaaactacaaagatcgaatttcaattgttttaagagttactttttctttgatgtacgtagtgacatttgatacatatgtcctagaagtgattattaagcatctcatttgttcttaggactagagatatagttcataatggagtcagatgcagtcttcaatctatatgaatgataatatatatgtcacatagttctggttctccaacacataaaacccttcaccccaaaaaattgcttactacgttgatctcttattaatatataaatgaaagacaaaaaactactacactataacaacatgatgacatcctgagactcaactcaagatcctaaatgcatctacctcttagatacatctatgtataaatatctctagttatgaacttatgattaaaaaatgaatgttactaattaaatcaagattaagtcacttggttcctctagcgtttaccgagatcaatggtagtgaaccttcttcagcagagaaacgttgttgtattcagta

SEQ ID NO: 36234 - DNA, 523 bp, Arabidopsis thaliana columbia
tccccaactcataacaactaatttggtgcatcttggttcttaataggaacaactgcagatattttccttctcctaggcgtaagtttttttaaaccagtggtgttgttagatgtttctgcaacacttttgcgtcttcgttttcgtttctcctttgcattgtcttggatctcgttatcacattccaatgccaacatcctctcctctcctccattgtttggttcattttcacaaacagtttctgcaacacttttgcgtctttgttttggcttctcctttgcattgtcttggatctcgtcatgacattccaatgccaacatcctttcctctcctccattgttcggttcattttcacaaacagtctcattctcttgtctacatacatctcctgagcagttctttaatccttttctccgtctctttggttgtctctctgcatctgacttcttctgcctgaatcaacaaaaaggtgaatttagttagattcacaaaagctacgtgtgtgtgtgtgtgtatgtaaggaata

SEQ ID NO: 36235 - DNA, 571 bp, Arabidopsis thaliana columbia
tacataaaaatgaagaactttggtaaaagataataataatgatagtaaaatcatctactatgaaatatttgaacccaaatacttaggacgaaaatgcaacccaaatataagataatgtggatactggatagatgtagagtcaatgttaacgagggaaatgagtcatccatgaactcactttagatagcttgaagtatttcacaagtcctaacttctttacgcaaaaatggatgatctttgattctcctttccgcttaccaccaactcaataacacacaagggcggacctaaattgtccattttattttccttatttgatttcaattccattttcttaatatacggccataagttatggcccatgaccaatatgctttttgttttacattttgtagtttatatgtaaataagaattaatccaatcttcaattaatgaacatttttctttgttacaaattaaggaaaccaaatacatataatagacaaacgacataatcatttattaattaacaacacatatcttacattcgagatgagagagggagagcaaagatccagataagagggagag

SEQ ID NO: 36236 - DNA, 527 bp, Arabidopsis thaliana columbia
tcatcctctaatccgaagaatcttctattcggttaaaacaagaacttctcgatcacaccgaaactttccagaatttattaatcgtagccgttcatcttcgacgtcaaacatattgataagtcaaaaaacgaatcacaaccgttagatttagttcaaacaccgtaatataaccgtagcggaacataagctacgtggtggaatcttcacggctcacacaaatataagataacgtccgtttcaaattcccccaactcggagaaaccgaagcgagtctgactctctgagtcgtcaccaccgagtcaactctgtctccgccatggctgctgcttcactccacacttcaatctcaccacgtagcttccttcctctctccaaaccatctctaaaacctcaccgttcccaaattctactgagaaacaaacagaggaattgcgtttcgtgcgcattgatccgtgacgaaatcgacctgattccggttcagagctgagatcggaccgaccatgaggaaggttcggtggtagtgatga

SEQ ID NO: 36237 - DNA, 590 bp, Arabidopsis thaliana columbia
gttgttggagagaatctaaaggaaaaggcttttagatcgaacttggtttgagacggtggtgagagatgagtttttgggagagcgagagagagttctagacaataacggcaagggtgtgtgtgactatgttttgataaataattatagacgaccatggtccaacactttttctttgttgaggcactttttaatattgatttattactttaaaaacctgattagtcgtaattaacatcatgtaacaaaaaaaaaacttgtcgacataactaaaatttaaaaagtgtgagttaggtagctatcaatatctaaaaatttgtattaatggaattatggaaataacaattgcaaaagtagatattgaaacacaggattattgtttgaaatttaattaataacttttgaaagtcatttgtatattaatactttcataaatagctatatgattatttatttattttaaacatatttaactaacaaaaaacaaacagaaatgttttgagttttagtcaagggacaaaagtttaaatatcggtctcttttttactctaggacccacctattcaaaaaacaaatcagtacgttttggtagt

SEQ ID NO: 36238 - DNA, 495 bp, Arabidopsis thaliana columbia
cagagacagaaccgctgacatagccgccattaccaattcctgaatctcggactcggaggatcgatgttttgctacgtttttggctttctcgtccgaccgaaagaggttcctgagagaaacggcaacggtttaattaaaagtgtaaaaattttgaagcctttgaatggctaaatattttgcacttatggcaaaaacaatcccctttttggtacctataaaaggaggcgttgcttcttctctaacctgtagggatgataagaacagaggaatttaccagtgacgtgatggaaaagcgaaaaccctttgaagaagaaaaagatcagacaaaatgaaaattagggtttcctttttcttctctgcgtcggtgctggcttcgtcttttgcttgtacggcgtcgtctctccccaatgactatgagatatagaacggcgtcgttacattagagtggggccagtgggcacattatgtggaattccttctctgtttttttgtttg

SEQ ID NO: 36239 - DNA, 640 bp, Arabidopsis thaliana columbia
  unsure (1)..(640): unsure at all n locations
ctgcaccaatttctagaaaaatgttaatacgaggtcaattaatttataataatgcatataatgcatatatccaatatccatgaataataaatttatgggtttggttgtgtttaagccatgttgttctctacatctacacatttaccttaatatttttcagcatgtattattgtagtacgatatatacagtggtgaaatcttgtttaatcattcagttttgttcgatttaagctccttcttattaatggtaaaataaaacaaatcagatcacatatattcatagcatttaaggacctagtgtgtcacacgtgtgaacctgtaatgtttgttatacacaacaagacaatgatttttgactgggcccagcccacacgagggtcctaacatctctcaacagggttggtgtttttgggcccaggtggacccttttatctcattctcctcctcctcctcacgtttatatgaaatttttcacgtatataaatttaatcaattttatttatataaaattcttgacatgtagattataagattaagatgaagtcgttgcaatttggacctcaattttttatgcagatcntccatcgtaacatgcatgggggatgacatgatgatgttagcaaacatgatgtgatgacat

SEQ ID NO: 36240 - DNA, 614 bp, Arabidopsis thaliana columbia
  unsure (1)..(614): unsure at all n locations
tgtctaatttctaaaaatttataggtcgcatgggaactttcacagcaatgagcagataacaaagtacattctggaggttgaagtcagacattctgatgtaaaggcgctcatattggacacctcacctttactttctttttggcttcacactgagaaacaacttaagcggctggaagatagtgttaacgatgagatttaccagcttgcaaaatctgcagtaatggatgaaccagaaactaacaaaagccctcccaaagaaaagttggtggcagatgctaatacagagagtgagtccgaggacagtgagagagatggagagttagctcaatctggaaaatctcttcattcagatgaatcagctgatgggagcggcgatggatctcctaaacactccccaaatcatccagctgggcagtctgatattattccttcaactgagatgcttcagaaggccggctccccagatgtggaagatgttgacatggatgtggatatggaagttgaagaatcagttccagtgtcttctgttcaagtgatagacgcttctgatggtaagatgttcagcaaacagagcgaccnaccttcatacagatgttcacacgtccgggtgagga

SEQ ID NO: 36241 - DNA, 503 bp, Arabidopsis thaliana columbia
aaagaattttagatgaaaagcatatggatcttgcgcaacgtaagaagcatatagaagcgctggagagaaatacggctgaccaaaagaccgaggtaacaatatttgttattttgaacagagatggatccttaatgacagtttcaaaaaaattgatggtatatgtatgtttactctgcaacagattactcaactcagtgagcatatatcggaattaaatttgcatgcagaggctcaggctagtgaatacatgcataaggtaaagatagtttttaattgattgactacccttaaaagtttatcaaaagacttactaagagtgatccattgcaaacagttcaaggagttggaagcaatggctgagcaagtaaagccagaaatccatgtttctcaagctatagattcttcgttgagtaaaggttcagggaacctcgggggttctggctctcctttcagatgcatagggttgggaatttcacaacaaatgagatctgagaaggacgagg

SEQ ID NO: 36242 - DNA, 454 bp, Arabidopsis thaliana columbia
ggtggatgtgtgtcatagtgacatgtgaaatggaccacatgcaatgaaatgaacgtaatccgagtagttttcgggcgaacgagagtagttgagtggcttatatccctcgttatgatatttgatcgttttaaatttcatttatggttgtgttttaacaatgcctgcgagggatattatctctcgatgatatcttcgatatactgtcagtcaggtcaagcatcacgtaaatgccgtgtctgagctagcgatacagattgtgcgagtgtgaaagtactcttagtaattagcttgataggcagagcagttcagtagtcaagttgaatactagatagggtacttatatagatgtccttaatttaactcggacgtagttaaactatgattaatacttaacacaccataattcactgatagaaactattggatagcattcacttttttgaagagtatataa

SEQ ID NO: 36243 - DNA, 596 bp, Arabidopsis thaliana columbia
cgtgaacggtatgatagtcgtgcttgatttgcgttggatacagaactaaatccaacaaagcatcggtggacttaagctaaaatgtgatctaatgggctttgtaatgggcttgggctatatatgtgaagactaaggcggtaaattcagggtcataattcgtctctgtttcaaatactgaaagttgtctcaaatgatttcagctttcacaagtttgcaagtacaattcctctttctcggttctcgctctctagaaagcgaaacagagcggaaaaggcagatgtgaggaagaagatgagcttcgagaaggtaaaaatcttccacgaaaccctaagtttcttcatgattctaattgatagtttatccgcattacttgatgatgtaggaagaggtacgacgaaattattctatgtgaaatcttaagtttaagctagggtttctcttccgtctctaatggtgttgagatgcaagtaattttcgcctgttgtttatttctgtgagcagcgttgtaaatatagagaagggatttcgaaactctaattacggattccatgagtgaatcaaagcttttctcatttgtaattcattcattaattatg

SEQ ID NO: 36244 - DNA, 567 bp, Arabidopsis thaliana columbia
taaatgattcaataacacataatttttgaaaaaaatgaaattaaccaaaatctgttaattgccataattttctgctgagaagagaaagcacaatcagtaaaccaatctagttattaaccgaaacctaaaccaacaatcatatgaaccgaatgatagacctgccttaaccggaatggcggggattttcactctcttatagtttcccgctacatttaatagtgaagagagaagagcaaagatttttctggataaatctgttttatcgattttgaagctccccatgaactctcgagatcttacactcgtctctacatctgcaatcttcggtgctttgatttcagctctagcatttcgcttcttctcatcaaaccctaaaaaccccaaatcccgaaaattcacttccaccgaaatctctgcaatttccagaaaattccctgctctagatcctttcagtcctttgaaacgaaatgggtttgtcataattccattcaatatatctaatttcgttattccatagctaaagttccaactttcagaaaacccaagtttagaactgctttgattttt

SEQ ID NO: 36245 - DNA, 562 bp, Arabidopsis thaliana columbia
  unsure (1)..(562): unsure at all n locations
taaaaaagtattacaagttaaaccagaagacgggatttgtcaatttatttgatattcctgtgaatagcttagacagagctgtgaagggaacttacaagaagaatcctaaagtttgatctgtcatcactctctttaccaccgcgacaataagttaccacattgacctctgcattgtagcctttgtttcccgatttaatcaactcaatctgtgaaacaaatattcactcagtctgagctaaaaatacaagaacctaaacacgaaactaaaatagcactaaccgagagcttatctggatgtcgatgtaccaaagaatgtatctgctccattaaatcatcactgcaacggacatagaagacgatgatgataagaacagagaaatgaatttttcttccttatctattgaatcaagaactttaactatcttgaagatctcttaactctcctctagccaaaagactctcactttaccaaaatggtcaaagacccttttattctaatcctacctctcctatgtatgttaaagaccgnagtggcccgtaacaatgtgaagttgcatttgga

SEQ ID NO: 36246 - DNA, 350 bp, Arabidopsis thaliana columbia
tccttcagcctaacttttataaataacccaaatggtgaagaatctgagctgctttacaagcctgcatcactcggaacaattcaaagagtggcaccggaatggatgagagaagttaataaattcagcacaagtaagtgtcccatcttctttgaaagagtctctcgagtcatttaagctcaatggtggaccggtacggaaggaaatcttccttcccttaacctgtggagtccactctgatggcttcctagtgggatgtttctcaataggtttgaaaagctagggaagttatcattgtatctatagaaatgtgtctctctttaactttggaattagtttcaaagatagtgtgt

SEQ ID NO: 36247 - DNA, 517 bp, Arabidopsis thaliana columbia
tagtaatatggcgattgcacctgattggtgaagaatctatattctcttccagttaccctacactagaatttttcaatgaagttatcacttgacataatcaatttaaaaatttgatttcgagacttcgacgataaattttgttgggccactacaaaaggttttactgagtgctgactacttattataataggcccaaacaaaacatatatgttgggccactacattattagccaaaagattttactgtaacttattatgagcccatacggagcatttcacagggaaaatttaactaaacgcgaaagtggcgttacgattattagaatgatttcgtaataaacagaggattagttaaatcacgtttcgattactgtatatgattaaaaattaaagttgaagacaattctttttttttcaattcattcatcgtttaactgagaaattacaaatctgaaatccctagatgctgaaattgaagagtttcaaaatccgaaattgcaatccgaacgatttagcg

SEQ ID NO: 36248 - DNA, 489 bp, Arabidopsis thaliana columbia
ccagagtaattctgcgttcagactagaatctacgagtacatatctgcaagttctgaaatctgaaccatcctgagcttaattgcaaatatggacaacaatatgtttttcttaaccaaaaagtttttgtgcagcctctattagactcgattcgggcgaataagaaaacaactcttatagttaaaagaaaaacacatcacaaatcctaaaatcatattttcttctgaacaatgcgtttctatgtcttttctataatcttctgaacaatgcgtttctattattatcttctgaaaaatcgacgacgatgaaaataatacaaggtgtgggtcaaacaggtcaaagataatagacgaaggttgaaacaagtgggccgtagggtgaggcccaaacggtcacgagcattagccttaccatcaccgacaccgtccacaaacggagcatctaacgtcgaccagaaccgacacgtgcaacacacgcgcattcgtacggaac

SEQ ID NO: 36249 - DNA, 550 bp, Arabidopsis thaliana columbia
  unsure (1)..(550): unsure at all n locations
taaaattatttttcgcttgactataggcattatgaaaagggtagtcaatactcatagagaaaaaagaagcaattttaagtttttaaaatctttaacaaattgttttatgtccatgcataacatatatcaattatctcttggcgtcgataaagcaaagagggacgaagagtttgaatatagcgtaacagaatgtatttttctttgtttaatatttgccaaacacacaccaaattaaatagaaaaatatatctaaagatttcatattcaggatttagtttcaaattcaggattccatattctgatttactgatggtaagctcaggtgtggcattgagaggtaattcgtaaaagattgtagtgagaaccatgatgttctgtgaatggctgaatgcaacaacttaactgtatttggtgacaggctcggctcatatacatattgggccttgtgaaaattaattttattaaacccaatttatttaacatcatacaatttgggctctttagtctttacatataaaacattgagcccaaggccaaactatanaagagt

SEQ ID NO: 36250 - DNA, 343 bp, Arabidopsis thaliana columbia
agatttggattccaaataagttgcgtatatttcgatggttgaaactttcactcaaagctacatataatttcagaaacttaatagattcttgtctactaaatcaataaaagcctgagcactcatgagacctacaaaaattcagaatgcgttttaccttgttgtaagtcctgtctttcatctgcattcacctgctgaagcagaaacaaataaaaaaaatgctcagtcttgcaattaaataagataggctagaagaactataaaaacctttttaactactatcagaaggatgcaacacagcagtacctcatcgttcattaaaatcgtatcaagatctctatttttc

SEQ ID NO: 36251 - DNA, 507 bp, Arabidopsis thaliana columbia
cgaactaataaaaataacatccgtttttaatgaaataatacttgctaactaatatatatatattcactagagttttattgttcttcgttattttttaaacaaaaattgtgaaaaatttgacctggcaggataggaacagttagaatagaaagcaaaacttacatttgcctggtcaccaagtcacaacattatatgtttcactactttgtgagtacaatgcctaaaatacccttccctcgtcacgtggcttgttggaagaggtaacctaattatgacgtacattattatttagtttttttccttaatcgcactatttttattttcttcaattcttttcaaatttaaattcgtgttgttaagtaaaatataataacagtcagttcgcaaaaaaagtacataaatacgggaaaggaaaaaagaataaatgaaaagaaaaactaaaataacagaaagcacgtggagtcacgcgcctttgcctgctgtaggaaattaaaataagagaagaca

SEQ ID NO: 36252 - DNA, 748 bp, Arabidopsis thaliana columbia
ctaccaagaaatggaaggaggtgtcagacaataatttctatcttctgtctaatatttctttattcattcaagcaactaaaatgactatcatggcaagatattgtattcaagcttagtgctcgaggaaactttggaatgcagaatgtcagatttcagtgcctacctagtgcataatataaatggaaaggaaaattcataatctaattaaatataaatatctcaaatgaagataaaacgattcaccaattcatacagtcagcatcgaacaaggaatgtattaacaagagtcagtcttgtcgtaaggtaagaacaggagactcatagtacctgtcaatgagccaaagaactccatcccgcacaccggcaacaacaagaggccccactggtcgtttttgctccactgggaaacgagtaacagcaactgagactcctccaccacccacagctacctcattgacccttctttcatccattatgtcatcgctatcacctctagattgtcttggcaatgataagaatggtggaacagatggagcattttggaaagaagctaaacgcaccacctacaattaaaaggtatacacataaggaagactcttgctagtttgacatgaattgacatagatgtcgacacatatgcagtacaaaacaacacgcttagaccttaaaaattatgctcccaatagcttacaatattttcaagtaaaagtaagaaaaatctacctgcagcatggggggccttaaagat

SEQ ID NO: 36253 - DNA, 558 bp, Arabidopsis thaliana columbia
ttcttagacgaaatgattttttttttatcagattgagtttccattaaacgttctgataatatttcttagtagcaaatggattttgtttttaatagcttattatttgtgtaaatccttttgcaatttaatactacatagaaagaaacagaatccttcatttgtacatatttgccatccgtatcgaaacattgccaatgatcaattcctagcttcacttgtccaatattcgaaccgttttcagaacacaaatgaccttctgaataagcatcacctttaagaaaatgctctctctttattcacgtccattgcataatatttttttttttcttgaggacataatgtagaaattagttttcaaatatactttgaagtcacaaagtaattgatttactggataagcaaagccattttcagcttcaaatagtcagatgagattatagaccggaaccataacaaaggggaacaagttataacatgtcaagagtaatagaacaattaatccaacatcttaagagatatataagagtggaaagcttaagcaagtgtttggcaatggta

SEQ ID NO: 36254 - DNA, 506 bp, Arabidopsis thaliana columbia
taacatttttagaatacgtaaaatcatgggattgccaataaaaaacagtaaagaaaaggtgctaatcaagggagggttgcagaggaagcaagagaaaggtgagaagcaataatgaaagttaaaagagtatcaaaaagtcacttggagttggtaattcttcaagcttaatttttgatcctctctaatcatttaatgttatgaatttgattattgtttttctttaagcaagagggaaattttagaattttttggaaacatatctgaacgtggatttcattttacaataatagctatagagatacctagggggtccgaatcaattcactcaataccaaaaaaaaggaccggttaccatatcgttatccaaaccggttgattcagatttattaggatgtgttttcgcattgaaattgagtgaggccagtgatgttacccaaattcacgacctaaccacatttttttacgtggcgtcacttctggtataatatcgtcagggttagttatga

SEQ ID NO: 36255 - DNA, 498 bp, Arabidopsis thaliana columbia
catgaagaagtagatagataaagagatccggtgaaacaactacaggatacctaccaaaatatattgaacactgatttctgcagctgcaatccaaaaattggataaagaccattcaacaatgtacttaacgcagtcttttgcctaaccttgaccgttttaggagtggatccttcatagtaaacaccatcaggaccatacttggtagaacctttctctcaaggtttccatcgccatgaccataacagtcctgcagtgaattctaagaaaaatgtaaaaaattttggcctaaactcataattcttaacatacgaaaccatggagaactccatgtctaaaaaataaaggctaaagctttttggcgacagaagcagataaatccattcaaaacacataaactctaaacaataaacagtgatactcaatactaagacttgtaaaggtctacgtaactcaaaactggagaatttcagatcgggtgtggcagagaagcttggattt

SEQ ID NO: 36256 - DNA, 458 bp, Arabidopsis thaliana columbia
aattcgcttggagtaccaacatgagtaaatccttgcaactctctgtcaccgttctatgcatcttgcacatccttgtgttaggtttgtattttttataattgtcataatatattattataatcatccacaataaactaattattaaaaacaagttagttttctacaataagaattaagtttgttacgtcaaataatgagtcagtcttagatattgagattctatattacattatagagtttcgtaatagcaagctaaattctcttatgtgggtttatgaattaaagatgacaatacaagctaaatcgatgcagttacatgtttagagaattgaggtaattgacagattgctgtttgaattggaaatttagagaagagaatgcgtgttagtattgggaagagatttgtatttagactgagttatgctttgtcgttatgttctatctgatctcagttacac

SEQ ID NO: 36257 - DNA, 560 bp, Arabidopsis thaliana columbia
tcctcgtactttgactgattacacttgttcactcatctctttctctctccttctctctgcggatctttgtttctaatttggaaccgacatagctcccaactaataggaatctcaagcttctcactctctcttgtgtaagtttcttctacttatgttttctttactccattttggattcttcttctctttattgtgtcctcgagtatctattgtggatcttgtctagcatttttcacattaatgtttcgtttgacgatttgatttttgggtctacttttatagtttctcccaaattttctttctttagacaacaaagtctgtttcttgactgtgaacttgagatgggttcgtgtgctttgcttttaaaactaaagtctaaaaattctttccttgttaagagtttttacacaactaagagaagtcttttagttgttgacttttttttttagcttgttcaacagatattttgtggctctctttcagttttccattggacttttggaacataagctatgcaaactgaggagcttttgtcgccacacagactccttggtggaatg

SEQ ID NO: 36258 - DNA, 1022 bp, Arabidopsis thaliana columbia
agaggtaatttagattacctcatttgggtcttaaccacaatgatggtggaagacaggacgacatccacgaggataggacctcggagatatttctccagatagaactgggaacttgactccagatagcactgggaagattgctacattccacaaggggaagtagaagcgcaccgagacatccgtccggcggaaagaagcatcctcgagactgattgctcggaagaagcctaacgtggtaccaatatagatcgaaccctggtgggaactgagctcagctgagactcaaccactttgctaaggccgaattggtgataaaggttctactttatttgtatttaactcattatacgaacatttaaagatttaacaaagcccacaagaacccagtagattgagcccattaagtttaatttccactcgcaacgttttgattcctattcttctcttcttctttgcaaagttttaacttagctgtgaacaaatgatcatctctccatgatcttattttgtttctccaatgtttctgtttcttgaaaagaagattcattttcatcttattgtgttttagattgtcgaaaatattaagattttatatttttaaaaaaattatatatatatatacacatatatatggtaaaatgtggattctttgtttcatgcatgatacaaaaccgaattcttctgtttacacttctcagttttcaagtggctacaaagctgttaattttgtttcttgagttcgtcggatttaaggctctggccactctgcttccgaccatcagcaaggatcgtttttttcagagaaactctggcgattttaaactgtttctgtaactggattatttatgtaaataggtcttggtccaagcagttattgtttgagaggctaaatatacatacttttgattataaaaaaaaatgtacttgagcctgagaaaattcaggaacacgcatgcttttagtggatatatgcgagaatgtgtgaggaaatagtgaagttaaggaggttaatgagagagagt

SEQ ID NO: 36259 - DNA, 537 bp, Arabidopsis thaliana columbia
caataaagaaatgtaacagtaacggacaaatacagtaagagaaagataaacacctgtgtgccggaatctacatactccggttaaaattcagccggaagttcaatttacaaattaaaatagaagctttatcgccggagtttcgattttagaacataaaggtagaagctttgtcgccggagtttcggttaacgagataaagttggaagcttttttcgatatagagtcaagaagaagattatggtgacaacaccgacgcaatgtcggacttgagacgcgtttattaaatgcgattaattagagacgacaggtacggaagtggatgacatatataaaaggagagagaagagaggattggtgtgttgtccatagataatggagcaggttacgacttcggaactacacaacggagttaggttttcttcttcttctttctaaacgcgtctctattattattacaaggtttgtgttttaatcattaattaatactaggaattaataatgtcggagaattttatactatgggtgattacataatta

SEQ ID NO: 36260 - DNA, 546 bp, Arabidopsis thaliana columbia
cttgatctcctccttgtccattaatatatcttccattagtttgtgatcgcagttattctcaaaactgctggggcccctacctgcagacccaagtacgacgattagagggatgttgttttagtgactaccgggaccaacataaatagggatccttgggtgtatacttgaagaacagaaataaagaataaacaaaaccatttaaactatagttgttttattgattttcactagggatctttttcttttttttttcttgttggtctaagtcatgttatcaaaaaaatatgaaaaacttgcctgccgtcgttgataaacttgtgagccacctatcatccgcctcccagcctggtttcgtaccatccgcccacttttccgttcgtaaatcaaattccacaatggtagccgatgcccacacccttccgacaatgtatatcttctcgtcaatgaccttagatacattcgtcataagcccaaccggcatgtcggcaacaagacgggtcgtgtgagttcgacagtcgatgcataacgcaatcgatgatggcggtt

SEQ ID NO: 36261 - DNA, 526 bp, Arabidopsis thaliana columbia
taatactaagaggttctgaaccgaaagacgttaggtatccagacccgaaaccacatccacatcatgtaaattacatgcatcagtgtatcacttaaacaagaagtcgtgaaacttccatgaatttataaggttgatcttatagtgattttctcataccatataaaatacaccaatgaccagacgtctaatatgtttctgaaattcactataaacaaattagtgttaagacttgtagttacatgcgtcacctaaaaacattgaaatttcatgagttctccggaaaacaaaccaatatatttatttggtgtggaaggtacaaattaagaccgagtctctcaaagccctacgtcgtgcacataagccaaccaatggatataaaaaaattaaaaactcaactatgacatgttgccaaaaaatctgatatcaatacttttcggcttatccagaaagataggagtcacacgtatataacaaggcaatgtgttgtgtgtactagatctatttatatgcaactgtttagaaaatg

SEQ ID NO: 36262 - DNA, 539 bp, Arabidopsis thaliana columbia
tttttggggttcttcagttttcttttgtgtgtggataaggtaggccccttcaagatatttcgagttaacaattgggcctgttaagcccattattaagttagcgtgaacataaggcccaaactatttgtcattgtctctgactctctgaccttcgcagagtctttctcttcttccgttgcttcaatggcgaaagacggacctaactgggacggtctgcttaagtggagtctctctcactccgatggtactcgacctacttgccaattaaggtacgaagtttctttgtaatttcaggttttgttggtcacttagtggagcttatgttgtttgttgggttgttttagaaatttgcgtggttctgcgtcagtttcttatgaggaatgaatcatgtagtggaatttgactatttgatttggtattgtttggtagatggtttttgatgatatgaaattgtttggttagacagtgaggaggatcgaaaatggtttgcagaagctatgcaatcacaaacggtagatgtagtcaacggttgaaggaga

SEQ ID NO: 36263 - DNA, 490 bp, Arabidopsis thaliana columbia
tcaaaaaaaacagaaaaggaaattcacaaatatattgattttgtgttacttaatttaaataaattatactactatccaagaaaaatgtgtccggcaaatattcgttggggtttgaacgacaagaacaataaagcaaaagatttaaaagaaagaaagaaagaaagaaagataaagtgaaagacaaactttgataatcccaagaagttcccccactttaaaaattgaatgaatgtgtaagatcgtattcatgatgaagcatatagtacattacatagggtttcaatactattagtataatgtcatattatttaaaccaataattgtacacagtcacttaacaatgcgctctgaatctctgacaatttaattatttcactatcttttagaaataccccaataataataaataatctaggacaagaacctcataccttgctaaaaaaggaactaaaacttgaaccattagcaaaacatttttgtaaatagtaag

SEQ ID NO: 36264 - DNA, 453 bp, Arabidopsis thaliana columbia
ccttatgatatccaaagaggttctttacctaagctttcgaatcgaaaacctcatcaagacgtctaataactacttctgctttctcctatggaatcgcatttgcattcatcatttttcccttgaaatatagaaataaccaaatcatctacaatgcggattacacaaaacaggattgatgatcaaaaatcatagagaaacgcacctagttccttgttccgcacgccacaatgcgaaaatatatttttgtggaacaaatcgaatcctattgaaattacggaacaaacatatgttgagcttggagcaatttagacgaactaatatccctcgttaggtttctgacttgactctcccgagaatcagacagatctttgtgttggatttgaaacgtggagcgagagaataaagaagaacataacaacaagattctgacccagcgacgacgacaacaacaac

SEQ ID NO: 36265 - DNA, 467 bp, Arabidopsis thaliana columbia
tgaatataagctctctcttctcgtcatctgcttcgttctttcctctcttcctgttctttcctccctttcccttgttcttcggcatagtatctacataccaatcatacaaatgttcagttaaaagttcttcctttaaacatgcaaagcaatactcttctctcttataatctacataagcctctcaaacttaaaggaccaaagcaaaacaaataccaaaacaagaacctttaaatcgcaaatgaaacctaaaaccaaaaaagagacttaacgattaagctaagctattagattgaatcaaagtgacaaacttgaagaaaccaatctagggttttcaataaaaatcgtaactttgaattgggattgagcaatttcgcatgaaaaatcaaaacttgacaagaatcaaacaaaacccaacagtttctgatcaataatttctagataaggaagatcgatcggcgataaagact

SEQ ID NO: 36266 - DNA, 554 bp, Arabidopsis thaliana columbia
cttctattccgcgtgcttttactttaaaactagtaggttttgctggttgatattgaattcgtccaggtgagttttagtttgtatgaaccaaacttttaatttcatttgtaaaatattgttgaaaaaatgtaattaagtatatctacgtaattttatgttatgtgtattgtaaaagtaaaacaaaccggtaactgataatggagccgttacgctaaggcaagtgaagacgataagcagcagaaccaaaacaagcatttgacgaaattttgaagaacacttcttccccatctttttctctatctttcttttacttgttgtttttctctctttcttttggttcgtagagacatttatgtatatatccaagcagagagaaaaactgagttgccaagaagccaaactatagagataacagacacacacacaattattattttctgccgtcacatatttgaattatagaccttctcctcttgtatcttagtgcatatcttctatttaaaaaggttagtaccgattccaagtttaactccttttgttcatactggtatttt

SEQ ID NO: 36267 - DNA, 424 bp, Arabidopsis thaliana columbia
ccttatctcattttttatatacagaagaatggaataaaacaaacaaattatctcatttagctttcatgtaatccatcaattaatggagattatacgtttcatatcatccatcaattactgtacatcttgcttagtgtaatacaatatatccaataatttataacatttttggatctaatccatgttcacacaagtcatttttcataaccaggataattttgaaaatgattgtaaatattatagcaattaggaatgaaatttctataatcgaaaacatacactctaaacctaaactaaaaccttaaacctaaatcagaaatcatagaaactaaaccaatactgtaaacattaaactaatatcttgacttagataaatcttttacttcaaaacctaaatataaggatctattcttaattagttaaa

SEQ ID NO: 36268 - DNA, 629 bp, Arabidopsis thaliana columbia
acgaaggataagcagactttgtatttctatctactctcagctgtttctcgcaatacatcttgctttgctgctcgaccacaacaaataatccattggcatttcttagggacgaattggagaagcatgaagattacttctcggatgtggccttgaatatactctctgtgtacaaggtaacctctgtactttatagaaactttaatctagtaattgataaatgaaagctaacacaaaatttcatattgtacagaaggaggtggcacctttaataagtcgtatagaaaattatgtggaaaatctgaagaatctgggtcctgggtaaatgcctcttgttgaattggattatccctactatattacttggtttctgattataactctagttggagttgaattgcgccttgcaatagtggtgacatttttgcatgtggtggtggtgacaggtcggagaagccaccaaatgcagatcagggagacaatcaggtatcaaacccgaggaaaattctggaggaggagtatatagactatgagaccaaggtaagaattgctgcttagtaggttacgattgattatttttattgagaccaaatatgactctgcatggtcgtgctctggttcgttgatttttt

SEQ ID NO: 36269 - DNA, 489 bp, Arabidopsis thaliana columbia
tgcctcaaatctcggaactacattttgtcacaacgctaaagataaaagagaactaaaagtagaaaaacaagagtttgtgaaagtttacaagttttttttgtagagagaattttaaccgtgttaatgttttgttccaaatgtttttgtttgttttggaaaaacaaaaatttggttgtttttatttcacaagttcaagagcacgcttgtaccaacaagatcgatgatcgtgttgtttcgattcgtgtcgaagttgacaccgtttcgttgtcttgtttattgatcgagacatatttgtttttggttgtggaacaaaattttaaagtatattgcgtgttcacactagtttgaaagttgtgtgcgtatgaataaacatatcgaataatcaataacaaggcaccatatagttattgggctcaatttgttttaaattgggccgataattatttaggcaaaagcccaataatagacaccagtcaaatatacctttgt

SEQ ID NO: 36270 - DNA, 419 bp, Arabidopsis thaliana columbia
tctgccgtaggaggaggattcagtgaaatgttgacattttcaagcacagaaggagataacagaacagatgcatcagagcttgggtgtttgttaagctttgcttctttgtctatggcaaaaaacatatcaatttgccttatcaacgtaattggtatagtttgcgatttaccgaaactaactcaacacccaatttatcaaagagaacatcaacacccaattcacaaaccctatttcacgtgttctaccaagtcctcattataagttgtttctgtccttaccatttaaggtttggatctgtgaaatccggacctctttcatgcacctaatatatgtctacgagtgatcccgctatttagccatatgtcattgactgacgatctgtgaaccaaacaacagtctctcattcaacacagaaagtt

SEQ ID NO: 36271 - DNA, 516 bp, Arabidopsis thaliana columbia
ttataaagataactacaattgcaaaataaaaagtttatgttacatcttgcaaaacttttgcctacaagtgtccaagtgcttgcagaaaaatgatcaactttgcaaaggtgaattaacaatctaaacaatatttttttaattccaaaagagcgaaagaataattgtgtaatgataaatcaaatcataagtttaagaactcaactgaaacttttgcatgtaaacttttggtgtgatatcaaagaaagaagagaaaacgtaatacagtacctttttttcttaaggttaaaacagaaacatgagaaatttaatagatgtgtcttaaagattagtaccaaatcggtggcagtaaccgcgggaggataggctctcaacatgtgcatgcagaaggtaccgttttccacatcgttggcatagcgcatcaatatattttgtggaggttagcccgaagaagagataaagagaatttcggatagaactgccatggaaacgaaaaagaagcatttcctcacaggagaa

SEQ ID NO: 36272 - DNA, 614 bp, Arabidopsis thaliana columbia
tagtggcatgtcctgtcgttgtttttggatttatgtttttttttccttcagccatttttggatatgtatttagttatgtacagcagcagcatacgtatattattattacagattcattgtacaaaaattataatatcttagctcgaaatcacatattaggtgacaaacaacatcattaatctatcactctataatggttctgatttttcttttctctaggggttttaaaatattaatttcaaccaaaaaaagaaataacggtttagtggcttttccaaatatattttggaatttgcagatatagtagtgaactagcttggaaagaaaaacagcctaatcatacttaaccaaaatgatattcagtttttatttatatggatatagagcaaatgaaatataattgaagaaaaacaaaaccaaaaccaaaccaaatgaaaatatatatgataagcttttagtctttttttccctttgttaaaaggcttttatactcttattagatggattaatcatacggaaatttatatcgaccatgtaatattattcaaataaaacgttttgaatgattttgtagataatttatgatcttggatccttctagttgtggtgaatta

SEQ ID NO: 36273 - DNA, 350 bp, Arabidopsis thaliana columbia
aaattagggaccattgttggagaagaagaattttcaaggacatgtgtaacagatagctccaggaagcacttaagaagttacaatagataaagacgagaagattagtggaaatgaatctatagtgatgatcacaatctaattgatgataaccgatttgagtctcatcttagacagtacattgacaacaaaggtaccatagttttagtggttctgattttctaatatagaccccaagaagatattacagagataacactggttcagcttttcagcttaacaataaaatacatctgaccctatatttatgcaatttctccgtccaatatctactatatcgctaaataatgtac

SEQ ID NO: 36274 - DNA, 170 bp, Arabidopsis thaliana columbia
  unsure (1)..(170): unsure at all n locations
acacgcacactctctctcacctctcgctcgcacgctcactcgcacacactcacacgcacactcgctcaccacacgcacgctcgctcacacgctcgctctcacactcgcactctcaccnatcctcgcactctcagccgcacacggccaccacacccaccacactcacgcgc

SEQ ID NO: 36275 - DNA, 421 bp, Arabidopsis thaliana columbia
gtctcttcatattctccttttatctccaaaatttccttaatggtgtagcaaaacttgatatctgcatttaaaccctaatatatattattaccttctttccttttccgtttcttatttctctctctttcttgagaacaacattctccttttctctccaaaatctccttcattttctgagttttgtgttcacaagcagagtcgctctaaacggtatgcttaattctacgtttcttcatctgttttggctttctttgtattgtctttatatagctttcatggtttctttctgcattatggttttaacgacaaggattagggtttttccttgcataattatttcctaatttttgttctgttttattcgatttaatagagtgttgattgcgacgaagaagaaagccattgtgattgaagatgggta

SEQ ID NO: 36276 - DNA, 615 bp, Arabidopsis thaliana columbia
gcaaaaacactagagctcttctcggaatctgcttggtatagtctctttctcgtctactacggcaattttcatagatcttctctatttgcaactgatagataaccgccaaaatccgctttcctccttcagtgtgcatcggccattgcacagctctcaaaaggcaggaacaaagaggacaaagacgctacggcagccccagagcttcattccctggctgcagctgcagtagagaaagaatacaagcaaaaagccccggacaaacttcaactcatctcttccgcgttaagaatcttgaagacttgatcgcaagtaaacgatgttctggcccacaagacgcaaacgatttagcagtagtagatagtcggaaaatatcgaactctaaattcaaataactttctttaaagtttaaaccaaagagaattttgattactgttagataccaaaaccaaataactgtatcactccttagcctttacggtttccatgcttgcgacgtgcagcttcttttgtatcattttcgatgcgctcaacgtacatcggtagaaggataatctctttgatctccttcagcaaaacctctttcgttaagtcatcttctatgcactttatcacgct

SEQ ID NO: 36277 - DNA, 521 bp, Arabidopsis thaliana columbia
gagtctaagccaccaccagagactaatgacattcctgctgaagtgaaagaaaccgtgaaaccaccacaaccaccaccggaggagagttcaccagccgagggtcccaagccagacgaggaagcctcaccacctttacaagaaaacgctacggttggtggagaagaaccaccggcgtcggaatcagataagaatgaagcagaggcgaaacccgtggaggagccaccgcagaatcaaccagatggtgaagatattgtgcttgagtcagaagatacaatgagttgggcttcggcgccgcgatcaccgttaccggaagttatcatttcaagatctgtatccggttccatacccgaaaccaaaaacggaccacaaccactacggagaagcgtatcggaaactgcaagctacacatcagagatctccgacgtatcaacgatcgaacgatccactgtttgatttggtggagaagatgcattacgtcttcatccgcgtctgtgaaagctcggtctttaccacctccggga

SEQ ID NO: 36278 - DNA, 840 bp, Arabidopsis thaliana columbia
tagtatatggtgatatttacactccctaacaacaaggccgtgtccggatctaccacaagtgcttacaggttggaaatatcaaactcatcttctctatgatattgcctatttgaaactaccgtgatacctgactaatggcttctataggtcttcttggtcaaatacattccaaccacatcatgtcagagagctatgttcacttttggtctcaaactcggttgatgtagcaaataaattgtcaggtacatatcatgccgttagatgtacaagatgataggttaacgttcctcatataataaggtctttgataagagaatgtttgttatggtgaaacagacaaagggaggaagaacgacaaaggcccttcttcacttgatggagcccaaagagttgctaatgagatcaatgactcaccagattgtgtccttgatgctaatagaatggacgagaagcctatatctcccgcaacacgtgcattgatgtgtgacgaagaacatgagatcgggtcagagaaagagacatcggcccgagtgaaaacaagccaagagaaagaagacacagacacaagctcggggatttacttagagcaagaaagacagatattgtcaatcttcagggactatctcattcagctctcaaaccgtgcgaggataaatggtaaccttgatatcgtatccttgttcagatatttacaagtagaggattgtgctaatttaagacattattttaagcaggtaaaaatatcaaaagcaacacaaatccaagttgaaagaaaccagaagatgaagaacaaagccatcgagactcaaattagggacattgcttagggaatttttttga

SEQ ID NO: 36279 - DNA, 492 bp, Arabidopsis thaliana columbia
accatattcacttatttacttttcccatatattttgcattgtgaacctgacttattctttcatgatccgatagcgaaaactcgaaggcagacctggatattggtctatttcttagctacatgcggtgttcttgttcctactccattgatcgagttcagatattacaccattccgttttacctcttcatgcttcactcctgtgtcagaagcagcagcttcgccacttggcttctcatcggaacgatttttgtctctatcaatgtgtttacaatggcaatgttcttgtttagaccgtttaagtggagccatgaagatggtgtccagaggtttatatggtagggacaaggtttattatactctttttgatgctattgtttggtcctcagaaactgttaagagttcatgatgtgttctgttgttataaaaacatacgttttaaggtttcttttgcaactcgagtacaatagttaggcaggattggggatttgcatg

SEQ ID NO: 36280 - DNA, 519 bp, Arabidopsis thaliana columbia
gagttgatatctttttgtaacaattttgttctttctaaaatttttgattaataaggaaccgaggatttggatttataaacttatttgctcttcagttataacaaaatcaacaaaattttatatttttattctaccagatatatcatataatggggtaacactaagtattcgtttggggaaataaactttagaaaaaaaatcgaatttacaagttcttaaaaatgtctaattaatttcctcaatatatttgagcttaatagtttgggcccttatcgatatgggcctaaaccctctcacatagacgcgaacagttttagaaaggaaccgagatatttttttcagtagagagagcttgaagtgaacgccgaagaaaccatggcgggaatcgatacgcagaagcagcttctctctctgatccgcgatttcacctctgaaagatctcgtggaggtaagatacttcatacattttgtacttcttctggatgtttcgcgaagaagaagaagtcggaaagtgtgtag

SEQ ID NO: 36281 - DNA, 388 bp, Arabidopsis thaliana columbia
cccatcccccatgattacagttatttgtaaaaccaattagctgtttcttagctttgacaaggtttatctcctcaagctgctgattgtttcgcctctggtttgtggatttgcaattggagttaatgggtttttgttcttgtcgcataggcttgagtctggtgtctctgttttgcttggttgttttacatgttaaatttctatgtgttggtggaagtcactatttgcaacggatttttggtagctaggctgcatgtgtgtagaatatgattgcagaaaaaccattgacattttgtgttacgtttttctgaactggctaagcggctagtagatgctttctcacatatgttaacacctccatatctaccttttttgttttagccagaaagta

SEQ ID NO: 36282 - DNA, 352 bp, Arabidopsis thaliana columbia
ctgaatttgtgccgcttctgtcggtttcctcaagtcttttatacgagcttgtgatgagtgtttcaagtcatgcgtcagtctttcagatttccagattgctataataagttcatcatgcatttcttctcaaattacttagattatgacatttgttcatcttttgcttacacaacttgtttaagatttgattcagtaacatagaaggggtttcgttttgaactttgtgaatatgagctcagagcttggatctcagattcaatctacgtacaggataacttgtatcatttttgcatgttgcagttgagacctcgcgggaaagaagaggaaaaaggcgatacgatagcgggagaga

SEQ ID NO: 36283 - DNA, 533 bp, Arabidopsis thaliana columbia
  unsure (1)..(533): unsure at all n locations
cggaattcagaattagcttgaagatggtaaaactcaaaattggttagatcacaaattcccttacaaatatccaaaggaatctatactcttcattctggtgctaagtatccattctctcaaagatgatattgttggagtaagctcaaagacttgaggaagaagaagaaagtctaaaccaagactaaaccgagttatggctaaaccgagatatggtttaatgtgaagataagattagtgagatttaggagatatctaaatcatgtaatcctattaggtttaggattagaatcttatataaaggacatgttggttgtaacatagcctttgagagagttgtagaatacattgagagtttaggttttgaggaattttcctagactaataaaaagagagtcattcttttgattttgtgttcttaatctcttcattgaaatctatatttggtatcagagcggtttcttaaatcaagagaagaaaacatttttgaantaaacatgggagacttggttacgatgaaaccaacagagaatgga

SEQ ID NO: 36284 - DNA, 1322 bp, Arabidopsis thaliana columbia
tagaggatcaattgtgtgttattatacatatagaaagaacaaaagaaagaacgaaaaggaaaatggaatgtgctcaagtcccaaaggtcaaacaaagaagtgtgaaattgaaagcgaaaggtgaggcttctttcttgatacacttgttttgtttgtttggccaatgttcatcattcgccccttatcacaatcacacctccctcttcccaaacaaagccttctttcacctacttctctctttttgtttctaacaaatattgatttttttttcttgtaacaaatacttatgaacttgaagaaaaaagatctacttattttagggttatattttcagaagcttgaccatacacatgtttgaaacttgataagtaaaagaggagaaaatcaaaaggaatttgtttggagatagtatgatttatctttcaactggaaataatcattagattccatagattttgtatggaccacaatcccatcacacattccaaatccttctttgcccacaaaaaaaaaaaaaatggctggagaacaaacgatacacataacagatcatatcaaaaataaggatcacatcaacatatagacgcattattattatgttctatcaaacaccatttcaaagaaaaaagttatttgtatggcgaaagaattacaagtactacacatcgtgtaatttgtatgatgaagaaaagtaaaataaagtgcactaggaacaaaatttcacttggtgaatcattttgctggccattagagagatcatatcactcgaatgttttttccacattattaatcccatgccttaaaatccaccccccacactactaccctaggcctagggttgctaaaatgcgcacctagccagcgcacgatagctctgataatattaccaccgttgctaaaatgagccctgaattttcttcaacgccccctttaaaaaggagatgtctttttagcaactctgcgtttctttctctctctctagtcacttgttgttcttactcaaagtgttcatctctctttcaccggtggatttctcgacaaagattctaactttgagagagatttttcggttgtagatgcagattcagagcgtatcatctctcgagaaaggatcaatgtctcatgaaataagctagactctgtttctgttttcttcttcttcgatctcaatttcttcttcttcgagctaggggttgtttatgtttgggaaaggaatgggcactaggcagtattcactgggagaagtagggcaccaataaatccgagagctggattgcgaagggaacaagctggtagaggttcatacagaggtagttagtaga

SEQ ID NO: 36285 - DNA, 579 bp, Arabidopsis thaliana columbia
ctagaggcaccatataattctattaactttaaaatctaaaccctaaccactcgttttataaattcaaaccaacatataattttgtttaattgaaaaatctaaaccataaacctcatttttataaacccaaaccgacatatagttttttttaattgtaaaatataaaccctaaatattttttataagcccaaaccgatatctagtttcatttaattttaaaatctaaatcctaaccactactttataaatccaaactgacatataattttgtttaattaaaaacactaaaccctaatcctcatttataaaccgaaaccgatatataattttgtgtaattataaaatctaaaccctagtccttatttataaacccaaaccgatatacaattttgtttacttataaaatctaaatgcaaattcttatttataaacacaaacctatatttaactttctttaattaaaaatatactgatttagtttctttaatttttttccagattttagttttaattttttaaaataaagtataatatgtcataatgttatattctgatttggcattaaagagagggtgaatg

SEQ ID NO: 36286 - DNA, 571 bp, Arabidopsis thaliana columbia
cgtaggttcttctatccccaccaattgtagtatattctccaagggtgctaccagtatatgtctacgatgctcatgctgattgcggaaagaatgtcaggtatgcagccacttgagtacccctaatagtattgcatctgctgatctgaaatgaccataaaggattaagctgatcgactctcatatgcttttctattgattgcattgggatttctctagtgctgcatttcttgtcctgtatggaattgctttggcaacagaaggctggggtgttgttgctagtctgataatttatcctccgtttgcgggtgctgctgtatcagctatcacccttgtagtagcctttgggtttgctgtttctcgcccatgtttgactcttgaggttagttttctggttgtctgacttatttgttccttaaaataaagattagtggttagtggttcacttaaatcacttcgctaattccttctgatgttcttcagatgatggaggttgctgtacgctttcttagcaaggatactatagtgcaagccatctctcgatctgccacgaaagtaagttacactctgatgt

SEQ ID NO: 36287 - DNA, 439 bp, Arabidopsis thaliana columbia
aatatgctcctgacaaaaggactcatctgtaaatcactgtaacaaagtgtatacagagactagaaataatgtgctgtattatttactcgatttcaatactcaattcaacgtgcttgcatttatccgctctttatgagatgcttgtatttgctactattcgttgctaacagattgatctttagccgcatatgattccacaaggaaccagatcaaaaatttcagcttataagattatgagctgaaaagagcatattaaagatattgtcatccttttagaaactgtttggaaatgctgcaggtatcatggagcttgtctgtcattttcggtgtgcctacttgttttagagtgctgcaggtatgtatctgcttcaagtagctttcattttatgttctgttatatctttctaatagttaataatgtctgacattgctttttgta

SEQ ID NO: 36288 - DNA, 448 bp, Arabidopsis thaliana columbia
catttatagaacaagagattaaaaacttaacaccagcttttcatatataaataatcaatagatatttattcttggtgcaaataacaaatctgaatcaaaagataatatgttaccttgaacatggtttcaagcgatgaacatgacaacaaaggaaagtataaaccacgagccttcagatgtataatggatgtgaattctacattgacctttaggtactaatgcaccggatcacgtcagatatccgcagttaagcgtgtttggacgagagtagtactaggatggctgacctccagggacagtctcgtgtagcatctcactaagcggtttagttaaaactatatgacttgacgagcatttagaccgagaggccgaacttggcatgtaatacctctttagaaagcccagagtaagaccatcgatgatagaaacgtagaccctgggtcgaagt

SEQ ID NO: 36289 - DNA, 611 bp, Arabidopsis thaliana columbia
  unsure (1)..(611): unsure at all n locations
agaggatacctgtcaaataattacagcaaagcaatgtaagagaagaatatttctgatagatataaagaaatattttaaggaaaaaaaaaagaaaagagaaaagtaaaaaggtgaagagaaccttgtaaagtagtaaaaagacaagacgaaagatagattttgcatggacccgagacatttacgtgaagtttaaagctacatctgtcgtaatgaagacaccattcatgcaatttagaatgcatatacatttagcgtgttcttttatttgacgctgcgacacggcaatagcggactgaaacgacgtgtcatgagaagtagtaggtaagtaaaacgacattaaagcttgaaaataataattttggatgagtcgccgatgatagccgatgaattgcaactgcatcaaatgaatcgctgaaattaagcagcgtcacgtcaatcttcatcatcgtacatcttctgcggcagttattctctaatcactgtattttttctcgccgcagatctgtntttcatcattggttgtcgctgacgctgcgttcattaaaagaacacgctaattatatagtttgttaaatatgtattgcatgacaaagaaattgctttgttttgtg

SEQ ID NO: 36290 - DNA, 270 bp, Arabidopsis thaliana columbia
taattttgacttagttgaaacagaatattagcaaaaatactaaaacaccacaacgcgtaataatacccacacaggatatcattaaatttgaccaataagaatctagctcttggcgaccacgcaagtatcttccatcttgctctccaagagaaatctacaccggctttaaatttacataaacaccctcagtcagagaaaagtcgtaaacatagtctctctcatgaccacaagggtaacacattaatgctgcatttgatccacacaagaaca

SEQ ID NO: 36291 - DNA, 618 bp, Arabidopsis thaliana columbia
cccctgtaaatgctttactttcctgaaaagaatcagcaacgccattactcttttttattaatgaagctctaagaacagaatgtttcttctcctgaaattgtgtaagggaaagatagttgttaaggaatcagtagcagctactttatagtaagatcataacaatggtgtacttgaagaaacgttatgccgtaatctttggcttaagagggaacatagctcatgccttttgttttcctgtcctatctctaatcaacttggtctccgacagtgacttcacaacaaacctaccacagaatcttcttttacttacaactttcatgtgagatcctatttgtgggtatgataaaagaacaacttaaccagtgacagggacttgttgttatgttgttgagaaacttcaggtccccactttaagttgttattaaatccatttagaccaaagagattagagaataggatcatcactgaacatggagaagagagaaacttgctggcttttattattgacaatagcatatgtcatatctaaaaaacattgagaagacagtcccttgtgaattgcatatgaagtttgtagtttaatgcccacacactccaataattatgtcacaaaacaaa

SEQ ID NO: 36292 - DNA, 285 bp, Arabidopsis thaliana columbia
tgcagtagtgctggaaggagacatgttgttctgttgttgagaaacttcaggtccccacttttaagttgttattaaatccatttagaccacagagaatcaaaaataggatcatcacagaacatggagaagagaaacttgctggtcttttatctaaaaacattgagaaaacagtcccttgtgaattgcatatggattttgtttttagtttaatgtcccacaatcaattaattatctcatcaagacaaactgcattaatgcatcttttccaaatggtagagacagaac

SEQ ID NO: 36293 - DNA, 536 bp, Arabidopsis thaliana columbia
ggtaccgcccaaaccaacatccgattgccaaaattaattttgtcgttcggtttcgggttactcggtttatgccgaactcccagggctatatatggttgttggtttgaaccttggcaactgaaaatattaacaatttttctatttttatatgtactaaatgggcatcaaaattttgttggacttaaggcatgattagtgtttgggtcggccctgaagattaccaacacgaaataaaatttagttggcatagatccaacgtgaatatattttgttacgaagtctaacaacaaaattggaattattttcggtttagaaaaacatcaacacttttttgtttacgacttactaaaattaggattaaattgtcaaaataggcaaaagtaattcgcaaaactgtcatactaaataaatgagggcgttttcataaaactaaaaaagtagaaggtttctcttgggaagttttcaattttccatagcaggtctaaacatgctcattagcgattctttcttatatattaaagcagatgtttaaagtg

SEQ ID NO: 36294 - DNA, 408 bp, Arabidopsis thaliana columbia
tgttgggtatccattgtcaccggagccatcgccgtcgtcgaaatcaccaccgtctccggagtcgtcgccgaagctgccgccgtcgccggagtcatcgccggagtcggaatcaccgccgtcgccggagtcaccgccggaattactgccgtcgccggagccaccgtcggagctgccggagtcgccggagctatcaccggagttaccaccacctatagttatttaatatactctttaggttagtttgttaattgatatatatataaagctattttcttaattatttattgaaaagatgttagttttgcaattcatcctttttagtttgttttacaaaacaagaagaaagtgtgtcatgtacttgtgtccaatccagcagtcaaaaaaaatacacctcatcagaaaaaaatc

SEQ ID NO: 36295 - DNA, 881 bp, Arabidopsis thaliana columbia
gaaaggatgtaagcgaagattctaaacccatttgtttatttgtgattcattgatactttcattgtttctttgtttttcatcaatacaattgtggataagcaaatatgcatagagtttatatgttgaaagcttatcagtcatttaaaagaaacgaacaacatagttgtgtccactgaactagaacagacattaatttaccccaatagttaaaaagtccaatagaaagaacataaaaacaagagaccatcatttttaagaaataaaacacaaaacaccgatgagccgtagtatggtatggctagagctcaactggtcttagcttgatctgtggttgaaggcttgcagactcttaaagaggaaacagaggagggatgattagtagtggtatcctaagttacgacacacaagctcacatccatcacaattgacccataaaaaatcttataataaatcatccaacacaaattcacgcttaaacaaactcaggagcaacagttgtactagtaaggatgactagcataagaagagaataagtgatcatgtaaacaataacactgtttttaccattttatagtgagaagttaccggtttaggcgtcctgatctttgtaaatgaatctcgtgcgcaatcacggcggtagaggctattgccatacagaaaattataggtaagtcgactttgagaaaagtatctgaagcggttttaagtcgagctacagacttagggatttcttgtttgtttagtggaggactatataaggaactgtagctgtgataactcaacttaaggaactgaagtgggtatagttgagagtttttaaggaggaaaagtgttggcgtatcttcgaattttaggatttgattgaatttgtggaagattga

SEQ ID NO: 36296 - DNA, 624 bp, Arabidopsis thaliana columbia
tggattggcaacgaacggctaagctttaacacaaaaatgccacgtaggattagtctgaccaataagaatccatctttcaaatccccttccttcaatcttaaccagaaaactcaatttatttataatctttagaaaaaggtacttgaagaaacagtttgcagacaacattgaagagaagctctaaagattctttgtctctttctctgtcgcattgatttgtaaaaaagtgtggcagagagaaaccatggctatggcggaaatggcaacgaagtcttcactatctgcaaaactcactcttccttcttcttctactaagaagacactgagtctgagacaagtctctgtttcacttccaacatcaacttcaatctctctgttatctctctttgcatctcctcctcatgaagctaaagctgctgtttccattcccaaggaccaaatcgtctcctctctcactgaagtatatataataatctcactttacttcttgaaatgaccaaaatgtctcctttttgttgatgagtgttcttgtgtcttaacaggtggagaaaacaatcaaccaagttcaagaaactggttctagtgtatttgatgcaacgcagcgtgtgttccaagtagtaggag

SEQ ID NO: 36297 - DNA, 611 bp, Arabidopsis thaliana columbia
gttctcacatcaaagattcttaaccagggttcctgcaatttggatgcaaataagaatactttgcatcaaaatgagattggaagtagagaagcaacgatgatctatggaatctctcgtctgtcaccagtttggcacttgaaaagtttttaccattcttaacctcttgtaagaattttacattattgaatctttacttctcttcttatcatatttttggacttggttactttttttccctggaataagagatcaggttggcctgtgcttctacgtttttgttatgtattttgcaaacaaattgctcaattggtttcatcatgcctattttcagttacaagagatcttctctgataagtataaacttgagaccccattatctcacctcttagattataaaacttcaattttggcagctacatagtaacatgctacgctacttttagtattttttggtgaaattttctagtcaacacttggtctatgactctttaatatgttttgtttgttgtatctatgtatacttctattcaactttctctctactgtctgaatatgaaatcccctataggctttgtttcaagaaatatattgagaagaaacatagattgaat

SEQ ID NO: 36298 - DNA, 493 bp, Arabidopsis thaliana columbia
ttaaatcaagaggacaaaaaaaattaaatcacttataaatattaattttatagatgtatattttaaaaaagagaaaaaagaaaagaaatgggaggaagacactgggacgaaagacgacgtcatctattgttagtaagtttagcccaatcgtgttctctctgcgcttgtctcccaaattctcagatctaatcagatcgacgattcctgatttcatcagcttcgagagagatccttcttttgttcttcgttgaatgtctcgctcccagaacgaggagtttcaacaatggtggaacaagcaacgagataggaacaatcacgacgttctttacgccggcgacgatgaagcattcctcaccgttgaaatccgtactccggccaccgttgaccctgataaggatcggatccggactcgtaccgttcgtcagctctctcgtctctacctcctcaagttcaagcaactcgcatcttccttcctctggatcggtaactcttt

SEQ ID NO: 36299 - DNA, 496 bp, Arabidopsis thaliana columbia
tgaagattatgacattagtatttttattttctctcacattttatttttttaataataaaaaaaataaatgttacggcatggttatatcatatattttaatttcatggaggatattagattgttcccattttctattcatcatattagattacataattagaaaatactatttttctgtctctattgtagtggtatgtatgattggagagttgatgaaaatgtaagcaagtaaaatcatcgtgcagatcgcgatgctatgtttattatcatatatgcttaaaggatcatttgagattaataccgcaatcagcgggtgagtaagaaacttaaaacacataactactctctttgtcaatggaagaccctcttaagcatctaacacatgattcgtctagacaaccatttaactctaattatatccctaattgatattaattaaatcaagaggacaaaaaaaattaaatcacttataaatattaattttatagatgtatat

SEQ ID NO: 36300 - DNA, 545 bp, Arabidopsis thaliana columbia
atctcaccttttcctttccagtgagtcgcctcctttgattttccttggttcgttggtttctggttccaattcgttagtatttgttttctcgttattgttaaatgctgtcttttttaaaaaaaaacatttattagaattatcaattgtgaagtattcgtttggatggtaagtggagctgtcgctacatttgtctaaattattaaagattttgcttttaactactactttttaatactacattgtctgtaacattatatgttttttggaagtgcatcgaacgtccttgtttctgcaataacaatcacaaagcaaaaatttgcatcggataaaaacaaatcgaagaaatacatgcttatgacaattgattaacatggtaagatatgaggcttagctgatttgatcactgtatgtgccagatcattaaccgatttatcatattagatcaatttttagtagtgagctaccagttttcaatgattagttctgctacgtttcaatgtttttctcacaagattcattaataccccaattatattcgatactga

SEQ ID NO: 36301 - DNA, 451 bp, Arabidopsis thaliana columbia
cgataaagataccctgaacaacatcttcagcttcagaaatttcaagctacatactttatccaccataagctataatgctatatacaaaccccaacttgttcgtccactataaacaaaccaggggaatccaccataagctctatacgacatctttagtttcagaactatcacgctacacacttttatccaccataagctatttacgacccccaactagttcataagcctcataaccttgagaatcctatatctgcatacaattcaacttctccaagtaagaagaagtaagctggtaccaataagtacacaatttcataatataaccaacactttattacagcacaacaaatccaatgttgcaaaacatgagaccacataatagcagaatctaaggcctttcctaagagaccctaaaagcaggtaaaaccataataagagcagtatacagaga

SEQ ID NO: 36302 - DNA, 461 bp, Arabidopsis thaliana columbia
atcgagaagagcgattacagagagagatggtgatcggcgcgtgtggaggaggcgagattaggaccgtcgtcgaattcacccgacggtaaaaaaaaaaggtgactttaggtaaaatcgcagcactgcttccgagacgacccgacgactctactttactggatttttaaccaatcacaaatttctcttcttgttattctttggtgtttgtttgtttctttaagctagtttttcacgtaaaaaaaatatctgagaatattctatgtatctttgatggtcaaaggaaaaaaaattgggaaattacacgaatttggtttatcaacaaaaaaaaaagtaatgcacaaaaaggatgaatggtgagtgagtgtgttaggaggtcttggtgtgttgtttagttggagtagtgggaatgttgtagagaagaagacctaggacaagaactatacaccccatcgtaaaatttg

SEQ ID NO: 36303 - DNA, 515 bp, Arabidopsis thaliana columbia
gtcttactatatatataagaaagaaagaaaaataaaaaattaagagaaattttgaaaaatgccacttttacaggtgatcacttgatcttgttctcatgtttatggacaataacatttagacggtatttgaaatcaatcataagtagctttggccgtgacagtaaatcaatgcttataaaatatatttgttatcaatattcaaaactccaaagtaaacagtactaataattagaaccagtcaacatatgcattcaaaaaagagaagaactaatcggtcaactcaaccatatgttccacgtttatcaaattcataaataaaaactactactactatttaactataaatatttttccaaacaacacaaaataatagcaataggacgtatactaatagagtaataggtgggagcaattgttagattgtaccaatcaaacgagccgtgaccaaaactatagcgcggaaagacgaaagtatttaacgaaaacgatattgccatttgcgtttgttaataatc

SEQ ID NO: 36304 - DNA, 339 bp, Arabidopsis thaliana columbia
taggtgagaatagagcgactaatgttgacatgtggagaacatgcaaggacgaaaccgatcagagtcactcccgtacactgtcacaaccctaagttgcaagactcacccggcgacacatccgcagacaaccactacgaagactctcttgcacgacgaagggctctgcgaagcactagcagaacacaccctccatcatcgatactcctcccggtcacactagcatccatcggcagtcaggggcaagcacgatcagtatgttcgacatcctcatagagaccctacccaagcaatcgttgagcatcgatcttctccaaaaactctacaaccacaacacgcgac

SEQ ID NO: 36305 - DNA, 410 bp, Arabidopsis thaliana columbia
tatttatcgcctattttaattgcagtgttccagtccaataatggaattctaatatatttttgtttttgttttttagccaacgaatctagatgtctatatgtgtgtgaatgcattgagtttaagaagttaatagagtttttataaaagactagtggagtttatcattgatggagttgcaaatttatttaacgtgaatccaacaagtgttgagtttaaaaggttaatagagtttatatacaaagactagtggagttaccatttatgtagtgtcaaatatatttaccgtgaatccaatcaccaaccataagggaaccgagttaatcgacgtgtacatatactttggtacttatctccgtacctctgtgtatatactgtgactaagaaaatacattcactctggtggactactg

SEQ ID NO: 36306 - DNA, 842 bp, Arabidopsis thaliana columbia
ctgatctattgaaatctctaaagtaaagggtcgagggtcgagacagcaagcaaacactcgtgaaacatgatgaatgtagcagctgatcatctaacaatgagattcatatccaatatctcctactgcatcaaattgattctagccatccaccatatctaaaacctaaattaataggtaatcccaaaatttatcaatagtaactgttaagtcgatgaatgctttcaatcatgagtcactttacagtagttttaatatgttagaagaaatcaaccacatgtactaggagaaaacaatgtacctgtaaaaatggactgaacacctcttaacagcagctgatcaagctcagtttctagcttcgtcaactcaacctgattttcatttctgcattgcggcaactgcctccttagatcttggaccagctcgttaagtttctgaaatttactgccacaaatagatattcatatcatcattagataatactatgaagcatatactttggcaatcaaatggtttagtaaagttaactaaaagtgttgaatttcagatcactatgcttgatatgctttttctttctgtgaatgcatcacttaagaggactcgagtttgagatcagctcagagggatgggatgaagtaacatcaactagacttagtttgaaaaaaaaaggtgacgaaataaaaaaaactgatacaaaatgtgtcacaggacaaataaagtattattaagtatccaactatccatctccttcctttagttaatatcaccaaagagttaaagacatgaaaatgaatagaaaacaaaaccttttcatgcacagagtctttgcaatgtggtatatgtgg

SEQ ID NO: 36307 - DNA, 675 bp, Arabidopsis thaliana columbia
taagtttttagttgttgcaataaaactgcacaacctcgaggtgggagtgggacaatatcttttcagttccggtacgcccaagttagcaaatcggcaccaccagtgaggagcgcaaattagcactatgtcgctagaaaaacatttcaatatatatatatataaatatatatatttgtctaagaacatttctatatataaacaatcgcacatgtccacgactcgttaaaaacgtttcaattatacattctttggacattaataagaaagatcatttatgtctaatactctaatcccaagtacgaatttgtttttttcttttcttacaatttaaactagaaatacaaaataaaaataaaataaagggtttttatttgtgagtcgaatgaaataacgaaaatacccctgatctcttttgtgcctgagattgatttcaaaacgctgcttcttcttcttctctgatctctcctcttcttcggatcgtcttttactttgtgaacgatggaccaacaaccggagaggcgagaaggccggagttttccggagcgtaaaggacagaagcggaacgtagaggaaggagccgccgccgtagaagatcgagagatctctgccgtcagcaccgacggaggccaagcgcttcttagcgaggttgctgctcaagtctcggtactaaactct

SEQ ID NO: 36308 - DNA, 705 bp, Arabidopsis thaliana columbia
ttctaaagtcactgatgtgtgtgatgttgtatccatagttgtttcctctatctttaatggtgaattttattggcccaacgacttttgataccgctaatttcaaagataatcaaatctaataaattattgttttgacgcacgaacataaccatcgtatctatagctaatttctcgaggttaaaagttgaaacatagtgacaacacaattcgaaactcgatggaaattggacgtgactaattttcaaaggacaaatagacgaaatgttcttgtctccgtttcttaacaccattggtgatcttgagtttattatttggaaacacttgtgatttattcaaacactagtattttcagaagagattaataaattgtttatcacaatactaagttgaatatgtaaaatgtaaatatagttttatctcaaattttggactgtaagattttgtaacattataaatctctttcctgactaaaactggtattgaaaggagatctagtgaaacattttgcagaggtgtcaaacagaccggtccacaatgagcattagtttttatttaattttattgaatatttatagtctgtggatcgacccaccaatctgcgggctaaatctgctaaaatctgcaattcgtttgagctggtctcactggcccgctattttacgggtatgtaatatggtgccaagctcaccttgctgtactatatga

SEQ ID NO: 36309 - DNA, 687 bp, Arabidopsis thaliana columbia
ctgttcaacatactatttttttagcttgttcttgtaatcttttttttttttttggtcaagttcttgtaatcttatgcaatttaaaccgaggtaaaaacttgtttcaaaataaagacgtgcgagtgatatttgaaaccctttaaatttgtatataggtcaacattaatgattcatagtccctctctgtactatagtattcttctcatgtttatattttacaccagaacattcatctacttgcttctggaaacaagttttaaattaatatgttaaaactcaaaatctctaattaattccctttttttctttacaagtcctctaagaaaagaaaaaacataaagggaaaaaaaaaaaaaaaagagattagagaagactcaaaacgattagcctgcaagacatggatcattacaccacaccataagctcaaagcaacaccgtatcttcttcttatacaccaaatttcacacaacacctgacgggagacgaagaacaagctgaccacccattaaactgccacacaccaaaaacataaaatacttacaacacccttcacaatgtctttaagatcagcaatcatcacataactacaaccaatgtaatcacaaacatgacgatgactgaaagcattaatgatttagctcctgacatagtagtagcagaagtcggctagaatgaaggtttggacga

SEQ ID NO: 36310 - DNA, 654 bp, Arabidopsis thaliana columbia
ccatcatgtcaagtgtttaaagcactcgcatgtttgtttctttcattcttagcattcacacgtgtttctttatcttgttccgatcttctagccaatagtgtggactgttatacaaacagtgtttgtgccatatgcaaatgaccacctagaaaagggattcccgttgcccataatgcacggattcacacttcagaatgcggaaatcatctgctcagaatctgaaatcacagtttgcagcgatgtcgcctacttggattcgtcccaacagcctcaatggctttgaagctaccacgatctacgacttggaaacctaactcgttgtagtttacaattggtggttgtaagtgtcgctactggtttggcatttggaccagactcagcgaccaaaacgaacaaagctttgtataatacttttgtacttaatgttgactaatctgtgaatgatatttctgtctgaaataaaatagtctttgtaattactgtggtatgaaaataggctatggtaaataatatgtcgacgaattagttggtcaagtggttagactgttagccagcttgttcaacttcatataaaagtcgaaaaattcaccaaattctgtatatggaatctaaaagtgtatactctgttctaactctttgaaatgatatcattgt

SEQ ID NO: 36311 - DNA, 827 bp, Arabidopsis thaliana columbia
ttcaggtgatagttgtgatcgtagatggtttctcaacttctcgcgagtccatgtggttgctattcccttcacattgttgttctcctcgatgaagtgatcattgaagcaaaatatcagaatgagtagacgtacagcagtctgcaccgcaattgccgatttctacgtccgcaccctcaagaccggcctgatgtagagactaagcatcaaaacaggtgcggtcgccttcataggtactgcaaaaacagcaactccagatgcccaagagagttcactctggtagaaaaagagaaactttatggaatcccctggttctaatgaaaatccttcacatggatggttcaccataaaaccatttcctccacattgttttcctgaaaccgtaatacttaactcccttgtggtcttcttagtatagagctctttggacataggctcgtaacaagtgtctccaatgtgaaagaatccagtaaatggctgaaactctatgatgtggacaggcttcagagatagccacacaacaccagatagattttttctgatcagagcagagctactccgtgattctttgggacaagccaacacaaatggatcagaccgattctctgatcctaaagctgaaaggaaacaaaacagctgtgaactaggacaaacattctggtcagatttctggattgctacactcccagaatcttcaccattaataaagccctgaaactccatagcagcagaaccagtgttgtaccatattcagctaagttatgcaatgtattgactgatgacagcaatagacatgagagaaggagaagacaatgaaacgcctttgatga

SEQ ID NO: 36312 - DNA, 599 bp, Arabidopsis thaliana columbia
cctatttttgtgttttaaaaaactatttaatacttctttttatttgtttaattctcaaaatatttaccccataccactacctcaactaaaaaatattttttaagaaaataaaaattactgtatgttgattcttctctaggttgattctaacaatatgttgattcaaaaacgaatatcttaccgaaacagtcgttgaattaaagttgattcttcactctcgacagctgaatttttgtagagatgaagaataggaactctgaattattttgaaaggaaaacataactaaccaagtagaattaccaagtctaacgacctaacaatttgtaactatcaaaaactatatgtcacacacatgtgagtagctcgaataagttcatgggaaaagttgaattctttcattcgtctaagagtctttcgcacacaatatctcaccatgtgtgcagtgatgtcaaaaatataaccgaaacagtggaatatcccgggctggtccgcacggatcagaagaaaagcgggcacatcgcgggcgatctgtttggtcgcgggcttacccgtctgcgatctctaataatgatgtaagtgtaagaaaaaaaaacatatg

SEQ ID NO: 36313 - DNA, 777 bp, Arabidopsis thaliana columbia
  unsure (1)..(777): unsure at all n locations
ttccctatgtgtagatatgttgtaagagccaaggctggtaaaaagcagtccacaaaagatgcaagcgggagaagtatacactctgccggagcctcacttcgtcgttacaatgaacttgctttaaaaaaggtttgtctctggacatgttttgctactgtttccttctcttttcagctgagattacaaaaggtcgttgattttttataataatatatgcggctctgtccatttgtaaaggcaattctgaactcggaagtgtggtgtatagttttgtaaacatgatttaggtctcttaaacgggtggaaacattggccgcctcctcgatgattatcaaccgggatcaggatcataggaaggaaaacataaagaaaaaatgtttatatatttttttacctctaggaaagataattcatagccttgaagtgtaatttttgtcatttttctctctattgttaggatattcaagagctacttgctagctggaaaccttattttgatggtgctgcttgtgtttttgtccatgctccctcaagcagtaggcaattacttttcaatggaggcaaaccgtactttagcagccaaaactgcgctgtacgaaacgttccatttacgatccgtcggccaaccttcaaggaatcacagcgtatatataatcagttgactcagattgcacatgtaactgaggagatttttgttaatcngaccagaagtcaccaaagctaatacagtggtgcagaccacaatgaggattctggcaaacctcaagaaaggaagag

SEQ ID NO: 36314 - DNA, 505 bp, Arabidopsis thaliana columbia
tcacaaactgaagcagcagatgagaatatcacagagtaatgtgacgccacgtgaaagagaagcggcataaacatcaaattcagtgataggaaacagctctccagctgtccaaggataaagctatcatcagggatctctcctccatggtacttaacttcctgcttggtcttgaaagaagatactctaggaatagcgtcaatccagtagatgacgcaggcgaacaagaggagatagtaagaagagttgttcatcccaacggcagagatagttgcccatgcgaaatctgtagaggctgtgatagggtcacatgcgaacaagagacgctccaaagcgacaacaatggaaggattctccagctgaagccatttgaattggagcgaagtccagcagccgatgaggaaagtagtctgagcgcagagaaaagccgcgagcaagccgagaggaacggaattgaaggaggaaaagagagaagatgagaagaagaaagagatctgagcagcgagca

SEQ ID NO: 36315 - DNA, 547 bp, Arabidopsis thaliana columbia
ccgtcaaaaatagtcccaaatcgactacactaattaatcttatgacacaaccgaatcttacatatctaagactaagttcagaatcactatgtccaaatttacaagaaccattaaacaataatatacgacccgatgatagtttttcgagaaaaaatctccaccaatcaaacgataggatcgatcgtgtttgacatattatatcaaaaccatcgtgatcaatatcttataacgcagttatttgtgagccgacaaatccttttaccacgaacatacatttacagcgtagttattattatttcaatcccataagatgtcattaactacagttctcttcgttttttttggtgcaccaattatagttctcaaaacgagacaccaaaacaaatacaatttataattggacccatcgattttaaagtaaagtatgccacaaactttaaaaaggctaaaaaaagaaaagaaaatataaatacacttacgtttctcagactccatatataggactcaaaacttctctggattcttcacatttcaccacaacgaccac

SEQ ID NO: 36316 - DNA, 502 bp, Arabidopsis thaliana columbia
attcatccgaatcgtattaaataagaggagagcgagacctgggtttctgccggtgacgcgggtgaagattgagtgaaattctttctccttgagaggacctcgtgaaatcaaagcctgaattagggtatggtgcttccagcttagcgatgccatccttagagacctccgtaatttcacagtatgaaaaagctagggttttagaatctggtgaaccctgattgtttctgtgaattagggttttgtatttgttggggagacagaaagtgcggtgagagagagacggaatggcgggaagcgttatcgacacgatgacgccataaaattattttgacaggtaattgttttttaatacagctttaattttatcttttctgaaatacgaaaagtccattttgcgtttgttgtttgtggttaagaggcgtggtaattccgtaattgtaaagtagtccaaaattaatgaaaattagcaaacctgacaatgaaatgtattggaattgcaaaa

SEQ ID NO: 36317 - DNA, 441 bp, Arabidopsis thaliana columbia
ggtcatgttaaggtccatgttccttctctcgtgtatctctaagtggttttagttgatgtaattcacgttccatatttgagtatagtgatggtctgataagatgagaatggagtaagaagagtagcataattttggtcgaggttacttggagcagttgcagcaatgggttttggtcgaagttacttggatcgattgcattacttgtataaaagagaccacatgttttacgtcaccacaagtttgtactttggtttgaatgcttgtacaccacaaaattatattccgaacactagttcttattgtgtattctatgacattacttgtatgctaaacaataattttattttcattgttctaaattttgaagtctctgtatatgcataccaaaacactcttcttttatccactcttattgttttaagtatccactcttcttgttct

SEQ ID NO: 36318 - DNA, 522 bp, Arabidopsis thaliana columbia
ctcatcattgtaatttacgaacaacctcaatctaatggtcagtgaagatttattgtgatagtagtcgaaatgttactatcttttttattcaacatttagttaacgtcctttcgcctactacaagtcaatcaatttaatacaagaatttgccatgtttggctatataagtagccacgacaacaaacttcacactttcttgcctgaaatagaattcacatgggacctttctctgacatttgcataggaatagataaactcatagaataaaaattcatacgtggattagtaataaacccaattatttactgagggaaaaacaaaaagccatattaaaatgaatattatattctaatgtattaaactattaataaaaaaaattcttttgaatgggattggttttcgattggtccgaaaccccagaagcaacagtcattactctgttttcatatgaacactcttcatcctcacaagcagcaacaagaacaagcacaacaacaagaagaagctagatacgaatgggat

SEQ ID NO: 36319 - DNA, 865 bp, Arabidopsis thaliana columbia
gaagcattttggctgctttcttcaatggttggtactatcgccacccgcacaatacactggtaaaaaatcagttacttactctgaaatcttaaataggcctgaatggcttatcatactgacagtatcatgatacctgctttagataaattggattcgggagcatgtttttatccgagtttggcattcaagaagagttggtgtgctaatgtatgtcattttcgcggagattctcttctggggtttggtcactggtgtgtttcacagattcaagatctattggaaactctaagtagaccgtgaaaatacctaactctatgttgaagttgttatagtttaggatatataaaatcaaattcatggtaagtaatgtagtcaaattcatgataagttatgtatatttttcgtaaaccttggtcagaatatcctttgttgatgttgatgatataggcctgtatatgcatttcaggccaatttcaccgatctaccgtattggaacttaaatatccgaatgatctgtatcctactgtttcccacatttttttacgtattcttccgatagtaatattcgatatcctcagaatggagacggaaccgcaccgcactttatccgcaggtgaaccgcatgtctccattcgatccgcaattgctaatttacaatctcctaaatacccttacccgatctgcaattgctattatccacgaaccggtatgctaccaccgatagtaattgctaatatccgaatgatctgtatcctactgtttcccacatttttaatgtattcttccgatagtaatatttgatatccttagaatggagatgaaaccggtacgcactttattcgcatgtctccattcgatctgcaat

SEQ ID NO: 36320 - DNA, 979 bp, Arabidopsis thaliana columbia
tatcatacaaatcacatatgtttgccagagcttcaatctgtgttcttaactctctagtatgcagaaaaacttccaataatgttatctttggatgaacgacgtttgtaaggctgcctaaccgagaagaaccatggtcagacccatcaacaatgtttgatgaacgcctcagttctatcgatgcacataatgtatcaagcccagatatatagccttctaggaccctcctcacagcaatagcaaaagcctgattaacaagagtatagcagcttttgttattgacttcttcattttcaccaattttacagctcccctgtccctcaacagctgattccacatccaaattcaatcttgtgaaatggtcaacgaacttatggagaagaaataccaaagaaccgaagcagcctatatctctaagaatctgtcccaacgcatcagtgcttgacaaccgatgccacaagctcggaattttgtggaaggtcctgtcagctggctcagaacaaaatgcagaagagagctgttctatactaataagagaagactcaactccttgcagagcattcagcgccaacctgaccaagctcgattcctatcacaaacaacaagatgtaagaaatgagaagtaggttcaattacaaaacatttttctctaaataacgcagaactagactatgaaaggactatctacatatctcatctaagcactaaagacagtacatcattctcaacaaaccctagattgagccctaatcaaactcaatcaataaaataactcactgcaattgaagttcccaaatccccaattagggtatccgatctaagccacacagaaacagatacattcacacaaaagcaaaatgcaagttcgaaacttacagagacaaaggaagaagatgaagaagaagaagcagaagaacgagttggaggaagaaatcggccgctttgagacggtagagattccaatttcgcggaggaaggtatg

SEQ ID NO: 36321 - DNA, 466 bp, Arabidopsis thaliana columbia
ccgaaccaagcagctacatgcaattcctcaagagcatggttattgatatggaggaccacgtccttaaagcttaatcaacatcaccatcatccctatatgtttattaagttgttttcaattatatctaataaagtgtgtttcctttcggaatgctatattttcaattatatataataaagtgtgtttcctttcggaatactatatacgtaccatgtggtttcttaaatcaatatataagaaaatgggtcttgtggagttactttctgtagcatatacctttagatgttgacatcttttccattcaagatacacttggagactaaattttacggtttcaagatgatctaaagcttaccaattgaagggaactgaaatatttgtaacatataacaaaacttctcaaattctattagtatcatgtcgtatttattgtaaaactgttttttggggcaaaatataattttac

SEQ ID NO: 36322 - DNA, 599 bp, Arabidopsis thaliana columbia
tacgacgtcgttctaagagtgtgaaagaaacgacatcgttccaatcgaaacgcatattacgccgtcgttctaacataaagaagagaagtattacgcagttgttgttgaaccagtggcccgaaatctcgaatcgactcatctctcagctcaccggtgctgcattatcaaaactgcaggaaggtacggcgagtttctggtctctgaccgatgtttctcaattgggtcgaggcttttgctcctgcttctcttgtatatgctatgctttgtggtttgacttttagatctatatctgtgatctcttcttgcttcgataacgatttgttcgttctaggagtgactgatttgtaattttgatttgcttgattgattcacactgtagtttgttcgatctatcgttatggaatataggatttggggttttaggctttttaagtctttaagcttgatttgtgtgaattcactgaaacgtctcttgtttgctgtagtagggaaatttacaaaattttcaatgtcaaaatttgattaatttaaattttatgattcaaagaatctctttttgtatttgaaggatttggttgtgaagatggcatcgaagttga

SEQ ID NO: 36323 - DNA, 781 bp, Arabidopsis thaliana columbia
cttaagttcacaacaacaacctctaatagccaacgatgagtgtgtcagagtcatgacttgcttaaggcgttcaatggcctcactactattcccactgtaaagatagaaaaccaatcaatatacgtttatagaaatcttaagctaccaattgaaacaaagagagaaaatggtaaaaaaagatgaaacctttcgtataaaagatcagacatggcaagcaagactgttgctttagaatcatgagaaacctgatcatcgttaggttgattcccaagacactgctcaagcactagcatcccttgagcataagattcatctgcaaaaattcagaattcacagagacccatttcgaattcagtcagagacttagagtttaaacacctaaaatccttataactatagagaaagacctgatttttgtgacctagcgtgagaaagagcgtaattaaccatctgaatagcaacatgattcgcgtttggaacgctgatttcaccgtgaatcaatctcaatggcgtcgagtatcgaataaggtttcctctaacggagatcgtgcggccacgaatcgttgccgctgcttctctggagaatttggcagctgcgcgaatcataatcgctcaatatcttcttttttcttgtcttgctcagaagtaaaggttttactcagtaaacgtcggcggacgtcttcctcgccgtcgtcactaagagtggccaatttcaatcggtataatttgagtttggtttggaaaatcggtataattggcttggttttgtgataccaaataa

SEQ ID NO: 36324 - DNA, 749 bp, Arabidopsis thaliana columbia
ttttaataagggctccctatatgaatgaatcagtgggttccctgtcatcaataacctattattttctttaaacggggtttcagagtcacaacagcaggatgtatctaacttgagcacttctgcagcagagcaccagattctggtaggattttgtaatgttagctgtctgcttgtgtgagcaaggagcgatctttaatcctagaacttaatttccttcaaatgtaatgctatggcctacgggacaaatcagtgagagctaatcatgacacataataatcaaatttcagatattggcaaggcaacaagctcagagagaagaagagttagcacagacacagcgccatattttagctcttcaggtgtagtagaattggttgcattgatctgtttctgcacatgttgcaattagtaactgtttattctgaatcaggaggaaatcgaggagcttgaacgagaaaaccgtcttcacagtcaacaggtatgtgattacacgagagtttggttgctttgccagtttcttaggatcttatttcaaacttccggtggtatgctaaattacaggaagcagtgctaaagacggagttgagggagatggaaagaaaacagaagagagaaggcgtggatatgacatacctaaagaatgtgatataaaactgctagaaacaggttaaaaaacatggagattaaaggtggattcacgaagtagatgttttaggggtagattaacttgtgataattgcaggtgaagt

SEQ ID NO: 36325 - DNA, 524 bp, Arabidopsis thaliana columbia
tccaaacagattgtggtaaggcctgaattaatatttacataatcaaaagaatcctacaacaacaggaatctgaaatctttattacaggtactaccagaagccggaccagccactggattcgagctatttcatagaatggcgggttcgggtgaggaactagagtcaaagatatcttcgcttatggcgatagatgagctaatggggaaaacaggggagcaagtggcttttgaaggaatagcgtcacagtatatacaagggaggaacaaagagagagctaacacgagcgcacgcgaatctgtcgcagctgttaaaacaatggctaacgcgatgagcagcggaagaagggagagaataatgaccggtatatggaatgtggaggagaatccattgacttcggcagaggaggttttagccgtctctttacagaaactagaggaaatggttgttgaaggacttaagattcaagctgacatggtggatgatgaagctcctttcgaggtttcggctgcgaaaggtcagaagaa

SEQ ID NO: 36326 - DNA, 923 bp, Arabidopsis thaliana columbia
tttattgacgttcttgaatttgcttttaaaacgtcttgtcttggtttcagaccacagatgacaatactggaggagcaaagattacagcagagaaaacactttctatggtttctgaccgtgaaatcttaagtctccagaagcaatgctctgaaacatatcctttagaaaacgttgatggcgccttgatattccaagaaatggataatatcaactttgcaggatcagcgtcctcatcgagcgtgtaccaattccatgaagcgaaaatgacggctcttataagaagaaatgggattctggaagggcagttagaagcagcattggcgggaagagaggcggctgagaggaatgtgtcggttgcgttgaggagcaaacaagagactgataaaaagttatctgacgccatgagagatgttgaattgcttaaggagaagctgaccgggttagagctcgctcaagaggaagctaatagtttgtcaaacatggttcactccgacaatgtcaggcttgagcatgatgtagcgttcctcaaagctgtcctagacgatacacaaaaggtaaaataatcctagtagatatacaagcgttttcaaaagactgaggattaaagtttaataccgttttgtgttatgggttttgtaggagttgcattcaacaagaggagttcttgcaggagaaagagcaagagcgttccagttgcaggtgtcatcataatcatcaatagactctattcaaatttgcattttcaaaatgtagtattgttctaaaaacttgagatgaacgcaggttgaagtgtttcatctgaagcaaagattacaatctctagagaacagagctgctacacccagaaagcctttccatgtctaaacacagaccagagacaacacgataacttttatgacttccattttgtagtactcgagaca

SEQ ID NO: 36327 - DNA, 898 bp, Arabidopsis thaliana columbia
atctagggaccgtttcatcatgttagtttcaagaacgattttagatccatagacggattgatttagatggtctataaagaactgaatcatgagaaagtaggactatccgagatattaacttggcgttttgaactagtacgttaatttttttcaatccaaaaattaaattgtcttctaatttaataaaaatcgatttatttacttcttctttattattttttcttccttttaaaatcattccattatatcgaaattaaagtgttaaagttatactagactacagaaccaaaattattacacaagcagatatgtgagccattttctgaaaaaaatacgaaaaataagattcacgatgcgttttggacgaaaacgccttattcgctaacgaaaacacatattcgtgatatttcttcgacttttttgctccaatacgatttttttgccttttttcttgaggctgtttcataatcgtattagtaaaacccattacgcctgatattagtcttggaagcacgactatctgatgccaattagtccgcatcaatgtccttgaaactatcataaaccttaacctgacttcaatataaaccagtagcactatcttctccacattgtgaattctccttctgaacattcctataaaaatatggccatcttctttcatccatgcaaagagaaccagagaatacttgaatttgggaccaaacattattagtaagttctgtttgcatgttcgaacatgcatggatgaaatatgacctttggttcgttttttgaagtggaacttatcgagtattaatttacagaggtttagtatagaaaaatctatttatattccattgtaaaaataatctgagataagtgaaaagtaatcattttaattttttcaacatatttg

SEQ ID NO: 36328 - DNA, 908 bp, Arabidopsis thaliana columbia
cttttctttcgtccatcggcttagcttcccttgtttgaaatttgtatttcaccatggttccaaaacaagtttcagatgaaagaaaaaaaaagttctagtacacttattttataccactcaagttcaacgcacaaaattacaattctatgttcaactttttttcgtttaattctgcaaattaatttacagaaaaaaatccgtttttttgaaaagaagttttgcgattcgttattccatatcggctttttactttcttgcataaacaataaacgaacatacatgttgataattgaaacacataaacagtaatttcttgtgtttgtttatgtgtattttactctcttttactttgactgagttaatgacaagtattattgcaaggtagacaaccacatgagctacggccggtaaccaaatagcctcggcggtttgtcaatttcctcgccgtctcggccgctttctgcatctgctcaacatgttgctgcctcgccgtagctctccaatcttctgctctccggtgcaccatatccattctcttcattaatttctcctctaaatttgatctcatcttctgtattttcacctacaacaataattaccaccccaaatatcacacattaattatttaaaacttcatcactcaactacatttatggactattaattatgattatatagctagataattatgattaatagttaataattaaattttagtctccaaattctcaagagaggaaattactaattttttcacatgggacttgcacaaattacaagtacgactatcatgtagctactacataaccaccaaaatcgcagacattaattcttgaaaattaatcatttcaatatagctacatttatttttaaagtttaatccaaattatgtagctagatgatagatg

SEQ ID NO: 36329 - DNA, 972 bp, Arabidopsis thaliana columbia
tatggcagaattttaaagtacatctaaaaccattatggcgcaaaagcttgcatatatacttgtcaagtgatccgctagaacaccacaaaatctttttccgtgtttttttgtacatgctcaatattaaaaaatcagttttaaatagttatctttgttgcaccaaaacccgttactcccaatagtgtgaccttatgaacacttgtaatgtactggcgacctccatctttttcctcccatactcacattctgcctattagtctccctttttacgccaaatttcatacgcgacgaatgactctacagttcacaaggaatttttgaagatgtagattctaacaataacgagttgatggacatcagagacctgttgtattttaggaaattgttgtatatcaggaaactgcatcagatcacatcagacggttgagttgctgacatagacgcataagctgacatggcagagatgaattggttgatgtgacgagccgaagagctttgctgacttagcgtggagatcaaagacgaaagtcgattaagttggtgaatatttttctcaacaaataaggaaagagataagcttgaagatcaaagaagatcccgcttattgattctcggagatcctaagggttagggttctggaaatagtataaatattatggagtttgcattgagccacctaagcattctagaatattggtatacgtgtgttatcttcaaagcctagcaaaagcctaaaatgtgagtgtttgtaattctcttggttttcacagatgtgtggtagaaaatacagaagagagaattaggcatacatttcttcttagtcggagttgatcattcatgtagaataggtcaaattatttctaagataattgatttttgtaaaagatttattatcaataagaataagtaaaaaagtttgtttggcgcgttctagacaaaatcattgtgttgtgtatcctctatatccttaca

SEQ ID NO: 36330 - DNA, 520 bp, Arabidopsis thaliana columbia
ctaaggctgctcttactctgtttaaacattttatcctcaactctcctctccctcttaccccttcatgatctatacactttgtaacaacaccaatcacactcttgttgttcacaatctagctaaaagttcattttaatgttcaatataacatattcactacccaactaggaccctctggctaataattttaatgctctctatcactggtactcagcttcggttcttctcttcaagtgttgcaccaaagaatgctctcaagtctctgctatttctggggtttggattcttctttttctttggttgattttagtgtctctgttatattcttgttccagaccataagcacgacctctgccaatcacaaaacagtgttcaaacattataaaatcaaggtaaaccatttgtcagactagatatatgactccacaatatcaatcacagccactgatggattgagatactatggggaaaaccgataacattgacaaggtaaaaagttagatatgattcacaagcatta

SEQ ID NO: 36331 - DNA, 497 bp, Arabidopsis thaliana columbia
gaaaactaaaataatttaacatgtataaattatataaacataaaagtcactcctagcttgactaggtctggatcatccatgtgtgaggtgaaaaagtggtcttaaagtaccactagactaatgaagtcaaaaagaacaaaccctaaaaataaaaacattgaagtcctaatgctatatcaaaattgatgttaataggaattatcaattatgctagagaaacttacaacaactaaaatcgcatatccatatcaagtgatgttttcactcggaaaaattaacaaaatgttcttgtttgatacaagtaattttgttttcgccatcctttatttttattattatttgatttgtaccttttgcttatgcggcacaaagtttgagacagttggggaaatgaatgcaatgaaagaagaagtattgctttggaactttcttgcgggagacgcggctactcggcgcctctaaagacagctcagcaaatgacaaataagtcaaaacag

SEQ ID NO: 36332 - DNA, 863 bp, Arabidopsis thaliana columbia
tatcgttctcatccggaaacctaaaagcataataagagaaattgcagctggaaacgaactcttaccaacggtacggatctccgatcttgacgccgtgatagtcatcgacgacggaatcatcacgccgagtcgcaggatactgtaattgctcgccaaacaccgaagaagaacccattatcgcagagctcgaacaataacaacgacgagaaacagaattgggtcgattggagaaggtttcgtttaggagaagagaagaggagagaggtgattggcgtaagatatttatacggaggcggcgcgtgattgttgggacggtaacaaacgcgaaaacgtgagaacgcgcgtgacttgcaaacgctgtgagcatcggttttctctctaccgcttcttcttcttccccgagattgccgttaatatgtcaaaatggtttcgtcgttctatcaaacattttatggtaccaaaatttaatctaaaatgttcttattcaaaaatatatttttatcaactagtctaaattgttatattctgacagtttgacttgtatattttgaaaagattagctttttttttaattttatctgttgacatgtttgtttggataattggatcagaaatatgaaatatctaagcatggatacttttccaaagatacatgtgattttgtagaccttttttttttgtggtgagatgtgacttttgtagactttgcaaaagcttatatccattgcaaactgtataaataggttttcgcttaagaaaaaacatcttgaacaacccactaattcatacaacaccatagtttgcgaaaatgatgcatagcataagcatatgttgttgataccatatttaaagccttttgggct

SEQ ID NO: 36333 - DNA, 424 bp, Arabidopsis thaliana columbia
acctttggaatgaattagatttacttaaatgaaaaaaagtggtaatcttgatatgtctgatgattcaatcttccttcgcgtccaaaacgccctaaacgcaatattagataacaatgatcaggctttatagccaatctctttttaaaagtttttgtagtaatatagaataaaagtaagaaatcatttagtattttttttggttacctgcatgatcatgatggctgctttcttatgtaggagtttattggaccctcggcaaccaaaagtctgagcgcacttggggcaaccagtttcaggtgggcattttcgcaagaccttaagagatcacgagcatctgttagaggtcaaagaagagcggacagatctgcagaacaaaatgttgatgaattagtcatcatagtcaacaattgcaacttgagaatta

SEQ ID NO: 36334 - DNA, 733 bp, Arabidopsis thaliana columbia
gatacgaacaaaatcaaaggagaagctcctcaagtgattcggtgatcgtaaaggactaacatcttcaagaccttccatcaattcccatgtattgatcgtctctggctctccaggaggcgtcactattggagttttagccacaatcttagggattttctcgtttatcgtacttgaccacaccttagcttcgataaccttagcttgcaaatccaaattcatcttctcttcatcgccgtgaagaaacccattaccggagattagcgtctcctcacccatttggtcggaaacgcgttgcttgtaaaaagagtcttccaagtgtttgtgaaaatgcctgagagaagaatcacaaagactaagagatccgattgtggaggaagtgagagccaccgtgtgataactatcgccggtgtgttgtgctggatgatgaacgtgcattgaatagcttcgtggcacaatcaccggcgataatcctcctttgcaattacggcaacggtttcgattcttcgagctcgcacaacccattttaatcaaatcaaatcgaaaacagagcaaacaaacaaattaaaaaagttttgatttttgggacgcaaggattagattttagacaaaagggtttgctaaattcgatgagatgtcataaaaattggcgatatttgtaagaataatagctggaaaattacgaagatcttgaaaagaacgatagaaaaaaccgacagatcgtaaaagaataaaa

SEQ ID NO: 36335 - DNA, 549 bp, Arabidopsis thaliana columbia
ccagtctctttctctatgaaacgcatctccccggctctagcaccttctccaacccaaggtttgattccccgctcataatttgtccaataggcaaaatctgttttaagaaaaaaaaactctttgcttgatgtgaaatcctaaattatgtttatttctcctgaagtgtttcctctcaggtcctcttcaagaccttcaaaatctcggaaattccctctaggtccacctcttcaagcatttcctcctcctccccctaattcaggtttgttgagattttttcagttgttttgggaacaaaactgtctttatgtggttcttgttttggtgtgaaaccaattgctgttattgtgtttctccagattgttcttcaactatttgtttggaaccgtacacaaacacacctccgggatctccatgtggctgtgtctggccaattcaagttgagctacgccttagcatggcgctctacgacttcttcccaatggtttcagaatttgctcgggaaatcagcgccggagttttcatgaaacagagccaagtccgtataatggg

SEQ ID NO: 36336 - DNA, 498 bp, Arabidopsis thaliana columbia
taacgacgccagtgtgctctaaagcatgatttgatataatattttcatttaaattcgtttttttcttcctcctaagcatttgaaagtgttaatactccatagcacactgttgctgccagaattatcaacagcaacaacgaaatgaactagctaaacaagtttcatctaaagtaatctaagaaaaaagacaaaaattataacagaaataaaaatataaaattcaaaagcaaaatttagattttgttaggctaaggctatatcctttgtttttaatggcccataatgcaagccattcagccgtaaactgtacatactatggtgagtttgtaacataaggcattaaccctcctttggttaatttgaccggagattgttcagattttctccaccgtatatacgatggtagttttgtagggtttgaacaaaactatataagtagattcatgtagtagcgaggttatataggacacacaaagacaaccacctaagtgattttat

SEQ ID NO: 36337 - DNA, 507 bp, Arabidopsis thaliana columbia
acaagcgaatttctgtgttcgtttgtccggatcagcgcatcgatcaatgaggagaccgatgatttgatgttccgcctgcacatagtaaccacgcagaccatgtaagaaagaacagtctgttatgaaaagtttgacctctcatagtaaaagaagcttagtgctgtaacttacaagagcgctgtagaaatatccattgtgtctgcacatattgccaagagcactacaagcttttgcacgtatatttggatccacatgggtaagatattctttcaaaggctgtaaaacagaagcctcgccgatgtatttataaaaagcctgtacggttaacaattgttccaaattagataacatcatttacttcactgtactgtgtctaagcataggtaacaaaaagaatgcatcgtacgtaattataaaacgcttaccttatccatcctcgatagatcagatatgatcatcaaaatatcaagtatgacttctcttggacttgattggttgagtaatttt

SEQ ID NO: 36338 - DNA, 603 bp, Arabidopsis thaliana columbia
aaaaaagctaaggatcattcaaagcaaagaacatgtggatggagaagaaagaaaaaaaaaaaagaatccaccaattaatgggcctttagaaatatggcccatttagataaaaattgtactagttataaaaactcagcttcttcatcatcgtgactaaatttctagggttttgaagagtctctctcgtcgccgtttgttattcctctgtgagcaaatcgacgaaatgggtcactctaatgtatggaactctcatccgaagaagtacggtcctggatctcgtttatggtataatcatcttcctctacctctcgcgttttgctttgatttgtttggttcttagaagtatagaacttgaacaccatttccttgttctctaatggatctgatcgtctattgatgatttgtgtatttgttgttacatgtgtgattagatatgtgttgttatattttggcaattttagattctgactttgtatagtttgtcaattcttctctttattgtagagattagtatttgtatgagattgttatacttggcttctatcttaactatgtgagattagttttgtgttatatggcaattaagatctgactttgtaattt

SEQ ID NO: 36339 - DNA, 566 bp, Arabidopsis thaliana columbia
tacttggttcctcactgaagttcaaggtgactaaatccgatattcgggttagacaatcttggcaagataacgagtggatcatgattggacaggtacttgtttctttcctctgtgactatatctttttaaagtctgtttttgagctgacattttgtttattttaccatttggctgaagggtacatcaagattaagcgcacagacttcaacaggagaactaaggagaaaggtgaatccgaaaggcgactacatttcatctgagagcaaagacaagcttgatgagtctgatgtacctttgtcagtaggtctaaagaaacggacttactctttggttgaacctcacaatcaaactagagctttagctgcttatcctccaaggtttcgtgaagaagtgaaagaagaagaagaagatagagagagtgttgcttcttctgttggtagttgttgcatggatactgatggtctcagtgctgtttcattcaatcccattgaaaccggtaactctagtgacacagagtcatcgtcttgtggctacgggaaggtcaagaagttggtggttcaagaaaa

SEQ ID NO: 36340 - DNA, 557 bp, Arabidopsis thaliana columbia
cgatcactgacttggccggatgctaaacttccaaagcacttgaatgatcgtcttttgatacttttaggttcaaaactcttaaaaccttcttggcacctagaatacgtgtttctcttcttatgctctctaaaacataagaaaataatagctaaaatgggctaaaaagccgtgttatcagtccccaacttcaaacctctccttccgcttatgtcttcttgtttgtttaagggcaagcaaagacaaagtttgggggagttgatatgtctataattttcatgatttagacattcattcttcacctctttgtcattatttcatccacatttcatctcattaggagtcgttttagtgtgttttgcatacttaggacggttttgcattaggattgcatgtgcattgcatatttggttgttttcaggtactttggatgcttttgcagttcaaacaaaggagaaacagagcacaaagtcagaatgcccaatgacgccttcggcaaagtactctatcgaagcctcgaagccctgctagggcaaatcactctatcgcaaccccggaga

SEQ ID NO: 36341 - DNA, 516 bp, Arabidopsis thaliana columbia
gatccccttaaacatctcaatctcccaacatgattccggcttgctgggattcagcatcatcacaatgggttgcgaactgtccgatgagatgttgatcacactcggactcttaggctctagcgtcaatgactcaaatgagtccgatgaggaatcacccccatcgttcccatttcctcctcctttttccccgatcagaccaaaatcttgagcacactcagctatcaactgatcgatcgcgtgctctaactcattctctatggcttcattctcatcttctttgttatttcccataagcattagcatttcatactcgtcgttggccccatactcattcatcgcaccaaacgcaccatttgcgtggattactggtacatcgaacaagtctgcattcaattcttccaactttaacccatgctcgccaatagttcccagattcggaacaccaaagcttccctcctcatccgtcgatggcacatagaattgcgtcaacatattgttcagactatcattcacttg

SEQ ID NO: 36342 - DNA, 520 bp, Arabidopsis thaliana columbia
cgaactgagggattaatggagcaaacttcagatgaagttactcctccaaaaattggtgtatgccgtttagcgtggagaacacacggtattctttagtaaaaggcgaaagaatagttcgctttgtattcaccacacggctccataacttctgaagtgagtgcaccaatgcattttatatgtgaatccttccacatctactttctgttccatccgatgtgggacgatttctgatgtcgttatttgtcgttattgggcaatttctgggcctttaacttgtctaatgagaactcaataacaatcgactctatagaaactatttagctaagaattatcgaactgatgatttaatggagcggacttcatatgaagttgctcctccaaaaataggtgtatgccgcttagcgtagagaacacacggtattctttagtaaaaggtgttctaattttctttatatctcctttagttgttaacaaataagatggaatacgaatcttcttttttttttttttcgaaaacatg

SEQ ID NO: 36343 - DNA, 600 bp, Arabidopsis thaliana columbia
agtcaatacatatgtctaagtgtctaacacatgtaacagttctatgactgttttatagtctcataaaactacacgattccggttctacatataaaacataaacataaaatcttcacaatctgcatgaaagttttgatttcgctacgtgagatctcctttagttaattaatttgacttcttatgatatttgattatatcaaacatgtttgtttcatttactactgaaatttgcgttattttaagacttctgtagataaatttgttatgtgaatttgatatttatctatataggaccgtcaaaaattttatttattttatatttttagatgcttctatatatatatgtatacacgcataacatatataagattggtaaacatgagcagaaaaattataggacaattaaacttcctctaattttatcagaaaacttttgttcgaattcatatgaaaattttcaaaataaataaaaaaatacaatttatttacaaactcaagactcataatacacatatcttgtccgtaagtgaataagccagtccaaactcacacgcttgctcagcatttacgtctctcattagtctctatctcttttgtttg

SEQ ID NO: 36344 - DNA, 384 bp, Arabidopsis thaliana columbia
cgagtaacggccgccagtgaataggatcgttggctaggaattgatccgaggaaataaggtggagtctcggacaagtgggaaggagctgaccataagctcggacaaaggggaaatcatgcgggcttagctaggatcgtaaggaaatcagttgggtcagctggctcgaagctcaaacgcagctggaatgagtgacggttactcgggtcgagtgacagtccttctgacggttgaacttaaggtagctggtcgactgtctgaccaactgggcggttatccagatggttacttgggcggttagggtcgaacggtttctcgcccaaagggtggttaaaggcgagcaattacgggcgaagagatgcaactgttcggaaaggagcaaggaac

SEQ ID NO: 36345 - DNA, 545 bp, Arabidopsis thaliana columbia
aagacctcattaccattcttaacattaggaagcttgttcttgggatcgacaagtctaatgctaggtatatatatatacacaaagatgaaccacacaactttttcagttgtcagatgacaagacaccgttctctctttatggctttttgtaggaaagcatccacaatgaaaggaaacagtgtccctgaactgataatgaggagctccgcagcagacgtgtgtgaggttaaagtcatatgccaagggaaagagataaatatggagcagacgatgatggagagcagcccagctaagtccccaatagtgcagcggcaaaagaaagatcaacctgttgacccttttgcttgcatttgctttatcagtaagcccaaaactaacagataatgtaaagagagatcaaagatgcagagacaatacatttgatgtaatgttttgtgtttggatagagcgagtaaaaaggaactctgataacaactaataaggttacgagaaacagttacaacatttttataaactacagcagcttatgcatacaaacaagcttac

SEQ ID NO: 36346 - DNA, 501 bp, Arabidopsis thaliana columbia
tgttttagtatcttttttatgtgttcatgtctgttttgactttgttgccgagaaattttactaaaactagtaaagctaagctctttgagtcgtttttcatgtttaattgaagcagtagattgttcttcttcctccattggatgccatggaaatagaaatcttcaggattcttcttggctttgattctgagatttttgcaatttgaaagtttaatcaaaggctactgtgatttttttggatatttttctatgatttgtgattttgagttgtggtgttttctctttttcccgttgttgagatgttgataaattttctgtccagaattgttgcttcacactatttgctgattcggtttggtttgtattggttttgaaattaaaactgatttcggttcggttttattggttttgttgaaaataactaaaagagtcacgcgatggagaatttggagagatgtgcgtcgataaaaaaagtcatgaattggaaaggggtttaccacag

SEQ ID NO: 36347 - DNA, 461 bp, Arabidopsis thaliana columbia
aattcgttttaaatttagacatagtttcactgcctggtattggaggagttcgttgttaaaatccttgtgagtgatgtgaacggttaagaacttgatttctgttgctattgattttttgcgttcttaacacattctgatacgaacaagctttaatctctagctagatattgcattttatgtttctttttggttggtttgttaagtatctttttaggttgagccagaatgatgcttgagtatcaaactaagtcaaaaagggggagattgaagatgcagattctgacatcaacgagctaatggacatcagggagttgttggatatcaggacactgcatcaaatctacatcaaacgtttgagttgctgacatggacgcgtgacgtgacatggcggtggtggagtggttgatgtgacgtgccaagaagctttgttgaattggtgtggtgataaacacgaaagttgg

SEQ ID NO: 36348 - DNA, 188 bp, Arabidopsis thaliana columbia
aatgaacgagagtgatatatccttattttcactgattttatctatgttttatgtataaggttttcagtctttatgttatttctcgattctttttagtgtcttttcaggtattctatgcagtaagacaacaatggagatgagaagacattttagagcaaaagctaaggaaaatgaagctaaggacaatt

SEQ ID NO: 36349 - DNA, 490 bp, Arabidopsis thaliana columbia
gaggatcagaggatgcctcacagtctagtttaaaataatagatgtgctcgtaaaggacgtgcgtgttgagtacgaaactctcaatagagatatatcaccttccatctccattgagccatagggatatggaattatacctttcgagatcgttaaagccatcaaacaaaagaaaaagaaggtgactttagttaagtaatgttgccggttcgagtgacgcttgggacgaatctaatactacatgttgtggtttcgggcctaggaggattacgggctttggcccagaactttctggtattcaaaaaaaaaaaaaaaaaactcactcagatcttttgtataattagcaaggaatggaaggctatgttttaaccatttttaaaccgcaaaccacagaaattactccgattggtattccatttaaaaaccttggctcatgtctgtagagagatcaaatttgcaggaacaaagatgataaagagttagaacaaacaat

SEQ ID NO: 36350 - DNA, 452 bp, Arabidopsis thaliana columbia
ctcaacaattccttattttagtataaataggtaactttttgatttgtccagaggaccaagcttttattttgtagtttttttgtgtgttttagaatcttgaaactttaattactcttaatctatttcgtttttgcatttagttctttgagcaaatttgtttatcttgtttatatctacattttggtatgattttagtaatttctcagtttgtgttcttcattatgttgcgtgagtagtgattagggttcttgatgatggattagattagggtaatctgtaggttagtcaagtggttaagattaggtgagatcccatctcgattcgttggcccctatgcggtgtgcactgcgaatgtgggaattcgaccctactgtatccaccatccagaagacgttcaaatggatgcttgatctacgaattccaagagatttatagactctaacccaagagat

SEQ ID NO: 36351 - DNA, 107 bp, Arabidopsis thaliana columbia
ggtgagttagtagttaagtcaaatgatttaattaatgcatcttataatctaggagttgtcgaacaaagattactcttattatgtattattgctgcacggaaaaaaga

SEQ ID NO: 36352 - DNA, 1016 bp, Arabidopsis thaliana columbia
gtcgactctattatatgattttactcttgtgcttatgtattatctatggaattaaacgtttaaaggaagaaaaaaaacacaaataaattcaagaaaaaaagaagaagatgatgtatgtgattcatcatcattaattttagagtgggatttatttagccatttatgtttttttttttttttttttttttgtcggccaaatttcatattggatattaaaaccccataaagggtgttacagatgccgattaaaagcccattccctcaccatgttcaactttgattaaaatttaaagcacagcttaacccacccaattctaaagataaggctaagacaaaaaaagtgccacgttgccaacaggtgtccaacgtgagatgaagagatgttgaaactgacgttgccggctgatccacgatccacctctgctccgtcggtcgggcttaatcaaatcaacaccaagagcttcttccacataattcgccggattccatcagctgaagattccatgccaccaccttgaaataaattcagagatctctcaatctagtcttcaaaggaaagcttcacctaatacctatcttgtaggtcccttcaatggacggtgaagatattactcccttataaaggaaaagatgagtttggtgaaagcagaattcttctgaagaagaaagcaaaccgaattgatcttgtaaacatgtggaaaaagaaaaactaaaacacaaacaaaaaatccgatctaatcggaaagataaaccggacaacgccggaagctttatccgttaaaacgaaaatttatttgtagatctgatttagattagaaactataaacaaagtagaaagtttctctctctcaaagatacatgatagagaagagagagaaactaatatttagccatttatgtttaagaatgcatgttgtttgtagtctgtgccaaattttgaaaacggtgcgatgtttacttaatgaagagaagccggtaccgaaccgaaccgaaccgagccgtcgtctttaattggt

SEQ ID NO: 36353 - DNA, 545 bp, Arabidopsis thaliana columbia
tatcttatatttttgttgtgtgtattcatgataatgaacaaattttagaatcttagatataaaaataatcagattatacataaaaatatatagaaattgatatttagagttaaaaatgaatctaacaataaaaaataagtacataagatgagtctaattttagtaagtataaaataacaaacaaaaaatacacataaattagcgacaaaaataattaacatatttttatctaaacaattttcaaaacaaacccacaggtaacgtgagaattcatctagtaaaataaaaagataaagcataacacgtatcaaaacaactacacgttttgaaacctaaagaacaactctgtcaaccactacttcgagcaaaacaccaccgcttccagcaccaccgcatcagagccctgattctcggccatcttataatcattaatatttatagacaatacaaacgtaacttatttgaattcaattatgagggaacaaaaaaacacaggaaatgaaaaagaaaagaggaagattcattgtattcgaaatatatatata

SEQ ID NO: 36354 - DNA, 540 bp, Arabidopsis thaliana columbia
tgtcaatatatatatatatatatatatatatatatagaaactacgtatttaactacaatatcatatgtgtgtataaattacatatatgaataattttgactatagtctttcatcttacttttttccacaactctggtctattgtgcgtgcatttcacttttaccaaattgcgaaaatcgaaataaaacaactttctttagcttgtgtacttaacaacaatcacagataaactcccagtacgtaataatgatcaagcaaaccttgttatatatttataaattatgatctgccaaattggaaataattaaccataatttatacatatcttaatatattagattcctaccaacaataacaataacatcgatcctaacttcttgtagttgcaagatacatatgatgtgtgctctgtctcagactacgaaacaaacaatttaggtgtatattgtacatgagttattggactatacttaataataataagctcgtcaatttgatccacaagtacatatataaactatttctttaattagtgagatt

SEQ ID NO: 36355 - DNA, 582 bp, Arabidopsis thaliana columbia
ataccggttcacaaaaatgtaaacgaattgatttggtttcatatatagacatatagctaaagtgcatttggctaaagaatttcactattagacattgtttcaaatcattaaaattcacaagccaacatatttgtctttttttaatacatgtaaaatttattcgaaaaaacgtttttacatcaagtgcaacatttggtaaataaattgcgtacaaatttccaagttttcatggatctatcttctatctcattgttaacgaatagaggagatccagtttcagacttgtttgtcgagttatcgaagcaactgtacgtgctggtggtattggtgtctctccaaattattaaactctctaagatgcattcattgtaatttttattttttttctgatgaagataattttatattcatccaaaaaaaactatctaatttgggtaaaaattgagaatgacttaaggattatttagaaaataactcaaaatgtatcaaatagggttttggaaatttccaaaccgaacgaactaatcataaacaatgctgtttctgttttcaattcaaatttggataaccaaacaaaaaccg

SEQ ID NO: 36356 - DNA, 588 bp, Arabidopsis thaliana
gagaatgcaaaatgttttatctttccaaatctctcaaatttaagttatttaacataagtagacttacatagagctcctcctcgctctcatcgaactcaaagtcatcgtcatcgtcttcgtcatattcatcatccagtagcaactctgtagaaccaaacatcaccagaaaagtggttgaattcaaactcaagctgcagagaattatcagattacattcaaacaaacaaaaagggaaccaaaacacaccgtcttgattctcttgaatctcttcgggaagaactatctcctcttcttcttcttcttcttcttcttcttcaatgatcaactcttcgactttattcggtttcggttcgaaagtactcgttttattcttcctcttcgcgtgagttttgaaggtaaagtttggagtccgacgaaacggcgtcgccggaaatccaaaacgaagactcgtcgtcgaacggaaacgattgacggcggaaagattgcttatgctaaaagcaggcaaaactgaaattcccgacaagtctgattcggtcggaaacagaacaacaaatccatcttctccggcaagtgaagaagaagaagaga

SEQ ID NO: 36357 - DNA, 418 bp, Arabidopsis thaliana columbia
cgccagtgcttgatgtcacaggcaacaaatttgctcgctctctcactgtctctcacaatcaatgacaacagaacagctgtttctgtttggcttttgtccacatctgcactacataaatcctaactcaaatatattcatcacactttcataattccaattaagtacccccaaaaatacacttgacaagccttgcattttaaatcctaacacaagaattattgttattcttctcataattaacccgaaatttccttgtttcctattacaatttaggaaaaacaaaagaatatggaaaaacaaaaactaaggagaaagctttgtttcacattttccccaccctttacttaaataaacaacacggggatccactagcaattttccgtaatatgcaaaaaaacaaaagagttgggaaaagatg

SEQ ID NO: 36358 - DNA, 134 bp, Arabidopsis thaliana columbia
tcgagaaagatcaaaatttgacatacgaaaatggatccatgatctattttaagagagagttttgataaaaagatagatgggttctcataagagattacatgagtttataaagagaagaagaaaagaagagaaag

SEQ ID NO: 36359 - DNA, 513 bp, Arabidopsis thaliana columbia
caacagcctcatgttttcttcaataatgtctcagtacctaactcttgtcatataaacgtccgtataggattcatacccacatgatcttgtcttctcaccataagttgtatagtccacaagttgattagctgacataattgattaccaacttgggacccttacagagtagaaacataagcatgtgttgtgtcgggttagattgctcaggagcttgtctaaacctaatagtttctccttctatataacgaaacaagcttattggtactcttcatcaaccacaactttcattcaaagagcttttcaaacagaactcacatatctttactctttctttctccacactttgctttccaatctcaagctttaactctccctgaaaatgatgataaacgcaaagaagcttatgaagatggctaagaaatggcaacaaagagcagccctccacaggaaaagaatctgatttcagagatcaaatgtctttactagcagctcttctactgtagaaaagggttg

SEQ ID NO: 36360 - DNA, 525 bp, Arabidopsis thaliana columbia
ccgacaccttccagaattccgtttatctttttcatcttcgtcattttgacacaaatattttgtttcatacaaaacggtcaggattcgcttattcctaaacgagagaaattaatatcttcatcagagcagcatttgccaagttatgttgtatggggtttaatgttaggttgtgttaaagcaagcaatttttattgggctttagggatcaaaacattttggaccggccctgttagtagtaatgatagttttgcttctttaaattcttttatctgtttttttgttagtgagtgagatgacgataatacctatgagatgtttgtttgcagaaataaactactttgccttctaatttgtaatttgtaaatgtctcttgaccaaatcacaattgttatattttcgtttatatcctaattctgagagtctcttgaccaaatcgtatagatacttaagtgagtaccataaccaattctactacatatcttgtaaaatttaaaaagggttttaattagaaactgttttagttag

SEQ ID NO: 36361 - DNA, 546 bp, Arabidopsis thaliana columbia
cttttgctctttagccttttcttatatgattttagaccgtttggtttatgggttcttgtgtgtttgaatccatcgaagttggtgggattttattttgaaatgggttttgaaatctatgcaggaatttgaaattttgcaaccgaggacttgaaaatgggagctaagtgttgcagaggtcaccgaggatcagtggtggaatcaaatggttccgtgatcttgtcgtaagttctgaggctgaattattgaagtgaatctcttctataagtatcgaaaagtccaacactttgaataagttttgtagccagtctttgagaattgtctactagttaaatgctttgataaggaatatatggaatgcaacttagtatgtcactgaaacatttatttctgcaacagtatatccgagtctatatttacttaaccattctgcttttgcctatgtaggttagctgacctagaggtccaagctactggtaagcgaagtttgattcgtaatattttggtacctacgttattcgtcttttcttgagtgaacctatgggctaa

SEQ ID NO: 36362 - DNA, 719 bp, Arabidopsis thaliana columbia
tgagcatttggaatagtagtttgaacaagttattttaaaacatactctaattcaagaaatgctctagttgcatgtagtttaacttctttgacttgctcaatgataatgacaatgtttgaaatgatgtatatatgtgatgtgagtaaattctgaattagcttgcttctctttcttctttgtttatgttgaagtctcctgcagatgacaatgggaccctactctgctcggcaattacttctcttatacacttaggataagatattctgacctggcacaaaaagcatagattctcaacggaagaaagcagaagacatggttgactttttgaacatttctgaatattttaattaccttatttgattgtgatctagtggttttcttattttctctgagggtgaacgcagggaaaacatctgaaatattataaccaaatagttaaatgtgaaggtggaaggattgtcagtatccattagagactagtgacattcatcactaactctcttgcacagttcgcaaacagacacacatcacaatacattcatttacatcaaaaggtacaatgattttggcataaaaagaaagaaactttcatatacaatcattcacttaaaagacacaatgttgtagcaataacaaatagctttcctgtaagtttagcagaatgtgatgcaggcttcaacgagcggcaaatagtaatgtaacatcctccaaagaggaat

SEQ ID NO: 36363 - DNA, 575 bp, Arabidopsis thaliana columbia
tcaaaaatttattggctagaaatatataattatgttctaacaatctaatattaagaaatttcagcagcgtaattaattagttgtgtaagttaataagaaaaaaattacattttaatttgggaatggaggattaaattggtagtttttaaaaacaacatgtttattttgcaatttcttttagatcaaggttgatcttgcaatttctctctagctaatttgttgttttggacttttggtgacgccgcgtcgatctcttttcctctcgtcccatcggaactcttctctctccgccgtaagccgcttgaatgtttcgacggcggcggtgaaataaacaggttttatttttagcttagtcttcaagaccaatgttttcataagatgtctccaccgttaggttacatatctctctttttgttgtttcatcttaattcttacacaatctcctaatcattgcatatcacagaattgtctaaaccgtttttgaaaagatgatgaaaccattgttgcttctcttaccatgcacaaacttgaatttatagaggcatatcaaagagccatcatgagactctctatat

SEQ ID NO: 36364 - DNA, 544 bp, Arabidopsis thaliana columbia
caggctttattgctacgtacatgtgaacagtttctcatattcaaaaatattcatagcccgcgaacatgttcattggtaactaaaagaataaatcataatgattttttctcagaaaatcgacgagaatcatgtgacccttcaacatgtgtgcctcttttcatcatttattatcataaatcataaacacataaccaattctttctcaccttttcctcaactatatatacacatatctcacttatcccacctttaatacttcacacacaacacataacacacgtagtacttgcttcctatcatttctagaaacttctctttaaaacctctgcctcaaccagaaagtttcttcttgttaaaaaaaaagattataaacatgacgaagtttgtacgcaagtatatgttttgcctcgtcctagtcttcgccgcgtgttctttggtcgttactccattcgcacgcacgcactaagtccgtcacatcaatatcttttggttatagtttatattttacttggtaatgattttcatatattaacattttatactt

SEQ ID NO: 36365 - DNA, 671 bp, Arabidopsis thaliana columbia
ttttaaattaatttagaagccaatttgcttaatttgttatatcacataattcataatataacaaatttaattggactttcaacgtttccatttctctattttttttgttaatccaaaataaaaatattataacactctttctttctagttttgatatctcgaggaagagtattggaattcttttattttcggtcaactgagatatattgacattttgacccactcacaaatttatgttaaaaggccttagactatcacgagcgcctgcgagaatagtttctcatattcaaaaatatttcatagcccgcgaacatgttcgttggtaactaaaagaataaatcataatgatcttttcacagaaaatcgacgagaatcatgggagaaaggggtcgatttaggctccttcccttccactgcatagcttctgcttatcgcgtgaacgtgtgcaattttgattagaggagcaagcttgggaacgggaggctagggcgcaagagcacacgcgagagaaccttgccttgtgggtgtccgatgcactaccgctcgcccctgtagcagggtttatgacccaacttgcccacgaaaaaaacgaaaaactttgattacaaaaccctaaactcattgaaattatcaagcagaaagaagcagaaagaagtatattgtaatttggg

SEQ ID NO: 36366 - DNA, 338 bp, Arabidopsis thaliana columbia
gtaaccagaaaccaaaagattaccttagtaacattaaagatcacaattacgtacataaacaaaatgtagtccaaacctaacgatagtaagcgcaaaggtaattaggtaattaccacaaggaatcgcacgccatggtctgcaaacacttggttgataggttgagacaagaagaaagacgcaagtgaagacagcctgagttcttccctccttagatatctcattgccaaaccgacaacagttaaagaccagcaatcctcacatgagcaatctactgtaagagtaagcactgaagaaacgcgttgtgagagttttcttcgcctgcgataaaacttcaggct

SEQ ID NO: 36367 - DNA, 610 bp, Arabidopsis thaliana columbia
actctttgcctctcaggtttctgtcacaaggaatgtactatgagttcacaacacacaactgggcagttggaaattttggtaacctgcaaacggtgctaccttgcaagagcacgttcacaaatcaatatcaatcacagacaaccaacaacacccagtgtcctgatcaacggtcaacttcaaaatgcagccacttcaaacacgaagacacagattaagcgtcttaatcaacagttaccatcttccaaaacaggcgacaatgcttcaggagttaaacaaatcactccggatttcaatttggcaccgaaaagtaaacacaagacattgtcttggggagtcatatggaggaaaaagaacttggcagacacaggtgttagtttcagacatgaaaatgttatgttggctggacgatctgatcagccgaatctgcaaccagtttgctggatctgcaaattgccgtataatcctggcctaacatatattcactgtacaagttgtgacagtaagaaaatttttactcactctaaattctatactgaattgtacatttcgtcaatgccaccattttgctcttataattctaatcgtagatctctatgcagtgtggtacaca

SEQ ID NO: 36368 - DNA, 585 bp, Arabidopsis thaliana columbia
taaaaagtgtgctgatcgtgatcggtggcgagttttcaggtgctacgtttgttcatttgcaatttcattggaccggtggctactacattaactgttaacatctctggctggttaatttgacttggtcaaaattttaaatatgttgagcatatcctagtacggtactcaagtggtactttgtctcgaccacatcgcatttaataataaaccatgaagttgggtagtatttttttatcgacttttattattttttactgaaacctccaaggagctacttcactagctggcaagttgataaattaggttatttcttcactttctttggtattgattatataatcatcaaactaattaggatctaaacatgtaattaaatattagcaacatagtggatttggactaacaaatttgtaaaatagcgcatagattatatttaatttcgtagttcccacctcaactcccacacaaaacttcttggattcaactctgccattttcggacgaccgagaagataaatccgatttaattttatttatttaacttattgttttaaggtaaaaaaaaatttttaagaaaaactgaaag

SEQ ID NO: 36369 - DNA, 573 bp, Arabidopsis thaliana columbia
cagcaagatctacacatcaattccacaattgaattaagctttaaagtatgaataataaaaatttatgatttcacagaaaattcactcacaaggatagtcaaatgtgaccacttcaacagcttctaatgtcttctttaacatttccttccatctacatcaaacccacaaacatatattgagcaaattcagactaagtgaataaactcagaagaagattagtagttacctaatcatccagtcggaagaagagggagcaccggcaccgtgcgcgaatataacgaccggcgaacatggaatctctgattcttcattcacctttcttcttttcctccgtgaagccatcgagaaacctggaaatctcagacaacagttgactcaaatccccaaggaaaatgggatataggatttgactttcgcgccaaattaattgggccactaaaacttgggcttctgaactaaaaacaggcccataactatttttgtcgattttagaaaacgttaatgatagttaacaccgtttatcatacctttgacaattcagatttccttcttcccaaaacaatggcctcccca

SEQ ID NO: 36370 - DNA, 531 bp, Arabidopsis thaliana columbia
ctgtgggactcgaaatgttcggctcggcgtcattgggtgaactccagaccatttttcttttgcagatagggagaaggtcgtcgggatgtgctgaatcactcgagtcttaaaggctcattactgactcggaagtatgtgacgagataaggatcggaagaaaaatattttctaaccggaataatcaaacctacctaaaacacggcggacttcgacgggcaaagagagaaaataaagaaatcaagatcagagagaagagagcgaactttagttttttcgtcataaactttgaaagtgattctttcgagggcttggctcgatatttatagaattttcaaggcgcgttgggtccgtgaaggctaagtaggtcgcatcgggagtgcgtcacctcggtaaaacgcgtcgtatccgcgtgaacctcgtgtataagcaaaaacgtatccgcttctcaagaaaacaagcggttgcacgcataggaagtttgacagttttggaaaatgaagcgctagaggttacaattgagacaacaattag

SEQ ID NO: 36371 - DNA, 402 bp, Arabidopsis thaliana columbia
cgccagatcccatatatatatatatatatatatatatgtcgaatatttataataaaaatgtaactctcagaaatatattttcggtatactcacaatgacaaagcgatgcgacactcacattatattctaagacactgattaactatactcacttcacaaaacgtatatgggcacatcacacacagctatagttatgtcagcaattgtgaggagaaataggtagagaaaccttcatctctccctaaaaacatataaaattctctactcttttatgaggggttaaaccctcacatttttcataagtggtgtaaaaaattcctaatattaatatactgaactatattttttgagaaatgtgatataatgatagcgcaaaaaaatattttaatcaatgtgtttaaa

SEQ ID NO: 36372 - DNA, 522 bp, Arabidopsis thaliana columbia
tcccccggtggcgtgcgcgaaactccctatatccatagctaataataaccggagaagccgagaaactattaacctaaatatgcattcttaacgagttcaattgttcatcttagtagataggccgattcttattaaacacctataaaccagactcatcaaataatagatccaactatagatacctatggcgggcatatctattgtcttgattcaagatctagttaattactctaaatctagcattaagcataattaaagatgaagaattctatagataacctagcaaaaggggcaatctactaaaccatacgaatccctaatgagaaaccctattcctaacaagcagatttctcagacatattgaatgaaacaatcaacataattgagtatgaaagaataaacacagcaaaggagataagagttagaaaagatctcttcactgtattaagaactggactgaatctctcaagaacaggagatgaataacttatgtctttcacaataggggtttcacgagacatg

SEQ ID NO: 36373 - DNA, 474 bp, Arabidopsis thaliana columbia
ctaattaaagagttggagatcagttgttttttttcttgaacaaatattttgattggacaaatgtctttttcctactatggctatggacctatggtttacaatgtttctttttaattgcgacatttgatgctgttggtaagattaagacaattagttattgaaatacataagaaaacatttttaaccaaaataaaaaatacataagaaaacactataacagcgacatcgacgtcattaaatattgttttataagaaaaatatatcatactcaaatggcaaattatgtaacagtataaaatagaagaaattttaaataactaaatgtcaaacattttaatatataattgtgtaaataggtttatatcttaatatagttaccttttgataatccgaatagtaactatgttttgcgatataaagaaaatgcgatgcaattcaaatagtaacgaaaatacataaatatatatatatata

SEQ ID NO: 36374 - DNA, 512 bp, Arabidopsis thaliana columbia
tccaacgtaaaaaaacttgtgtgtcgtcgtgggatttgtagaaatgaaagggggtgtattgtacacgaggcacgggctaagaaaaaagactagagctttcattttagcgttaacgttaacaatattgtctcttcaaatgaacttgtccccatgtaaagtgaagttggtaattttgttgttgtccttcgaaaactcccctctcctggtgaagcagcaacttgaaaaagtctttagcattgtggtgatggggtgaaatgtaaatttctccatctcttgttctcatctttcacaagagaagttaagaactagtaagcagtaacacttttattaggatgaacagatactggacttaaaaaggattaaaggcatatagaattaagtttacgctttggtgatgttacaaaaaaagatacatcgtttaatcaattatcttagaaagatttgaaacaacaaaaaacactaaaaaaaaaaaaactgtacgtagcactagatttcgttcagagaaggcatga

SEQ ID NO: 36375 - DNA, 196 bp, Arabidopsis thaliana columbia
tagtaacagtgtgctctaaactctaaaggctgatcaagcaaggtttggtgacagttaactgacacgttgactagcaaccagtaccaagtccagctccaaggacaaagtcgaaggtcaaggtctccctatctacgacgaggtctaggaccagcatctgcttcacagagcacgcggtgtcattgccagtgttgccgat

SEQ ID NO: 36376 - DNA, 482 bp, Arabidopsis thaliana columbia
tgatgtcgttgtagtattttaggttgtcaatccaaatgggtgtgatgctaacaattaagatgtgatcagaagtcactaaatcaagccaagcaataacaggttttggtgtgttctagcagtcctaagtgaacatgcagaaaacagaaaatcaagtagaaacagtaaaacactcgaccaacacagctcgttgcagagcactagggtaaggtcgagtgacaggtcgagtaacaggcagtaaacgaaacaaagacactcgactacacagtctgttgccagacaactgggtggtcgagtatcaggtcgagtaacaggaaagaattgtagaaactaagcaacatatgacaagatgcagtaaacaacagtagagtaaacaataaaatcaatcagataaagaattcccaagatggggtaattgagtagtatcgtttcctcagtttacaagtgattgacatgctcagtaaattatccctagacgataagtt

SEQ ID NO: 36377 - DNA, 417 bp, Arabidopsis thaliana columbia
gaaagtttatatgtttataatatttatacttcttataaaagaatcgagatgtgtttcttaaaaaaaaaaaatttaagttgtatttgttttgttgatattgtttgttttgttttgtgtttaagattgtatatttatgttttgattgttaaatctaggatttcacctatggtataccgtcccatattattatcgactcaaattcgtaaattctaagatttcaccaatattataatgtttaaattttctgaaaatgaatcaagatgcatttaaaaaaaaaaagttatatttggtttgttaataatattaacgtaaatccgtaattttcacgccaaaaatgtaaactagtaaaaagtgaaatccataaatatcctaagttttgatgataatgaattaataattattaataatgataattat

SEQ ID NO: 36378 - DNA, 494 bp, Arabidopsis thaliana columbia
tacgctcgtgaaaaccagataaatatagagactagtaagaacgaaaatcgcaaaaggagactagtaatcacattaaactaaatcaatatatgtgtatgtgtgtacaagtgaatccataacttttggtctctaaggaagacatgtaacaggagcatatgtcgtgctggtgtaaggatagcgtcattgaaaagaaacaagaacaaacgataaatatatatttccacaacagttgatgcgcgtaaaagcaaaacgtgattaacagtggaaattatccataaagtgaaaaagacttgaagatcacaaatccgagttttggcagtaagaaatatggttattggatttgaagttgggttaatattgaaaaagtaaaagttttttcgaatatatcatatgaactcaacaaacaaatgcaacggggtcgacaactcaatatatggtgcacatccgaaacgagccgactcacgtaatggaagtcccttgccaggtcacgtgtt

SEQ ID NO: 36379 - DNA, 520 bp, Arabidopsis thaliana columbia
taagcatcctgtataattcataatcagttctgtaagcatcctgtagcatctacgtctggtgatatattttctgttctaagtcatgaaggcatttatacatactacataggcgtggacgtacagtctgtatctgactcttttacagttattgggaatacacaccctaaacgatttgcttatttaattactgtgtagggttcatgtcatgaggacataaggacatgcgacgcttgtggctcaggttgtgtgatgtcaacaggttagataatgagggaaaaggaacctggtgatggaaagggttatccatttgtaacattcagatgtaaggacttagctgctgaagcaattgataatctaaataacactgtattcacagtaagttctttgacctgattcttaatagttacctagaattttgatggattggtgtttccgaatatttctggctcttatttgtttgtttacttattgttattcaatagggtaaaaggataaatgttcgactactaagcaaacatcg

SEQ ID NO: 36380 - DNA, 374 bp, Arabidopsis thaliana columbia
ttcttagttatgagtcgtattgagattctagtcagtcgtggtctgaattggattccgagagagagagagagagagagagagagagagagagttcacgtcccattgaatttgaaagctactttagttattgttcttgttttgtgtatgtgtgcgacggaaaatgaaaatccacttggttgataatttctattactttctggtgtttgttggatcagtgagtaaatgcagcaaagttagaattctgagctgattaggttattcactagttcttctttaagcaagttcatgtgccaactaaacacttcctaccattcttgttgtggaccacagttttctattactggttaacaattaatttctttttgaattcatgc

SEQ ID NO: 36381 - DNA, 553 bp, Arabidopsis thaliana columbia
tctaaacgagttcgattgttcaccttagtagataggctgatttttattacacacctataaaccaggctcatcaaataatagatccaactacagatacctatggtgggcatatctattgtctagattcaagatctagttaattactctagatctagcattaagtaatatcaaagatgaagaattctacagataacctagcaaagggatctactaaaccatatgaattcctaatgagaaaccctattcctaacaagcaaactactcaaacatattgaatgaaactagaaacatgattgagttagaaagcataaacacagcaaataagataagagtaggaacggatctcttcattgtattgacaactgaatgaatctctgaatacaatggatgaatagcttatgtcttgaaaatagagattacaaagaacttgataaaagaaacttaggtctaaacaataacctctaaaactatatataagccctataaaacgtcaagggactaataatgcaaatagggaagtcttctggggcaaattccacttctgtaaatttga

SEQ ID NO: 36382 - DNA, 487 bp, Arabidopsis thaliana columbia
gccaaccaaactggaataaactcgaacaagcctccgggtgcgacggtgatgactgaggcgtctaattacatctaaatagaagtcttcaaaaagctatcagaaaagatctgaagcaggacaaggagagaagcctagcctccgagaaccttcatcgtgagagaacaccacaaaggtaggagaaagctaacaaccacaacaaactacactaaggaggagagaccgactgccaacaaagaagactatcacaacaaaaacataacgaaacctctgaaaagaaatggggcaatccaaatgggaattgatggctgaagcaaggagacaagagacggagggaaaggcaaggttcgggcaccaactcaacgagaacccaccaccataaaccaacaacggcaaagataccacgctaaccacttatacggaaaaagatcaacagatctaaccgctcttaccgcaacctcaacgagacaaaagtcatcccttgaaacaa

SEQ ID NO: 36383 - DNA, 417 bp, Arabidopsis thaliana columbia
atacctatggtgggcataaaaatggtctggattcaagttctaggtgatcaatctagatctagtattaagaacaattaaagatgaagaattctacagataacctaacaaagggggatctactaaacaatatgaatccctaatgagaaaccctacacctaacaagtggataactcagacatgatcaaagaaacacaaatcacagtctgaataagaaatcaataatagcaagagaaagagtaaagaagatcttttccaaagacagtctccacatggttttacgccctaagtacaaaagagatgagcagaatagtctctccaagcttaggtctaaacaatgacctttaaaactatatatatgacctaaaatacgtgatgtgccgtctttagaaataagagaaagttttgggccgcatttga

SEQ ID NO: 36384 - DNA, 621 bp, Arabidopsis thaliana columbia
caatatgtaacccattttgaaaaattctttctaatgcctttttcacactaccccttttcaattctactcttttctatttaccatttttatttataccctatttaaatttttaatgactattttacctctatttgtaaattgatttaggttaacaaaataaaatattaatattttttgcctaaaatattccaaaataaatttcccgccaaaaaatttcggaaaaaaaatttcccgccaaaatgttttttcaaaaacatttttccagccaaaattttcccgccaaaaaatttcgaaaaaaaaatttccgccaaaaacaaaattcgaaaacattttttccgtaaaatttttttttggcaggaaatagatttacaagagattttaaaagggttttaaaatatttacaagatttacaatagattttaaaagggtttaacagatttacaatagattttaaaagggtttaacagatttacaagagattttaaaagtgttttaaaagatttataagggatattaaagggctttaaaagaaatacaagagttttttaaagatttttcaagggtttaaaagtgttttaaaagatttcaagggattctaaaggggtttaaagatgtcaagag

SEQ ID NO: 36385 - DNA, 433 bp, Arabidopsis thaliana columbia
acagtgaagagatcctttctaactcttttctttataagagggtatagagatcaacacaacatagagaatcgcttataactatattcttattgataacaaactgattacaaatgttatctcggagattactcgatctattctacccaaaagatcaaacccgactaagaatacctaagcctaattctcttctctgtttcttatcacttttacgtgaagacaaagagaactacacactcaccttcaagcttttgcaatgctttgaagtttacaatcgtatgatagtattctagagtgctcgaagtgcctcacactaagctctagaatacttatacctactctccagaactctaaacctaggatctccgagaatcacgtttttaaggaatctttcttgttttcccaagcttattcctcctaaatctttgagataata

SEQ ID NO: 36386 - DNA, 850 bp, Arabidopsis thaliana columbia
ctggattgcacgagttcctagagcaactcagcgagtttgcagatcttattctgtttacagctggtcttgaaggtctcttgatttacttattagtgttattatgttcgattttcaaattaatgctcaactacataaccacaacttcctaaccattgacaattcatgcttcatgtctgcaggatatgcgaggccgcttgtggataggatagataccaggaaagtgctcaccaaccgactttatcgaccctcaacagtcagcacgtaagttatcctgaattgggttgctctgttttagtttttaagaaactagtttgtggtaaggttactgagatcttataaattgtgtgtggttcctaatcaggcaataccgagatcacgtgaaggatctgttaagcacatcaaagaatatgtgtaggacagtaattgttgacaacaatcctttcagctttttgttgcaaccatcaaatggaattccatgtattgcattttccgcagggcagccaaatgatactcaggtctctattagttgttactcttctcatacaattttcaacccttaagattattattaactcttggaatctaatcggattatcaaactttgaagctcttggatgttattctaccgcttctgaagcaactgtcagaggaagacgatgtacgaccgacactttatgatcggttccgcatgcctgaatggtttgagaagcaaggcataccaccttcgtgctggaagccttaaccggttaagcggaacgtaaccgaattatcagaggtctctggtccacacaaaaagggcaaaggacttgtttggtacagtagtttcacaatgaaagcacaggagaaggaa

SEQ ID NO: 36387 - DNA, 674 bp, Arabidopsis thaliana columbia
tcttccctcatccatcatcattcatcatcatatcttctacttcttcttcttctcaggttctcttttttgtcctcttttgtgtaaatacgttttgtcatgattctctgtgaacagtaccgatcgtttttttttgggattagcgaaaaataaaaataaccgacgttttttgtattatttgtctgacagacagaatctgtattattttgtcatcttttttcaatagtctcatgattgtctcttgtgtgtttccagctttcccatagggtccattgatttttgcagccatggattatgatctggtacataccaaaaccatcaaaagtttgtctttcttcataccaaaaacaaccgaattctcattcttgattcttgtttttttttttttttgccagcttcgttccaagaagagtatcaaacgcgtagaatccaccaaatcaaatccatggtggtgggatagtcatatcggtctcaaaaattctaagtggcttgagaataatctcgatggtgagccattcacattatgtcgtttcatgtaatgaaaaccttattagcttagggttccaaattaggtggttagctttttcataaaggaataaaaatatccaagtttagtttgtgtgagatatgacagagatggcggagcgtaacggatggtgaagtgatagagagatcag

SEQ ID NO: 36388 - DNA, 499 bp, Arabidopsis thaliana columbia
agctcaagattttaaagctagaggctaataagcttagtcggagaaataccgaaagagcttggagatttgcagaatctgttattggttaacgtttcgtttaaccgacttatctggaaggttaccattgggagatgtgttccaaagcttagaccagagtgctatacaaggaaacctaggtatttgttcaccgttgttgagaggtccttgtacactgaatgttccaaagcctcttgtcatcaatccaaactcctacgggaatgggaaccatatgcctggaaaccgagcaagcggtggttctggaacattccaccgcagcatgttcctgagtgtgtcagtgattgtagcaatatcagctgcgattctcatcttctctggagtcataattatgatgctgcttaacgcgtctgtgagtagacggcttgcatttgtagacaatgcgtaggaaagcattttctcgaggtcttcgaaatcaggaagaagcttaatgatgggtaaactt

SEQ ID NO: 36389 - DNA, 466 bp, Arabidopsis thaliana columbia
tactccaaaaatcatatattttatgacttttatgaaaacatatataattctactatctctgtaagaaaaattatattattttgatctgttcaataagtttaaccattagcataaaaatcttactatacgcatgtgttcatgataagaaattatcctggctaagctaccatcattaatctggtgggaaaatgatctcttcactccgaaacatcataattcacacaaacgacaagaataccctactatcttacagatccaatagaatagtttgtattcagtttaaaagtcccccagttatataaagaacccatcattttatgtatgatacaatatgtctcatttcagtacaagatcgataaaagagagattgtggcatcgctatcataccgcaacggtctcatgcatagcgtggctacgtcgactataatgaagtaaactatatttacttttagcaaaccatacgaag

SEQ ID NO: 36390 - DNA, 549 bp, Arabidopsis thaliana columbia
aaatacaaaaactgaaccgaatcaaccgtgaaaaatgttaaaaccgaaacttaaccggaataattataaaccgtttggtttcattattctagaatccaaataaatttaaaaccgaaatcatttttgtgtaacgaaaccgaactgaacacagtaaatcaaattcaagtatgtatcaaaaatagatatagttattctagttcaaaatatctataatttggtatgtatcaaaaatagatatacttatattgaataattatgatattaagtaaatctgtttctacataagtggatgtaaggaaaagtgaattgagattgacggacgagtttctcacttctctctttagtatttttcagagagagactcatcccaataaatgtttaggatcgtcgttcgggtttcatccggcttctgtcgacggggtgtctttcggctatcttctcccgttgttcaggatttagaattttcttttggtcaattttgaattcgggttttcgtgatttgtttttgttttatagttttaaaatcttgatgatgaagcattatgatat

SEQ ID NO: 36391 - DNA, 583 bp, Arabidopsis thaliana columbia
tgtgatttgaattccttttaaaacccaaatgttcgggcatattttgagactgaacaaacacggattttacaaaatgacgtgtccaacaacgagatcaagatcaagaaactcctcctccatctatttcatttggacaatattttaactatcttagcggatctataagcaatttactagaatattaaattactagttttatgttttagttttcttttattttaaagttagtacttgtttgcttattaattttataaaattacgtgttgtagttgttctttgtgaaatgataatatgtatcaaataaaaaattaaatttgagggaccaaaatataaatataaaatttcaactctaaaatagagtagagaatagacttactctatataaatagagcaattctgcataaatttctattttagagtccaataaagagcaaggttggagaagaatttggagtttttactctaaatagagtagggttagagatgccctaacaacacatacataacaagcattttaccataatagcacatacatatgtatcgttagtctagccacctcgtgttgactaacctcatcagtgga

SEQ ID NO: 36392 - DNA, 711 bp, Arabidopsis thaliana columbia
tcaaccaatggcattataaacagaaagcaaataattagatttgctcaaacatgtcaatcaaataaatcgcgaaagggaatccacaagaccaagtgtgagtagaaaatcttcttactagaagaagaattcagcttggaccacccggcagcaaacacgctcgttccaggctaggccattcattattgtcgcagaccatgactggatgagagaccgagccattgcttactcagaagagctaaggaaagttaatgtagataatctcgtgcggccgtgctagtgtacaaagatgcggttcacgagtttgctaccctcaacatgtttcgtaggactcgacaagctcaggcttgtccagaagacattgcaatctgggccaagaaatacatctctctccatggccacgagttctcatactagtgttttgaaactccatgtggcaaaaaaggtcaaccaaaagtaaaccgtgtttttacgggagacaaagcaaaagaacacatgcagaccgaaaagattgatatcatcgttgcaatcatcgtatcatgtgatttgtctcttctatttagagttcaagcttctgttgtatatcatcgtatcgagtaacgtccattttgattaacccaccaaaccaaatgcagaccgaaaagattgatctgtgtccaaatcttaacttgaattttgtgtgatatttatccttgatagtcttactccttagta

SEQ ID NO: 36393 - DNA, 497 bp, Arabidopsis thaliana columbia
tgaagaggaaagatctgaattttgatttttgatttttttattccaaaagtaagtttaatttgacataattaactgctaaaaatatatggacgctaatatgggccaagcccattagttttcactttccataatgggctaacaaaatttatgaccaataagactcatgtttaggctaaatcatagcggtcttcatcattttgtccactattttgttttcttttggtcgaagatattgtcaagtattaattatgcaattacgtgaaatcatgagagtcatctcctccacacatatagcccaaaaagaccttgactttgaacatttcgactctttcgtcgttgatagcataagaacatgtccatatttgaaacttaaactcaatgctctctcttactagttacttcatacaatcaaagtcaaaaagctcaagataccactactcaatgggcatagcaagatccataaactcgttcatgttcttcttctttctaatgatatt

SEQ ID NO: 36394 - DNA, 120 bp, Arabidopsis thaliana columbia
atcaaacttacagagagagtaatatataacatgatatgagatgaaactgtatactgtcctcgcatacatacataaactagtaataaactcacatactcccttaatagcagctcgtaacat

SEQ ID NO: 36395 - DNA, 530 bp, Arabidopsis thaliana columbia
gggaaatagttgttcttctttgaatatgaatttcaatataaaaaaattaaaattggaaaggcgtataaaaggtaataaatttaattgatgtagtttccttgcattgcattatgaacaattgacttcaaaaatttaggatacaaagagggttgatttccatataaaaaatgacggagaaagaaagaaactcggttaacactataagacaaacttggattatcaaatatggcaaaggaaagtgagaaaatagtcatgacatgacctctttatggcaacgtgtcactacaagaaaacagacgattaccaactacaatggaagtcgtaaacggaagttatgcgactattagacgactaaacaccatagtcttatatacataatcgctaagtaccgtagtcgtatatgagtcgtaagtttacgactaacatacgactgttacacagtcggcaaaaaatagtcgttgattagtcatactatttggagaccatatggcgactattgtatgatcaattaaactgtatatggggtatga

SEQ ID NO: 36396 - DNA, 543 bp, Arabidopsis thaliana columbia
cccgtcttaaaatttctctttttttaagtaattagaattaatgaagatatattatataagaaaatgctactaattagaatcattaattaattgaaaataattaatgtcaatggcattccttataaataattcaaacttgaggatttatttcataaaatagctgcaaaaatgtatatataaatattttatttaccacatattcccaagtgaaaactagggaaggattcgaaaaattattcagtaaataattcctacctttttgcaaaaataacggatatatcaacatcgtcaataagttggtccaattatcgtgtttttatttttatttttatttttatataacatagatcttgcataacactacaataagttatttttatccgatgacattttattttacattataccaccttatttatgtaaatcatagaaagtaagttcagtagttacttacggctttacaacaagttctataaccaatttaaaattttgacccaacagaataaaataaaaaaccagttacaaaaagagatgattatgtac

SEQ ID NO: 36397 - DNA, 574 bp, Arabidopsis thaliana columbia
tccccaagttttccaagataatagaaaactaaggcaaacgatgtgaagaaaggctagtgatgttttaccaaaaagtttgaatcgttataaggaaggtggtgagaaggagtagtacatggagaaggacttaaaactcttatgaacaagtttcaggagaaacctaagaagaaaggagatgtccgaaagatagaattcggggacgaattcttttaaagggggtagaatgtagtgaccctcgataaggggtaagctgctaagtgggaaacatcgcggaacggctaaaaaagaatcgggagagaaagaaatagttcagggacgaaagccaaagagatgggcaaggaaaaaatgaacatgccaagtctagttcaaaatggggtcatcttggcgacggaaacgagagaaagttgtccgaatacacggccaattgactgtatgtgtcaaaagatgtcaatcatcaaagggcaaaataaatacctatttgggcaagaatgggcaaagatgggcaagaatgggcaagtttgggcaacataggcatgctgtgcgcgaagtttgcccgccggcggttgaccgtttg

SEQ ID NO: 36398 - DNA, 465 bp, Arabidopsis thaliana columbia
ttacaaaaaaaatcttcaagtatgagaaaactattaaaatagttttattaaaaaatcatgtaatattaaaataaatttagtaatagtataattaaatatgtaaaaataaataatatatcctgttaaataataaaaatatcattaacctataaattagaagttgaagagcttacattaattatttaatagacacatggcaaatgctaaagtaatgatgtgtcaatcatatggagaaagttggccaactttcatatacagtataacatctataaattaatactctataaattaataacctctataaattaataaattcttccggtcccgagttaggaccaatgtaaaacatgacataaatcgataaattaataagataataatttttttgaaagtcatatgtaaatctattgtcccatcaatatcataaattaataattatataaatgtatcaactatatatatata

SEQ ID NO: 36399 - DNA, 301 bp, Arabidopsis thaliana columbia
cttgactcaaagtcaaaaccttctacttcttccagagtgtctcgtatacttagcattaggatcattcttcttcaaatctccaccttgatccgaatgcttcctgttttagctttaacttggattcctctccggtacctgaaccaacctgttcagcttttcttcaagtagactcacttgaccttttgattcctgagtaaacccactcagcttcttctccctgagtaaacccactcagcttcttctccctgagtaaacccattcagcttctttggtccggagcttagctctaccttaatccggg

SEQ ID NO: 36400 - DNA, 480 bp, Arabidopsis thaliana columbia
taattgtttcggtacacatctcgattgctagcaataaacagtggactggattgacaccccccatagctgcgtcgacatgttactgtttgtaggggaattgaactgaacctcacacccttcagcatataagtaggcctaaaaaacctacttatcattagggcatatggaatcgtaatttttataggcaacaatggaaaatcatttgctgtgaatggacaaagagtcaaacactactgggctgaagccgagattccaacaaaagagccatttgatctccagaacccacctgttgattaagcaactacagagtcaagctattgactataaacaagcacttagtggaagacaactcactagtaactatttttgttttttattatttcattcatttggttttaacttaggattttattcaaaaaacaaaaaaaaaacaaaaaaaaacaaaaaaacaaaattgctgtctaccaccacgatggagtc

SEQ ID NO: 36401 - DNA, 524 bp, Arabidopsis thaliana columbia
aatccacatcttctttataagagctttgatacatgcaaaatactatacatggttggaatagcttcatcaagtattgggattaagatcattcattcttctttaacacaatgtaagtcgctaactagtttttgttggattcggctttaagcaactcgtgatcacctcgaaccaaagcttaatacttgctcattagatagatattccacgactaggactttgccaaacctgaacagactgctgatcctttcgggtcacaaacattctatttcctccaaacgccaatcctgttatcttgttttctcctgaatccgctaattttcccaacgaattcttcctaaaaaccctctcttccaatacatcccggcttgcattccccaccaaacccgtgatcacttcagaccaaagctctatcccacttcctttactactgcaaaacacatgattcccatagctctctatcttagacccaactcctcttctttcattcaagtttctcatcttctcttccccaagacaaacccatg

SEQ ID NO: 36402 - DNA, 606 bp, Arabidopsis thaliana columbia
caggaaatagaaaaaacgggctcacaactacacgtttcgccccttagttgtacacacaaactgaatgcatcttttatagatggctcagccaattcctgatgtaaagtgtaaaaatcagcaaacagcaagcagagcttgaaagtcatctaatttcctgatatagaacatattaagctaaatgcaaaagatgaccaagaaacggaaatcagactgtatcaaactcatgggtatggttctcactatgcataaaggtgagaacattagaaagagttaccatatgagcaggctctacaattgggtaaccagttttttctttgaacattttcacaaactcctctgaaatacagaaacaacaacacaattacataaactcgcacaaggtaaagccgtaaaggaagtatactatacaataaagtaaggacaacaaagaaaatgaagaaggagaaggaagagaaacaaagctattaccaagcataagattggattcacggcgacgagaaccgtgatcaacaattataatcccatcagcatcaccaatcccatttttgaccaaccttcgctctcccaaaacatggtgatctcttctctcctcctcgttggagttga

SEQ ID NO: 36403 - DNA, 556 bp, Arabidopsis thaliana columbia
gtattccatcaaaatcaatgataaaataattcttaccaaattaacaaaaagtgaataaatatcacattattcatactaatcttcatgatatcatcacaagaataatgtgtgcacacaaaaaaccactgtttgtttccgcgtgaagtgaactctcaagagtctccaatgttgaccaaatcaaacaacctcttaacttctttgaccaacaatttttaaaaccatgaaataagttacatacgaagacttgacttgtttctttctcttaaaaatcaaagtttaactgcttcagagtttaattttcaatgtgtccatatacaattcattttaaatctaaagcaaattcctcttcttttttttcctttaatttattttattttttatggagtgagttgagttctgtatacattctttgtaaatggaaaaaaataaaaaaacagcttgattaaaaaaaataaagaaattgagaaaaagacaagaatttaaataataataaaataatgtaaaaagaaagtgaacaacaaaaaaagacacaaaaaagtagaactgaaaaggagta

SEQ ID NO: 36404 - DNA, 575 bp, Arabidopsis thaliana columbia
tattttcatttttgtctgtttatgtagtttaatgcaaatttttgattttcttctgaaaattagtgtacatatatatattttagcgtcactgtaatcttatttcaattataaatatctggtaggggatgttattattttatgtatctatagatagagttataaagatagaaatgttatgaagattctattgttattcaattaagttttttaaaaaattctaccaaagtttaatgttattagtttctgtatttataaaaaaattgtactcttaactttttcataaaatctaaatttattggattcataattttgtacggtcaataatatttgtgtgttttcaaataaaatgcaaataattcattctgtcattatgaattaaaatattcagttatttttttattaattctacaatcccgattctataaaatattctctgagttcttttaaaaaaaaaaaaaaacagaaaaaaatcgagttgagcttcgcaatgagactccgctaccgctatggtttttttgtcaaagcggaaccgcatgatggaggccacgtttctccttaagagatgtttgatatga

SEQ ID NO: 36405 - DNA, 408 bp, Arabidopsis thaliana columbia
ttttttgcaggagagctgatgaaaataacactttagatcttaataacttacctgatgatccttctagagacattttcccattctttgaagaaggcttctcttcatcttcttcttctggtacacactactctcccttttcttttaattatttgaataaagttttgtaaatgattaaattaatctccccaccttctgctttgggtgattgtttgtaataaatatgatactagagtcaacatcataatagtaaattaaggtttggaaaccaaaaaagttttgatctaatcattagacgtacatttttgtattaatttagataaatcaattaagctattaatctttattattgagtaggagggtttagagagaagcaaacaaaagatgggaaagagtatgaatgtagaattt

SEQ ID NO: 36406 - DNA, 560 bp, Arabidopsis thaliana columbia
ttttagattaagcctccagagattggttacattaatggaagtttgcacctttgcttccattgttatataaaatattttctgttttgtttttttaagtacgcctttatcttttataccttagacaggagttcatgggcggatcttttcattagacaagggaaagccactgcctgggcttgttgtggtcaagggaattaattatacggtagacacatattaaccctgccttctagtatttccttattccaaaatctgaaaaatcttgttagttcttcattgctcattgtaatccttatgctctacaggttaaagctcatcaaacatatgcagactatcatcggttgcttgtacctggacagaaatatgaaggtctgatgtttttcctcatattcagcttaaaatacgtgtgattaagttcttatcagtatgttattagagttgccactgttataagattatgatacgagctgattttagtgattcatccttaagaaccgtggggcgtacaaatgcactatgatataccttcataacttgtgcagaccaatgccttctgttat

SEQ ID NO: 36407 - DNA, 577 bp, Arabidopsis thaliana columbia
tgtctgtctcagactttgttcgttgcatttaataacttattctaaaactccaaacagttaattatcttatctatgggttgtgaatggagcaattgaaaaaaaagtagaaaaagttgatttccaagaagaacatgcagacgagcatgcctgagtttagtgcatgtctagatttttggctagtggcagggaaaagtgttattaatagtttgttgttactctttattttattagctgttgacagctttgtgagacgaagttgtcaatggcacagctactcggtctgtgatttagccatttaggagatgggacatggaaagagacattttcttaatacccaaaaagccctgacgtcttgttttgaacacagtaaccatatgggatcccttaagtgatgtatacttttattatcaacaacaaacattagaatcataaagaccaagtcgtcaccaggtaaagaggatacgagaataaattcatcagaaacatgtgaaacatgtgaaacgtgaaaccaaagacgtagaggcatgtatgaacttcaacatgtttttgtacaaaaaagtgtattagagtatactag

SEQ ID NO: 36408 - DNA, 597 bp, Arabidopsis thaliana columbia
ctgttacctgactgatttaaggcctcccattgcagctagctgacaaaactaaatgaatcatctcttcttttcttaaattcttttgatcagacattatgataaaagattagctttatattatgctttagttaacttttgctaaacatcgggcaggtggataacagagagggactcactgcttcttcagatagaatcatctggagtggtccatttatttttattactacttactatctctttggcacgagttactttcagtttcttcaagattaggatcattcttcaatggagccagcaatagtaatcagaaaggtataaaaatgttatggagaaggattaaaaaagaaaagagagagagagagagagagactggtgacaaaaggtggcccagtggagattgtgccccattagaaatctcgagtgtaggagtagggtcaaagagagatgatggtttgaccagtccagttttgaacagagagtgaagaaagaagttgggctcttctcaacgtccattggtgcggtggtgggcattgcagaatgaggtgtgtgactgaaaccagagttggtggaaatggttggtcctagaagcagaggaga

SEQ ID NO: 36409 - DNA, 593 bp, Arabidopsis thaliana columbia
gagatttctgatgaagagatgaaaacagaaaccctctttacctcgaaggtagaagaagaaaccaaatcagaggagaagaaaggagggtttatgctgtttggtgttaggatccaatagctagctacttggttcttaggttttttatattataacttaattagagtatggtttttatttgcttttgtattacatagtttttttatttacaaactcgatgcttcgattttgatatctaacattaattagataaattgtctctcttgagtagatcaaaaaaaaaagaagaagaaaaaccacaagaggctttaaattcttcttcttttaagagttaagacaaaagccacttaactgctacaaactacaacgaactaaacaatcctaacaaagacatttagttaatgtcacaaaatgaaatagatacaactcacttctctctctatacactccttaagaagaggtgagtctccgcttacatctccttcgagtcccatcgccctctttgtcaggagtatctctacaacagtatcttcttgtacaaccaacctcggtttctcgatagttttcttattggtgttgtctgagtacttgtgtga

SEQ ID NO: 36410 - DNA, 529 bp, Arabidopsis thaliana columbia
gatgaattaaaacaccttctttccaactttcacataatagaagagacatagttgtaagtagaccacaagttacaaactatttttgtaatgttgtgtgttaagtttttggcactcactctctcgcgcgtgtctcaccaccacacacaccactgtccttgcttttgctaagtcattaaggacacacaatttggatatcgatcacaactttagtctttacatgcaataatacgaccatacgttcataacattcttcttttctttgccttaaatcacggtaataaccatggatatatcacctactctttttacactttccacctcaccaaagttgcatttattaaggacaaagatgcataacctagaaatcaaaaattatagttgaagaaaaaatcaccaaaagctgatatctctggatcccaagttggagagtagttagagtgagagggtaataactagcacggacaagaacatattgacttttcaaactcaaatgataatctctcttttcttttgtatatctttagagaga

SEQ ID NO: 36411 - DNA, 602 bp, Arabidopsis thaliana columbia
  unsure (1)..(602): unsure at all n locations
caatatttttttatttaacatcttcattctttattaatttgaaatcaataatacaaatgtatcaatgaacatatacattaaacctcagcaaaccatacaaccaatacttaagtagcacgaaaaagtgtaaaaaaacatgttgcttccgaatgttggtaagctttacacgcgaacagattcattaatctgttattttccttcgtcgtattcgtcttcagtatattttgatttttttgttgggctatcttttcttagtattacacaataattattaaatgacattacaatttttaaagaaaattaggcttatttattccattaatttgatattatctgttttctttagtggaaacttttgtagtggggaaattaagctgaacatttttactaaaatgtattaaaatgagaattgtcgttataaacaggatacatatatatatatatatccccgggccccacgacatattttaagaaccactaatgattcttattatctgttacattgatccttgtaacgtgatgatgattctacaattgaacacccacaatctgatttgaaagtaatgtnacgatcactagtcatcaggttatagaggaaggtt

SEQ ID NO: 36412 - DNA, 838 bp, Arabidopsis thaliana columbia
cgagacccacactagaataaattcattttatttgacgaagaaatctctcccaacgtgtctaaaactcaatacctttatctaaaaaatttattattggaccaacaacttgttggttatttgaattcgatttgccatcaaatattcaaatatatcattagaagtaacggtaaatcttcttaagactaaatccgaatatattatagttttcctcaatattagttagacataaatttcccgacacattctatgagacttgcaccctatctaattctacaagacatatagtaaggtcaaaatcaagaattagttctcaaaatcatagaaatttcattaaaatacaaatatgatttggtagaattgcaatatgcgagcgagtcaagcttctagaaacactaagataaaatattacacaaattatgtgagcgcgttggcgaagaaggcgacttgttcactctgagttgttgacatttgcattgtcccacacaatgacgtaacatcatatggaactttttgaatttgaagcggttttgaacgacaataattaatagaatttgctaatttggtcgactgtgtctcttacttaaaagtaatgtgtaccgatttctacaataactacgtattgatttcacgatgtataaataattgtttcagatgtgttagatgcatgaactaaggaaaaatatatcgaaatttacctaccacactacattagtgatggtttacataccataagggggctagtcacgcgatcagtctagtttctatggcgcatgttcaagcccgcatgcaagcatgggccatgcttgatagtgaattttgtggggagagacctcatgcg

SEQ ID NO: 36413 - DNA, 553 bp, Arabidopsis thaliana columbia
agaagaagaagaaaccggagacaaaggcgagacgtgacggagagatgggatcatcatcaccggaaaggaaaaacattgagaggggaagatatgattcacaacagtaaaggcaattgacaaagaagaagatcaaagcatcctaggttagggcaaagcaaaacagaatcaaagaaggaagaagataacgggaaaagtgtagtttcaagttgtggtttacgagggagaatcccgtcatgacaaggagtatcagataatgagtaagatgtcgttgaaaagattaatttgtcaataatccatagcaactgacgaagtttaaatcgggtttatgactgagaagttatgagtgtttcttttgggccaagcaactacaaaaatattgcaaaactaagccctaaggagctgctccgagatgggttcttcacagcaacgtttggaggtcggaaactaatccgatcgggacgaaatttggatggttcctgaagagttattacggtgtcttaagggcagctgaaacaagtgttctacatcatcatgtggccaaggtgagggtgtg

SEQ ID NO: 36414 - DNA, 468 bp, Arabidopsis thaliana columbia
agacatctgagcatacggataggataggatgaagcatctactcgaccaattgatcactcggaccatagacacaaaggcgtagacattgcagcaccctctttacacgatccccaaggtcgagtattcgcccaaaccgcctcaagtctcttgtcttctagtgaatctagggtttcaacattttactataaatagatcattttggggtttgtccaaaagatctagactttatctttcagtttttctttatgtttctgaatcttgaaactttaattactcttaatctatttcgtttttgcatttgattgtttaagtaaagttgtttagcttgtttagatctatattttggtatgattttagtaatttctggatttgtgttcttgagaatgttgcttgagtagggattagggttcttgaggatggattagattagggtaatctctaggttagttaggtggttagtgtttaggt

SEQ ID NO: 36415 - DNA, 560 bp, Arabidopsis thaliana columbia
gaatgttatatatacatatatactttgagtgaataaaaatcaatcattataagcttttagctttaaatcatattgtttgaacacaataatatcattaattccaaatcattcttaaatttaacattttggtttagaagaaggattggatttttcaaaaacatttaaatacaaagtaatcaaataaatgttttaaacttttatactaatagggatactctagaatacagttgtgattgtttttagtgattggcatcaatagtgagaaggaaagttatcccatttggagaaggaaagctgtcccttttcccctgagaaccaaatgatcaagcttgggcgggttcctttgtcggagagtgttgaagcagctcctcctcaagaagctcaaactaggcgaggaaggtcgcccccatattggtggcggggtagcccactcgatatgctgcaaaagcaaagcataaggttactgctagtaagcgggttgaagtttcttcttctaaagcaaagagatcgtatggtccccgtgtgggtaatgaggatttgcagagataataggggagtgc

SEQ ID NO: 36416 - DNA, 518 bp, Arabidopsis thaliana columbia
aggcatgttaaccttataacaattaatatatttagtaagaaaaataagatatgagattttaattaaaaaaaagaaaaatactgtaaggataataaagtaacttcattagttcttttactgttgaagtagtcaacaattctttcacctaaattttcagtcttctgagcatatcgagtgatattttccttcttaataatataatcaataaaaacattatatttcatatctaattaacataagaactagtctaagataataccaataatgattctcttaagccacatgttcagtttttaatttaaatgacatgggtaaaaacgtaacttctcacatatcttctttttcctccagctaaaccttaactaccgcaatcctctgttttttatttccgtgtttcttggagtgatcttagagcagctccaacgtataggattcatatagtttctaaaaaaacaaaaagtattaatattttactttcatatcaaaaaaacagaaaaatcaacatataggaattgtat

SEQ ID NO: 36417 - DNA, 458 bp, Arabidopsis thaliana columbia
ttttcaggattcagcgttcatcgttaacttgttgtatccatcccatcactaccgtttgttggattcgaccatcttcaatttttcactatttcttaacagatttttttttttttttttttggtctcatatttcccaaattgaaacgcacataaaacccgacaatctttattatttttggctctgtagaagaagaaaactcagtaagcgcttaaatctccgttcccacacgctttacaagaaatattagtaaacgataccttaaagaaattccaacttcgtttctcaattcatgcgagtcattcattagatgaagatgcatttggctaccttcagagagtcatagttagtttttgtgcccgttaaaccatatcatttattcattcactagtccatcacgattactcggcaggaatcacaatgccatacatcccagtagtaaaaagggacttcactaatca

SEQ ID NO: 36418 - DNA, 544 bp, Arabidopsis thaliana columbia
tacaacaagagtacaagacaatagcagagataaaagactgcaaatccggctttaagcttattcgttcaacgcatatcccttcacaaacaagtttccccagcaaagaagaaacatacaaaaagaaaagcaatcttcagaatatacgaatcaaacagaactttccaatttctgcttcttaaaacacaaaaccctaaattaacccaacaacaatccagtctagtacatagcctcaaactcagatccgagaaacttaagcaatcgcagaatcttccatacgcagacccagaaaacaaaatagcttcgttagagcatcacaccgcaccgacaagcatttcaccgcttcggtatgtagacttgagagagagtgaagaaaaaggaagaagcaatgagctttagttaaagtaaattggttacactaaagataagctcgggaaacatgaaaccccaaaaagagctcatgagaaagcaaaaaaaaaagctaaacgacaaaagagagaacttttaaaagattcaaaaaggtttttggaggagagtaagaaagaac

SEQ ID NO: 36419 - DNA, 647 bp, Arabidopsis thaliana columbia
taacaaagtagatacacaattaattagttttttttcacaaatagaagttggaacaatattcaaatcacaaacaattaagttaaatgtagataattttgtttagggttaaaaaacaatcaagtttagttttactcacgttttctgcttttctcaagctaatgtaaaccaattaacaactttcttgagtcaaacacaattattaacatgattcaaatcattcaaacaatttcacaagttcagagattatgattagtcaaccaaatcatattttcaattaatcctaatcaagtaaataacaaagcagacaagtcatttttatttctattctataaaaaccagagacacaattaataaataacaaagaatcaatttgattatgtcatcaacttaaaaaccaaaagcataattattatcacgatccaaatcagtcaaacaacacaagttcatagattatgatcaatgtgaaccaaatcatattttctgttaatcctaatcaagtacataacaaagcagacaactaatttgttctataaaaactagagagacaaatgatattgatcgatatcaatcatacaatttttcacaagttcagttatcacaagtacactattaattttcacatctcatctatatagaccagtgatgat

SEQ ID NO: 36420 - DNA, 537 bp, Arabidopsis thaliana columbia
gatagatccaaaatacaaatgatcaattaatcaaacgttcatgtgtgacgttcatgatatttgagttgtgtgtcatgtttaacttccgtttcatgggtatctagatagaggtcaaagatcgggttttatctggctggatacgatagttttcggggagggggggggggaaatagaccgttttccgataaaatagtatgaaaatgtgtccatataattaattcaaagcattttggttatgattatatcttttgacaacattattaataacatatttatcaatatactaaaatagataaactttttgaataggagatttgaagaaaaatgcttaattttgaagagaaaatatgttgttccttactcacgtattcatctcaacatcagtttatataagcataaaaatctgtttgcgaggtatttgcgtggtagtttagctacaatattacaaagaaagcaaagtaggtagcatattttaaaacctttcttacttagcactataaattcgtctcaaatgcatctcaacattgcatcatacat

SEQ ID NO: 36421 - DNA, 556 bp, Arabidopsis thaliana columbia
aatcttccgtgtcttagagacgatcacagcatagcttccttcggtggttggctcaaactgagctccgtagctcacatcagcacccaaaaccctaagctcccatgaaagcgtgcaagcctaccacaaatcaacacaatcaacattaaccttcttgatcaacaacattgttacaatatgagcttattagccatcgagatttaaatgtatttatacctcagaagcaggcaattcaatagtgtagtttgctgccggtttaacgatggcttccgttatggtttcttcggtcaaaggagtatctttgctaagtccaccgtatttaacgggaacttgttcaggagctatgtatctgattatataataagccttagtgagaaacatgcaaacatacaaatatacaattatgaaatggttaaagtgatttaatggttaattacttgaaaatagtatcggcagatttggatggaccagcaaggaccatcttgctcctagtccttggggatgtgatgatagatccgaatgttttgtagtatggaatgtccaccatgggacattgatg

SEQ ID NO: 36422 - DNA, 524 bp, Arabidopsis thaliana columbia
  unsure (1)..(524): unsure at all n locations
tactcgtgaatatcattcctaagtttgacgtaaacacactaatctatcctattcctacctaataatttgttgctaatttttctattgtgttgtttttttcctcgagtggaggataaagatcaaccaaaaaaggggaaacaaaagctgccagaaaattctactttggttctacgaaaatttggaatggaatccaacgtcgagagcaagatcagtcaaagtcaaaactcccaattgtgcaactgtataacttttaaccaagattttctttcaaaaacttctgatacatcattttcaagtttgtaagaatttagcatgcaaatacaataagttaactaagtttaaaggaaaaactaaaggaaaacaagaagtatttagccaanaacaacacctcgatgaagaaattacataatacagatagaattgacagacaaggccccgaatataagagggactacagaattatttcctcttttcgtatttttgattctctttgaaggggaaatttcccaaagagcaatttaaag

SEQ ID NO: 36423 - DNA, 486 bp, Arabidopsis thaliana columbia
gtgctaactgtgtcttgatctaattttttgatatgttgaaatagtgccagttgaaggattcgatgtgttcaagagctcaaagaaggcacgtgctaaaggtaaagcagaagaacaaatcacaaagaatgagattgtagagaatcccaagaaggaacttaatcgtcaaatggaggtattggagttgtttttaatgttgtctctgtttcatcaaaggcaaagtgtgacagattcatgactttgtttgctcttttataatggcagcgagatgctttgtcgaggaaacagtacagcattcatgtttccggtaacaatattccaccgccgcttaaaagtttcgcagagttgtcatccaggtgcgtggaactggattgtttctttacagtagtttgatattatgctcatagtattagtggttttgtagtttaggtatgtatttgttgtttcatggacgttgagtctattgacatactctaattatgtgtttag

SEQ ID NO: 36424 - DNA, 588 bp, Arabidopsis thaliana columbia
gggtcctagctcatttgaaaatgtggttagcataaatggacgcctggaacaacttaaatttttctagagcttgtaatcgctgaattagaagcggaagactatacgattaggataccattagctgctggtaaacggagaatcgaagaaacatttgttgaactaactggtgattcggttaaatgggaccctgagatgataagcaaatttaactatttgaaaaaatagtggtttttcaacaacatattatctaagggtagtggtacacatgttgaattatcggggcagatcataatagaaccgtcatggtgggacaatcgatgcacgataataatataattttaattatgtttaacatatagtttcttgtaaacatgttaatcgcatactcataaatcatatttattttacaggaatttggtgaaccaacaaaaatatatataactgtgctacaaaataagcctcttcctttcaaagatttactagatgttatacatagcaaacatgatcttgagcaagattttcgctatcaccccacacacttggagttcagcttgatctcgaacaagaaccatatgatgatgatggtgt

SEQ ID NO: 36425 - DNA, 546 bp, Arabidopsis thaliana columbia
tgcttctaagttaaactagtctttctctaaattagtttatcacgttaaaaaattaataaaaattattttcagaattacttttgagcaaaataaatatatttatgagattcactatcaatattgctaggttacaggactaaaacctaaaacctaaagacttcgtcgtcggcgatggcaagtggatctcttcggttttgagatgttttgtctctcgattgagtttcctattctcctaaggagatatggattgtttatttcggatcttggttgtcagatttttttggttatattaaaggaggtttttggaatatttgggattcaaagagattgttatctttggttggaaaatcgcttctttgggtcgtgttatgtggaatctccggcaggatttctgaggagaaatcaaggattgcggaactgtgatgttattcttggaattattggtgggtatcagatcaaatcaacaacagctggttcattggagatcgatcgagtttttgtaccagaagctttattggaagttcagatcatttcaaaagatcttta

SEQ ID NO: 36426 - DNA, 176 bp, Arabidopsis thaliana columbia
acgatctcctattcttgatgattaggatttgagatccgacataatttagttagttgtaatagagaaagcattattacgaacaaatttccttttttctttttagaatctgcaattttgaaattagctttcaatttttttacatatatttttttgttatttttatgactagatagtta

SEQ ID NO: 36427 - DNA, 523 bp, Arabidopsis thaliana columbia
tcggacttcttcttgattctcaatgctttggagaccactctcgcggatcaagtcatttcgattcgatccgagccgagcatccttggttcacacacggaccatgacatccgattacctttctcaagatacggtcgtggatcaaaagggtctcgatggttccttgaaaactcggtccgtgagttccactttcgcgtttaacttggaggacttcattgacagttttgaagcgaatgtgaatcaatccccttccttctcgtctttgtcctccagttaagtttttcttcttccatggacttctcctttcccttccccttccatggtacttaactcacgcgaaagtttcaaaattcgactcaacgttctcagacttctacttctgcatacaaggtgctacattggcggtcaacgcaggaatgggcaaagactcagatcgaaagagtgacttcgagaaagaagagaaggaagaagactctaaaggagagagagacgttgccgttatcgaagatgcttaaaacagcgttga

SEQ ID NO: 36428 - DNA, 459 bp, Arabidopsis thaliana columbia
catagctttgagtccgctatcgctatcccgaggattgattccgacatctgtgatggaatttgacactaaaagtatatcaactgaaaataaaaaggtgctgaaatatgacgttagaaacttgtttccttagcctaaaagaaatatttggtcatcactggaggattccagacattcgtgcatgtacatgggttggccctgccatgcacgctcgtccatgcattgtcatttccacgtagatacatcactattacattaacaaatcgaccaaaaataaaacatactcataacaaaatatacacataagattttgccaacttgtaggtaataaagtttgtcggagtctaacgtcatgtcgtcattccgtgtgatcatatgtacttccctttatgggatctctaatattataactttagcatgtgatttaacctttaagaaattaaggccattgttgaccgatga

SEQ ID NO: 36429 - DNA, 516 bp, Arabidopsis thaliana columbia
tgatgatgtttgctctgatctctctacccataatttcaggtaacataatcatctaattattggtaattcgtatatattaaacaccaaatttttctgaatcttttcaaacatttcatgatttttactactacattctcaaccggacttttatccattatgccatcttctccaaaaaaaaattctattttaccacccctatttttggaatttcgttttcatttatttttaaatcgaaatttgagtacaattactaaataaccttatgttttcagattatttacggcatccaaccgcagatccacgggctgaaccggatccaacccattctaaatgggtttccccaaaattgaaatttttaacctaagtaaaatttcaatttctcactgtcgtcgactctgctccaaacgcgttccgtctctggcgattccaaaaccccaaaatcatcaaaacctaacatcgtctttttcttttctccggcgactgcacacaacccctttctttctcatttccgagtaa

SEQ ID NO: 36430 - DNA, 668 bp, Arabidopsis thaliana columbia
gattttgacagaaaaaaaaatgaaacagactcgatgaagaagaagaagggaaaagaagacatgggcaatatcgtctttttcaaacaataaatatgtcttttttaaatacactgcatttgtgcctaaaattaaagtttttataaaacaaaagttctcatattaacaataatccctaatttatatgtttagggggatgtttttgaattcttttgctaaggtctgtgaaggtatgatccaaatttttctagttttgctctgaagtcgacttgaataaaccagttaaatatctattctctatctctctttcttgtaacacaacatataatctctcttgtaatccttttaagctatggttttgagcttgagagcaacctttggtctgttatagtgaataaatgggttgaatccagctccagacgtagattcaccacaccggtgaatcgatttgggtaaataatttgtgtgaaagatcttgagatcgagtaaggtttcgagttattgaaacgtaacatggtctataaaatgttaacctgacactgttacttaatcgataactaagagccaacattgccacttactctaatatcatttcttgggttttagcacaattttacacacacataaaacagagccggctcacaaaatggcatcggatatagaaaatgtgt

SEQ ID NO: 36431 - DNA, 398 bp, Arabidopsis thaliana columbia
tcaaaaaaaaaacaaaaaaaaaaaaaaaaaaaaaaaaaaaaaaaaaaacaccccataaaaatgtcggaaaaaaactttacgtgtaaataacctccgacacaaacccactcgtaacgacattaactggtttcttgtcttatcataccagaatacaaacttttatcttggtcttggtttgaagtctctgtctctatattaattgtttttcttgagaattgagtggtcggagaacaaaagggcacattcggtggcacgcgctaacatgcgcttggggtgcgtcagtcaagttttgggtatcttattctattttcacaatcgaggtgcgacgtaagcacacgcgatgattcttaattttgatggttctggtgatgctgacgacgaccatggagagtgattgg

SEQ ID NO: 36432 - DNA, 587 bp, Arabidopsis thaliana columbia
gaaaggccaaagagagctctccgatgaatgaggaaggaaaatggaattcttctattggttttttttcctactccaaattttgacctaaatgtactttttcgagcctttttgggatctttgctatattacggggcaaaaattatatgttcggacattgttttcaaatattttgcatgtatcaaagctcttttaaacaagatagggtattcctacgtagctggtgggacccacggcaaatggattataaagtcttcaaaaaagaatatatacaattgcattgcatgtagtaacggatgcgatcataccagcactaatgcaccagatcccatcagaactccgtagttaagcgtgcttgggcgagagtcgtactaggatgggtgacctcctggaaagtcctcgtgttgcatccccctttttttcggtttttctctttttttttgtcaataatgtatgactctagaacttttagaccgtgaggccaaacttggcatgtgataccttttcggaaagcccaaagataggtctccgatgaattaggaaggaaaattgaattcttatatagtgtttttttctactccaattttgac

SEQ ID NO: 36433 - DNA, 542 bp, Arabidopsis thaliana columbia
tagcagatgttttgtcgggatggcaggcgaccataggagaaatatcatcaagaagcattgtaagtcgttgttttcgtcttctaaagtagatgtttcttttctttagatttgaatataagggtatgaaacctgtttcccacaatgagtatatacgcgtctcatgtgtgcctgcttatgccaataacaaataacttttgagactagattaagttcttgtgtaaagtgactcctgacatataaattttttataaccgtatactgatgatgatgagcctttctccattgtcaggagggtttgtaaggctattgctagagtattggcattggcgctcaacgtggatggagattactttgatacaccggaaatgcttggagatccctcacatttatgcgcttgcttcactatgaaggtgatgtttttactttatcacattaatcttaatgtcaatgctctactcatcccaattaatgttcttcctcttatgtaccttttagggatgtctatcctcaaaaggaatatatggctgcgggcacattctgat

SEQ ID NO: 36434 - DNA, 413 bp, Arabidopsis thaliana columbia
  unsure (1)..(413): unsure at all n locations
tcaatcttttatgatgaaactattcaacggatttaataatatgtatgttaaagtttaaaaatgtatattttgatttatttgtgtattaatgatttataaatatatgttattatttatatattaacacaaaaattaattaattattagtatatatatatatatatataatctataatctgcaccgcaaatagttttttcaccagtcaaacattattttgtaccgcgtatttattcagcacataccgcagttaaagagtaccacactatcatacggcttttcagcacgtacagcagttgaaccgtactgcagttgaaccgtaccgcaagatcatgncgtgcggagaaagcgttattacagtgcggtagggcgcaaacgtctgtaagtgcgggagtaaaatatttgcgggatgaat

SEQ ID NO: 36435 - DNA, 481 bp, Arabidopsis thaliana columbia
gcatcttgcgcagtgcctgtttcttagtatagatactcagtcgcatatgatagcgcggaagctcgaattctttccgacaaatctcacagttaagtgtaccagcaaactctcttaattcatcaaacatctcagcaccaagtttgatccttagaactgcatgtttctagcacatcatccatcgaatgactttccaagtgtcaaacattcgatgtattttatcgcgtagattgcacaatcacctggatcgtgattcacgggaccttcttcgtgaccctcttcacctccaccattgcgtagtcttcttacgtctttagaatatattcagacaacatagctgggatcatcttccttaaaaacatgcaatgctgagacatttctggggcgatcaacgatagtgggaatgttgttgtaaacgtagatcctctttcgctacaagtgaatatctaaaaccaaccaatgctttttattgacaaaaagacaa

SEQ ID NO: 36436 - DNA, 527 bp, Arabidopsis thaliana columbia
tcacactcgtttgatactagacaccgagaaacttagaatggagacaagagaattttacgagttcagattctaatttggaatcctacgtctcgtcggagatttctccggaatccactaaacttcttagctcaaaactgagctctctctctttacaattgttctactctctctctctctaacctctcgattcaaaaactctgaatcatgatgatacgaaacaaaaattacaaagcaacttaaacaaaatgaaaaaaccgagaaagataagattcttccgttagagatgaacgactgagattgagccacgtgcgcgatctcctcagctcgacttgaaaccttctgattctttgagagtctttcacagacttagcatatagatcacttctcttcaccgagacttcccgctttgtggccttgcgtgtctgagctactttgttttctcaaaacgatttctcctctctgagcatatgcttaaggtgctcaaggtcggcggcctacttatcctttctttttaaggttgtgcgcgg

SEQ ID NO: 36437 - DNA, 592 bp, Arabidopsis thaliana columbia
aaaagaaagagaacaattatgaaacggttatggagatatgtgacgcacgcgatagtatgaagggaagccataggagaattgtcgtctctattactcaatttttagaatctttaactaatgcagagtttgaggcattagttattggattttatgtattatcccaacgcctattagtaaattgaggaaaatggtcaggtttattaatgactattgagtgttcaatgaagtaacttcagaaacttccactttagattagatggctaagtcgtactttagtgccacgtataaaaagacacctaagtttatgcatggatacaaatgggctagtctctcgtcttaatcacttttaatttagtgtaatccaaataagaaattttaaataattttgttttttatataataggtctctggttgtgacccggagaaccctggctctaaatagcaagactttagaattttgaaccttttcaaaattaaatgaccaaaatgtgtaatcaatgaacctcacttgttctcatctgttatatccaccattgtaagttgtccaaatagtatattatgttcttaatctttcagttcaatggatgttatg

SEQ ID NO: 36438 - DNA, 545 bp, Arabidopsis thaliana columbia
gaattgtaatatttttttttaatatgagaataaaaattccattggacccaaaaatgatacattggctaaaatctctttttcttttactcctactttgatgagtcctactactttggatccagaggtttcaatacgcttttaaaaaacacttgtggaatatttatgattcttcatcatcaaaacttgtgtttaactccataattaattcatggttcgagctagagatatgttgaaatcagctaattttcataaatgtcagatttgcaatttgaattttgttttgattctgattaagaaagacaggacatcggagtttttttgaaaaaaggcttttaacaaataatagaggttgaaaaaggccgttttcgtcgctttcctcttcccttttgcatttcacaaaatagcatttactttttcaccgcaattctttgttactcgacaatcacttgtgacttagttacattaaaaaaaaagtggtggtatacgacttggctaagatgagtctgttctgtatatgtttgtaagaaaaattaaaaaatggtggt

SEQ ID NO: 36439 - DNA, 551 bp, Arabidopsis thaliana columbia
cgtatttgactttttaatcattaaagagataaattaatttactctttaaaattttatttctaatggcatacctatgtaattacttacaaaaattaaggttacatttaaaatatacttcccaaataatatagtaggatatttttaatacgaaattttaactgtatgattactaaaaacaagcaaaaggtaaatcgctttgctaggagcctaggaccatttggtcatgcaatgactcatttggtaatgcaagctaaaactatatcgtaagactaccacaagcaagcaaaggtgattcacacgaggtagtgtagtggtacttgggtcatgacataaggaaaagggattttaatcctcagaccttaaagcgcttgaattcgattgtcattttgtactatgtcattttctaatgaccacttgtgttttttttgagtttcggcccatgagattaacatgtggtgggctatgcagaaacttctgccaaggatcatatgctcagccgagagtagttcgctctagttgtagttctgattgtgagaaatcgacgactagat

SEQ ID NO: 36440 - DNA, 407 bp, Arabidopsis thaliana columbia
gagaaggttcttgtatttgtccatgagcttctcgaaaacagggtctcttgatctggaagctacatattgagcagacgtagtcgttgatcggacattgatgatggagccaccacatgggtgaaccagaagtgatctcatgaggaggaacctcatagtatctcaaagagtatatggagctagactgagtctccgcgttccacaacgtcgctgtatatacccacactctctgcggaattatatcgaacacctaacaggcattaagggaaaaaacgaaattaaaaaatgaagtagaagaattatatggacctattgtattttcatgtccaagaccaaaacacatctataagcgagatcagttaccgctataaaatttatttaaactaataaaacacataccatagtagttt

SEQ ID NO: 36441 - DNA, 485 bp, Arabidopsis thaliana columbia
aggagggtggggcattgaaacatgtggagataactgaaacatctgcggttgcgggatttgcgtttgcgtttgcggctgcggttggaagacgacatggttattgtacggatttggtcctaaaggatgatgattggaggtgggaaaatgaggaaaaggggtgaacctgaggaggatgatgaggatcaccaagagatggatccatggatgtgagatttttgcagacaaagagaagagaagatacagtaaaaaaaaaaaaaagaacaaaaaaaaaaaagacagaggtggaaggtgagatttagatttagggtttttttttctttttttttgttttttgctctgagagctcttttgatttttttgtttttgtgaaaataaaatttttgtgagagaaataaataaagttaggttggggagagagaggcggaggagtagagacgaaaggatgagaagaaagattactattaaatctaaccggttgatttgtt

SEQ ID NO: 36442 - DNA, 526 bp, Arabidopsis thaliana columbia
ttcttaccccattctccagcaactctcttagacttgtcaataagtttgtaaccaactccattacgatgcagctcttttgcaacacagacgttgctcaagtatgctctagcaaaatccacaccaatcccctataacacaaaatactcttaggctactcaatttgtccaatttcagattttaagttcagcattgttggcaacatcaaatagacaaatacctctggttttgttccagcaatttcatcaggaagccaacgacattggttaagatcaaggcttcccaccacaactctgtcttctatgccatcagagaactgagaaacagatgaaccatagcacaaatccatatcacagttttttctagaccaggaagtaacaatgacatgatgacaattccaaatgtagagcaccataacttaaatgcaacaaaccctcttgaacaggtaaatacaggatgaccaaattgagtacacagaccttacatgcagacataaatcctcaaaagagcttgataattgcgacaatgg

SEQ ID NO: 36443 - DNA, 527 bp, Arabidopsis thaliana columbia
cttctcccaacaccaggtaaaattcctttaatacccttcttctatttactttcacccatttcgttaaaaggtgattaggaaatatttactctttcataagtaggatttttttgcttgttgtataatcgaagttactagatactcaattccattgataatcattaattttgctatacaagttttgtttttctttcaagagttttatgatagacattgtttgtcaggctcctataaaagagagacacgtgggaactaacttcattcacttattcctttatttgcagcctaaactcagctgaggaacacagcacagagactatgacgacgacaagtccaagttccggcagtacgacgtcgtgcagatggtctacgaaggtgctctggacgaaagcagtggttcacatctacgtatcacggcgtatcacgagcaatcacagtcgttcttctctcgcttggtttttgtcgtatgtggtggttcttctgaccagagattatttgtcttagtgtctgcacgtatgcgcagaaac

SEQ ID NO: 36444 - DNA, 590 bp, Arabidopsis thaliana columbia
gatgtacatgaaggtaacacgataattatgtacagagggaagaactatgtgcaacctcctactgaaatcatgtcgccgaggattactcttccgaggaaaaaggctttggataagtctaaatgtagggatgcgcttcgtgcggttaggaagtatattccgaggcttgaacaggagctccagttgcttcaagcacaagctgaaacgaagcgggattacacgaatgtgaaggttgatgataatcaagagaggtcagaagagttgaagaagattatagaaagaagcgaagagtgtttggaggatgagcaagaagaagatgaagcaggattagaactagcgacggattcagatctttcggatatttttgagactgattcggaattagaagatgcgaaaacagagcgaccactttttcttgaggagtttgagaaattcccagctataaacaacagagaagacgaagactttggggatctcgggaaggctaaatcagaaggtgaggagaatgatgatgataagtcaccaaactttgatgaagtagataagatgtttcttcgggctgcttttcttttacagaagaaaagacgatgaat

SEQ ID NO: 36445 - DNA, 504 bp, Arabidopsis thaliana columbia
ctgtttcatttataaattgaatttgtaggttggacatacgaagggatatgtacaggtcttagttactggaccagaaagtatgcttgggacttcagctatggcgaggataacatctgtggggagatggtcagtatttggggaagtgattgagacatttagctctgcaaatagagaaacaaaatcccgagaggaaacaaagctgccttgttcgtcgaatgttagcacttgtgagacttgcacttgctctgctgagagctgtggagaagagagatcaggagaggcgtgtaacatttctggaaatatctcaggacaagatgataacaagggaaagtcaaagaaagcagagaaggaggtacaagaggtcgtcgtaccgggaagcagcgtacgaaattggggtttcattgataaggcacttgtctgtggagtgttcgtaagctctgtcaccattcttgttttgttgattagcattgcatgtagagttttgctgcggcaatgaatcagtgt

SEQ ID NO: 36446 - DNA, 1177 bp, Arabidopsis thaliana columbia
ctccaacaaatataagtcagacgaattccaaagaagatggaaattgaatcatggaggtttaagtctcctcacctgtcgatggctaacgagaatagcgttacgattttgagttgtgtttgatggtacagagccagtggctacaggagtagaagaagatgaggctccatcagtttgatgcgtttggctacaacaaaagaaacatacacccaacaaaaataagtggatatttagtatgtatgtaacattctaatcagaaaactgaatctgactgttggcacaagaagatgaagtaagaaacattaagtttccgacttttcaacctcaatctttagaaacatgatcaagctacataagttacaagtctaaaatttcattctttctcaggaaataaacaaaaccaaaatcacatttttcatagagatatcaattctaattcgactttcgtaccatcactgcagaagaatggtaaaaatcagtagaaatgttcggaattgcagcactaatttcatcaaactaatctaaactttgtaattccaaaggtaagtcaaacaaatatataacaccttgaactgtggggcacctgagaagcgcccgacggctgagaagaagaggcggctgcggaggaaggaggaggaggagagtagacgtcggacgacttgacgaaagcgaaactctgagagaaactctgggaaggcttgaagagagatggaggcgtggacttcgtctgtgagctttccaaaacttcctggtacgatggcacaccaatcacgatctgggttttgggttttctagcaatctgttggtgcagacttctggatttctcaccgtcgtcgtcttcgttcgccatgagtgattgaatctccgagagctcttttttcttttcccggactctgtttctcgtcctcaacttcccatgggattaacaggcttttgtgggccttaattgttcaagcctaaagcccattaattatgtaaatttgatacaacgtaacacgtgtcttaagattatagacgagacgagacgacaaaacaaattaaaaccagtatttttgcacactatgacagtcttcatccaattgtctaaagtatctagagttacatatatgcatagattacatcatacatgtgattacacagcatgtaatataacggagcgaaataaatgcatagagttaca

SEQ ID NO: 36447 - DNA, 483 bp, Arabidopsis thaliana columbia
ctagaggatccctttttttgagtttatcatgaaatgtttgatcatcgatgtcatatgaaatgccaaagatgaccgtaaatttcgcatcgtaactcgcaaagatgaaccttactttgagacgctgcctgcgtgatggacgtgagacgcataacgcatactattaaattaccagacgctcgtggacacaacacttcaataccgaaaactaaactaatcacattgtgatacgttttgtattcagagagccaaaaaaaggcttacaattttgtcgttatgtggattagccttcaatttgttgtaaccgtcatgtatcaaggaacataaaactattagaattattattctaatataaagtaattcatttcactcacactttattaccataaaacatttattttgcgcctataaaggcatttcagctccaccagtaggaaactttctcttgaaagaaacccacagcaacaaacagagaaaatgtgtggc

SEQ ID NO: 36448 - DNA, 753 bp, Arabidopsis thaliana columbia
tccatcattccattttggaagaagaccaaatctgattaattacacacaacgtttttactataccaagtcataaactgaagaaacaatcaaaatttgataatctgatcatttgaattgtgctctgcgatgatcaaacgccctaaaacatctaacaatttggctcactaatgattcttagggcctatgaaagtttctacctttccatctagactgaggagtagcttcaagaacagcatcgagatcatcatttcttgtacaaaccaaaatgggtccttcaaaatcaaccggaactgcttctcctctcttcaccaacaaatcctcgccattacccatttcctgtaacgcccttccgactcttccgccacccacaatcacagcaggcgctagttttttagcggtggcagctgacgcggcggccatagccattggaacggcgaatctcgctcttgaaactgagggtttaagagattcagagcgtcggaggaaagagaaacgagctgaagcggacgaggaaacagcaaacagagtactactggctttagcatggtgataataatgggcttcgacgatgttgtggcctctcatggttttggttggactaatttgaacagtatggtttaacagccactcgatggtttgaggctctggcttatcggttttggatgactcacgaagataaaacggcatgacgttgataaatataaaaaacggcaggttgttgatactttaagtgtttgagtgtttgaaacacag

SEQ ID NO: 36449 - DNA, 206 bp, Arabidopsis thaliana columbia
  unsure (1)..(206): unsure at all n locations
nnnnnnnnnnnnnnnnnnnnnnntaaaggtgtttgaagatataggatgctgggaaagagtcgggaaatctcctcagcattcacagtcaagtccaatccgtagttgctgcacctgcattagactccttccttgtgttcccttcgatacccgtttcttgaagactgaattattttagaatagacatagtgtagatctggaaatcccct

SEQ ID NO: 36450 - DNA, 795 bp, Arabidopsis thaliana columbia
ccttatgaattgctatgggtttgagtcattcaattattgccatgcacagatgtttccttctagttttgcatttcgttacttacaggaagaataaatcctgcaggaaagagtgagtctgcgaccacaaaaccccagaaggaaaaggaaccaaaagcattgaaagataaaaccactaaagcagaaagacgtgccatccaagaggcacaacgggcagcaaaagctgctgcaaaaggttcttgttttgttcattatttttgctttgttttccatattcattaaagtggaacgtaaaatcatctaagtgcttccctcttgctaatttttaggcgaaggaagcaggcgtgcagatgagtctggtagagctaatcctggcaaggctgccataaagccccaaccaaagaaagaaagacttcccgtcacgtcctctgtttctgaaaaaacagctgtagcagtagaaaaagagaagaggatggatgtccctcagacacaaatgcagtatgatgataaaagccgagtggataaagctaagaggcgagctgtggttgaacagaccgagagcaagaacaaagttgaattatttctccatcttcctcaatacgaacgcagcaatcagcttcccaatttaagctccaattttttcacactcgattccatacaccatgcagtctataaggtacacctacttgtttatatgtgactgtgaaatgttcgttacacttttgaactggaatccttaagggtttgaaaccctgtggtttatctctgtgccatagatcctcaagtgacgtatataca

SEQ ID NO: 36451 - DNA, 568 bp, Arabidopsis thaliana columbia
atctctcactcgtccaaagaattactcgttttgacaccatttcactcgatttcgtcgcgatactcgacgacttcactctaacggtgacatcgcggggtaatgcttgtgcttttccttccatataagactagctatgtgctccctcggtacgcctgtattcctttcgtggattggaacctacgtactgttgtattgtagcgtgatgttttcccactgctttctggcttgactcacataaagtacgtgcgtaactggcactatcatgtaggtgcgaaatctgtcttctcctatgtcttgttctcccagtttgattcctatgtttcgaagtccagctaattagtgaaggaaagtggtatggatgtttggagctcaatccatcgaattcactcgcttctttgcgctgcgttgtagctcttagattattgggaggaggtcatttcgaatgttttgtaatttggaatcgttttttcttcaaggcacggcttcttgaatcgtctttgtcttgtagaatggttgtcatctggaatctaactaaatagttagttaagaagacgcgtgctttgttggg

SEQ ID NO: 36452 - DNA, 466 bp, Arabidopsis thaliana columbia
agtaacgtccgccagtgtgctctaaaggatcttcaaaagatttaatagaatgtgctatgtagtgtgcgcatggaaacaaacaaaaaacaagaaagaacagaccaaagaaaaataatggatcaactaaaccctcttggggacttgcttaagaataagaaagaacaatctcatgttacacacaagaaaaacaaaaaatgttaaatacttgtttatatattgtttttacaaacggttgaatcactggattagtactaattgatacatacagtatctgctatttatgtagtagttgtaaaatactaaaatcagttgaatgctgtaaatttttctactacacgattttggttttgagtgcgcaaattgaattttagaattttgaaaaaccaaaagtcatgtttataaaacttttttctatacaaattagtaattagattggttaatagttaagttaagtggatacatatac

SEQ ID NO: 36453 - DNA, 535 bp, Arabidopsis thaliana columbia
caaaagcttgtaactattataatacgtttaaaagtatattttcttttatataattcaaatttagcttaatgatatatttttaaaataatgaaaattacctgtttaaagaaaaatactttaaacgtttatatcatttaaattctaattaaaatgttaaatatatactgaaaccattttctagataattacaaatctaaaatccaaaaattctcttttgactatgcttaatcatagtttaaatttcatgtgtactaatcagaaacaattaacatagttttgttacggaaattgtataaaatctaaactaaatgagaatttgttattaaattagattgaagtttcctaattatcgaataacatattaccaaaataaataagtttacatatatacaattcgaattaaaatagcctgatatgttatggaaacgtttttaaatgatttcctaaaatattgtgtagttattaatttattgatttaattcgtttttaaaaaaaaaaaaattcaagatatttatttgggaattggacatgttta

SEQ ID NO: 36454 - DNA, 292 bp, Arabidopsis thaliana columbia
ccataagaaccaaactacattccagtcgttgttgtttcctgtttctgtttaaatgttaatctaatttcttgttttatgtacgtgccttgttttattgtttaaattctctcgcaatgtacgtatagtttctggtgtacgctatcgtgtacgtatattagttttggtgccttcaacataaaaaaatattagatttttacttatgttgtgtacgcaatttgccaatgtacgataaaccaagtttaatgtactatatagtgtacgttcacgaagacatctagtaaaacttaaagtg

SEQ ID NO: 36455 - DNA, 458 bp, Arabidopsis thaliana columbia
gggtacgcttacctcagtcgaagaatgaacgtagttgcacattacttttataacattttcttttttggaaactgtaaggaaagaaacaaatttgtcctcttaagagcagagtaataaacagagtttctctcttgttttaggttttttttttggtcctgaccggttaagaatatttccgagaaagttaccggtttagctgattcgattttaaaaacgaacccataatctaaaccggaatgtgcgattcacaattgtggttttgtaaccttaaaacacggaggaccagagataccgtttgagatgacgattgaattatgttatcatcatcaccggcggtcaccaccgcctcacacttacatcctcctccgtcgccggaaacctaccaaattcctctgaatttactttcctcgccgcatattacccgccgagaccttttcaaaactctctccgtatgtatt

SEQ ID NO: 36456 - DNA, 318 bp, Arabidopsis thaliana columbia
tgtagggcggctcaaaaaaattaaggaccacgagcttgaaaaaaataattggcccttatttttttttatttttttaaattttttttgataaaccctatccgctgatccagtcaatttcggtagaaacgcaccaaaatactttaaagtggacttctccccgaaagaccaccacactgtctgtcccgagtttggaatgctttcaaatgtgacttccaagttttgttttcagggatgatcgaactatgaaagtttcacccttccccaaatcatctcctaccaatggaccacacatgcttgggcctactttctaagtcatgt

SEQ ID NO: 36457 - DNA, 542 bp, Arabidopsis thaliana columbia
catacttttgaggtaattaatatcttttatcaaattatttagagttctattctaattttttagattatttttttgtaaatcacaccatttatagtcaaatactaagctagctagttcaaggtaaaatacaataaaattggtcaaattcgaacggtaaaggttcatatgaatgaccttttggccttaagaaaagacacattctctctctgactctctccatattttttctatactcatcttttagtcagtcagaaattaattaatattataattgtccattaattttctaattttattttcttttgtgcacttcttctctcttcttttttttaccctaatcgcctcttgtagttcttctgattgagcaatcaatttttgacgatcgagaaaacattagtaaaagaattatatatctcaaagcatttgacaaaaaaatactaattaaattgtgatcttaaatcactaaattagtaattagtaaatagtaattctttttaaatgactaaccagcagcaggccatatgacgtcactcagcaaaaga

SEQ ID NO: 36458 - DNA, 310 bp, Arabidopsis thaliana columbia
gacaatacaaaaaaaaaaaaaaaaaaaaaaaaactgaaaaaaaacaccttcaacacaagaaaacccggaaaaaaataggtcatgaggataagtgtgggattcggcatggaaatcactcggttaaaccgtttaaaactttgttgtgtttagggtttcaacaaccatatattatcgcattcgggtttggcaacaccgcaatgtttgtctttagacttctaaccgttttctaacttgtggcttttcgcgactgtggcctttctcattcctggcctattccctccctccatatcttacctcagacccccgcctc

SEQ ID NO: 36459 - DNA, 495 bp, Arabidopsis thaliana columbia
aatcatctaaagaattgtatatattatatctagactctagtaatcaaaatgaactatgtcataggctacatggatataaataaccaaacaaagttggtggcttatttttgagagtttttgggtcataaagagactaccaattaattgttgtagatgtggtgtgggaagtcattgggctaaatgaggaatgtgatacgcagagtcacaacaatgacattcaccttccttctccaatcaccaccactcccaatttctccatctcctcctcaattctctctattcctcttcacctttatcaaaaacgcagcgattcatcactccaagccagggctctcgactacggactttgtgtaccaaagtcatcataccaaacatgcaagattcaggatcaccacacactctctatatcttactcagcgagaagccgctgagattgatgagaccttgatgggtcctcttggtttctccattgatcagcatcatggtcctccattt

SEQ ID NO: 36460 - DNA, 573 bp, Arabidopsis thaliana columbia
cagtgtgctcgaatgtgtgatgaacccaaatttctagttgattggtcggcaatggaacatggcgttgtgctgatgtggggttactcttataattgactatttttgtcacttttttccttttttatttttctcattcgatttctctttgcattatccaaagtgttttaagaacatagtagacactaattcatttgttttttttggtttttctttattaaagttattaatgtacttttgagtaattttattgtccgaagttttattccgaaactgattgctgacttcacatcgctcaataatttgctatcattattgcttgtcatcaattattatcatttgctatagtatgtcaatgctgaaaagattttaaaacaacttgctagaaacgaaaattttcaagtaatcagtaataaaaaaaattataatcgtattgcattttgaagttattagattgaagggtattattgtacaaataacctcaaaagaatttgaagaggatctcttaagtatacttgtgtgttgttcttgttcactgtaaaagtctttataataggaaacaatatgtatgtatca

SEQ ID NO: 36461 - DNA, 520 bp, Arabidopsis thaliana columbia
tgattttttgagtgtatattgtttagtttttaatctcttcattaaaacagaatcttaattttgggaaatgtgccaataagattacctataatttgtttctttttttaatgggttttaatttaaattgcataaaaccaaaatgttttcgaaatgatttctttgtggaatttatttttattttgatggatactaaactttagtatttacattattttgtaaacttgtatttattcaaaattttcataagatataacgattaaattgctaaacgcatttgcatgcctaaaattgcatatctccattactctacttgatgttttttattcataaatcacaacatgctagtaaaatgaatatataattacttactagattaaataattaatgagaattttcacttttttaatatcataaaaaacaaattgcggtctctaaacgaaaagtacaagaaaatacaaaggtgataataaaaatttcaaattgtttctatgtgaacaatcaaaatgtttcttaattatat

SEQ ID NO: 36462 - DNA, 598 bp, Arabidopsis thaliana columbia
gactttatgatccctttgctgtgggtcccaccagctatgtaggaataccctatcttatttataagagctttgatacatgaaaaatattcgaaaacaatgtgcgaacatataattttcaccccgcaatatagcaaagatcacgaaatgcacgaaaaagtacattaagatcaaaatttggagtagaaaaaaaaacaatagaagaactccattttccttcctcattcatcggagagctctctttgggctttccgaaaaggtatcacatgccaagtttggcctcacggtctaaaagttctagagtcatacatttttaacaaaaaaaagaaaaaaaacgaaaaagagggattcagcacgaggactttcctggaggtcacacatcctagtactactctcgcccaagcacgcttaactgcagagttctgatgggatccggtgcattagtgctggtatgatcgcattagttactacatgcaatgcaatcgtatcaattttttttttgaagactttatgatctatttgccgtgggtccaccatctatgtaggaatccctatcttgtttgtaagagctttcatcatgtaaaatattcgaaataaatgt

SEQ ID NO: 36463 - DNA, 580 bp, Arabidopsis thaliana columbia
cgaatttatttatacatggtaacacaatcatacactagacttatatatagtgttttgcaaaataatgatgatgtattttaaaagtactagtctttattagttgatcaatgaaagtttgtttgttatatatatacttacattatatacataacataaagtaatcattttccaaatatattaaacatatgaaacataaatagactgtattattgtgaatgatagctaaattagtaattacattagaaagttttaaacgtggaaaaggtttatatatgttagtttgatattataaatttacctaaaactaaaggaagattctgacagaaacaagagactagctatactctgctgcctaacaaaaaggagcatattcccttgcatgttgttcatcgttaacatattctataaagtatattgcatttatcaataatttaagttggaaatcagtagattacctctaccttttttaataatccttaattgggtgtgaccaaagagacctgaccactagaaaagatctcaaggttatatgttaaaacattttgcaacatttgtttatcgattcataaaatattagttg

SEQ ID NO: 36464 - DNA, 496 bp, Arabidopsis thaliana columbia
gtgtgttgttcttgttacactgtaaaagtctttataataggaaacaatatgtatgtatacatgaagaaacagaatgtaatcaagaatcaatggcatcaacaggaagtgaagttgttcttttcagacactttggtaccaatctttctccaaacatctctttcaccgtatcttcttctcttcctaacccggaaaccgaacccaagaacccgtctttcggagaaatttccacctcttctccggattccggccaccgggtttttagttgttcatcctgaatatctctaagctcaatttggcatttggctttaagcatctcaactcttgttggacctgattttcggttttttcggatggctcatcgcagtatttagatggcataaacgagaacgatccagaacccgatatatggtttatctcgttacctgcctcgcaagaaaacatgttttcggggtcttcgtatagcacctcttcttcctcctcttcttcggaatggtta

SEQ ID NO: 36465 - DNA, 566 bp, Arabidopsis thaliana columbia
ccgatgaggtgattttaaaaaagaaaattgataatcaaatctaaataaaaaaattgtgatgttgatctaagatatccttttttttaatgatttattttttcattttaaatagttttttatcccgtatagactttttgtcttcaacgcattgttaaacgagaatttgaattttttctaacgtgcggttagtccaatggtaaatctctcaagtggaggtgtagggttcgaggcatgttgaaagagatctcttatctaaaagagatgagtttaacctactgtagatcccgcctcgggaaaaaatagagtctttggacttgaattttcagatattaaaaaaaaaaaaaggagaaggagaatttgtaaggtaatttgcaggtcacaccctttgactatgttttattttcagagattggcaaagtcaaaggtagttttcatgttttatcttttcagctgagatttgaccattttaccttaccagcgtaactagatattgtttgaatgtacggttaagttagacgatttagttaggtaccatatccggtttggtaaagatatttggagaacat

SEQ ID NO: 36466 - DNA, 507 bp, Arabidopsis thaliana columbia
cgaaatctctaaactaaactcaatgatgattcccaagaacttcggcaacgacgccaaatttgatattgttcaaattacttgaactactctctcaaataagagatcaattgcagtattttaggatcgaattcacggagttcttttgttcaaacaatgagttaaatgttgagattaagctagcagggtaatagtgaaaataaaagagaacaaagtaaaaagacagtagattgatttggttgtgaacgatttaataaagagctaggaacaaagtattctcagaaaactattggttagtagatctagtgaaagctaggttttaaacgaactattcttaaactcaaactctaattatggaataactggtgggcgtgccgcgaaactccctatatctgtagctaataataaccggagaagccgagaaactatcaacctaaatatgcattcttaacgagttcaattgttcatcttagtatataggccgattattattcacacctataaaccaga

SEQ ID NO: 36467 - DNA, 577 bp, Arabidopsis thaliana columbia
catgcaacattgttaaataaaatgttgaaattgatttgaattgcaggtatacaagccaacacttgtcagatttgagaatgccgggggattggcggcaaattctccagctgaagtgacgaaaggtactccttgaaagcagatagattacagtgtagctgtgtcatgtagctctcagctcttctgagatgaatatctgccttttccccttaagtccagtcatttcccccagaaataatacgttaacaatttgtgactgctcctacagatgtagatgttcttgtaattatggtaacaaacgaggttcaggctgaggatgtcttgtatggacatcttggagcggttgaaggtatatctctatatcctagattttagcactggaggttagagctgactttcctatattttctttcaaatatttcagctataccatctggagcaactgttgtacttgcgtcaacagtatctcccgcgtttgttagccaacttgaaaggcgtctagaaagtaagtttttttctttgcttgatgatagaggaaaatcctacaaagtgttttcagtacgggctacagtaaatactg

SEQ ID NO: 36468 - DNA, 414 bp, Arabidopsis thaliana columbia
agtattaagaggacactatacaaacgtaaaaacccagcatttggcggacttcttcctccgtttgaacgtaaacgtactctctctgaactccaacccttttgcatactatgtagataagtcggagtaccacgactaggaaacacactcgatttattagttgaaactgaagctctcttcacatttaccactcttggagacgtagaggttacattactaagatccaacgaaacagtcctttggtaatctaactttttcgccagcgcttcacatctagatcttcgttcctgacattctataaagaattgagattagctctcttccattaatcataagcatggatactacagtataaacttttgttatcatgtaaagtaaacgtacctctaagagctacagagaaagaactcctagctg

SEQ ID NO: 36469 - DNA, 1041 bp, Arabidopsis thaliana columbia
tgcacccttatttgaaacagtactttagtaagaatctttgttaacctatcataataaagatccttcttgacttcgcgcgctcaatgcttttgtacgtacgatggagaaaaacacttactaaaaaaaaaacactttttgttttgacatttgacctttctaagttactttttttttttgtcgtctgaaaatttattatagagattccggtgaaatacaaaagtgaaatataaagccggcggttaacaagtaacaccagaaaactaagccgacgattaaaaggatagtcttggaagcaaaacccaaaggaaagggagacaacaaggcaaaacaaaccttacaaacaaagcaaagttgcgaaactgaaacaaagaagcagaccaaaacaaccaaaattttaaacacaacatctcgtcaaccacattaccagacaaaggaaaggcagagctttacaacaagccactccgtaggagacaaggaactcccaaccaaacggacagcggtgccacctattacgatgaagactaccttacatagaagagttccaaggaatccataccggcgagaagaactaggccaaagacgacaagtcacacctacactcccggaatcggcgaattaaagaatatgattgtttagcgcctcgaaggaaaccagccaatgaacagatgagatctcgatcagatctttagagtagagacaaggagagaaccaaatcaattcggaccacaccgaaaaagaaaaacgggaggagatcgaaccggacagaaacgaaagcaaccaccaagcctggtaagaggctaaacgagaagaaggctaaaacatgaccggatcaagaggcgctactagcaacatagaccaacccacaaaaacaacataagccatctaagaaccattcgaaaatccctacaccacaacgcacataaactaagtaaaagcaacataaactttacaacagagcaagagacgcatagctccggcgctatggaagccaccaaagccagccaacgcaaactgagatctagatctacttttagagagaat

SEQ ID NO: 36470 - DNA, 727 bp, Arabidopsis thaliana columbia
cgtcgcttggggttcttcaacgaccctttctttgtcctcttgttcgtacacttgccatgtcacctgctagtttctcttcttctttgtttgttcttgattaattagggtttttttctttgattatttgtttttcgttttggttcgtttagtcatgcgatatttgttgccgttcatatctgatgaacggatcttttgttaaggtttaatcaatgaataattatctcttcattctctttgttgcttgttttatgttcgcaaatgaataaagaaaatatcaaataccaaaagttaaatcgcattatttgcaaaagatattgtgtttggacttgaaaagatcgttagggaagtatatatcatgtctatttcgatgcaatcattctttttgttacatcgttttttaatttataatatttgaaaattctacattcagaaatgtgtgatctctaattaacaagaagaaacatataacgatttgaatgtttcttttcctttttcttcgtgattttttagttagttactatataatttatttgaaatttttcttattacattgcaaaaatcacctcttttgtttcctttttaatttttttgagctatgaaatgtaacagtaaatgggatgaagaattatatcccatctaattaacattcaatttatgtgacctcgtataaagaattagatttttggacttgaaaagatagttaggaaagcaaactgttgtatcatat

SEQ ID NO: 36471 - DNA, 562 bp, Arabidopsis thaliana columbia
cagaagtttaaagctgtattcccaacattgtatgtatacatgataatactaaagcagaagagaaacattacctccattccagaatgcacatttatccatatgtgaggatcaaatgatatggctagcttccgcattatttgagtttcgggctcactaaacggagcagttcctggattctcttcagatggatcataatcctggaaacgccgagaacaaaacaaggacaaaggttcgtgacacattaacaagggatattgaagggaaaggaaagtgcagtgaggtgaagaagtaccttttctttcttgccccagtcaacaccccaatttcggttcaggtcaactcctcttcctgtgatttacagatatgttaaaagataaaatacaaaacaaaacacagtcataatcatgtaatggagactcaaatatggttccatttcttcgttcacaaagatctccagattcaacacgtttgcgaccattcgggttttctataggaaccatctgacaaataatagcagtaatttatgagtaagtgaatttatcaacaccacaaaggtgaaaat

SEQ ID NO: 36472 - DNA, 846 bp, Arabidopsis thaliana columbia
aatcagctcatctccctcatctgccatttcaagcctctcaacattttggggcaaaatttcacaagatcgcagcacttcgacaggcagatggatcaacccttgagccacccatctgcaccatttcatggtaacgcgagatcaaacgtcggacctccattgtctcagatgatgcctagaaacttccctggagctcaattcccgcagcattctgctcatttccctccaagaccagtgtttcatcatgataacctgataccgcgtggccagccacagattcgccaacggttcaactctggtgtccatcaagtatatgaccctttttcacctagtgatggttaattcagtattgtgttttcaatagccatgtttctgcaatagggactgtcccttctgttacaagttacttaatcggtttatgtaatttacaatgtataaatgcaattgttaatcacttttatgatggcctgagaaacctatattcggtaccttttttgtttgtgatgtgatggttcttgcataaattgagatggcatgatgaaattattgactatcttatccaatcctaatgcaactacatacctcgcaacgattttgataatttaacttcacaaaaaactaacagtttcatagagtctaaacatttgaacattctgcatcataagacatcgtagagtatgtacaggttctagattttgacacatagtaaaacactgccaagagggttcaaatgttggcgccagacctaagaatcctctccagcttctcagccttaaggtaatcattctctgtgagcggtccggctggaaaaggtgtgatctccaccaccaaatgtggcgtcggtaactc

SEQ ID NO: 36473 - DNA, 895 bp, Arabidopsis thaliana columbia
gcctgcacaccattcgcatacagaaggaactgaagtatcaacagacagtactatgagcatggtccaagaaaagcgatgttcataaatgagaaaatttctgtctaaaaaagatcaatagttgccaggaaaagctataaattctagttccgaaaggcaatcagcaaagttacctctacagggatatttttaagctgtctcattttcccatcagtgctgccgtgactattgtcaacagaaactttgagatcatccaccaggttctcgaggttgtgggttctggtctccagctgtgaaagacgtgcactaacaccttccattacatgaagcaaggtatcggtatgtttcttcattgtcctatctataatctcggacataatagtcgtgttaaacacattttgacccttgtcaggaaccaacttggaaggttcaatagaatcgagagatccaaaattctggccgaataaaaaaaaacaaatcaatcagaaatagacaagtcctcttataggcttatgatgtagaatcatgtacaaaaaaaaaaaagagaggaagattcgagaagtagtagtaagtacagtgttaggcgaagtagtggaaacgggtttataatcagaggcggaccaattaaccctagtcgtggatccggcgagatctaaagccgagtgagacaatcgtgcggcggtggtgggacgtatgggatggaaatcatagctaggaacgatcacttctttcttagagtccaatccattatcgccgatcacctgcttcttctggtgatcatcgccgtcatgattgttcatcagatcgatgaaatcagtggaaggtagagatgaagaagaagatagatccattatctgcttatccataaactgacaagtattcatcgatccaccgacaa

SEQ ID NO: 36474 - DNA, 530 bp, Arabidopsis thaliana columbia
tccctgattctgtttcctcttacgccgttctgccacatgtgtctacgcatgaggttctaaacggttctggatgatatctttaagcaagttgtcaagcgccatatcctgattctcagctgagtcactccatttagtgtatctgttttcttcagaaacagggatcatatgcctcacacgcacctacatacatataatcacaagattaatctaaaacgtttgtgcaagatttgtttcagtttttttaaagacaagtagcagatttgatctagaaaatcttacatacatgtctgtgggcacgcttctacttttcaatgaaagcggtaaagttgaaacgttttctagaagatctccaatcaagtagcagaacacccgtcagtgttgattttctaaactcacaagcttctccaattccaggcacactctcatatatccagaccagcaaggcctgaacacaaccgtgaatcacataagattctccgtcatacttgacaatcttcacagaccttaataaagagtcaaaagccacttga

SEQ ID NO: 36475 - DNA, 569 bp, Arabidopsis thaliana columbia
aactttcttctccaacccaaccaatctgctgcttgcattcttgtccatgtcactaattgtgacattcattttctccaacatattccaaatatccagcaagcttgtcttctcctcttcatcaacctataatgaagcatataacaatgttaggtaattcactgtcaacatatagacctatgtatatggaaaactcagaaatggtaaaagcaggacctttatatgagctttccctgttctttgcttcttatgagatacatcatctgcaggcgttgattcaatcactttactctcaccatcctcgtttgatgattcctgattttgtttcctcttacgccgtgctgccacatgtgtccacgcatgagattttaaacggttgtggatgatgtctttaagcaagttgtcaagcgccgtatcatgattctcagctgagtcactccattgaggatacatgttttcttcagatacagggatcatatgcctcacacgcacctacatacatataatgacaagattaatcagtttcagttttttttaaagacaagtagcagaattgatctataaaaccttac

SEQ ID NO: 36476 - DNA, 467 bp, Arabidopsis thaliana columbia
ctctcatatgtaaatccctaatcctaaacatgcactataatcatgtttgataagttcacctaaaagctaaagcagacctacctctatctagctactaggcctatctataatagttcaagttaaataagcgccctctcggattgtacctatcaacctaagatcaaattctagttagctactctagaactaggagtaagaacaattaagatgacgaactctatagataatcctaacaattgtatcgatccaataattcatctaaatccctaatgagaaccatcagcccaacaagtagattactcagacatgatcatagaacaacaacctatttgaataagaaaagataaagaaatcaagagccgaaaagaatttagataatatctccgcactatagggttttggaatctttgaaaatctctgtaacctcgtctagacttgattctgataaacgttatgaccagttaggt

SEQ ID NO: 36477 - DNA, 555 bp, Arabidopsis thaliana
gagagtcctgaaaaaatgacaaaaaatgttatcactatccttattaatctgataaacgctttaataataatcttaaacagaacgattatgtatcttattgatacatttatgacaaattttatatggtgaatgaaaaccaactaataattgaagatgtaaacagattgtataaaaaatatcaattaaccaataaattagtacataacatacatcaccctatgtgaaaatatatactcgatcgtttttcttataattggaaactgatctctccattaccgttttttgtgttcacacattttaattagcattactatgagaatgtaggttcaaattagaaacaaaaggagaggttaaaattaaataccttgaccggcaccggaactgcttgaaataatggaagctaatgcaaatggaatactaaatgtaatctataaaatatagcaaaaaatggattaatattgttaaacaaaataataattcatggataatagtaacaaaaattggtaaaagacatggtggacttacagcaagaggaattcaagaatagcaaagaga

SEQ ID NO: 36478 - DNA, 570 bp, Arabidopsis thaliana columbia
cacctacttctcattagagaagccatttcatgtaccaaacgaattgctctaaatatcctatttctatgtcctggacaatcttcaagtaaaggagaactcaatttctcatttataacaatgggagcaccgaggctattgtctcggatcgaatccggtaggaaaagcctcatatacaacgttgataaaattcccattgctgctgcaacctaacaagtcgcgataaggatgatcttaactgaaatatattcactaataattatacatacacatgcatgtaactccgagtatataaagatacctgaaatgtcacgccaatagataaaaatcgagcagaaagattggcgcaaacgaatgcacatgatgtaatcccggtaagtatccaaatgcggaggctcgtctcccttctggtacattatcagcctgaaagtccgccgaaaatactttcatatataaaattattgaacttcactaaagatttcaccagttattcacaataaatacttttaaacttttcaagagatttaattagaaataagtttactaaacatatttcttcttgattattttata

SEQ ID NO: 36479 - DNA, 571 bp, Arabidopsis thaliana columbia
cacgtggtctttagtaaacttcagtggatatgtaacatgatcgacggtcgagagtttatcatattttaaatgggctttaggaaggaaaggcccaataaagaaatgaatatttccaccacagaattatgaattgagtaaaccagaaaatcgaagaagaacggcaatggctacttcttctactcagcttctactgtcttcttcttctttgtttcactctcaaattaccaaaaagccattccttctcccggcgacgaagatcggcgtttggagaccgaagaagtctctctcgttatcatgtcgtccttcagcctcggtttcagctgcttcttccgccgtcgacgtcaatgaatctgtgacttcagagaaaccaaccaaaacgcttccgtttcgaatcggtcatggtttcgatctacatcgtttagagccagggtatcctctgatcatcggtgggattgttatcctcatgatagaggctgcgacgtcactccgatggtaaacatttcttgaaattcgatttggttaatccgtcttcttgtagattttagggttttgatttgagtttgatgttgga

SEQ ID NO: 36480 - DNA, 166 bp, Arabidopsis thaliana columbia
gcattttagaccgatgcccgaactcgtgattttgaagactttctcgtgattctgcaattctcccatgttttttctaacttacaagctgcaagacgacaagaattacactttattttagggaggcgtccaggtaaacccgaaagcccaccgggggctttcctggttg

SEQ ID NO: 36481 - DNA, 530 bp, Arabidopsis thaliana columbia
cttactgctttcaaagtaaaaatgttagttgtcattttttacgaacaacacttcagtctagactgaggttttatcgtatgattatacttcaattccttttaagcatgcatttttttttttttttttttattaattttttttttttttttaagcatgcatttaccagataccggtagtagaaataagaaagtcacgtgtcttaaccgggggagatatatacccatcaataaattaaattagagacttttggatcgtcaatgctcaagctccacacaagtgcggctaatatgctttttcggatttattatacaacaactaccaagaaaaggaaagaacggaatggaaaccttaatctagctagctagtataggtatgatgaggtattaaaggtgcatttggtgaaagaaaagtgaaagtggtaagtccttacgctttggtggcagcgtagatggggtagaggggatgagaagggacaacaacggcagcgggacgctaatattgacgatggcccacggcggcggtgaagcatt

SEQ ID NO: 36482 - DNA, 597 bp, Arabidopsis thaliana columbia
ttatatacatatataacattatttatttaagtgctcaaatacaaatataagtatatctatatatcatatatatattataaacttttattttaatttatatatcatatatatataatagaaatcttttaacctaatattagtttaatcaaaattaaacttaattttaataattgatccaatttgtttaggtgtctgccatgtaggttcgtataatattaacaatgaatgataaactcatagattataagcggtctctagcaaactattataaccatctaatattatgcgaatgtcaaacctcgacattacaactttaactagagtaaagtacaaacgattttaagatattcccaacattatttaggtttgatgatgtgtacaatgtcttgagttgtgtgtgtgtggattggtagattccttgatagtttttcccttttcctcttggcttatttgttttataggtgtcttctttgtatcgcacatgtacgtgctgatgggcggtagaatctatcttggcactgaagaaaaaatacgattaggaagttttacggtaagactaagaagcccttttgatgccattgtgttttttttattagt

SEQ ID NO: 36483 - DNA, 165 bp, Arabidopsis thaliana columbia
agcatgatttggtgaaattccaaagccgacagtatagtctggatgacaggagagaaaggtctatttagtacatttgggctgctctgcgtgcgctgaattgacaactcatcgcttcagagcaaatcgcttaatcgcacaagtgtactgctgtaagtattgcctagt

SEQ ID NO: 36484 - DNA, 554 bp, Arabidopsis thaliana columbia
gtacactaaagcattcagtctctacaaagcattgacaggactaacatttacaaacaaagctttcagtcttctttcactggaaacatacatatcattttacatctcttcaacgttcacaaatagtaaggattagagaacaatgctaattcacttccctaacttattcaaaacttttagtagacttcaagcttaaaacccatggttatttgatatcctacacaccaagcttaggtttttaatttcagggcaaactaaaatgatggttactgatctcctacacaccaaaacaagtcgcaatactactcaatttagatcattcttatacgttcatgtaaagcaatcaacaactgattctaattgtgattttaactatgactacaacaaacgtgaagatacctagagctatgagttgtttcagcagatcagatgaaagaaacacagaagagtgaaagaaaaagcacacctacgtctgtttagagtacgaagatgagaaggggacgcgtttgttgcgaaacatcatgtaccaaccggtaatacaacaccgatcatcatca

SEQ ID NO: 36485 - DNA, 510 bp, Arabidopsis thaliana columbia
ctcgggttagtgttggtttgggtaaagagtttcaaaccctaaaaatatccaaacaaatggaaacgagtattttatttgtagatagcgggtacccaaaaaacaaacgttaaatattaacaaatttttaataaatttaattagatttgaatatattttactacaaacataacaaatgatttttaaatagtttagttgttttgagtatttagatataaaattaattaatatatttggatttataattatcaccccacataactacattataccaagaataggtgtaattaatatttttgatattaaatttatgttcgggttctcgggtatcctatttggataacggtaatctccggaccgacctgatgaccacgggtttactaaaattttacccattgaggtaatttcttaaaactctaacccgccccaacccgattttttcagttcgggtatcagattgggtatcggattcggtttttttctccaccctaggtacgtgcgggagaaatatat

SEQ ID NO: 36486 - DNA, 328 bp, Arabidopsis thaliana columbia
aaaagtgtatctcaaataataatacaaaacttcggtctaacaatgaccaaataattaggtatattcgtgactaaaaacgtgtagggactactttgcaaataagaaaaacttcagggcttctcaaagacttggctaaaaatagaaattccctcagccgaaataagggtgtcgatcgacataggtgtggtgtcaatcgacaccatcgcgtgaaaaacgtctttgataatcttcattactgaaaagcttccattgttcccagatgcgtaagtatactgaaaatgactcaaaacatacgaaaaagactagaaagactcttaaaaccattctg

SEQ ID NO: 36487 - DNA, 548 bp, Arabidopsis thaliana columbia
tttatttttagagtggaattggtaactttgtatcgctacgatatagagtttacagttttcgctgtaactaatcacaaaaactttactatgtgcatggttatcttctctctacacgttaattttttttacccgttgctttgaatagttttaaactacgtatgtattgttatcttctctctggacgttaaaatttttgttaccaatccgattcttaataaaattatgagactgcaaacttttttctttcaaagtattatactttatatttagtcactgaatcatttcataatgacactatacataaaaatatttagtgggcatgaggagaatctttatagagtagaaagaggtcacaaaatatccgctcgtgcggaagagaatactgacaaaaccggtacccggcccaaccctacggcccacgcgcgtcgaaaaccgtctcctgctttgcataaaaacccttcttattttaattctgtttttatctacctaatattattaacttgatttcatagatctgtttgtggtcgcactatattctaatcaaaatt

SEQ ID NO: 36488 - DNA, 621 bp, Arabidopsis thaliana columbia
cccgacccgacgatattagtcgggtcaagttttccgtctgttgatacccgttcgtaaaacttgtcatcgtatcctaagaaactcaacggctccggatttatgtctctttgttcgttcgtgtctttctgataaaaaaaaacgttacaaaaagggaaaatatttgttattgtaaccaaaaaaagtagttcagtaagaaaaattcaataaatacctctttagtttcatgatcaacggtcttataaccacttgtcgcaacattttttcgatcggtcacatgacgtatcacccgaaacagattttgcttatcatcttcaaaagtcaacttttgtttctccgacttgtaaatcgacgtcggtgtgatctcctccttggaacggaattttgttggccgtgaaaaccaacgagttctcgtcttcttcttcgtcttctggatctcttgaccagcgtctactattggtttgtccgagtgaattttccgggaaaccccgaaacatcgaagaaaataagaagatgaagagttaattctctctcggacttttctctccggtttgcccattataagatgaaaagaagtatcctaaaatgtacattaatttgtgtgaagacttgcattatatatat

SEQ ID NO: 36489 - DNA, 458 bp, Arabidopsis thaliana columbia
tacagataacctagcaagggggcaatatactaaaccatatgaatccctaatgagaaaccctattccttacaagaagattactcagacataatgattgaaagaagcaacatatttgagtgtgaaaacataaacacagtaaatagagaagggaaaagaagggatctcttcactgtagtaagatctgaatgaaactctgaaaacaatcgatgaataacttatgtctttcagtaacagggtttgtagaaaacttaatgattaaaaactagatgaaagacttgataatgaaaactaggtctaaaaacaatataaagaccctaaaaacgtctacggactaataatgcaaatagggaagtcttctgaggtaaattcctcttctgtaaactcgaaagcatctaagaattttgctgggctgaaaatggtgtcgatcgacccaagagtgtgtcgatcgacactcctcg

SEQ ID NO: 36490 - DNA, 372 bp, Arabidopsis thaliana columbia
ttaaaaagttttgtacatctttttaaaatcttttgtaaaggttcacaatagtttttaaatggttcaaaatttattaaagggtttacaagggtttttaaaatatatttaaatggttaacaaaggttttaatggatttacaaagatttctaagagatattaaatacatttacaagagttttaaaacccttgacaaatcttgtaaatctctttaaaaccttttgtaaagggttcactagagttttgaaatggttcaaaacttattaaagggtttacaagggtttttaaaagattattgaatggtttacaagggtcttaaaggatttagaagtgtatttagaagatttacaagagtttttaaaattcctgtaattg

SEQ ID NO: 36491 - DNA, 604 bp, Arabidopsis thaliana columbia
gcttgcatagtattctggcccactacatctttgtcaaaaaaaatcggatatttgggtattttggttatttttaggtatttcggataaaataagcatcaccgaaccgatatctattaacgttcggttatttatcggttctttttctaaatatccaaaccgacaggtaaccgaatcgaattgaacccaaaccaaaaaacctttggttccttttagaaccaaaaaaccaaaaaccaaaacaaccaaaccgaatggaatcaaataaccaaacgcccatgcctacccagattaatccctttgagttaaaagaacatgttctcaaatctagcaacttttcattcccaatatttggggaaagctctcatatattgaaagtagttaaaacttcataatatccataatctcataaaagctcgagtttgtaagcattttcaacaatttctcaaatattttgtatagatcttatatgcctttggtataagctacaacttgcattttctaataaattcaaatcaatctttccttgattgttactagactagaatacttgacttataaatttagaccatagtttttgcggcttcatttctattcgcattacatttca

SEQ ID NO: 36492 - DNA, 602 bp, Arabidopsis thaliana columbia
ctttgattgtggtgtttacggatatatataaaaattaatttggcatatattttgaatttcattacatatataaagttcaaaggtcatatattatgatttcaagaaaaatgaatattttgtttaaaaaaaagacatagctttaaatttataaaaaaatataaatgattgccaaaaagaaaatgtatatgcttgtatattatcaaaattctataacaaaatgtagctcaaaatataatttgaggtatattttgtcatattaattttcgctaaaattaagttataacttaatatttttaattttttatcacaaataaaaattaataaaaacacttttacttcttaataaggcaatttatttacatttaggtcaaaattaggctaaaatagagttaaatcgaattaatttcggttaaattatggataagtcaaaccaatgtataattaacggttaactggtcggttcaattggaggcgtagttttaagaacaaatccgaaagtacatatagttttatcgagattaaaattgtttatggtggttttcaagtggctaaaagtttaagtaggaaagttgagattcaaatagtacatggctgaaaattta

SEQ ID NO: 36493 - DNA, 421 bp, Arabidopsis thaliana columbia
aagtgacctagtggatgtagacttgacggttcctgatacatccaactggcgcccgaggatgcgaggaagtcttgtgcccggttctcattccactgctcttgaccacatgatcatccgacctagccaacagtctcaaacttccactaggctgaatagttcacagccggttcagacaccatcggttcaaacgtctcaagctcagtcaccttttacaacggctgcctatagaaccgagacagttttaggaaaccgaaaccatccggtgcccgctcctcctggcattgttaggcctactggaccgacatcttgatggagaacttgagaggctagaacaaggggaagttggtacttaggagttaggacacaacactttacataatagattagtaactttatcactttcccacgcccatgaacagag

SEQ ID NO: 36494 - DNA, 411 bp, Arabidopsis thaliana columbia
tttggtcgctgcgattagggcttatgtagtcagaaagtcaagagataatcagcgtgctggctctgttgctgatcttgtgagacgtggccagctgaggtctggtgatagaagaggcatgtatgaaactcacactctttatcttctttactattgtcactctgaataacctaaactttcgaattagtgtcactatcaaacacataactggattcatgtaggtggatgtgtgtgtgtttaacttctctaaagctttgatctcaagatgttttttattttctttatcagctccaaatctcttaactacgaggacccattcaacaacccttttgtgaaacttgataaaggaagctcaacggtagagatgtgcgggaaagtttatcggctagctccagtcacacttacagagaaaga

SEQ ID NO: 36495 - DNA, 585 bp, Arabidopsis thaliana columbia
taaacttttgtagatcttacaattttaaaataaaatgtacattaatgttgaaaagcaaaatcttaaattagtgtatactactactttttttttatcaccgtgatagatcattagatccttaacctcaatccctagagcctgcttattgcctttaagcattgtgcaatcactaccaaacacactcaaaactaaataaatataatttataacttatcaaataaaataaatactatcaagtgtgtatgaaatcgatgacaatttatttattaccttattaccatttgtgtcttgaagtacacgttaagctatttttatgtgttataaaggcttcttcgtcaaccaattacgaaatcaagcttttgaagcttctcaacaatggcggctattccttcccacaacaaccttcttaccatcaaccacaaaaactccataaccggttcttcttccctaaataccaatttctcagaaatcaattttcccgccaaattccgagtagctacgagagctttgtccagaaccgacgagtcgtctttatccgccgtgatttctcgcctcgagcgagaaaggcgggaaagacaaggttta

SEQ ID NO: 36496 - DNA, 545 bp, Arabidopsis thaliana columbia
catattagataagaacttacgtgattagagatcaaacgatcgatatcgaaatgatgttgttgaacgttagaagacaagtcttggccaaggaacataagaggatcggtgggatttttctgaatttgcatataagcggaagggtttagaacaacggattcttctctagaacgttttctcgacgacacaggacgaagaaaatcgacgttgttgtcgctgttgaatgtgagagaactatcaacggactgtatcgttggtttcatggattgatgaaccaaacgatcgactggtgagatgttgtagattgggttaaacagagaagtttgacattccacggtggggttaaacgtcggaacggtgccgtatctcatctgggtgttatagactacaccgcttgcttcaacgggatgaatcatttctctgtaaggaaaaaataaaaacacctttgacgttaagatactgaaaagaagagaggacaaaggacacagaggagatttatacaagaaattttctgtacatgttggaagagacagaggatttagatggtg

SEQ ID NO: 36497 - DNA, 242 bp, Arabidopsis thaliana columbia
  unsure (1)..(242): unsure at all n locations
attatgattacgaccgagcagcctggtagagatcctttacagactacttaaatactccacgatggtattgtaagttgcataattgccgtgctaccactatccacttagaggcagcccgtttgtctctaggattcnagccgcccctaaatcactccaggaaaaacaagcccgaattctacagaagtctttctacactagcaaagcagcatcgtcgcttagcgaatgtcgcaacgtgttacgag

SEQ ID NO: 36498 - DNA, 610 bp, Arabidopsis thaliana columbia
ggcagataatgccactgccacaacggtcttaatcacgtgggagaatgcatatgtggataacgccattgcttgtcttatcaaccatgagggcatggttgttttgggaggaaaggatttgatatagtaaaaggagtgctaagagaatacacacgtggacggtggtgattaaagaaagaagcaacggttaagatgaaattattagagaattgttgggtttaaaagatcttgaagatcagaattggattttaatcgttaaaatttgtgaattttgttgttcttcctctttgaggttttctgggtttagaataatttgattcatcctatatgaagatccatcaagagatcttacaaggtgaatctgagtttctcatgttttatgaacattagattctctatcgtgtaatccgtttcgtgattgaatggagtattgatttggtgagaataagtggtttaattgtatcaactagaaagaatagtgtaaacgatcagacaaaaccatagaaaccgccaacctaaatttgatctaaagttcccatgaatcctctttgaaacaccgtcacctaactagagatctctcgctcatgcaagggagtaatcaaagttgggttgt

SEQ ID NO: 36499 - DNA, 231 bp, Arabidopsis thaliana columbia
acgtttctagaaccctaagaacaatttcaaagtgatgagactttgatctaatcgttcgaacaccaataaacacaagacacaacgattcttgctaatgatcagtggtgagcaacgagtgacgtcgtgccgacccgtttcctttggagaacgtgtaccatccggaatacagccgtattgtagtgtctaattgtgttgttaacacagtggtcctaattaaagtactcactaccg

SEQ ID NO: 36500 - DNA, 477 bp, Arabidopsis thaliana columbia
ctaagaagtttcagatttaaacccataatctcttctaaaaaatgaataatacatatcaatttagtttctttttcaccaacggtgaaatcgacatttttttttattttttggaacttcggatggtacattgatgaagctaccaaaaccaagtactaaatgtgttacgtattatataactttttaaaataaatacataataaaaattaatattgaagatgattacacaattatcttacaattaaaaattgttacaccaacccttcgtagaaatattaggtggtaacaaaaataaattaatgattattgagagcttaacttataatgagctcatttgagttgtttgatcctcaagtcccaaccaccaacccataacccattcaacatgtttccagttggtttgcataatgtaaatgaatactacacacacgagacaaccacaacatgcatatatgaataagatatatatggttgaaattg

SEQ ID NO: 36501 - DNA, 525 bp, Arabidopsis thaliana columbia
ctgttgataaagagaaacgatgtagtcttgaaattgtctctgcaactgagcaacgacgatggtgttcatagctaaagtttaccaagaaccagacttgtaaacaaagatggtaagagcttctcaaacatacatataccaaaaacaaacaacggatacggtgaactgtatttcgacggttccgagatcgatctaatcggaggtttttggcttaatttaaaacagatccaacaacaactaggcgaaaagaccaaagaacaaacttccaacttaactaagagattccaaattcaaaatcggagcgacacagagagagatgatgatgaatctgatcggagcgtcgaaagttataatttattccacgttccgttgactgattttgacttaaatatctaatggagggttatttttgtaaatgactatattgtaggaattaatcaagtacgtcaataatattttagtttgtggggtcaaatctgattttatagatagggaagttgctagcatgcgttctccacaaacgagata

SEQ ID NO: 36502 - DNA, 509 bp, Arabidopsis thaliana columbia
tccatgagagatggcttaagtagtgaacttgattggtatctacggaggttggaggtacttcactgcatctcttaaactccatctctttggtgttgtattattctgtgattgactcattcgttcaagtaccttcaacaggagcagtttggagtgtgctgttcattgcctggggctgcaaggtgcccccgtgtacatagacatcaggtaaatatgaatgtttgtaaacctgacctactagcctagcttcttctgaaattccaaatgctaaagattggttctttttcataacagtgcaaaagttcttgtcttaatttaattacaaatatggtgtaggtggtggatacattggtcactcttctctgccgagaaaacatatctgcagaaacattatgggatggaggatggcttttacgccaattgcttccttatagtgaggcagaatttaatcgtaaacatctcaagatgctgaatgtatgttgcttcaagatgtttttttcggtttgccactg

SEQ ID NO: 36503 - DNA, 736 bp, Arabidopsis thaliana columbia
ccaacattcttgctcttcttccctgttttttcccccttgaatcatcttcttcgcttgaagctacagacctagatggtgactgaacagcagaaacctctctgctactccctcttgagttcgtctcctgcttgttactgctgctgggtaccagtagtggagttttcagttcttccaaggatttatcattctctattgttacagttgtggagtttgacaatggcgtagacataatagcttctgcttcagtattctgtttctggaaagcagtggccgctttctgcacttgctcagactgagcacaggaggaagaagccaatgtccctatttcagaaataatcttctgggtggcgtttgcagttctctgcatttgctcagcttgaagacatgagaacgaagtcggtggcttgtcagatttagatctcgcttctgttgcatgggaggtattgtgatcgttttcttgattcagccacatgaatggagcggctttgcgttgaacccaatcatctttttcagcaatcatccaaggaatcgttaggctttcacagttgggaagaaccaccgcttctcgtattgccgtctacagaatcataatgttatcacattctgtcagctcaaagtcctctagagaacaaaagaagagaacacaaaggagaaagaaactgtaccttaaacaggttgatcaagaacattgcaacatggctgttggtgattttgtgttccccacagaagatgcgag

SEQ ID NO: 36504 - DNA, 164 bp, Arabidopsis thaliana columbia
  unsure (1)..(164): unsure at all n locations
nnnnnnnnnnnnnnnnnnnnctaaaggctgctggagctgagtaagataaacaataaccaggtgatgatgtagagtgcagaaaagagcctaaactagccacaaaacgtggagctcgtaggctcagcatgtgtactnacggagggacctccgttgacaggttagac

SEQ ID NO: 36505 - DNA, 495 bp, Arabidopsis thaliana columbia
gtaccaccttcttacaccaaatgatcaagttggcttgtgggtcgtgggttcgtgtgctcttggggctcgccgagtaatttttggaccgtggattggcttttgagagttgaatcttatggaaatattctattttggcaacaacttgggaatcactacaagtaacttggggaatattctaagaatattctctcgaaacctacctcctctactatataaagaggcattcgtctctcattatttctcaagctgtcaaacagaaaatactcttagttctaaattctcgcatctattatgtttcttaaaagtaagttcttagtttagtagttttttagaatatatcgtagattaagtttgtttgagcctattattgtgtgctcgggtataagtttgtaatcggtcgtatctaggaattcataaaccgtgattgtccgaaagcacttatgcgtcgacgatttattgaattaagacaaaagatataatcacttgtctatgtga

SEQ ID NO: 36506 - DNA, 357 bp, Arabidopsis thaliana columbia
ttctaaaatagtattgatgtcactgtatatcgtgctaccaattactatatatttccgggaatactgcttgtaatatccatttcaaatgtttgtttattctgagttctagcatttagcatagtcaatgaatgcgtatacactcaaagattgttagttgttagcaacatgtgggctaaatctatgtaactcgtgcaggactggttgaagaagacatgtgggctaaatctatgtaataactcttggattcacaaatcatttgacatatctcggtgacaaatttgttttcccttctccttaaccattattggggatcgttttcgaatttacatgaatttgtgcaatttgtcttactagaga

SEQ ID NO: 36507 - DNA, 516 bp, Arabidopsis thaliana columbia
cgaaagaattattattattatgtgatgcctattcaacgtaccctcccttttttcctccatcatcttcttcttcttcttcttcttcttctcctctctctctctccatctcgatatcaaaaactcttgcttctgattctcttcattcatggcttcagagcagagtttcaagaagagaaagatcaccgatgatgtagacggagtaggagtaggaggaggactagaatcccttcccgaagatatcatcgccgacatattctctcgcctaccaatctcctccatagctcggcttatgttcgtttgcagatcttggagatctgttttgactcaacacggtcgtctctcttcttcttcttcttccccgacaaagccatgtcttctccttcactgcgattcgccaatacgcaacggtcttcacttcctcgacctatcagaagaagagaaacgcatcaagaccaagaaattcacagttaagattcgcatcttccatgccaggagtttgacgtggtaggctcttgt

SEQ ID NO: 36508 - DNA, 476 bp, Arabidopsis thaliana columbia
aatctctaaattctattcatagaattgaagaatcatcgcaaaagctggatcgattggttgtaagattgagggaacaaatccttttcttctttcacctctagatgttattgtctgctacactcaagcttccgccgttagtcacaagcgctgccgctccgaaaccaatcgaataagcctaatcgtcacttaaatctagagaggcttctccgtaaaggaaaatacagaagctacacgattttgacaaagtctctcatgtttgattttgcaaggaaagactgaaagataaagaaagagatagatagagacagaaaagaagaagaagagtcgatgaagaagaaacaaagtagaccatgaagaagacgaagaaaataagtacaaatagagaaataatattcattatacttttttaagtaattaaattatatatataactctgataatagttacgactttcatccaacgatccactcatcata

SEQ ID NO: 36509 - DNA, 585 bp, Arabidopsis thaliana columbia
ccctactatagttttaaaatatttattactaaagtatattcgtcaaggggaaagcaacatcccaccagtaaacaatataaagctcagctcataacattgttttaatgatggagtttctattattggtatctatctactcttttgtttaatatttgtggtcggcttttcttctacataaatgcatggagatcgtatcaacgatcatattaaaatatgattcgaagatatatactataattgatatcatacatggtgctgaaatgttatcgaaatagaaaggtagataaataattgatagtgaataattatatcattgacttattatctcttgtttctctgaagaaataaactaatgataatttatgaaccaaaacaatactaataacaaatgttttgaaatggaagtgggccattaagtcaatcaaaaatttgcacaatttcactagaaccaatcaaaatgcacgaaaaactttctattttgaccaccagagaagtcttacgaatttactaaccggaatccggcgagactggccggagcgtgaaacgtagtacacgtggtatggtagcgtacgtgtgcaattgggg

SEQ ID NO: 36510 - DNA, 598 bp, Arabidopsis thaliana columbia
ttaaattataatctagtgataaagaaactagtcagcttgacaaagatatggataaatgcaactttgtatcaacagtgatatataaaataacttatcaaaaattggaaataaaaaacaaatatcatccaattttgggcaaaatattaatagtttttgtgcccatatggtgacatcgaaagggtatgtgaagttgtgaacacaaaactatataaaatagagagagtgaggataagattactagtggatggacttcaaatttggctcctcttccaacctgtctttttctttgctacacaatatacatttttgtaaccccccatacacatttcaacataaaactatatagtcatccaattgaatgattttttttttcttttaaccaaggtatcattatcaaacactgtttcaaaaatcaataatagaatttggcacaccaaacaaacattttttttgtaaaaatagacctctcaaaaatatcatagaattaaagaatactttttattttatttgtttgtccacatcatcttcatcatcatcatttcgcagttaagttctcctctctctgtgtcaccattatagaatcagtgaatcacacaca

SEQ ID NO: 36511 - DNA, 317 bp, Arabidopsis thaliana columbia
tataactttaatcgtttattttcttacattttaatttataatcgagaaaaccaaacaaacaaccttttcgctttagctaagaacgagtctcggaaatctttagagtatctttggtccttgtggattgaccttgcatatgctacctttcagttaagtgtatcgagcatttactcgagtaaccaagttggcgccgttgtcggggacagattgcgtcacctacagacttaggattagtttatagtctccagcctttgtgtatactgccaatgactatcacacccaagtatcctatggtgtgttcaggtgtatgacccata

SEQ ID NO: 36512 - DNA, 539 bp, Arabidopsis thaliana columbia
gatcccttttttctttgcctttatgattatatatgtttcttttgtcagaagaaaattaaaatatataatatactgtgtgagcaccgtttcaacaattttttttaaaaaaagtgtaagtaacacctcagtaaaaccaaataaaaaaaaacaaataaacaaatgggtatttcatgattttttgttcataatttacggatttttattgaaatatataatgaaatgcttcactgattttgagaaataggataattcagacaagaggataaacaaagaggcactttgtcgaaattatgtcagaatgagaaataaatatttcgaaataatagataattgtgtaaatttaaggacttaagatgatttttttttatttaaattgtaatgtttaatagtttttatgaaatcagacaagagaaggaacagagaagcccttttgtctaaactatgtcaggatgagataaaaagcaaaacatatttctatgtacaacttgtgaaaaagttatacctcggagaagcagagatcatgacgattttggagaaga

SEQ ID NO: 36513 - DNA, 428 bp, Arabidopsis thaliana columbia
tgccatagaatcggccattaagtttgcggtggcggaggataatgagaagccggagtggcgtgtttatggagccattagacggttttacaaacaacgacgcagaaagttgccacgaggaatcatgaaagatccgaaacttggagttagaagaattttaccaaatttgcagaggaagtacaacgagttgctcaagaacagaacaaagtcgcttgagaaagtgcgaaaagtgaatgaatcattggttgtctttgattgggtacggtagaatgttgtgtgattataatgttaagggaagtatttggtttgttagaggttaagtaggatattgtgtctactattctatttagattgatatgaggcttttgaaacctgattcacataatgataactgataaaccacaagtccaaaacagagagattcctgatta

SEQ ID NO: 36514 - DNA, 543 bp, Arabidopsis thaliana columbia
ttaatcagtctcacattcaagactgattagcgactaatgtataatatagactaattagtcgctaataaatcataatttagttgccaaaactaacgactacatattcagtcgcggaattaagccgctaataccgtgttttcttgtagtaggccccagtttaggacaatcaatgctatcaagaagaataataatctcttgtgtcccttttttggaacagctaacctgtaaaatccttttgtagtcttcatatcccttttgaattaatgacacgtatgaagacaaaattacccttctaatttcttttgaatgaatattgaataaatattttaacacaaaaaaaacacaaacaaaaacggaaaaaaaaaaacgagctcgagctcgagcttcttcttcttcgggcttcttcctccggtgagctccagcgagccgcatttgttgccgtttttccctcctacaagctgcatcagtctacgaagtccaagtatgtgcatcgacttggagagagctcaaaagctttaaattaggattttgaggaatttgaga

SEQ ID NO: 36515 - DNA, 440 bp, Arabidopsis thaliana columbia
aaatcagtgcttctcaatgatttatggatcaaactcaatggatttcaaacattttattatacagtgtcacaaaaagtcgcacttttgcgacctttaagctacgtttcaccgacgctcgcgttttgcatttcaaaatttgtattgtgaggtgtgtttgcaagttttcttatatgtttatagtttgatttgatcgatattagttataagaatataatcaatctcttcaattccaatgtttacaaactaaatattcaaaaatccctaatctatatcaagtgttacatgttctttaatatacaagaatgatctttttcaaacaatataaaataagctaagaaagcaaaacatttacaaacctaacacttatgtatgtactctatactactaaatcattgcttctcaatgatttatagatcaactcaatggatttcaacatttta

SEQ ID NO: 36516 - DNA, 439 bp, Arabidopsis thaliana columbia
tatccccatgcacagtgtaaatagtgacacattagttaattttctgttcttctatgtatacttcttataaataccctttaaaaattgtgaaaatttagggtttttggagtactctcaaaatctcagcaaaatggccccataataaaattagccagcgaaaatagtcttttgaaatatgtccctaatttaacgggtaaaagagtaaatgaaacttatatccaccaaaatgtggcaccgtacatttttcatttcctcttttaactgttaaattagattcacgaagtaataatatttccctatttttaagcactatccaccaaatgttcgaattatatccaatcatatttaacaagtattttcaaaattgggaagaatcacatccgctcaaaacttatcagcttgagaccgtctcattattgaatttcacattattaatcta

SEQ ID NO: 36517 - DNA, 623 bp, Arabidopsis thaliana columbia
cggagaagaatgctatcaacaacaacgtaaacaagaggaggaagaagaaacgggcgatgatggtttatggtggaggaggaggaggagatgatttagcggtggtgaaggcggcggcgtgggcttggtacttacggaaagaaggcaaaccgattatgagagagtttgatgtaacgagagcacaaagaatacctcgaccttcacggtacaagatcgaagccacgaagaacatgatcctctctgagaatagggttttggccgagaatagggtttcttctactaagtctccgctttggtacacgaattatcaatttcgtggggatcaagaaacgtattactctcgtcttcttgatacttacgaaaccaagaacatctccaagaggcttaacattgatgattctagtttctccacgagtttaagtagtgttttgaagcacaacggcgatgatcatcataatcataatcgtaatgatgattatggttttgatgatcatggtttgttgaagaagagacatggtagtgacagtaatactactactagaagtaaacaaataatgacaagagttataatggtggctcattgaaaaggtgagcaagagaagtttatggaagggaatgattgtgat

SEQ ID NO: 36518 - DNA, 513 bp, Arabidopsis thaliana columbia
taaaatcttattttatatttaatatttgaactaaatacatttatatccaaatatctaaaaataattaccaaaaactaaatacatttgtaaatacttaagactaaatattttaaaacgcaagatacttataagtatttaggatattgggacaaaatttcggttatgtgggtaaaattcagatatttgggtaaaatattcaggtatttagataaaattttagatatttggctataaaatacctgaatctcaaagatacccattttaatggtatttagcggttctaaaattatatatccgaaccgacccgaaccccattggatccaaaccgaaacaaaacagaaattttagatttatcttattgggtcctaaacttttctacccaaaaaattcttatccgatcgaattttaccgaatattccgaccacatacctgaatgcccaaccgtactttagggaattacatccgatgcacaaaagaactaacaattttgtactatcattacaccacccattt

SEQ ID NO: 36519 - DNA, 505 bp, Arabidopsis thaliana columbia
gccagtgtactctacatcttgatcatgtcgtgtatgccagttctcatctcacattgctgataaatgcgtaaagtatttatgtatgtcagtatgagcaaatagtaggaattataagggaaatttattgtgaaaaaaaaaaataaaaaaaaaataagggaaatttattagaactccatgcactgggtctagagtacaatggtagcagaagatagattgcagaagctaatagaatcggttttgaatcgatgctctattgctctgccttgtggttattcactccttaaggtcacattttgctagcatgcatcgtcacctagtcatggaaacttggtggatgcagcaacattggcatcacctgtagtctgagatccgggcacggggttctgtttgttgaggccagctttgggaggaaaataaccaaaccgtcttttatgaaagggccagccataatgtggaagaggaaactaccccagagttgctggttatctgtgatacctcactttgc

SEQ ID NO: 36520 - DNA, 862 bp, Arabidopsis thaliana columbia
agatccgccgtgcgccgtctacgtctcgaccgcacatggcgcatctgacggtccaagagtgagttctcctgccatctacgaggtccggtgtgagtgctctcatgggatgagcagatctgatctagaaacaaaaggcttagcgatgataataggatttttcaagagagcttcatcgctgtaaatcggtggtgtcgtgaacaggtggtgaagtgggagggcaaatgccggaccccattgccttccaccgtcgcttgtcttgttgtctccagaatgaaatgataagcggggtaaggtttgaaaaggttgaaatagggtttgcagaggggagaaggaagctggtagcaaaggagacataatagaaataaaatggaacccaagcaagaaaaatagaaaagctaaatcccgacgccggcgttttgcgtcttcgccggcgtcgaaaaccatgatcggaaaaagtctctcgataaatgtgtctgagagctttttaatgtatatgatactatttttggaaggtttatagtcttgtttaatgaccttataaataaccacatgatctttctccatactttgtcctcattcgtatggttttaacaatcccttttcggaagatcatccatcctaaaattactttagccaagcacacttaactgtggagttctctcagcatgtttgaccgaaaagataaatgctatttggtagtataggtgtccaatttaattcttttgaacctaaccgcatgcaccaccatatttttgaaactaaggtgttataattcaccctcactaacaaatcataacgtcttcgttgcaaaccaagaccgtcacccgcaatgatgtgagcattcttgacttcatacacgtat

SEQ ID NO: 36521 - DNA, 558 bp, Arabidopsis thaliana columbia
atcccaataaagtgagacgaaccacctaaaaaagtagactgataagaacatatatgattctcatttatctctataactcagcaacacaacacaaactcacaggtaattccagcaacaaaactacaggaaccagtaaaatagggtttgcttaaactctcccaagcctaaatgccctaaagcaaaaccaaaaccactgagacctaaatctgtctacgatagctaaaaagaaaaccttatatatcagcttgtaaaagagaatatgagccaacattattaaattccagcgataacacttatcttcaatggtttatcaaagacatcagtaaaacagacggcataaggacctactgaaaaaaaaacagtatgtgcaaaggagagccaaagggatgaaaaaggtacatttacttttgctttcggaatcagcaccagatgaagatgtgtatggaacagttgcagattcaggagtgcctcgagaagcgtttgcaaagatggagggcgtaatgtactcctagctgcagctgcaacaactgctgcagacattgcaggaaaccaattcct

SEQ ID NO: 36522 - DNA, 569 bp, Arabidopsis thaliana columbia
cgacaaaatattctatatattattaaacaggttcgaaaaggtaggcatcaagagccaatcacttcggaacccgagaatttatatagaaaaaatgacatctcgaaaataaacccttttgcaagggtgtcagctcggatattcaactttctaggtatagtgatatcgcaaaacatctaaaatgattacgtaaaagaatctatttccgttgcaaacactgaccacatatcttcttcttcgacaatttttaaaagctcgagtttggaaccaaagtctcttataatcatttaagaatcctttttttgtgtgcaaacaattagtctcctagaatcctataaactaaattgatctgacagaccacacacaaactcggtaacgataccaagatttgatagtttcctatatatactttttcattgttttttttaatgaaatggatcctcagcagtataaactatggatgatcattaatgcatatatgaatcattctacacatgtagacacattctatcatctgtaagagtaacacaacacacctcactaaaaaatagatggttgtgcattaggctaga

SEQ ID NO: 36523 - DNA, 514 bp, Arabidopsis thaliana
tttcaaattatttacaatgcgtccaacatccaaccagaataaggggaccgacgcaattaaactcatatatacttagacttttctactttgttttaattgtgataagttccttttctctttattggattacggataagttatttgacttttctcattccctcctcctcgttttctttaaatagaggccatgcatggtaacattttatgcatcacttgtttctccataataagagagttttaagcatttgaaacaaaaaaaatggcttccaaggctttggttctgttgggtctctttgctgttcttctcgtcgtctcagaagtagccgcggcatcttctggtacttaaaatgattttatatattttagtaggatgtctaatcttcattatacctaatctcaaaatattcaaatgttttgtgccaatattttgataatcttcagtatatgatgttataaatcttttgaaaacactctaatagattcggacagattttagtatcgcggagaggcatgt

SEQ ID NO: 36524 - DNA, 522 bp, Arabidopsis thaliana columbia
taaagcagtaaacccatagacacagagattagatatcttggacttaaacacaacctgctccgttgtagttctgaagccaggaacgttgcaggaatctttggacctaccgatcaagcttgcttgacaggaagccattagagaatctttctttgcttcagcggcgcaacaacgccttccagagacgttatgtctagcttgtagagtccaagctcatttgtggttcgatttgcagagaacgtaatcatctctctagttctcgatgaagctgaattgaatctgcagattattctcacttccacacctgtatttttttgttcagttaaaacaaaagtgagagacattttaactataatttcaaacaatgttgataagattctttaccgggaatgaaatagctgtgattggagaaactgttgttggagcagacgtcgcagtaaacaagacccattacagtgatctttccatttggtttggctgaagaatgtttcagagacagagagtttaaggacagaagttgcagaa

SEQ ID NO: 36525 - DNA, 535 bp, Arabidopsis thaliana columbia
tacgatattaactttgttgttaaacaatgtgttatcataaggttttttataaaataaaactgattataatatccatatagactaatcgatatatcacacaaatttagaagactaccaaacacggaaagaactactgaaccttgcgaagatgatagcctatgatggtaggcgttagactactttccgaagatccgaagataaggtattactacatcatcctaactacatacgacatacgtgagtttcgacacaccgaagacacacatggcttctgcaaaaaagtaacatgtggacattcttaacaccatgatatctaatattcgaacctagaaagaaagaaaaaaaacataatcttttaaatgtcatcctaaataccatttgtaaaggatatgtctctcatttttaaagtttttgcactaagattatcgagagagaatatatactcaaatatctaaaagacttaatgcgtttcctatatttttttttttacgagagatcaatctaactttagcgttagaggatctctcggaacata

SEQ ID NO: 36526 - DNA, 492 bp, Arabidopsis thaliana columbia
tgctccttctccttttctctttttttcttctttataaaacgaaaagtggctaactaaagccctaatttcgagtttccttattttataggcacactctagggtttccaattaacccaaccaattaaaccggatgatttaaaaacaaatcctaaccgattttccggttcacgggcgttacatattcttaaatattttatccaaactcgtaagttttgcaaaataccctatttcttgtacccagataaagaaaatggctctcaatttctttctctattttaatttataattaaaattaaaaatcttgccatttgataaaatagacgtgcggaagaagtcgaaactgcaaacaaaatggttatgatgagatgtcgtgacaatgatggtttgtgtggtggtcagaagcaagtacaaaaagatacttacaagattgcgagtctcgacttatgaacggcatgatattgagcatgatggtcgattgatggcctctaaaag

SEQ ID NO: 36527 - DNA, 301 bp, Arabidopsis thaliana columbia
ccgcttcattattagaggagtagtctgctgacgagaaggatgggttaactctgaaaccggtagcagcactgggtggcgagaccggtaaaccaccagtgagacccttgaggaaaaaaatcatctgcctcactgttcttaacctgatagatctccacctaggtatctcgatgattgacgctgatgaggagccttatattcttttattatgcagcagcgtataaagtggagcttgccaagagtagaattcagactaggacgatctaggatcaggattgagcgagctcccgcaagaagatgatga

SEQ ID NO: 36528 - DNA, 1131 bp, Arabidopsis thaliana columbia
tgaattcacttaacgtggcttccgatgcgtacaacaatgccgtcaatgtctcgcacgtatccaaccttctgcccccattctttatcttccggcttgctcactgcctccgcaccgttctccaccgctctctgcacaacgcagcatctcactggtttatcaacacgtacgaattgaagagtaacaggcaaatatagacataagtatataataattgatttctaccttgaaaacggcatcaacatcagggtaacagaagcagacttcgatgggtgctctttcacgtgctgactgcgtagcctgaaccttcccggttaggtcgtcggtctcatgctggtgaagcggtgtgaacgctatcgtggtttgcccgctctctagctccccccacctgtatgtatcagtttctttcattcatcaaacatatatatttggtgtgtttgcttagcatgttagccagcggatcggacctgattataggacatcgcaccaatagaatctcaaacccgagagttttgtttcatgacctaatacgattctgtcgtttacattcctatgatcgtatccaacaacacctaagacaatccaacgtagagaatagtaacaattcataatacaaacctgtgggattcgtcaagacgacggacgttgtgaccaaaagctctagagtagaattctacagatttagctacgtccttcacgtacacaacagtgtaagcaaacgccggtctcatcatattagctgccattttttcccagtcttatgattctgatttcgatccgatgaaatccttggaaatgctcatcatcaaacctcacataggatctctctttacggtgagctcaacacgtggtcgacaacatgcaccttcgtgtgtagggtacttgctgccacgtgagctttttgctcccttttttgggtcaatttgggcctactactcacatatgggcctttagattagaaaaaagtcttgggttatctgttatgttggaggctttttttagttgtttaatggagtttcacagagaatgacgaaaagtcgaaagccatctactaccgttgatctttaagaaccaacgatccatattcttcttacagatttccgcggatcgaatcttggaccgttgaagaagatg

SEQ ID NO: 36529 - DNA, 593 bp, Arabidopsis thaliana columbia
agtaaatatgtgattgatgtatgtatgtgaccacagccaggaatttcagaatcctctgtttccaccaaacaaaaggtatgatcctgtaacctttcttgaaatttcactttcactagtgtctagtctagaacaaaagagctaaaacaagaataagattctttctgtttagaatcaccagacaagaacaatttcgcaggttggaaggtattacttgcttatctcaatgaggattcttttggttactttcatatccgacatgtttaacccctgaagaatgtatgacatagtgattgttttctttctttaaagttggtaaggaagattaactcaactattaatcataatcacatttctgaagtcaagaacgctagcttgcaagctcactgatagaaagttgcgctcatcgtcattgtagatgatttggtgtcttacgaaaaaactctttttaactctcatattcctttctcacatgcagagactccaaggtacaagggttttagcttttggaactttgcggtgtgctttgtggacaaatttcttatactactatcaagcccagcatttaagtaacagaaagaaaggaaaagtttgat

SEQ ID NO: 36530 - DNA, 624 bp, Arabidopsis thaliana columbia
catcaataaaattcatatcaaacaatgtaattaaatcacctaaatttagcaaaattgcatttaattcctaaattctcaaaccaaccaaaaccctaatttttttgaaatgattgataaagaaacatacttgtgttcgttctctgtccaaggagttcctcttttgcgttcactctcgccatgtttagacccaaaagagatctgaccagcggaatcccaacccgccgccgcagccgccgagtcatccatgtaatcagggacatcaactcgaccagaatcaatctcgaaaacatcatgaaccaagacctcgtaatgctccctaacttcaccagcagatttatgaagctgatcagcgattctctcccaccgattaggagatccttcaggaaaaagaaccaaagcttgctcaaacatcttatcctccgacctcgtccactgacttgacgccataatcgttgatgattactcaagtagagaagaagaaaacaaaaacaaaaatctgaaatttgttggatattggaagaaactgttaggataatttatacggattcttctggtttttatcttgggaagttttttgtaataggaaaataagagctggaaaaataaaataaaaagggaggaaga

SEQ ID NO: 36531 - DNA, 312 bp, Arabidopsis thaliana columbia
gtaacggccgacggccgccagtgtgctctataaagcaaggtttgaggttatggtgacagactaacggacaagtgagtgagtgaactatcaaccactatcaagtcaggccacaaggtcgaagtcgaactgtcaacctatctacaacgagtataaggtctgctatctgcttaacacagcgtgatgtgtcgtgtccaatgtgacagatgtcgcgagtcgcaagacggccgccggcctcttgtccaatgtcgcagagagcatgtagcctgtgtggactgtgaactgtcgatacgtcatgagtctggattttgacca

SEQ ID NO: 36532 - DNA, 598 bp, Arabidopsis thaliana columbia
gtgtatcatcgtgcacatactatatttgaagcaggatctcaggggatatggacgaaagaggatattgaactcgttatggagtttcaaaagacacacgggaatgattggaaaacacttgcagatgcaatgggtaagcacaggaagcatgtgaaagacgcttggaggagaggaagattggcaggtaagaagaaaggacattggatgagggaggagtatcaaaacctctttgaccttgtcaacaaagaccttagaatgaaagcattcaaagagaaacactcaaaacatggtatgctcaaagataacatcccttggatggctataagcgacgtacttgaaacacgggaccacgtgacttgctgccagaaatggtatgagcagttgatatcaccaatggtagcaaagggaatgtgggctaacgttgatgactataggctcttggaagagcttttgaaactggatgctgcttgtatcgacgatgtggattgggataatcttttggagaatcgagatggagaagcttgtagaaaacggtggaaccagatgatcattcatatcggcgtaccgaaatcgaaaacatttgcgagacaagttgagattt

SEQ ID NO: 36533 - DNA, 531 bp, Arabidopsis thaliana columbia
gatagtgttgcagtcgtggtgatgatccattgttgtttttgagactaattcggttttttatatatagaaggatttaacttctgttttttgttggttaaaaatataataaagatctttttaacaaacgaataaatatgataaaattccatatctcgcaactattatctcttaaaacttaaactgttgtaaatattatttcttggaaactcgaaaatgaatattcttaacgagaaaaaaaaaacataacgaaaatatgtatattgcaattataagacttaaaaaaataaaaaatattaaatgcagattaacaaaaagaaattattagatgcagatttgtgtagatctttgaaaagacctattaaagcccatttaggcccattaaacgacaacctattaaacccatttaggcccataataacggcgtagtttcagaattagacagtgaggcaatggagcataaagtaacacccgaaagatccgacccggagaagagagatccggacaacccgacccaaatatttgccatttttg

SEQ ID NO: 36534 - DNA, 635 bp, Arabidopsis thaliana columbia
cccatctaaaacatataatgttaagccaaactaaacagaattagtgactcattacaacatctctatacatatatcaaaaaggaattgcatacaaaagcgtattttagatactaaatcgttttgcatgatagcataacatgcacaccttcatgagatagcaaattgtttttttcaaatacaaaagtaaaaagtaaaacaaaacgtggaatacgagagtcgagacaagggcataataggaaaggtttcaggacgctttctgtgacctgtcggggagtagatgtctacacaaaacgtaacgtgtatatacaatacattcatgtgtaccattttcttaaatcaacattttgtgtttaaacccgccaaaagaggaaagtacttacttctaattacggtttatatgaatataaaattacgtatactacttccgtccacttttggaaaataatacgattccaagaaaaaagaagattaaaggtaaaaaaataaaagaaaataaagctctctcacacacctttttatcatttctcattttcactcacaatttgatctcatctttaaatttttttgttcccatttctctcagaaagtgttctgttctttttttcttttgtaacactaaatgcttcaaaagtttg

SEQ ID NO: 36535 - DNA, 657 bp, Arabidopsis thaliana columbia
agaggatccccctctttttcagattcaagcgaaaaggtctttctctggttaagagcttgagaagaaactccttgttttactcgtagtgaagagatcaaaggatcagagaccgtcaattgcgagtccgagacatgggataaaccagcagattttgatgctgcagctggagatttgttctggttcatcctgcgggtcacagctctttcttttgatgaggatggcttgtgattatggttctccagagtgtcatcataacgtcttttgcgacctgaatccttaaagggagggatctcgcggactgaagaagggttcttaatctctgaaggtctcataagtttctcccgtgttcggggaattgaagctgtgctccattcaattcgtcgatcatagccctgagagtcatccctagtcgtatgatgatttgagtagcgagcatttgcaggtgggttccagttctgagatcgagaattgtcaatacgacgccaagcatgtttagaattagcatttacaacttgtttgccttctgttttctcctgcggtagtcagaggttgttgggcttctttagcttgtgttgggttgacaagtcaggtctccacacgaagggtgaatcgttcatttgtgctgagctggagagttgcagtaggagtagaaagagt

SEQ ID NO: 36536 - DNA, 548 bp, Arabidopsis thaliana columbia
atccccgtcaaaagcaccaggacgtagtcgttcaaaagattccctttgaaagtctcttatggaagacattgtctcttgaatggtcgattcaaaaaattttcttctacgtggtacccatgatccgctagactctcttgatccattctttcgactagccgatggatcaactcttgaatgttgtcgatcgtgtgaattcatatgatggttgtgaatcattataaatgatcacacgatacatcttcttggtttgttgagtttcttgaacttcattaggctcacaatcgtcgtcgttatcaccatcatgtgaattgtcatttctgatttccgcttttctttgccgcacagactattgacgttgagaacccacatctaagactgcaaagcaatgagacgtgatatcccaatcttttggaggttcgcggttcaagcgtgctagtttcgcaaactcctaagattaaaaagttaatgtaagaaaattatctataatttttgtaataattaaattgatgaaattagggacatgtttcacgattacccaccatgcttcg

SEQ ID NO: 36537 - DNA, 572 bp, Arabidopsis thaliana columbia
ttcgatcgtccatgactggttttcttaacgtgtttatttataatttatttcgtctatcctccagattgatgtaatgatacattcaaattaatttaatttagtataaccatttttgttggtcaaacgttctaacatattcgaatttcgcatctattaaaataagacaaacacaatccaaatataccaatctaatcgaatttcaaactaaaccagaataactgattgagaaaccgaacaaaaattattttttgggtaggtgggtctaatagaacatttttgaaatgttgggttttaatttgtaacttttagaaactaagaatccaaatttgaaaactattttataagtttgacagttggtataaccaaccaacttggtaatgtgctagtgatcagaatagccccacgcaacactaacgtacaccacaacataacttgagcgtaatctcgtcctctatcatgtggttatgccgtcgagaaaacgagaacatttgacaactttcacctgcaatcactctcaatggctgtatccttccaaccaagtaccctctacgacctatcaccaacatcccaaa

SEQ ID NO: 36538 - DNA, 560 bp, Arabidopsis thaliana columbia
tgtcccaatcatttttttatttcatgctatgatccgaaaattttgttcctttcttggattaccaatgatgaaacctagaagaactacagatttgacgtctctcagtgactgcatagccgctcgttgtgatagcttgcttctggggaagtctcacagtaaacagatattaattacataatctgtataaccttaaacgccaaactaaatgttgtgttataatactcctcctttctaatgacaaacactgagcttctatacaaccattactaaaccctagagaaaaatatttcatatcattttgaaactgaagaattgatggaggtttattatttagtaataaacctttccaaaaataggcgtatgcgctttaaaagcagagagaacacgatattctttagtaaaaggcgaaagaatagttcgctatgcctcactgcacggctccgtgagtcttaccgagttgctctcgctctctttatatactttgttttactctgttcctgagtatcctgccgatgtgggatctacaaatcaattagcaagcttttgatagattaataagg

SEQ ID NO: 36539 - DNA, 570 bp, Arabidopsis thaliana columbia
gtaacgtccgccagtgtgctttaaagtgtgcaatagccaggaatgtaaggaattcaaaattgttctttattttgtgccgccaataaatatcttttcataaaattagccagaaaagacgcggcatatagccctatttacaccgatgatttcgcagcacgtgaggttaaaacttcctgattcatgtcacattttatggggagattatcgtaggctgacgacctttcagtcttctgtattagttgtgtttacgagaattccctattaagcgaatgatgaaaagtagaacagtcgcaataagagcatggacttagtattgcactatctcctggaggtcaacagagggctattacttgcgcaacaggttaaagattgtgaatagttaccagcagtcatttacccgcttataacaagcgaggcagttgtaatgatagctcagaaggattatgcaaggcttcgtaagggagaacgcatatacccacttctgtgcatactgttgagctgaaaaactgacgaattatgataaactccagccaactttatttcatatcattgagggcctgtgcgtgatgg

SEQ ID NO: 36540 - DNA, 362 bp, Arabidopsis thaliana columbia
taatgattgatttgatcttaatttgatatgccagcctgttctgaagtctgtgtgataagctcatactcttggaaagaattataaatatttaagtattggttgcaatctgagtgataagaattgtagcatcattggcatttttgactcgggagttgatcttgaagacggctttttaattaattaatttatctgataaatctgctgataaggtgtttaaaagccgtcttcaagatcactagtcattctaaaacaaacaaaaaaaaattaattaaaagaatgttccatttatcaaagtgtttaatttgctatttatatatacatttttgcagctattttaacaaaataaatcttggagttggact

SEQ ID NO: 36541 - DNA, 551 bp, Arabidopsis thaliana columbia
ggtgatggctttatactaaaaggcataaaatgaaaacagccttaatttatttgttagagtcagggtctcactgtgtcacccacgctggagtacagtggctttcgtgatcatagctcactgcagctctgaactcctgtgtgatggttaatactgagtgtcaacttgattggattgaagggtacaaatcattgatcctgggtgtgtctgtgagggtgttgccaaaagagattaacatttgagtcagtgggctggggaaggcagacccacccttcacctggtgggcaccatctaatcagctgccagcaaatataaagcaggcagaaaaatgtgaaaagaaaagattggcctagcctcccagcctacatctttctcccgtgctggatgcttcctgcccttgaacattggactccaagttcttcagtttggggacgcagactggctctccttgctcctcaccttgcagacatatatatatcctattagttatgtcctctatagaacctgactactgctttaagaaattgtcaaaacgtggtgacttaaacagtatg

SEQ ID NO: 36542 - DNA, 544 bp, Arabidopsis thaliana columbia
  unsure (1)..(544): unsure at all n locations
nnnnnnnnnnnnnnnnnnnnctaaaggctgatcaagcagtctacaagcaggtaagaaagatagtaatagcgtcatatgaaaaacacagtttatgaatctcctatagacgttagattataagtgcaaaaagtaagaagtctgctagataaaggtctgatttgtagattagtattgtgaatgtatgatgtgttatgtcacagatatagatgctctcgttactaatacatggctctctattgcagaagaaatgggtgagacacgaggaaagagaaagaggaaaccatcagagaaagccatggagctgcaggcagagaaggcaaaaccattgaaagggtcaggcaaaacagtaagagcaaaaaacagagcagcgtttgatcaagaaaccgatgacagtataaatggtggtgatgatgatgatgatgcatattattaacaaattaggtttactaacctttatgtatgcaaaaagaaaaacaaacgcagtaagctaggacatggaatgatatttgtttgaatttttcttgttgttggaggcaatgttgtg

SEQ ID NO: 36543 - DNA, 582 bp, Arabidopsis thaliana columbia
tattacaaatctatctcatcttatataacaggactctttttctattaatgagattggtatgctagatttggagtgtattggattagattgtggcgatcatgggttctttgtctgggatcattcaacggccacttgttgctgctgctgctgtgattacagcttctgtgtctgcagatgtctctgagaggttctcatctcttagatcactagttcgaggttctgaatcagagcagattgctccttcagtgtctggtttagttcaggaagaaaggtccttgtgggtttctcaagtctcggcctccaagcttgcagatttatcttttgtgtcgaggatttgtgttcctgtaccaaatgttgatctcctagcttctaatcctagctgtagtctcgctacttctgttacttctctgtccgctcttcgtagtgtttatcagtctgcagagttggctaaagcatcgaaaccggttgcattcacaatcggtgcctcacttgtggttcctgatattcctacagatggcatttacatgagcctagtgcagtcgatatgtctggttcttcgagttgtgtgtctgaaaagaatag

SEQ ID NO: 36544 - DNA, 546 bp, Arabidopsis thaliana columbia
gctcattgcccaagaacgaataattggcgacgagagagtagtcaaaaagaagagcacatgatttcacatagacaattcgtaagatcatataataaaatattagtgagtatgtaaaatgtataagctcaagagcaaattgtatacaattacaataaagtattaagttaagtatatgcttgtataaatatctcttgaaatcgataccataataaaaccctaaagacttatcttcacaacaacatcgaaacaagctaactagctcagagccgccatgaaagaagctttgaaacttatcgctattgtgctattgactcttgttattttaactttatcgggtcgacccgctcccgaatctgcgacactagtcgggtcatcttctcgagtatttcggaatcgctccaaaatgaatccattcgatcaaatagaccctagtctccggaagattcacgtagcggcgcaaatcctactcagaacaagtagcaactcgttataacaggttttacatattgtacaagtttgtctcactatacatatatgctagagggt

SEQ ID NO: 36545 - DNA, 548 bp, Arabidopsis thaliana columbia
taatcaaagcaataattacaaaggcataaaagacaaaccttgacattcttagagattagataagataagaggaatcacacagacaacatttccattaaaaatgaaaacaaacatgaagaagacaaagttagtaagcaaattccacaatgataaaacaaaccctagctaggattcgctcgaaatcaaacaaacaagtgaaaaaaacacaaagaatctcttcttaaaaatttcaactttcaaaacataaaagattagatctcacttagcaaccatccttgctatgaaatcttcataccggatctttccatcggatccaacatccacctccttgatccactcatcgaactcattaggctccagcttctctccgatactggtcagaatatgcctcagatccgccacagcaacgaacccggtaccttccttatcgagcactttgaatgcgtcacggagctggcgatcgaaaggttccgtcttcagaatgtttcgccatgagatcgaggaatctgttgaaacaaacggtgaagagagatctcggatgcgattat

SEQ ID NO: 36546 - DNA, 537 bp, Arabidopsis thaliana columbia
tctccgagaagtcaattagatcatccgacaacggaatcagtcagagaaatcaaagaagaaatcgaaggagaagaaaatttcgaaatccctaaattatttgtgtctccggctactactccgcctataaacgctctgttgttgacgagaagcagatctgcaccgtatagatcgtcgtcgttggctttcagattctgggaagaaaataaccaacgagaagttgaatcacagcaaaatgtgagatcggagaaaactgattcggaagttcccatcgagaaaatcaatggttttcacgagccggagtatgttgacagagatgaagaagaattcacgaagttaagatttgtacggcagccggtgttgacaaggagcaaatcggagccggcgaggatcggcgagaagatgatggtgttgcttcccgatgaagaagaaggttaggtagggtttaggtctctcacgtgattagtcaataattgcactaatcttaattaattaatcgctggtatgactaatttaatttgcattgtttaggataatttg

SEQ ID NO: 36547 - DNA, 637 bp, Arabidopsis thaliana columbia
tctagagaggtgctccacgggagatctataccgtgaggccaaacttggcatgtgataccttttcggaaagcccaaagagagccctccgacgaaagaagcaagacaatgtatcatttccattgactttttgtcgactccaaattttgacctttaagtacaatcaccgctccgtggagatgggatcataatggcgttcttcttcactcttttggacattgccaaaggtttgggatgatagtctcaaatagggttcgaaacaaaattaacaaatgacctcgacaaaagtatctatcaaaacagcctaaaagaactgttactctgttagcgtggagtccacgaccagccaaaacaaagttaaagggtgctataggggttgtaattgacagaaacataacaatacggatcatgggcatcaagactctaaaacacttcaaaagtggagttagcccaaagctttttgagatcagatttgtaacataaaaccaacgagctaacctatttgccaaactttgtgggagagaaaaccaaaaccaaacaatgaccatcacaactaatctcggaaggtagctactctccaaagacgagaaagaaatcaaaacgtttgggtttgctagagtgaaatacaagggggatcctc

SEQ ID NO: 36548 - DNA, 601 bp, Arabidopsis thaliana columbia
aaatctacaagaacacaataacataagtttagtgttttgttagtaagaatttgtcttcgcaagatagaattttagaagtatatatatatatatatatatatactattttatcttaattctttttgttttatttttggtttttaggtaagggttaggagtaatgggaccatattggtggcatgctaaattattgtgataaatttatgcatggaggaaaagatgccaaatgaatttatgttattcactcatactcacctaatgacctaatccttgaattattgttcgaactttaaaaataaaattttaatattgtaaattaaacaaacaatataacgttgttagcatgtgtttatcgtgaaatgtgaatgtaactaaaaatattataaaggagttcttcctttcttaaagcatatgctaataatagcgtttggtcaaattaataaattattagtttatttagtcgtcaacaaattaattagttaagcagacaagaatcgtttttggagatagagatctcacttgcattcactctcttgcaattaacatattaagcaacacaaattttgctttagtgaattattagcacgaccacgttatatag

SEQ ID NO: 36549 - DNA, 495 bp, Arabidopsis thaliana columbia
ggtcataattaatatatcgatcgaattatataattatcataaatttgaataagcatgttgccttttattaaagaggtttaataaagtttggtaataatggactttgacttcaaactcgattctcatgtaattaattaatatttacatcaaaatttggtcactaatattaccaaattaatatactaaaatgttaattcgcaaataaaacactaattccaaataaagggtcattatgataaacacgtattgaacttgataaagcaaagcaaaaataatgggtttcaaggtttggttatatatgacagaaaaaaaaaaaggtttggttatatatctattgggcctataaccatgttataacaaatttgggcctaactaggatactaaaatgagcgtaatggtcctttttatatttgggtcaacccaactctaaacccaaaccatagaaaaagtatacggtacggtacacagacttatggtgtgtgtgattgcaggtga

SEQ ID NO: 36550 - DNA, 618 bp, Arabidopsis thaliana columbia
ggtagtgaaattcttgtatccgctaaaattgtatgactcttttcactatttcagctgttgcaacttacttaccaaagcgaaaagcagataagaagaagagtctgttgggaaatcccaaagactctgatgaatcccatgtggaagttgaggtatgtctctacagaaatttttgtatgttgttatgttaatgtttggcctgtgatggagccagtgtgatggcaatcattcttatgaactaacacaaagcaaacttcgcaggaggttgatggtaaggactcggatctcaaggatgagggccctgtggaatgggtatcctactggaaaccaaatgtcacaattaacctagtcgatgactttactcggtaagttagttagtactgataattggtagatgaataatggatttatggcatgcttggttttcttgggttcactcttaacaatgaacttcataagacgtttgctgattgtttcgatttccatacagctatccacagcatggtgtacaccaaacatttatccttgtatccttttattttatgatgtcctattattatttgagtttttgcaactctctatgcacatctttttctaacaatcgaaggcagtaggatgtgt

SEQ ID NO: 36551 - DNA, 527 bp, Arabidopsis thaliana columbia
gaggacgctgtgttattgtgtgattgctaaccggattgaaggatccaagtcatctccagcttccatgatgtcagatcctgagttagctgattccaaacataaccggaaactttatgcggtttgattagagtgaaacagaggatttagaaaatcattaaagaacagagagattttgtatccagataataaaagagataactcttgtgtttatagtagattctgtatatgtaacaaaagggaaatagtataaatcaatttataagacttttacatgataaatcatcaatgttgactttgactagagtcaacaaaaatgacgatgcctatacaaagaacaagggacgagtagacaagagccgtctctttaactgtctccggcattataatgacgatattaccctttctcgccgccgtattcgtcctccaactcctctcaactctcacggtcgcggagatcaagtctttcactatctccaacgattctcggccagtgattctcttggagaaattcggtattattgagattg

SEQ ID NO: 36552 - DNA, 583 bp, Arabidopsis thaliana columbia
tttatgatatatgagtaaagaataaatttctttgtaacatttggatatcgaacggttccatgaacgaaatcacaaccaaccatattactcataattcataaacaaaaattcacaatagacgattctaacaacaaacacattcatcgaaaaaaaaaaaacattcatgaattgaaaagtatgtgactgaagaaggtgcacgttaacacattaagctggatcatctctatcctacgcctacacgataacaaaaagatgaagaaaaaactaatacccgttttggcttaatgtgacatgccagcccattcccacctatttcaatggagagtgcaagtgcaacattgtcgttcctcttttctttattattattatttgctaacttttgtcttaatacttcaaaaaaagatatgatatgataaaaaaaagacacatcatatgcttatattcgtattatatgaggtgatgtattagaaattatagaataaacgaagacagataagaaagaaagagggtaaaaatcggaagaaatgaaacataagggggtcgtaatgaaattatgagattttaaaaggcccacaaatgaaag

SEQ ID NO: 36553 - DNA, 633 bp, Arabidopsis thaliana columbia
caaaagtatcatgttcttttggttgacagcatctgatcccaactataaacataaccaatttgaaagaaatgaatcacagaaatgcaagtagccaagcattgaaaacgataaatctactcctttcttatcatttcctttaaccgatcaatttgcctattatggaataagcacaaaatataccaaagaatcaaacaattacaaacaaaagaggatcaatttaatcgacaatactcaaaacccataattcccttgaaccctaatttctaaaaactaaaatcacatcaattaatacaagaggagaggcgttcttatcttaacaaattgattgctgacgatttgactccgattttccaagctttcaccggagatctggtgaaaatagttgaccatgacgacaaccatgatgatgatggagatcccaggaagaagagcgcgcatataaagcaccgtcggataacaaatcatgatgaagatgattctcattagaaacactggtgggttacaaatcgcgtcaatttttttttgctttggctcggcgttattgccgaagtgagagagagaaagagaggaggaagaaaatgcacgggaataattttttggctttaatatttcccaatacaactaagaaattgt

SEQ ID NO: 36554 - DNA, 552 bp, Arabidopsis thaliana columbia
aattcaatcagagagactttgttcatggaaacagttacccctccacgaacgtcttttccagaagcacgctcgtttttatgatctgaaccaccatcagaactctccgatcctccagatttctcatttttctccgaagattttgtttccggtttacctgagtcatgtttcgaggtagtatcagaagcagaagtactcagcaaacatctctgatccattttcagcatttcgattccacagttaagtgaaaaaaactgcaaaaggaagatagcaattagagagctcaaaacaaagagaattagaaaatgaattcagatgaggagaagaaatgacgaaccgatcgaggaagagagaaatctccatgacgaagcgcgtcggagatgcacgccggagaaggagacgatgccgatagtagatcgctggagacgcgaatccgacgaaaaagttgaacggaacgaagacggcttgcagttctacatagagcagacgccattgacgaccaatttttctctgaagttcacaaattcgctgatttctttcctgcgagctgaggtt

SEQ ID NO: 36555 - DNA, 284 bp, Arabidopsis thaliana columbia
cgcctttcctcctcagctgctcgtttcgtttggagtaagaactgaatcacaacaaaacaaagaccaacaaaacacaattaacatatgtgatcagatgtacctcttaagcatcactgttcaaacctggagaagaatgtgtatgtactatatctaaacatctgaaatttctttaattctcgtctgataaattctcttgctagttttagggtataagataatagaatgacctcattgaaggcttgcttccgctctccaagtgtccacagagcaccgtatcttttgtc

SEQ ID NO: 36556 - DNA, 446 bp, Arabidopsis thaliana columbia
tgtgacaaacaacgactcagataagacatgtgacatatttatatgtgatagaaatgctagagagttgtcagccacttgaactaacttacaagagtttttgtttttcttgaacttaccagaaaaatctaaaaaacttaacaattttttcctacaacttgcaaaattttcaaacctttgaagaaatttgaacattttcgtaaagtttgggtaagtgtttggatagttttagttgattaccaccgacttattttgaccaaaacgtgatatgttaatggctaggaggctagaaattggctgcctaggcagcgtgggaaatatggttcgcgtgtttgtatcggttaaaatatcttgtgggagacgaagaatcacgatgtttgtactggttaaagttaaactcgactccaaaattctttcatagtgaaagttaccgagacagaaacaatata

SEQ ID NO: 36557 - DNA, 686 bp, Arabidopsis thaliana columbia
  unsure (1)..(686): unsure at all n locations
agtaacgtccgccagtgtgctctaaagagatctcgctgaatacgactaccccggggaagcgggcgttggggtatcctgggatagaggggtggaagacgtatattcctgcaagtgcctttagtttgatggcggggtagagaaggtttaggaaagccctacgcatggagccattgccatccgcaactgtagggacatcgtgatggtattctttaataagcatcttgggctttatttctttcttttaactgtcaattgctggcaaggtgttggtttgctcaatagggttgaagcttaggagctttgagctgatgcggggcgatgctgataagacaaaatcacgtgattttgtgttttgatatccctaggataacattgtcgtcgtaacttcacagcataatgaaacatagtatcatgattatatggctccagtcacccaatagggaaacatatttgtatcttcggaccagtatacaacaagacatagtaacgtagaacacaggtacagaagtgaagacaataagtacagtgaatggtacatattagtatggaaccaggggcacggagatattagtagactctattgataggtggcgcacgtgtcaggtttacgtcgtagtctatatgcaggttggatcgaggtgcacactcctanaacacgtactggagatcattagcttgatgttaag

SEQ ID NO: 36558 - DNA, 518 bp, Arabidopsis thaliana columbia
tgttcatataaagcatcactcagggacataaggatatttcatgcagatggtgatgatagggtgtcttggtgtttattgttcttttcaattaggcatatggaatttaagtgagctgttgattatagttttcgcatgtatttatagtttagcattgtaaattacttgtcaagtatccagtttgagtatccttgagacgaaagtcctgcatacgattgtctgtgcgtttaaacattcggcactctatggaattagtgtcgcctttaactggaaaatgcatacctttttcatagtggatagcacatattatatttaccttgtttagttctgatcttcttctttaaatttttttgcatgtttcttcacatgatctgcagtactgcctgaagagaaaagtaagtttgtcaataaccgcctatgataatggatgcttactttcataattgcttcagttttatttctaatccctgatctaccattatggtttgggagaaccttaactgttttacgctgtgatgatt

SEQ ID NO: 36559 - DNA, 534 bp, Arabidopsis thaliana columbia
atccccaagatattctgggaaatgtttttttcttagataaagcgaggaaaaaaaaagaaaaaaagagagaagagatgggaaaaggagagagaagagatgaccgatggaaaaaaatatagttaaagggtaaataagtaaaataatttatctaaagtgccttctccatttaaagtggctaattaggaattaactttcaaaaaagtgtctaatcacgtaatattctctttttaaaatcaatgaaattttacataaccatcaattttttaaccttctcagaactttatttacaaagaaaatcttaaagttctatcgagatagtgcaaataattcaaaacattttaagccaaatatgttctacaaacctgtcacaatccgttttggggtcaaaaggcacagcattaggaatggcacatttttcaggcataccaataagttttgtaaatcgagaatcttttagaatttcctggaaacatttgcaaagagctaaacgaccgtagattgtctctacatatctgtttacatcgtttatggcat

SEQ ID NO: 36560 - DNA, 157 bp, Arabidopsis thaliana columbia
gccagtgtgcgctgatcaagcaaggtttggtgacagttaacggacaagtggtgcgtgatgtatgaactagtaaccagtctcgcgtcaggcgacaaggtcgaagttgaccgtcctcctatgtagaacgggtctatggtctgctatctgcttcacgcgg

SEQ ID NO: 36561 - DNA, 613 bp, Arabidopsis thaliana columbia
  unsure (1)..(613): unsure at all n locations
aaatatatatatatatatatatatatatatatataaatatattaaagtaggttatctgtatgttggtacacttacaagtattttttgtttttttttaggttggtgcatctatttataaataaatattatgtatataatacctcactaaaaataatatgtggtgaaattagtcaactcatgtaacgctatgtatgttacaaaattaaatttatatttttatcaatttttgtattagcggtttataaatatctgttattgtttatttattaatacaaaaaataaataattattaatacataccaaaaaaatgatacgnaccgaaagtagtttgtttcatgaatcagacattattctatactggttattttgtagaaatcgcacttgtgtcgcaatttcttccgcacgtaccacagttaaagcgaaccgcactgtaataaggcttgtcgcggaaaataaaaactgtggttagcattcggaggcttagctttgatatttcaaatatgaaggacaagttaaaccaaattggaaaagttatggaaaaacatacaagggtaaaagtcattaatttatgagaatgatatgtatttatgtgatatttatgaatttattttga

SEQ ID NO: 36562 - DNA, 444 bp, Arabidopsis thaliana columbia
taaaatcattggagaatcaacaaaacgaaagaagaatacttcagggctatatatctatggctcctgaaatcatagagaaacgaaatcgaaataccaccaaaactctaagcagctaaccatactacacatagcaaccatacttgtaatggttctgttgaggacttaacactaacgataataaagcataacaacaacaagagaaaatattaaatgaacctgagctgagtggtgcaggttatttctattgtattattttacaagtgagaagcaatgtatccaaatacagtattcaaaattgaaagattcaaaacaaacctgtaatttgctctttcatcaagcatcctcttccgctctgcttcttctctagagacctccaacattctagctttcaaatcttttctttgcctcctcactatgttcctcaatctctccacttcctttgca

SEQ ID NO: 36563 - DNA, 548 bp, Arabidopsis thaliana columbia
taaataacagtagaatttaatagcattctaaaaccaatcaattgaataacactagatttaaatagaattctaaattctttcatattcaattaaaatcataccttcaataacccccctaagatttctccttttttaagtaattagaattgatgaagatatattagataagggaatgttactaattaagaatattaattaattgaaaataattaatgtcaataacattttttataaataaattccaacttgaggatttatttcataaaatggctgcaaaaatgtatatgtaaatatctagcggttagacggaccggcccgcgggtatgttgaagtgtagtcggcgaatcattatacacttctctctatgtatcaccactgaagaaccttccttcattcttgaaactaataatacggctcacctattggctcctcttttttatagaggaacaaagtcagtgcttgggtttacaaaccctaaagtcttgtcacgtgtggttaaatgaacctgtgacattctgcatcattttgaggtattgctacacttttaa

SEQ ID NO: 36564 - DNA, 444 bp, Arabidopsis thaliana columbia
agaaaaaaacaaaaaaagtcacgcgatagagaatttggagagaaatgcgtcgatacaaaaaggcatgaattgcgaaagagggtttacccacagcaatcgctctcactcgctcaacgcgctctttctgcgagtgggtacgaaatagagccttctgattggtttagaaacgcaacgtatcaatgaaatagtagacatgttgctagctatgttattatttactattcctctccttaggcaaaaactagattcacgctttcagatttcaactggtgagtgctaaaatatgtataaaccttaatcattgttaatcgtctttgttatcatcgaatctatagttctggtatgaatgtattggtatgtcctgcactgttgttactatgttgcccagaactgttactaaaactagagagctaagctcgtttgctatgtatcatttggagcagt

SEQ ID NO: 36565 - DNA, 430 bp, Arabidopsis thaliana columbia
gtggcaccagcgagatcaaagtaatttatttttttctttcaaatggttatttaattgttataaaaatccatatactatagtattctaaactcgtcccaccatctaatctagttcggtaaaattaaacattattattttttgttctaataatatttttattaaaagatttataattcacatcaattttcaaatacatcttttgacatggttatttgattttatagattgtatttatcatatatctcctaaacgtttttcattaaatactctaaatattttataaactttaaataaccataatatttatctttaataaagtatcatattaataaagtcctaagatttctcatttttacaagtaattagaattgatggagaactattagataaagacatactaataattaggcatattaattaattgataatg

SEQ ID NO: 36566 - DNA, 573 bp, Arabidopsis thaliana columbia
tttatccgccgattgagctggtggagtttagaagaagttatgtaagaaaacgagttgaaatctttgggaagttttggatttagtttcattttgaccaaagaaatctcttctggttgtgtaagatcttgtttgattgttgcctctagttgtaataataatgcgacgaacaaactagtcaaaagaataaaactataattttggcaaaattaggttcttattatattttacgaaccaacatcttaaccgagttccggttcacttaagatttattccaagaacatatagttccggttcacttaagatttattccaagaacatatagttccggttgaaaaaaacagagcacttttcaaagagaggacatctgaagttcattatcgggtccaagcctaaccgagttcacgtaatcagtcatgcaatgatccgacagaccaggaatcaccagccccataagcctaaacaagatcctaaaccgatccctctttgtaatctggtccatgagtgtccccatcgtcaagcctctaaccaactcccaaactgcgatcacatgcccaagaatcttgtaacgcagac

SEQ ID NO: 36567 - DNA, 785 bp, Arabidopsis thaliana columbia
ggtttcaagtggtgttggtggctccgagtcggaggtaaatttattgtttttattagcagttaactttgttgtagttgtgaaaatttttgtctcatgttttttacctttacagcgggacggagttgttccaatggaggaaggtaatctcactgagggtgacgtcgttaataaccaacaggtgggttgcttgttagtcgaacaaatttatattttagtaagtatattatttagaatgcaaatcttgtgttagcgtggcagctgaaactataagggttttgtacctttttcatcaatatacattgtgttatattgtttctaggccggtaacgatgctggcgttgacgttgccccgactacagaagctgccactgaagataactcctgggttagttgttaagttctcctctagttaacagtgatttaaacctctaatcttttgtctgtgggtttaatcctctcttcgtggaccccgcatgcgcaattaatattgtttcttggttctagcgcgaggacaacacccccattgatgtggatcctatagatcatgcgggtatgatccatgattcgcaggtgggttgcttgttattagaactaatttataatttagtaagtatattatttagcatgcaaatcttgtgttagcgtggcagctgaaacgataaggggtttgtacctttttcatcaatatccattgtgttatattgtttgtaggcctgtaacgatgctgacgttaacgttgccccgactacagaagccgccactggagataacttcggggttagttg

SEQ ID NO: 36568 - DNA, 575 bp, Arabidopsis thaliana columbia
ctctttcatgaagatcaaagaatgaccttaaactagaagaatctacacaaccatacttatccaaaaacaaagcagcagtagctgcccggttagccccaacgccaatctttaccggtccaccacgaagatgtctttcaagcattttgacttcatctccaccagcataaccctgacaatatgtaagagtctaagtacacacacaagcaaacactccaaaaattcaatggtaactatacatactagttagaagaatgggaattacacgagtgagaataagaggtgtaagtccagaatcaacgaggaattgagaaatgtattccaccattggcgtcttcccattacctccccagctcagattcccaacgctgatcaccggaacggtaatcttcattcccacagatcaaattaagttccaggaatcgataaaagcattattcaattgatctctctctcgagagagaaaacgcaccggtgtttctgtaagagtgagtagcggtagagagagcggcggatttggagagcgactccgtatagagacgaagcgattgttaggaagggacgagagaacggtgaag

SEQ ID NO: 36569 - DNA, 545 bp, Arabidopsis thaliana columbia
tttattttagaatatttcatagcttatcacaaaacgatacatatttttagcggatacataaaattgtatgcaatacttgattgagaataaaatatagttgtaagaaaaatagtgcaaatacttattattcttagttattttgtaatacaacaggacatataatcaatcaaaaccttataaatttatttatgttgcaaattcaagtattttgctttactgaattatagccctaaagcatgataattcaaatacatagccctaaagcgtgtcgattagtttggtgggctcgacttggtgggctcggcttggtggtgttgtttcttttgcggcgttgtgtttgagctcgcgtggaggtgattctaacctaattgttcttattttggagagattgacggcggaggaggtgatggagctcaaggacggctccggatctgactcattctcgccttcgatttggcgctcagacagtttatctggtttggtttagatttgctcgctcctcgggctctttgtggttgtggctagctggcggagtctcagagagg

SEQ ID NO: 36570 - DNA, 1532 bp, Arabidopsis thaliana columbia
cgagctgaactctatggacactcaccgcaaacacatagccactgcaaaaacaaaaacaacaaaaaaacaaaacaatagataagcttaagcataatccttcaagattgagcataagtttcttggtttggcttacccgacaaagaagcgtaaggctggttgttcttggtctaaattcaagagagcgccttcgttatccttcaagatggaacccaagatctctcttaagagatctggtaactgagcaaatagccacagtactccaagatatttaaaggataccacgcaaaacctttttagagccacaagggaacccatcctccgccatagccaccgtcatcacctaaaccgattatcgctgtgtttaattcacctcttacatgcgctggtacagcagtgcctggtgttctacgcacaggcaatcctgagctaaccactaaagatcctgaagcaacactggctactcgattcattgcagctcttgcactagaaggggaaaagttaactctgttcacaccgttaacagttgggtttccactgttgggatttgttgctccttggctacctgtcaaatttggttctaaaccgttcaattcttgagcaacatgctccatgatgaaaggtctgaattggggacatggcaaggagcctccaatagaagcaccacccttgggtggagttgctggctgcaaccagacttgatctccagcaaaacatctcatgtctactgcaaaacgtttacggtatatgatccttatccaatagggtccacggagtactacagagacatcgatgggcaagagagagcttggaacgatgccaggtccgcttctccctgcagctgctagcattgcaactccatggaaacctccaccaagtgggcttggagcagaagaagcaacagtatttcctgaagttgctgaggcagactggccagtagcattaggagttgctaaagttgaaggggcaatgattccttgagtttgttgtatctgatttgattgtcttgaagacgctgtagcaggtacaacaggcatgccagtggcagtactagctcgggcagggcgagtagcggcagctaatgcatgcaaaggcccagcagtaaggcgaatcaatccaaaagggattctacctctgctccgtttatgaaatcctccaagaactgtacaagagtaactcacgatgagaaaaagcatatatttggaactcttataataaaaatatttcccatgaagagagcaaatgttaagtcctgcgaactactcacctttgtatgtggccatagttggtcaggagagacatgcatggtgcatccatctttacctgattcccactcgacaacaaaacgcgccaaaacgcctgaaccaaagctaaaccacaggcttgttaatcccacagcctcaatcttgaaagctctccacctatctactggctcacactgccttttctccagtagatctttcatagtggaattagcctgactcttctgtttttcatctggctttatgcaagtagttccgcatacaagggagaca

SEQ ID NO: 36571 - DNA, 525 bp, Arabidopsis thaliana columbia
gtatgagtactgccttatggtacatcttttcaatgttacttcgtgacaagtgaaaaaatctattaagacaaaacaaatatttcttgaaacatttttattttgttggttggttgtctaggttgcctacctcttattttcacttattttgctctggctagaatctgaaaaacataactaccattttggtaatatatagaaattacggtgcctgaaaacttgttaatgaagcttgtttgcattgcagattatgccatgcctgctgagactgttattgtgggtggtcaaattggcgagtttttacataaacgtggtaatgaaccaagaaatgttcagttgcagaaagatgatatcagagttctcgctggcttaatatttgcaagagatagacacagacctgctcgtaagtttccgtggttttaatattagtttcttaaaaaactacagtacatcgagagacacactttatctttactatgctaggttaaatatttcagcatcgttctttcatgttgtgctggttatgtg

SEQ ID NO: 36572 - DNA, 434 bp, Arabidopsis thaliana columbia
cagtaccgacgtgtttacgcgacaacaatcaccttcactacgactctcattctctgactcttgatgaacaataaactcttgtgcctgcaagtaacccgatatgaaacaaccgtgttgacgatcccacagatagacgatataagtatcttacggattcattgccaagggaaaacagttgatatcagatatgatagacggcatgacgacttcccaaatcagttgccacctttcactctctttgttatgcacgctccatgctttcaatattcgatgtattacttcaatgaagataatatcttcctcctgaagtagtcaagcatctccgtacatgttcatgttcatcatcatgttcatgatcatgtacatcattcgcgccagggagaggtataacctgacattgatcatcagctccataaatgtcatgagctacaagg

SEQ ID NO: 36573 - DNA, 582 bp, Arabidopsis thaliana columbia
gtaatgtctggtttagtcacttttaacttatatgctaacctagattacttgaacagagcccagcaggaattattcaaggaatggctcacggaaccacaagtctcttcagtagcactatttatgctttaagtgatgctgccactcaatttagtaaagctgcacacaaggtacgatgcatctgtttgcttaaaaatctatggtgtagacgcctccttcaagaaatatttacagaattaccaattcgttgcagggtattgttgcatttacattcaatgaccatgatgttgcaaggatggagaagcagcaattgggtgaaggatcgcgtacaaaggagttataggtgaagtgtttgaggtatgttatttgcactttctttggaagtatgtcttatatactgatttgatgttcacttagtcttgaaagttacttgaagtcagtgacttctgtcaaattcttctgaacttgcataaagaatttaagcatgccagctgacacgatgttcatcacagggactcactggtctccttcaatcaccaataagaggagctgagaaacatggtcttccaggcgttatctcaggta

SEQ ID NO: 36574 - DNA, 536 bp, Arabidopsis thaliana columbia
ctacgatatgtaggggcagtgtaagctgaagggaaagcctttgtacgttcatcgtggaacaaaccagtttgatgaattaaccttataaaagccttttctattcaacgattatgacaaataatgtaatcggtttaatcgattttgtaactaaggatttgtttgttttctattggctccatgtggaatgattcatgctagttactatgaaattcggaatacgaaggtatgcagtattatgcaccactgttcttcagatgaatgaattcaagtcgattttctagtgatttacatggcagaatttataaataatatacatcatattgtttgttagataactttactaagggggcaaaaaaggaattatcagataaacaaaatatttgaaaaaagaaaaaaacgttggcagggagtttcacgcgcaacgcaacgcgcccatgtgattaacaaaagtacgagaaagccctgccgcttaaagatctgtatataaaaagggtaaaataaggtctcctggcctggcctttaagataaagaaaagg

SEQ ID NO: 36575 - DNA, 462 bp, Arabidopsis thaliana columbia
  unsure (1)..(462): unsure at all n locations
nnnnnnnnnnnnnnnnnnnnnnactaatattggatctttgtatttgtatattctgttataactgaaaacatctcaataaaaaaaggttataattttattggattttgaaggagatgacttcaaacaaacaaaaatgaatcccagtaggtcgtggcattacaaggcatctctactcaatgcaaacaatgtctaatagtcttatctaaagcctgcaactgcaagattctctatatgttgtataaatatatatatcatgacagtcgctctccattacttcgataatggttctttttttcttcgaattctttctatttacactgactaactcctgtattagcttcgttgactaacctggtcacaagtccttgaagcctctgagctccaaagctaggaacaatcttagccacattaccgaccctggagcattttggtttccactgcaccatcaccaggagtaaaact

SEQ ID NO: 36576 - DNA, 266 bp, Arabidopsis thaliana columbia
tcatgaagtattctcgactggagtaagcgattaatctggacgtttcaacggtcttgtgtgtctacagaaataatttagcatatgcatatcactattgtggtgtgcgtatatacgtttataaggtctctcaaacttgattgatgattcgtgacaaagatcctcatgttgttacaaattcatatgaccacatgacttaacctaatcgtctcgggctactcctgacttcgagttaagtggctgatatagaaatcgagatgtgaagtgat

SEQ ID NO: 36577 - DNA, 427 bp, Arabidopsis thaliana columbia
cgaatctgctgtcagtttgatgaaacgagagagagatcctcagggtgtgcttgatatcttcaacaaagcttctcagcagaaaggttttaaccataacaatgctacatactctgttcttttagataatctcgttaggcacaagaagtttctagctgttgatgccattcttcatcagatgaagtatgagacttgcaggttccaagaaagtttgtttcttaacctgatgagacatttctccaggtctgatttgcatgataaagttatggagatgtttaacttgattcaagtgattgctcgtgtcaagccttctctcaatgccattagtacttgtttgaatctccttattgattcaggggaggttaatttgtcccggaaactactcttgtatgccaaacacaatcttggattgcagcaaatacttgcattt

SEQ ID NO: 36578 - DNA, 533 bp, Arabidopsis thaliana columbia
tcccccaaatcgtattactatgaaaaccctactaaggcctcaaatttacttgtttcacttaagattttatgtcgacttctgtagtggggaaggttggcaggtcctttttgtttcaaagatatttgttagtttttgttccttttcaagctttcaataatatactatcaaccatctatatctgctgcctgatatggattgggtttagtttcctattctgaatgtttgcccagtttttttgtttgaagtttgtcccagtattgattgctttgagtgtctaaaggatcttagtagtggtctaggaaggcttccaaacttcattctgaattctctactttagttgaatcatgatcactatagctacgtatctacttagtccacctttccacaataagaaaagctcactttcatattagttttctctggcattaaagttatggaggacatctttatatcctcctatgtttattattggttggtctcctttaactccatgtagcatgctatggggtctctttattctacattaaagagcg

SEQ ID NO: 36579 - DNA, 244 bp, Arabidopsis thaliana columbia
cgggtttctattgacgctgcacacaatagggtccagaactgtacttcacaggtcccgcagaggcattgttattgcagctctctgctcatctcttttgttccttttctttatccgtcatgtgaaatttcaagggaagcatcatggaattcgatgctcccagcagctggaactttgctgggtcgttgctgcttgcaaacaccggcttttcatgagtatcgtaaacaggagcaatggtgtcctatct

SEQ ID NO: 36580 - DNA, 484 bp, Arabidopsis thaliana columbia
taatcgtaaatgttttccattcacctaccataaacagttaattgattacttggagtaaaaaaaatcgatgacatacatgtaaaatatatgtaatatatctgggcatcagggcatgtatatattgataagattcgagcataaaactcccacacctaactcaaagtcatcatcaaacctataagatcttcacttcttttaatttccatgtcattaatttatctttaaaaggtaattatatttctatctttctgtttaattatgccctttcaatcatttgagttactagtttctactaactgcagtatctacttatattcttctgtaaaaatctcacaaaagtacaaaggaagaaggacggacgagaagagaaaccctaacatgcatatgggacaaaataaaccagtccagaaaaagtctccattatatgaagaaagtactatcatttttgcttcaagtcaaagtatgtttgtgtgtaatatatgta

SEQ ID NO: 36581 - DNA, 541 bp, Arabidopsis thaliana columbia
gtcacatcctttatgtaatgatttgagtaggtggctctttttcttttctcttaaggtttagatagatgactctgtgtgtttgtgttgtttcttttctgatttttggaattgtttggtcagctgcaccgtttaatctgaagcaaccgctagtttttgtcaattcaatggaagtgtatgctgtaactccctggaagacttgaagttgcagagacagtttaaagcattcaatgtatctggcagatgttctccacttctcaaatcattactttgctcggtaaggcaaaaacatatcaaaaacataatgtgattagattacttggatgctgtggttttgttcgtgatattttagaacctttctagcaatcagttgatgattccttctgtggttgcagaagtgtgatcctttcgcagcagagcttttccgcgttgagtcagaatctagacaagttcctgtgctctgcaactccacagtttcttctagtaaatcaacacaatcgctagccgacattgatttctgtgcacattttggaatgaatgcaga

SEQ ID NO: 36582 - DNA, 345 bp, Arabidopsis thaliana columbia
taataaattaaattacaaaagagactaccccgtttaataaaccttaaaaaacaaaaaagaacaccaacttgtctgatttttttttcgataacgatttcttctttgtttgttttaaacgacttgtctgaattttagtttttttttttttttttttttttggcctgtaaataggaaataacaaccaagttcacgtcggttccccgtcagacttcaaagttaacacgttaatcacgcaatggggacatatttgaaccagaattgtcaaccacacgctaggaatatcccccgtttacttaaaaaccggtttaaaccggttctactgctaataaactttttaatgggttt

SEQ ID NO: 36583 - DNA, 523 bp, Arabidopsis thaliana columbia
cgccagtgtgctctaaagatactagtgatcgatagttatgtttaggtgaattcctcttttctttagctagctaagtttatatttgcatgattcccttctgttttaggagttcacaatactattttctttctgatcaattgaaattgatttcagactttctccatctaacaagtatttgatgaaatgtctgaaccaactaattttagagatttgtagattctagcccaagacattggatgtttagactacttattgactttaatagattggtgtttaaagcctgctttgctatgtttcatcaatggaaatctagattaggaagtggtaaagttatgaagatcattgtcatggaagtggattgatctggttttgaatctattgtctagggataacttgattaagtttgttagttagctaatggatttagtattctgctcgttctgtttagttcttgtgcaaaattaattttagtcgcaaagtagtcataaagcgatagattacgactgttttacgactaatcact

SEQ ID NO: 36584 - DNA, 651 bp, Arabidopsis thaliana columbia
  unsure (1)..(651): unsure at all n locations
tcattttgtttctcgacgccgagcctcgccgtctcatcttaatcggctccaccgtgtattacatgtgtgactataacagagcaataagagaggatattttgaggccagaagtggtggatcttatggagaggtacgcagttgctgaatcagtctgtgtaagctttagtaacttggctaaggtgtttcttgacaagcatgttcatgcaaacacatgagattcatatgtaatgttaaggaaacaagcattgctgattttgattggctccttttgagatgaatgagaaaagagtttcagtttctttccgcattcagaactcggctcttaaattcttaatcactcaagattcttcttacacaaaactcctgggacagaaccaagcgctagaagacttgctgaagcaaacactagacagacgattataaatgaacaagtcatccgtcataaaacaacaaggcatctccaagacttgacagagaatcaacatctgaacaactgtatgtataactttcattccctgctctagacgctttaatgacttgtgcaattgaggttatgactctttgttttcttgcatctttacacgtntgtgtactgattagtagttgtgcagcaaaagagggtacagcaaagatgcagagatggtgtgagag

SEQ ID NO: 36585 - DNA, 587 bp, Arabidopsis thaliana columbia
atgatgtagaaaatatcatacattattagaaccaactcaatcaaacctaactcaaaataataattttgacatgactattcccactaaaactacatataagtgacaccggctaaagttttttaaaaattgtacggcataccaaaatcatggaggttgatatgatatgtgtagaatcatccgaaaaatatatatttgtgaatttacacaaatttatgggtcatcaacgtacgtctagacctctttcaaacaactttttatgattgcaaaatgttatttggttaatggatttcgtaacacaacaaatatctcatcaacgaacttcgtccaccacttgaatatgaaaccaagctggttttcttagtcccatatataactgaatttttcttccctagtcacacttttagcgatacgaggagcagtgacatcagtccgaaccgcgaccaagtgaaattacaaccttcaaaaccgttgctaaactgtgatttatttatttttttgggtaatggctatactgtgaattttatccagcagatcacagaatcttggcaacttatggggtacgaactagcttcccatggcagagtgac

SEQ ID NO: 36586 - DNA, 551 bp, Arabidopsis thaliana columbia
ttttcaaggatatactagtttgtaaaatttcataaggccaattttattttacaagtgccttgggactataggtagatagattcaggtacattagcaaatgcaaaatgagaattgatttatcaaacttttagtgaaatacacattttaatttattagtctattaaatatgtaagtatgatgacttcatgaaaaattaaaggagtagggcagagatatataatgttcaaagatataaccccacaagtcaattattacttagaagcattttgagttatacaatagaaatatattaagtatatatatgatcttcccatatttattgagtaagtaaaaagaaaaaaaatgatcttcccatatttatataaaattatttacatttaattttaattgaatatgcttttaatgttacaaaattataaccacagaaatagaaaaaattaataatgataaataaatgttgagaaaaaagaaagatagtaagaattaaatttaggataacaagaagttaaaaatctgtgtggacaaaaagaaaaaatctccatatttattag

SEQ ID NO: 36587 - DNA, 485 bp, Arabidopsis thaliana columbia
caataaccttgataataattatttttgtgttggctatgaacatgtcgatgtatgctccatgcacgacgtaaataacaagtacatataaacttcttatacctatctttaattgatttgattcagttaaggaaattatgaaatagctgtaactataattagtagttgacaacaatgagaggaaagttaaataaagtagtaccgttattggcagtataaaattgacctttctattagcttagcagcatcacgagtcaacagtccacttttcatgacaaacacaatcttgcataaaaattaacaccatcatgatttatgaactctataatacaagacaaatactgtgatttttcagtttatgtcgagttgcatttcctctctcttctctcatctctatcctttagagagaggaaacgatcgaagcttcttaatctgataacgattgccacttcagcatctgttgatcgtcacgatggcttctgaacaga

SEQ ID NO: 36588 - DNA, 617 bp, Arabidopsis thaliana columbia
cccctacaatttgtttgatacaaagagctctagaacacaaatctagatcattactctcacaaacccagacacatacgtcacaggcagttacaaacaaaatgcataaatcttctaaagaaagctaagtctcgatatatacacttcacacgtgtgacgtcttcttcagcgcacgtgctcctcagcaccatcttcattcgcacgtgcttcacgcctcttcctccttgtatacactattaagggcttgtcatcttctttgtcatcatatataaccttcgattagtgacgaagaagacctgcaatttctggcttaattctttcatcatttttttctggttttgatattagtagaaacgcttatatatttttgtttgcgtgatatggacagtaacatactttagttcggttggtttagagtttttagctctttcccacaggtgcatggttcgaatccgatagtaggatgatttttgtatttttgtctttaatacgaaaacgatgtcgtttactgtttgacggaagatgttgatgctgactttgtaccgttaaattgatctgttaattgactatacaatatatttcatttggtacagtcacaaaaattagtgatttaattgaaa

SEQ ID NO: 36589 - DNA, 590 bp, Arabidopsis thaliana columbia
gttttgtcatttcaagttgagtgtggattcacttctcttgtgtgattttctggcttaataacttttggattcaagttgttaaaaccgtgtgttgattgtggattcattcaacaaaccctccatctaccatctctatcatcattcatcaaccatcaaagcttcggacctttgcttccgttgataagatcattgggtggattcttgcgtttgcatcagtcttcatcgaaattactttttgttattataaacaacttatagttatcatatcacttatgtttttcttcttcaaactaagaaactctaaaccccaaattcatgtgaggatattgaattttaaaaacattagacaacgattatggtaagttgtcataatgatttttttaaacacttttactttctttctttatttaactgacaaatgttaactcttctgtaactttcgttagtatttcgatagtgttctgtatcttttaaagctgtacaaacaaaaaatttaatttggagagagtgttagtaaatataatttggaggtgtatatagtgctagtgaaatatatatacacaatgtcagtttgaaggttgaaaatatga

SEQ ID NO: 36590 - DNA, 497 bp, Arabidopsis thaliana columbia
tcagcctcaacctcgaatatataaatcattttttgataatgttctttcaaatttaaattaattattttaaaatcgcccattatcgtttaccctttttaattacgtatagtatatagattaatatatacttaaaatttttagtctgataatgaaaattccgaaacaacatttgtgtatgggttctatccgagtcttggcattgtattcgtactctatttcttaatttaaccaatctaacatatttacgaaaaagaaaaaactctacgagaaatagaacttagaatagatgctaaatttttataaatgacgacgtgacactaactccaattttgtttggacgaataaaagtagaagatgggaaattcatgtgttaagaggtgacgcacatgcacgagggtcgggccatattagactaaaagtaaaaaaaaaaaaagtttaaacgacttgccatgcaattaatttttgttctttttccctcaataaaatacataatattt

SEQ ID NO: 36591 - DNA, 469 bp, Arabidopsis thaliana columbia
taccgccaacaagttgctgataatctgaaccgcacaattcttggtcagttcttttttatttttacctccacgaaaatctctaccgtcctgtgaccttagcaaattacaagttttaactcattcttcaaattatgtagaacacacaaaccacccgagctacacaccaatggaaaggatcatacaacaggtgacagttgtgagacaatacttgactgaggagaatggcaaagtaatcgtagtatttcagtatttttactcatatatctgattcgttgtagaagccctgggaatagtaggtgcctgtgtttaaacgctatttcatgtcttatgataggatgcgtttccccattctctctgaaggattctctcaaaggctaagatcgcaggactactccaaagtttgctaggaggaggatatgctaagcattgtcatgtaaatacaaaaagaccttgctcctctctaaagttt

SEQ ID NO: 36592 - DNA, 526 bp, Arabidopsis thaliana columbia
ggaagcattatgcaacatttttctggagatctgtcaaaagcctactgttgtgcatcgaaagcaacccaaaacagcatcagagtcctcctgggagtttcttctcatcagcaaatttcataagacctactctaggtttcacaatggtattacttcaataaatcgtttagatctggaaggcattgtcccatttgattccaagatttgtagtgaagaaacactgggcagctcatgtgaactaatggtccagagtttagattgtctccatgcagtttatgagagcttgaagatggataatctacggaaacagtaagcacattggttttacaaagctttgtttcgtgctttttgcctgttttgcttacaaaatgattagctatctttgattggtaactacaaaatgctttgtttttcctcgtttcttaattggttctctcttgctgcatgaaagtatgaaattctgtaacataagttatgttgcatatgccttgatcaaacgtggcacaatagttgatctagccatagatgg

SEQ ID NO: 36593 - DNA, 509 bp, Arabidopsis thaliana columbia
ctttgaatgtgaaagaccaataaactaaatgacaatgggaacacaaacatagccaggtggagacacacttttacacctaatcgaagtttctcgaagccctcaagagcctgccaacgtctaccatctgtcttttttttttgctctcttttcaaaaatcaataacgttattcttttttggcaattcaataaagtatgtgaaaaagattcatttgaggtaaagaagttttcaatttcattatcctagaatatgttttataggaataggatataaagaaattccacaaaatccacctttaaaaaaaaaaactaataatgaaagtgttttcatttactttcttaaaactgactttcctattaagtagaggagaaatttgcacccattcaactaaattgtgtcacattttctctcaaaattaaaacaaaaacaaatctatatgtatttaaatgcgatttatagttattgagaaacaaagcaattttgtaaaactatcataagcattaatataaat

SEQ ID NO: 36594 - DNA, 622 bp, Arabidopsis thaliana columbia
tgaagttaatgtcaaattttgagggcacaaataaaagataaaacattgcatagtcatgtaatatattacagttgttgcagtttcttttgagcttccaactaactaactcgttgtactgaactttgttctggattgtacatttcagtatgagcacatggtgctgctagatctgattaagaagggccattctgagcctgaaaagaagattggaggaggaatcaaaaccttccaagtaagaacccacccaatgtggaaaagcagatgcttctttctggttagggaagacgatactgcagacgatttcagcttcaggaagtgtgttgatcaaatcctcccattgcctgaaaacatgaagactcctggagctaacggcaatggacatggtggaggtcgcggtggcggtggtggaagaagaggcggtcgtggtggtggtagaggagggagattcagaagatgaatatgctgacacttgatgccttatttcaaaagaaaattttgaaaatttcagatttagttcttttgccaaaaactttaaaagttatgatcttgtctaatgcaactgctttttgttggagacaaattgtcagtttatatacccattattgctgaagaagagaatatt

SEQ ID NO: 36595 - DNA, 598 bp, Arabidopsis thaliana columbia
tagaggataacggcagcttttatacgacaatgacaaggattcgttctcattactccatcccattttgtggtatgtaaaatcctaacttttttactgcattgatacaacattttattttagcattagatcaatacgatggacatatgtcatcaagtgagggggtagaagtttgcaactaatgtttttgtgctcatgaatcaatctcttctaggtaacattatttcactcttttctatagcgaatactgcaatgcttttacgttttaactaaacatgactaaaccaaataccaaaaaaaaaacgagtaacactttggtggttcctatctaagttgaccggatcactcgatttgataaaaaaaattatagtaaaagtttttgtttttgaatacaaattatatatttgactaaaattcgaaacttaaccgaaactaaaaccttagcagataatctatagtatagtagattcataaaccgaaaaaacaaaaatctaaacctaaactgagtaattactaatggtggatccttaaaacaaagccataatttgcaatttgcacaaatgtttttgtttggagtaaaaaccaaaaaaaaaatgatggg

SEQ ID NO: 36596 - DNA, 316 bp, Arabidopsis thaliana columbia
gtttctttatttttcgattcttaattagggtttttgtttctttgtttttgtcttctcagctctcaatccctaatctccgattctctccgccctcgaaccctaactctcccttctctgattctcaccgcctctacagtctcttccatctccaaggtaaaatcttcagacaaaaggttttgtttggaccctaatctctccgttctctcgattatctatctagttctagctagtatttctttattatttgattcttaattagggttttgtttcttagattttgtccgattcatattgaaacaacccgacgcatttgttt

SEQ ID NO: 36597 - DNA, 1016 bp, Arabidopsis thaliana columbia
tctcaacataaagagaaatagaaagaactgaacataaagaaaaatagaaagaactgacggactgatgaactgacaaactgacgaacgtacaagtttatggctttttcaaactcgaattgacaccaaagccaacatgaatgtttccttgtttaagaaaacctccacaatcgatgctaaatagagttgcgaatctactatccagattggtttgtatttaggtgagatgatgatcaaaaaagggattggtagattgtattttgatctacagcctttaagttattaaaatgaggagagcaatcaacggattcaaggaaatctgcagtgaatcgcaatcggcttagtcgagaagattttggcgaggcagagagagagacagaacattgtgtcttttttttttgttaaaattcaatagctaatcataacttgccacgttatcgcctctctcaaggcatactctttcaagaaatcgctcctcttcatattaatctgttttcatttatttatgttaccaaaaaatgagaaagcccatatttttagtttcctgtggaaaatccgtttttcttttagccgaacccaataactctttctctcagatagaagtgaataaatatttaatttttaatcaaaaaatttagatattaattactatcatatccccatccaaacctaacaactacacccaaaacaatggttcgtatctgagcctcttcatctgaacaatcttttattctttttttgaagaaaaaaataatcaaatccctgatatttcgagatatttccaattcgaattcttcttcttgtaaccgttaagcttttcgatatctctcccttctcctttaattcgaataaccgcagaattcgtaaccgcattgcctctttaattgttcaattgatcgatctgtgttctgctttctttgtcattgtctttaaattgttcaatcgatcgaagagaagtcggagaaagataatacctaagacaacgaaaggtttgggcaaagaaaaagaagagagagaag

SEQ ID NO: 36598 - DNA, 550 bp, Arabidopsis thaliana columbia
ataaataataaattaattgaaatatgagtgaaactcaaattatatgaagtctatgcaaatgaaagttaacttgaattattcttcatttaaatgatcaattatccttcatttaaactcaaatattaaaactggacttttaaatagtatctaacaattcacaaaaaatatctaggagatgtgaggataaaaagtttggcacattcttaaataatttaatataaatatgcaaactcaaatttaaaactcaacccaaaaactttttttaccactatcaaaattttgtagaaatatttaagaaatttgtatttgataatcagccaaactaaaaagataattgttgtgtgattacatgaacatggtacatcaatagaggagcaaaaccaaacacaaacaatctaaacaagatggactcctcaacacgaaacattaccaccaaatacatacaacttcgtcaaggaccttaaatttaagactactctatgccgaaacatagatagtagaaaacagagcaaggaacataatggcgagaggttagatagagtaaagttta

SEQ ID NO: 36599 - DNA, 690 bp, Arabidopsis thaliana columbia
aatacctgggtaataagcagataaaagactaaccttttgctctgttgatggacgaaccaaaatgatgacacgctgtcgtttgaagatatatctaaaacaggaataggatcctacaaaagcaaactgaaattcagtaatgttctcaagtgtaggtagtatcttgtgcagagtatataagccaaccttttccaaagcccaaccgccatggacagctaacgtaagatatacaggtctctgaatatctgctgaatatacatgagcactcttccttgaggatactacaccatgttgtctctcgagatatgtgccttcttttgtcttttcccacactgtgaatttgacaggacatggaagtctatattctagctttaaaggagaactaatagagattttcaatcataaactggtgtattgaggtctgtatgaagaactgacgcatctgctcctacactgagccataatggcttactcccagtagaaggctggcagcagaaaagcatatccttcttctcaagctggtttaatctcaaaaaaaatgtagatgccctgctgcttatgttgattgtattctgccgagtcagtaaaccttgatcaacaaatggttgatcttttccgcaaccagaactcactgcgatgcaataaccccatgcataagaatgatgagagttttcaacctttggccggatatgc

SEQ ID NO: 36600 - DNA, 437 bp, Arabidopsis thaliana columbia
ctagttgttggagcatgatcccctagatacacctagaaacctagaatctatcaaaatcattcgagattttgccagatctccagataacaacgaacacagagaagattaagtccacaaaacgaaacgaaaacatgaacgagcaacagagagacgatttcgtcgaactatgagcaaaagagagactagatccgtagcttaccgagaggattttggaattagggatttgtcgaattcgaaggtcgagacgcgaaatgagggggaagtgagaaattaggggaaaaaaaaggaagaagagatgggctttgattttcagagaaagtaaagagaaaaataaggcccagtaatagtatgacaagtgtctaacggtgttgacccgttaaagactttaatgatcgtggaaaataaataatttaattgggccttgactccgttactag

SEQ ID NO: 36601 - DNA, 533 bp, Arabidopsis thaliana columbia
tttgagtaatagaaaagtagtggacatacgaaactcattcaagaccagctagccctaacggctagtaggtgaaagtcggctattctctgtcatagatcgcgtactcagttgccctaacagctagtaggtgctaacatggtttccagatacaagatcaaagaattaagttcaagttcgattctagttcataagtccctatcactcggcatgcgtgcaacggttatagttcgatattcagttgagctaggtcaagcaattatacaagattctgccaagtataaaatacctaagatcatgtactaggtggcgttccggacatacatgcattaagatttaactcaactagaaataatagtgtaaacgatcaaacaaaactatagaaagcgcgaacctaaacgtgatctaaagtccccatgaatgcccttcggaagccctaaaacctaactagagatctactcacacattctcaaagaacccacatcatatgaataggaaattgcatgaaagagtatgagtatgaaagggtttagaga

SEQ ID NO: 36602 - DNA, 520 bp, Arabidopsis thaliana columbia
tgaactcaaccctttttctcttctaaactcatcccatcccatagaataagtaccacctagtcctatctagtccggatagcgcgaactagaactacatgagatactatctttgtcgttacaaacctaacactttctaccaagcttaatcgaaaatagacctcacaaacactcacaagtggtatatggcttgaaagaaggcttaggttagggtatggggaaactgctctaaaagtgagagacagctatttggatcaacaagagtggtgaaacgaataagaagatccacatattttaagggtaaccatgagtttaacaagcgatgcgtagtatgataattaagagtcacatttatggttcaaattgatagggaatagcttcaaatcacagcaagttttgactaaggagagatcaagtatatgacttctaaagacggtgcggttttacgatcaagatcaatcggttaagcactagtctgctaacatcccagggtattgagactatctagtgaacattgcaaatt

SEQ ID NO: 36603 - DNA, 494 bp, Arabidopsis thaliana columbia
tttatctagaaatttgaaggataccatttatttttttttggacaaagaaggatagccatttaatactacacttcaatgttggattaactaacttattatgcctatttaatggtctaaactttagataacatctacaacaattcaattatgcctttttttggggattgtataaagtttgaacctatggttagtgtattgacttgcgcgtctctttgcaacggttttatcttgttgctgtaagctattctttgaaaacacattaatgataaataaattgaaaagtatagagatggcaattgtttcaaaagctaatctttctgtttgataatactttacatgaaaaacaaaaaattaagaatagtttcaaacaatacaacttgtttaccttgtcctaacaaattcaactcaaatgacatgtgtttgctttaaaatagtaacaactgtaaattcatttgctcttgaaacataagtgcaagctaaagataaacgcaaac

SEQ ID NO: 36604 - DNA, 643 bp, Arabidopsis thaliana columbia
ccattgtaacctttacaacgattcaattcctattaacttacttagaagccaaaaactggacaatataagaaaaacaaagacaagtggtgcagttgaaatatgtgagctacctattgagttatgtgcttgacttggtccggtgtcagcaggattacgaacatcctcactcccacaccagccaaaacagctcattataatacacccttttctcacacgagctaacttaactgtaatagtacagaagacaaaatgtgacaaaaggtataaaaaaagggtttgatagcaccttaagcttctatctcctacttatgaaagtgtaagataatatagacaacaaacagttttgaaaacaagatttgcctatctaagacaaagagaagagagtaaaatggtaagatcaatgatcttatctctctttattactcaagcaattaaattgtcaaacacgaacaactgagacattatgttccctaaacctagaattttcataagtcaacgagatataacatagggatacggatttcaaacatgaaaagttagaaacaatcaactcctttctaaccctcgaaaggaagatcctttttgaaaaggttgtctgatatttaagcaaagtacgaaaagggaaactcgcacagaggaagag

SEQ ID NO: 36605 - DNA, 420 bp, Arabidopsis thaliana columbia
gctattgtaggattcgtttaggctgccacatgaataaagaaagcttacaagttgaaaccaaaataagcaataaacactagtgatatattaactgcattagtacgatctccttaagaaattaacaagctgtcttgtagactttatcgaatctgtgcgcgggtcacatattttaaccattccgtggctgaaaatgtatttagctctgtctctatagggtgaactaaaagtattaaaagctctctcatgtaagtaagtatatcaagaagaagaggaccaatgacctgaaacacacaattataaaacccctaatgaagcattcatctgtatttagtaatcctgatattgatatgtaagtctcaatatactattgtgctaatcaaagcaacattgcaaatatgcaaatgagatgggtgtgtgtgt

SEQ ID NO: 36606 - DNA, 497 bp, Arabidopsis thaliana columbia
tgctatcagaccagttaaggttcatgcctaaagtacaatcaggtgtgcctcatattatatgcgagatatgaacaaacattcaaggaaatttaattcatagaaagggtgcaagcataatcgatacaggattgtacaacaatgtgggtttagccagaggagtcagttgccattgatcacacccgtgtgtttcacatcagtgacgatattcttttggaaaaatgtaaaatcaaacggctaaaagtctatcacacctttgaacttcaatatcaaagacagaaaaataaaaatgtataatggatgaatcaaatggctaagagtctatcaaattgacagagatccgaagacatggatcaatatttgtcctatgagatcagatcatagctgctatgatctatactggaaatgattatgcaaaatctacgaattaaaaagcaaaatttgtgtaaggtctcttacattctttacatgattgccttctgagcccaatatgatcccgg

SEQ ID NO: 36607 - DNA, 582 bp, Arabidopsis thaliana columbia
ggaactaaggttagataagtttcttttaccagagatatgtcgtgactcctctttgaatatcttaaccttgttttttactgcaaagtcatcagtgtttctaggcatgatatagttcttatgttcatcactaacacacgggcatacgtgaaacaaaccaaggacacttaacttagctcgagtattatgaatggctttatgataaatgtagctgtttcaatgatctcaattaactagaataagtatgtatcttgaaacttattgcttcttcaaaactaatatgagtccagctggtttactgacttatatcgatcaacttgcattctttgctatggttcataatattgctttagcaggattactatatcatgcagcaatcactttgttatgtcgttttggagctaaatcatcttgatattacactggtcatatttctggatttttatttttttttgtgaataatgtaattagtatatttccttcaatcaagcactagcttggggttgaatcatatattggttttggtgaattaaattactctaagctgtgtttgttaattacggtggtcactgctatgatcttttg

SEQ ID NO: 36608 - DNA, 456 bp, Arabidopsis thaliana columbia
ccgatatcaggaccaaacatgttcgacttcttcttcttctttgtgttccctttgatttgtctctctttcgtaatcgtcgccggtgtctcagtttccgcttttgctttgcattggattcgattaaatgctttcgtcggagcccaatcttgattctctctctcgcctcaagtttttagggtttctttaaatccaatttcatcgattatttgctgtgtgatgcggcggtgtcttttgaaatcgattataatgctgtgtgatgcagcttcgagagaagaatttattaggtcttacggtgaaataagttacttcacccaaaatcttcactttacacgcttctcagcttttttggtcaattttggcatatttgtattcatagattgggcatttgcaattgcttgtatctgatgatcaatctcataaatgtgttacagacaagaaacaatgtctgggctgctg

SEQ ID NO: 36609 - DNA, 575 bp, Arabidopsis thaliana columbia
tatgtgtgggtgtgtgtgcgcgacatagacatataagtatattatataagcagcattgatgtatgtttgtatcatgattaggtccacaaaagtgtcaataccatcattaatgtcaatataaatggtaacacgtccccaccatataatgcctacaaatctacattaggtgcacatacataacaatttgcgtatatgtgtgagttcttgtcgattcatttaattattcttctataaactatttccaatagatggtagtgatatatgatatcatgtcaacattattggtaattttctttacaaaaaatgattaaagaaaacacacaaactgctaactttagtataaaatcatcacccaaactcttctttaacaaacgtaatcattttcttaagaagattagaaacactaatcatacgatttactttttctttttgtcaacataatcatatgattttctaaaattatattttgaagacttttttttggtgtttggcccgagtcatttatatttctttctcttttgagtgtgatttaataatcatgagaaaaaagtctaaccaactttgaaatagtgaga

SEQ ID NO: 36610 - DNA, 556 bp, Arabidopsis thaliana columbia
tatcaaaagtgattgagatgcaaaacagtagttttcaagatgacatatggaccaaaagtttttaacatttatatttggagtatttcggattttacaacttaatgtgaattttcttgaagactcatattcacaagccttaattttcgaattgaggaataaacattcagagaaagttgattcgcgagcaagaaatttgtccaatttgattgctgactcggatttgaaaacattgaccaaaggctaagaaaagaaggaagagaggaagagtcttcagatacagactcaggtagcaaagttcttgtcttagctcagaaacttaaaaagagagctaaaaaagacctcttaaaagctaagaaagaaaaaaatttgctaaatcaaaagaaaaaaaaaaagatatagaaaacaccaaaacactggtttcatacaatacctttccctacccgttatgatcattctctctgtaaatctccttcatgcttaagccttcaacttcatagcttcatctctttggtaatttgttagatggacacacacacacacgcaagtcgacaaaaac

SEQ ID NO: 36611 - DNA, 814 bp, Arabidopsis thaliana columbia
ttcattgaaaagagatttaactatgcaaaatgatagatgaagaagatatgtaattatgtaaacaccaaaatccaaaacttgtatgtttattccctctaaacaaccacttcacagtattgttacaatgccaaaatgatgagcagaaaagatactgaaagcaaaacttacaagcatatctggcaaaggaatctttattttcgtgagcattatttcacagttatttgctcttcgcaggtcaacctaatacaaacacagaaaaaaaaaagggggttagaactgaaagataagcaaactaagaggcaagaacgtaatcatttattatagttatagagtatccatttgagagaataaatgatgtttgcaatgtctatcaattgtcaacttcttctagcaaccgaagttaactttagatcatcgaagaatccatctggttaatgtacactatatagctgtaggtgatacctacttaatagatccactcttggtaatatttggtttaccaaactgtcatttatatatatagatgttatatgtgtacagaggtgaaattgagctgcctcaccaattgaactttctcaggtttgctgatactagaaccccggcgacctgtgctcttcttagctgtggtatctgaaactgcagaaaaaagactctcgagctctgatatatctatttctggggccctgtcatgaagattcgtaaaattcatcggattagttcaacaaaaatagtactttatgggaaacaggtaaaatcgcaagacagaactgtatagacaattcatttttgtttcataattgttatcagtgaatta

SEQ ID NO: 36612 - DNA, 510 bp, Arabidopsis thaliana columbia
tgtgctcttaagtagtaccgcatggccctcacaaccgcgcatcttgagaaagaattttatcatgttcacgcgcacacagtacaagttcttgagaccgaacgtgcccgagtgcagcgcaaggagcaattacttcttcgtattgagaacgaaaatttgcaattgcaattaaaccaggcaggtctggacctgaaccaggccaaagaggcagagtccggcatccgtcttgagctcgaccgcgccatcagggaacttgatcttctacaacatgtcgcccatgcgtcgtcccgcgagatagataacctccgtgtatgtgatgcatgcgccatgttttgcgacttgacctcctgacactttccatagcatgaacttgcctcgctgagcgcaattgcttctgatacccagaaactacaagcagaaaaagttcgcttaactaaagaagtatcgagcatacggtccgaagtcgacgaactcaggtctcaaaacacttcggccaacgcactccttgcagag

SEQ ID NO: 36613 - DNA, 318 bp, Arabidopsis thaliana columbia
taaatgtgtgactacttgccagtctttatcattctctttaactgtatctgagacagtagagtctgggtctcctcgaaaaccacttcttttggcctgtttgcatcaatctgtggacgaatgagatgataccgaaccacaagtatcaaagatggcattgcaatactttaataaccagaggagtagagaaaccaataaaggattgcctaataccttgaccataagatctgagtttgctgaaataatctcgtcagtatcttgtttgtatcactgcagccgtgcttttaccttcatacgagtaaacttgtgcgtttacaattg

SEQ ID NO: 36614 - DNA, 464 bp, Arabidopsis thaliana columbia
acccttcattttagcttttgcttttagttttttttttcatctttgcttttagtttagaaacaaaggcgaaccataccagcaacttttgaatcttaatttttaattatatttttctttagaaagaaattttcgagagtaattttgtaaatttatgtaaaactatttccattggggtttttcataatagttttttacaattcaatgagatataaataatgaaaatgagagagagagagtgtgaaaagtttctcacttgagaaattctgagatattctgtacaacccatcattacatttctctttctactattgattcgattttttaactaaaataaaattttaatcatataattaaattataataaaatattaacccctcaatgttcgagaaacggtgggtttctcttggatggagatgccctaatgggcttatcaggtttcaataaactcatgggcctccagttt

SEQ ID NO: 36615 - DNA, 578 bp, Arabidopsis thaliana columbia
gaactatcaccaatacttgaatattgatataactatatggttgaaaaattcgcaaaacattcaacagcagcccctagattttaattttttgaactgcacccaaagggacaagacagcaaacaaaggagagcaacactacgaaacagaactatcaccaataggcaataagtaaggaaaacgaaacagaaaaacagaggccaagtcaagacaaaggaacgagcagatagcgaaaccttgaaggagggtaatggtcttgctttacttaagcaattgttctgcctcgaaatttaaatgtgtattcaagtaatcagatgctaatttggatatttaagaagaaatacttgtttattttacagtatattcttttaaagaaacaaagatgaaatgagtataaattttacaacttcttcacaaatgtatagtaacatcgagaagctaattcttcaagcttcacttaaatatgtagctaatgcgcacaaatgtatttgtgggcgctagtaagtagtaacctcacgtcctcttattcctgctcccaaacagcaaggcgaagtaaaataagatcctaaagaagagacctg

SEQ ID NO: 36616 - DNA, 515 bp, Arabidopsis thaliana columbia
tgatattatcacagatataggcgaaaaaccaatgcaggtcctcatggagaagcgagaaggcgttcttgttaagtccagtgcagtgcaggactaatgtaactagcctaggggtgatgcagggaagtgtagctttgccagctcagtaatagacctcatcggttagttgagagctgaaggtttaagaagctgattggtctagataatttgggggcattggggagaaagaagagttgtacagaaattactctctcgtttgctctaattctgtttcagtctcttcttacgtttggtcattgatttatctttgtaccagtttctcaaggatcaataaagagggcaatgagtttctgaacctaacaaaaggctaaatatgaaagtttctttacaatgcaattctaaagtctaaaccattctagtcatggagaaatcgccagaccgataaagcttaacgcggctttatctcattgcataaatgaatatcatcaatacatgtaaagcagagtaagagcatagac

SEQ ID NO: 36617 - DNA, 544 bp, Arabidopsis thaliana columbia
caatcgctaacaaagaggaaattcatgtactttttagctcggcggtttccaattcttctgcctttcttctaccgtagatcttttctctctggaacctcgatcagctcgatcagtggatggcattgtcattaggagaaaaggtactaaatctcctccattgtagatcacaaacacaaagagaggagttctctaggagaaggagtcatcatatctgctaactctgttttcatctttcaggataaacttttaatcaaagatccaacgtttcaagaagtttatcaaaggaacgtggaggaatcagtccgtcaaggaatcacaaaaccatttgtagaagaagccgtgcttcaagtatcgaattggggctttactctttcggaattccgcacacagaagaaatgtgcaaccaacggtgtcctttcttggctcatgtcaatgtacagtgaagccgaatgtgaactaatcggatttcgaaaacccattcacatatggcaggtgagttctgcaccatacaatgcatcagttagtttgtttagtaaagttaatc

SEQ ID NO: 36618 - DNA, 429 bp, Arabidopsis thaliana columbia
gatgtgctaagtggtactatttcggagctctctttcatctatatccttttcatcttcatgtgaatttggacaaaggtgtagttccattctctagtgccattaatatgggtgacaccgctcttagcctgaagtgtcttgggggctctgaaaaccaattttgttccgatgtatctagtttcactgatgatggctgccggttagtcctcggattgggtccaacgtcgacttcatactgttttagtgtcggcgttaataacagcaacaaagattctgcttctggatttactcaagctgattcagttctgcaacttggtcgtcctgctgtaagcatagacactttcagtggagttgataatggtggtgtgatcctgttgttgatgaaggttcttcttcagctaagagatcaggtggatacatagcatcgctttt

SEQ ID NO: 36619 - DNA, 446 bp, Arabidopsis thaliana columbia
ctctagacaatccctcactggtaacctacactgattacaaaactaagcagatcaatctaattgaaaacctgtgatatattcctctaaacaacctaaaagagcaattagattaagcacaacgtcgattagcctccaaagagaagacccatttcgcagaaatgatagtacagagagaccattgaaacgtaccagttaacgacgaccaagaaccctagccaggtgaaaaaagtttacgcctttttcagtcttcagagcatcgtgttcgagagtcacccctccctatttttggacggtctggatctgatcataactgtttacacacaaactgggccgatgaaggttatttaaaataatgggcccaatgtataattattttcccaggctagcccaataagttatgttaccgcctccaataaaatatagctgcggagagtgaaccgaagaac

SEQ ID NO: 36620 - DNA, 420 bp, Arabidopsis thaliana columbia
  unsure (1)..(420): unsure at all n locations
actcgatccccgcattgaagtgtaaacgaaaaactggaggaagaattcagcatttttctatgttaaaacagctaccttaaatataatgtaacactaccgacaaaaaaaaatattatgtaaaacttgagaatctgacaagataaagaaagaaaagataatgcaaactcaagaaactattgtcgtgttcgtgtagatttgaacttgcatgagcgcaaccaacgtagatattcgtagcttgtgacacgtatctacgtattacacgtggtgataaccagtagtcgttaaattagatcggagagcatataaaccattaagccaaataagtttatagtttgataagaaaagtaagaagaagaagaaagaagatgcagtcggcgaaggaanagatcagtgacacggccagtacggcaaggagaaact

SEQ ID NO: 36621 - DNA, 486 bp, Arabidopsis thaliana columbia
caaagcattcaagtactcaggcgcatatgaaacatatgaaaagtaaaatgcttcaatagtagagacagacatgccttggaaccttggtgggtaaaaaaaacatacttgaatggcttcataatgaagcaaaataatgagagaacatgagaagcatcatcatcaaaagccaacacttcaaaaagaaaaaaatggatatggatatccatgggaataaccccatcaaagcatcttctcctttttcttcaagcactcaaatgtcaaaaaggtcaccacttttattaaaactcatatatatacactgagccattagtccatgaataaccaaccagccttctctcaaagcaaaccaaaaagaaaaaccaacattgaaagaggaagttacgataagcggacgagtaatagggcatctttctattggcaggcgacttggctatttgtatcttttgtgttcttgactattggctatgtcacttgccaaaggagagt

SEQ ID NO: 36622 - DNA, 572 bp, Arabidopsis thaliana columbia
taaaagaattcagcagtctttttttgttttttttttctttttgtgcacaaagaattcagcagtctaaggtggttaggtcttaggtgggtctctattataattacgctacaagaaggatactgacgtctttattttcgtctcctttcgtttgaaaaaataaaggaaaagcaaagaaaacaaagttgctctgactattttttctttgtatatgagagaaagaaaacaaagttgcatttgtttaaactctcaattattactcacgtagaaagaatgtatgcatatagagaaattattacgtagttatacaaagtcttttatatatgacatgtctctggataattatttgtttgctatccattcgttggcttatcacgttagatggttataaggcagtcgctacaactaggcagcgaaactgctttgatcaccatctattgtttttttttgtccataatttgattaaagaaatgagaatatagcaacaaatgattgcatttttagttgaaattacaatacaatcattgcaatcgcacatcctaaaaaactaattgaaattaatatcgatataagga

SEQ ID NO: 36623 - DNA, 472 bp, Arabidopsis thaliana columbia
ctggacactgcataagcagcagaaatgtgtacttgaaaggttcacaccttaagatttcatgccgaccaatcgtgtcggcccaccaacactttaaagctctttaacccaattccgcgttctttcagaagaacaatttcagcattcaactttttgaccttccattttctttttcttcatttttttacatttgattttctccccataaagtttaattttatcattgtttatgtcttttgtcttttttatgtctttcctcgagtaacactgtccgaaaataacaactcttaatcgtgcgcagtcacataatttaggaataacaaagtcatcctttataatttcattactagaattttgaaaagaaaattaagagactactaagttttactcctagtttgactgaccatatttgtcgattaatttatagaacatgttgtttgtctgtttttaacgggtaactggtgactaaacagaa

SEQ ID NO: 36624 - DNA, 404 bp, Arabidopsis thaliana columbia
  unsure (1)..(404): unsure at all n locations
cgattacaaatatatgatattatactgtctatctaactctgaatctgtggttcttatgaatgttatttatgtttgacatggctgtaatggaactgaaataagaaaccggtagttcagagctggtttaatgaagtagattgttttttgtaggcgagtctaaggacttcagaactccatcatcttgttcaataaagtaaattttttcttgtaggcaagtttaagacatcaaataagaagagaaagatggacatgacctctaagaaagagaacaaaattgaagatgaggaagatgtntatcagatttcttcaggcgatgaggattgcacaaggggaatgaacagtatggatgaaacaaaaatgattactgtttcctccattattagctagctgcatatgattagata

SEQ ID NO: 36625 - DNA, 568 bp, Arabidopsis thaliana columbia
caaacagttttgaaattattttatcaatgatgattgaattaattttccaaaaacataagaaatagtttttgttccttttctccatataccttgtgtaagaatgaaaacaaaaaaggaatgaataagaggatcaggattcaggacagaaaaagagaagaagagagaatcaaaagtgtggtttgatctttgggtctcatttagacgtgtgaaataaatacttcactaagacaaagatttaatagtttaccctcactaaagaaagtaactaaataactaaaatattttgtaatcattgatcaatgtgtgattagagatggacacgaagagttcaacttaagatgtctactaaacctattaacctaacatacacttgtagtataaaatatagtaacaggaacggtcgaaactccagaggtacaaaacatgtctttaaaaactgatttaagttaattaactacattattaaatgatttctatgtcaagtacctgttgctaaatgcactgccactaattataatctattacgtctaacaattagtagtaccaagagtcaagagacatgattctg

SEQ ID NO: 36626 - DNA, 460 bp, Arabidopsis thaliana columbia
cacatgatagcttgctgtttaatcactatgagatctggttcgggtttagacggtttaaaacataaagccgccagttgaagtattatcttgagtgtgtttcgcttttctctacacgccattgctctccattgtctgtagattggatcaagacttgaagaaggttcagaagttgttttggtgaacaaaaggaaagaatctctacaaaagctgtggattagaaagtttgttctgtatcagttactttaatttttgtgtttgtggtcagagagatacatgtattgttaatatacagtagtagccaaatgatataagagatgaggctagattcttttgtttgtaaccaaagacaaattctttttcatatcttaaaatttgttactacttgtttgtttgccagtaatttgacataatctcaacaataatacggcaaaaaaaaagaaaatttcacctgatattagca

SEQ ID NO: 36627 - DNA, 508 bp, Arabidopsis thaliana columbia
ggattgtccactgactagcttatctttttcgttttcctcttcactctgtaatgagcttataggatgctgtaaaaagattaagaagaatcactaaatcaaattacaaaacagtcagacaaagttttgttgtcatcatcaacaaagacactaaatgatttgattacctgatactttttcgaacttgtccgagagttaaaagatctgaacttctctgcacgttggcgggtacttgatatcgaatcctgcctcttcatggaagcagcagaaaacttagccttcatctcggttctactttggtcaagagcttcttgcattgacttcaacttactttcttttgaactccattcttctcttagttttgcatccctcttcttcatatactcttcatacaactttcctttagaatcatctgaaaatcttaactcagataagttcctccgcattacaacattcccgttgtctttatcgttaccagctgattgatctcctggaagaatccgtagttgat

SEQ ID NO: 36628 - DNA, 525 bp, Arabidopsis thaliana columbia
ataaattggccccattacttggcaccattagcgatacccacgaggatcactgcgtactcacacccaccggttgttataacttataactcaattttgatatgactacttaatactatatcttatttcaatcatcgaattaaatcaattgaatgtttagactttagggactttccttctgcagattagtatagactcatactaatgaatgtatctcttgtgattaaaaaaagaaaaaattcaactgaatttgactatagaatttattttgaactgaaaattatgagtcactaaccaaacggtcgattcatcaacgtaaattcaaaatgtatattgtttttcgttttaatatagtaatgaaaaattaactaagaaccaatcatatattaaccaattcaaaggcgacgtgatacaaaaaaaaaaaaaaaagtattaactacaaacaaagaccatatagatgatgaagctcacaaaaagttgcttgatctctactttgtccaagcaatcaaaccaaggacaagcttcaaa

SEQ ID NO: 36629 - DNA, 131 bp, Arabidopsis thaliana columbia
  unsure (1)..(131): unsure at all n locations
ggctcctcctacctgctgccctgggcggacaacggtagctcccagggcagcccccgcctagtactactacaaccccgcgggcgggangtccacctggaccctgtccaacagctacaaggaccagacctccc

SEQ ID NO: 36630 - DNA, 596 bp, Arabidopsis thaliana columbia
accgtaccattcaacattttttcttcgtatttatatatagaatttggtttacactttaccaatctcaaaattataatttcactccaaacctaagagcttataatatggtttttgttgtttaaaaagagcttaatattattggttataagactcttcactatatgatttttacgtatgagtgcgttggcggaaagatatataaactataaagagaaggtgattaataaggtaccgatactatatattatcatatcttaaacatgttaagacacaagtatacaacataacaaagcaaaagattacaaagccatcaagacaaacaaagacaaggtaaatatcagcttagatagccgtcttattttacgtatacgaaaccatactcttcaggcaaatgatgtcgttatccccacttcacttgatgctgcaacaatacaaacgatcaagagtataaattacatcactagaaagattaagtcatcgtctcaagatcgagaaattagccaagttaaaaaaaaatattagagagaatatgagcagtactgctcaattaaaaacttacgtggcgcagttggtgctcgtggagatgggatagggga

SEQ ID NO: 36631 - DNA, 1176 bp, Arabidopsis thaliana
taggcatatttgataacttaattaagaatatagtatcatatacatataaattaagaaagtagcatataagggttgtaaaaagacagttttggtgtggaatagttggtgagagatgatttagtaacactttatttagttttcacccatttttatgtttttgttatatatcttttccaaaaaatagattctaattctaaaatttatgagataaaatttatgtttttcttctacatacaacatagtttaaattttaaaaatcggatttgtatttataaaatagtaaataatgtttgtaagtaaatttatattgtactatttatgatgtatagaaataaaatgttgtactatactattttcataaattattcgtaattcaattttaagtttagaatagaacaaaatattttaaattaaataaagtaatagtggtggtagtggtggtgggatagtagtttaggttgcaatattagctacgataatcgtaaaagataaaacatagacgatttaaattaccgagttaaagcgatatgatccccattaaaaaactataccataagagatacaatattggaaacccaaacaagcaagttaactgttgtagtgacggcaatacgattgtagtgacgacaatacggttatagcagtgagccactgataaggataatggtgacttggtagtagaggtaatggtgtaataatatatatgataattgtattatgaattttattatgtgtaatatttttttttgttagaatagaatagaaagtacatatagaaaaaaatagaagtaagagacattaagagagagagataaagagagagagaaaggggagagagagaaagagagagagggggagagggggagagaaagagagaaagagagaggaagggagggagagagagaaagagagagagagggaagagagagagagggaaagagaaagaaagaggaagggggcaaaattgtgattaatacacaaaatatgaagaatatcatctcttttttgttttgatgcatactttcttgattatgatttttttgtgtgttagatctgcaaatttcgctttctatttctaactatagtgacgcaataatattatttaccagaaaccaaaaagttgaacaaagggtgatgattcaataatcctatgaatttgttggatggtgatttgca

SEQ ID NO: 36632 - DNA, 630 bp, Arabidopsis thaliana columbia
tttaatttaaaacccaattttccatactattttttttttttaaaaacttcttaaaaataatttcataggttgatgagataccaaacgcatcttaatattttctccttaatttactttggttatgtctttctatgataaaactactatttacgtacatatgcacatacacatataaactatatgctctatatcatatggattacgcatgcgtgtgtatgtataaatataaaggcatcgtcacgcttcaagtttgtctcttttatattaaactgagagttttcctctcaaactttaccttttcttcttcgatcctagctcttaagaaccctaataattcattgatcaaaataatggcgattttgccggaaaactcttcaaacttggatcttactatctccgttccaggcttctcttcatcccctctctccggtaagctttacacaagacacatatatacatgcttcaatatgattaaagaaactactatatgaaccaaccaagtatatatttatgatgaggcttgtgtttggattctatgtttcttttggtggatgatctgattatcttatttcgtttttacaaacaaaatctctaaacagatattgacaatcataaaaatataattagttt

SEQ ID NO: 36633 - DNA, 457 bp, Arabidopsis thaliana columbia
cataagataacaagtaacataatcggttaagacacgtttgagttgacgaaagtaccctttttaccttcacataagcatcaacgattctataaagcaaatcgtgacgcgggaaccgatgctgcacggcgtcacgattgacgttaaaatcgccggcgggaagtttaacagcttcttctagaaactcgttaacgcaatcaccgtctccgatttccatcaaagcttctacacaacgtccgatcagaaacgccgtcgtttcagactccggaagaagaagaaggcacgaacggagaacgatctgaatgtaatcaacgtttacgaagacgactcgtcggagataagactccgtcaagttcctcaagctatctctaactcttcgtccgtcgtcagcttccgtaatcagaagaacctccacggcgattctcaacgaaacgacattggacgggcgtaactcaatgtg

SEQ ID NO: 36634 - DNA, 488 bp, Arabidopsis thaliana columbia
ggttagagaagatatggattaataaatatgcatcacatgatttgtcaatatggttagccccttgagcgatcatcacatggccaatcaataatcatgccaattaattgaaaaagataggtctatggtgatttcccacaaattctcttagttttatttgtttagttggaatttttcaacgacataagcatgctcttttttcaacttgaatggcgtaaataatcctataattagtatttgactatttgtatagcaaatatcattaaacacatatagtatacctccacaaaatcaataccattggcattttctatagatacaagaatgtattggctggctctgtatcatcatgtctacgtagacagagatgtatcatgtcgactaaacaaaaattacatttccacgtataagatttacttatagtagtaactagtaataagtttccaagtaaaaacagacacatttaactaaattattattctaaaacattt

SEQ ID NO: 36635 - DNA, 666 bp, Arabidopsis thaliana columbia
tactaatacgatttcaccggtggaaacagatttattatcaatattataaaaagtttcaaacaataaataaacattaaaattaatagtaaaatattattaatggttctctatgagtacaactatgtgtatgctctcatgcgctttccttcctcatcctatggtttgtctttcatctcccattttgcatatgtaagaataatcttagaggctaaaagaaaaaagaatgggctcaacgtgagaataagaaagcccacattaaaagaggtctattaaagcccatatttgatccgttatttatttgtagccttttgaatcttctactttacatttcccttccttgacattaatgattaaaccagtgatacccgaacccgacaccgaatccgattcaaaatccgccggggacgcagctactccctccgccaaatagctttcaacggtaaattttcacggcgccggttgtcttccttctttgttcttctcaggaatcgctaattgataacttcaattggaagatacaagacaaaaaaagaagatcaatatgggaaacggtattaagcagctcgatcttactgatttttgcttagtttacttgccaacaaaagtatgcaatactgtgaagtctgttgtcaggtgaagaggagactacaagagatgaagtatggt

SEQ ID NO: 36636 - DNA, 557 bp, Arabidopsis thaliana columbia
ctagctatatgtctctctataaattaaactatgaacagattttctttatctaaacatttactctgttctgttcactccctagtcagttggagttgcaggaaacaaaacaaggaacagaattcttttttctttttttgtgtgtgcaagtcaaatgaaagttaagtctttcagtgtgtatcaaagcaccaaaccgcaaactaaacattccatgaaagtaagtcgttaaagcaaaactacagtaagtatctgatatccatataagcagagagggttactttaaagctaagctaatctcagtttttggttttatattacaatacaaactgcaagtaacacttgagatccaagttataaccaacatggcgagttcaaacttaaaacataaagaagatgagtaagctcaagtgtattatcgtatactttacacaacccaaccagaatagtaacaaagaacactaactcgtcttcacaactgtcttttatatgtaatgtatgtgtttggaaaagaaaagaagtatgtatatcgcttggaaattgcacatcccgtcaaagaagtg

SEQ ID NO: 36637 - DNA, 501 bp, Arabidopsis thaliana columbia
tgagtttgtagtgttcaacttcgtgtatttaaactattaatttattgataatagttttgtcaataagatattcctacttattggatctccgtcctatagcgtccaccatcttaactaatacattgatctataatttgttttcccaattgaccaattaactaaagtaccatcactattagtttattattatcggtttgttacacttgacaatatgataaaatcactaaactccaactagtaacattaaaaattatttagcgcaacatcaatatttaacatttagctagtacactagctaatcctacaaaatgtaagagttcaaaatcacaagttcgaacacaaacggtagagagattgactaataacctgatttgtttccgatccggaagaattatacatttaaggtctggttagaaaagacatatattattttgcaataaattttaactagaaatataagatagaatgactaacttgggtcagcactgatagtgatagcag

SEQ ID NO: 36638 - DNA, 285 bp, Arabidopsis thaliana columbia
cgcctgcagagcctactactgcttcatctcctgagttctcttgtctggtttcagcactaaccgattccattacctggtcgtttgcaaacgatgccggtgctgctgggacaaagaattttgctttcgcaggaatcggtggtttagaagattgcacgggaggtgactgatacatgctcgaggagccttgattataggtgtcaacgtacctgcccccgaaaaagagtaaaatgatcagttctaagcatgcacattatctacagtaaaacactaacgagggaatattat

SEQ ID NO: 36639 - DNA, 564 bp, Arabidopsis thaliana columbia
tcaattacgggttgtaggaatgaagcaaatcggattcagtactaaccacttgaggaattgatgaaatcctatcaaccaggggtttcaacagctctggcttataagacgatgtcacaaaattgaccataagttctagtgaaccagtctccacattcctatggtcaagtttaatcacaagaaaacatcagaaaaactagtgcaatgaaagaactatcgaatagcacagatttaactatcatttttcactcccatcaattctagttcatcatgacaaacacactattccctgttactggtcttatgttacaagaacaagtttcttattctaccgacaatatgattcaagtacctttaataccttccagttctcagcatcaaatgtttaagaaacccaacatgtgaacgacaatcatatggtgaaagacttaattcaggatctctccagcaatcttggacagcagcaagaacctattttgatttataaaaaaaagttattaatgattctgagaggagagctctacacagatcaaaattctgtataactactttcaccataccaagttt

SEQ ID NO: 36640 - DNA, 563 bp, Arabidopsis thaliana columbia
atccccttgtaaaattaatcttatgtaaaattatatatatgttaatcttatgtaaaattatacttgtcaatacttgaatgcttaaaccttttcttttcagcccttgaattttgttttgaatttttatataatgatgtcaacatcctttaatatatgatttggctaaaaagttgcctaactcatggtataagtaaacagttttagaaatgttcacgccacatttggccctcatgggatagcttggatgactcacatatttggtaaattatattaaaacgtttacttaaattggagttgaccaagaaaacaaattaaaagaggaatgtgtcatgtcccctcatgagagtttttagataatgttttttttttctgttcacaaaatatatatttgtttttcataccaggtctcttgctggttccatgtttatttttcacgaatggactctcccatttgtgagaaacttattcgtcaggaaaataaagaaattcaaatagattgattaccaaaatttaattagccaagacgccaagacacatttgaatgacatttttaaatgagatgt

SEQ ID NO: 36641 - DNA, 579 bp, Arabidopsis thaliana columbia
ctcgaaaatagtcaaatatccaaaatagataatagagatagatcttttcaacttcatttccttgcatgatggtcaaaattgatattttgttacatgtatcaagacttccagtttacaaaggtgaatttgaactaaaataaatatgaaaatcaaagaagaaataagtataatctagtaacacaatataaataaagggttttgtgcaaaaaaaactgaaattgtatattgttgcagctttacccttcacgttaaaaaaatgcaaataatcctataaattttaaaaataatgcgaaatatagccatttttttgcaaatttacatatattgtaaatattttcatgatcacatacatttgtttttgaattagactcttccaatatagcaatctattgaagaaataagtattatttatcaaaaaattgaatttttgacaatagcaaaaaagttaatttgcgtattattttgaaattcataagtcatttgcatttttttatgtgaaagataacattgcaaaaatagacgaatttgaaagttgttttgcacaaacccaaaaataaaatcaacaatataggatatata

SEQ ID NO: 36642 - DNA, 413 bp, Arabidopsis thaliana columbia
accggtaccgagctcgaattcgactttacatgatatttttggatatcagctttgaatggtaattcattatcaaaacactacagtttgtatatgtttgacaattatcattcacaaaatttttatcaaaaacattacaaaaatttttagtagaaaactttattatacaactttctctgcataagtttttacagttttacactatttttaaagctcttataattgtagttaacatcaaaaaaatttgtacgaatttgtattaccaatcggactcattattgttgcgattagtaataactaaagaggtattagtccgattcggatctaatattggacttaagacattggaacttgggacgacctcgaatataccctatcaacttggagagaataaagacatggagaggcagtcaatt

SEQ ID NO: 36643 - DNA, 274 bp, Arabidopsis thaliana columbia
cccctagttcaagatcatacacgaactaatgaaaatttatatagcatcaataatcagagatacatcataaaaaaaaggaacagccttgttggatcttcagcaactagaaatctccattgtttatatctgcgaacgagtctagtagatgtcagatttagcgtaatcaagtagtttctgcgcagagattttcgctttctcggctgatgttatgaagaagaggttacagttcttctggtagatacttcgagaagaagagagactgctcaattcatct

SEQ ID NO: 36644 - DNA, 285 bp, Arabidopsis thaliana columbia
gattttctagttactcagtcatgacaacatgtgcaacaaagaaaggaaactttatctaaaaaatattatcaaacaaattcgaacaaaatgacgtcgacaaaaagaaatacgcgtgtaaaagacaaaccacacgcaacaaaggcgcgtttagtcgtaagactagaatccgtggacctgaagcgcgtgggccgggattttcatttgtcttaactgaaacaatgggccacataattaacaaaataggcccatttacacttttaggttatatagaatatttgctctggt

SEQ ID NO: 36645 - DNA, 494 bp, Arabidopsis thaliana columbia
aaatacagtacatcaaaacttgaatctaacttatatcaacttcaataatcatcaattcatcagttaaaaaaactccttctttcatggtttagtttatcaaagatatgcatttgatttataagaaaacccaaagagtatttgttacctagtcgtccccgggtttcacggggttacaataagagaaacaaaatgggccacataatatttatttatttagtgattctgtcgtttaaaaaaaaaattagtttaacacattgtcaaagtttgaactaaggaacttgtaactcaaatactgaaactttaaccattagactacatttttatgcaaattcggccaaaactaaataataatatgattagcggccgcaagcttatgttttgcttgcttggccttgtggccggctaaataacctaagtatataatcaataaattacataaacgaccggataaatcagaacttaattataatgttaaaagtaattaactgaatgat

SEQ ID NO: 36646 - DNA, 569 bp, Arabidopsis thaliana columbia
aaacatagctttctgtgatggaactctcatcattctttgtcatcatgtctttcaaggcaaaatcttacctgataatcatatagctgaccaagatcatgaacaccgttgatttataaggatcttgccaataggctaagcgatttatatgcaagcctagtttgatgaaaggtaacaatagctcctgcaatgagactatcggttaatagtaactatagagcaaagaaatggagaaaagatgaagaaggaactcatgataccttcataactgcaacgttagtgtcaattccttctactttcacttgttccacagtcgcctgagcagcttcagctctgtctgtgtctaggattgactgtttcagagctatctccaatggactcgtctccccaacacaaaaatctcctacgattgtcaattcttcacccatatttgtccctgtttctagattcaagccaaaatgctcaagcaatttgagtgagactggagataagtttgagggccatttcatatactgaacagaaccgatatcagaagcaacattagtggttatgcgagagacacggctggacag

SEQ ID NO: 36647 - DNA, 658 bp, Arabidopsis thaliana columbia
ttgttctgtagatctatcactttcataacatctttcttgttctcgtagtcttcttcttcttcgaattcgatcccaatctgtaaactttgttttcgtagagagttctctaatatcgccatttcttccatctctctatacaaagctgtcgtcacgctcacgtatctgtttccattaaccaaagaaaaaacaaaatcaatctctgtgttgtactctgttttcttgctctgtttttactctgttttttgtgtgttaaatatagagaaatttggtttacctttcgattttcttgtttttagcttctgtgtctttacagttcatgacccatccatgagggtcacgacccatgtcggcaaattcatggaataagcggtggaaagaacggaggctggccgtggtgcagcggttgctcagtcttgaaacagagttagctgcgtgggcgagactatctgcgagctcagcacaaacgaggctgaggtggaatgtttcgtcgccgttgacgattttggttagacttctaaggaaagagagtggtctcgaggagtgaggagattggaatcggtgagagagtgagtgagatgtaggagtttggtcatgacacgtgctacttcgaacgataatactccgacggaggaagtggtggttgatatccggagagatg

SEQ ID NO: 36648 - DNA, 615 bp, Arabidopsis thaliana columbia
cacgtgccggagtacgtgcgtcgtcttcaagagctaaagatggaagatatacgagtctcggagcgagtcacggcgtttatggccggaagtcacatcgtttcgttccggaaacccagtgaactcgtcgccgggccccgtgaagtccgcctcgattggagatgatgacgtggtgttcaaaacgacagtgatgtgtgtcggttcgttatataaaaaacggcacgtagttgaagaagtctggaggttcgacactataattgtaatatattaattacgaatctactactactacactagaaaatcaaaatgtatgtggcgtctggggaggcgaacggaaccagatgctttgatgaagaggcataacgctgcgtttgcgtttttgtcttgtatttgtataacctatagtttttattaacatattaagctgaatcttaatatgtgattcagagaagagtctttttactgttgcgtttcaaacgcgggtaaaaaactaacgtcgtggagagaagtagctgaactttgaaactgtgtacgaaaaaaaaataaaaaatttggagctttgttgagtgaattcaagaatgtcgtctgtgtagtagatatggttgggcattaaatgac

SEQ ID NO: 36649 - DNA, 559 bp, Arabidopsis thaliana columbia
taacggccgctagtgtgctctaaagctttagagtctgaggagcttcgacgccagccgcgcgagaagaatcgaaatggttgtgtaggtgattgaccagactaatgatggtcaattggatattcaagaatggatacgggggtgataccaaggacagggacatagttcagcgcattgtccagcttcaactgctcgcctagatgcacaagaattagggctggcaagaggactttgacgcctagactggagacatcgttgatggaggagcgctggatgagcccgaatttgcgagctgcgacgccgtagcgtagggttaagaggacagacacgcaggcctgtagggcgcccaggaaggaggtcagtaggcttccctgagccatttcaaattacttttcttatcgcagtatatgcggttagacgacgcaaggtaacggagcacgcgagctcgatttaaacaaacgcctgttactgggtggcatcttgttgtatgtcgtcatgatggcgagggtcttggtatatggtctagatcacccgacttcaactgcacatttgcatagtgact

SEQ ID NO: 36650 - DNA, 581 bp, Arabidopsis thaliana columbia
atttccgaattccaaagtatatactagtagcaaaacaagtccactatatcaatgtcgtgtgactcgtgtcctcatcattctctcaaacccacgaggcattttcttttctacttttttcctcaacctttttaagttcaaaaaaaaaaaaatagaaagagaaaccccccccaacttgttttcgagatatcaacaaaaatgtcaaagacaaaaaaattcccttaataatccaagaaagaaaaaatcataacgatgacgtctctattctctaaacctagagctctcacttctcatatcaccaactttaaaacttaccgtccggttatcggaaaactccacgtggcaactttaacgcttcttctcttcctaatcgccgccggtattgccgtcacttcctctctatggcttaacaaggtaaatcattcttttcactatatatacatagttcacactatcatgataactattattcatactttgaattattgtttgtttatcaaagacgacaaaagcatttgatcgaccgacattagtagcaacaaaaccagaaccggagctagagccacgcatgaaccggagtattg

SEQ ID NO: 36651 - DNA, 433 bp, Arabidopsis thaliana columbia
caacgaaaagtctccactctccattaccacacaccacctatacatatatgccatcacacttcctattcttcaccaaaaacaagctcaatattctcttctttcatttcactcgatcaagtttgagcttagcttttaaaaaaagagagaaacaaatctatgaggacaatggttgatttaggaaagcaaagagatcataactatcaccacatgcaaatcataaccactcctacctccgtggattgttctcgcgaattccgtcaccgacgaacacttcgttcactcatcgaatgcatgattccatactgttgcacttaccaacaacaaccataccaaaacgacaccctttcagtctcttccacttcatcctcgtcttcatccacagaccactcttccgtctcccagagtagcagtaccgtaagtggaactttcttcg

SEQ ID NO: 36652 - DNA, 591 bp, Arabidopsis thaliana columbia
gttaaaactacattttgtagatttatattttctttgaagttttcaaaattttgtagatgacatagctactgagattattgtagtcaaaattcaatttattttcttttaccttgaaggtactattcaatcgagtcaatatctttgatttatgatgatgctaagaagtaaaaaaagaaacgagctaacaaggaaaaaagagtacaatccaacgtgagggaatgatttcagatctcaaatttatttggttagagtgcttaaatatttgtcaccttacaaattaaagatttctaacacacaatcttctcaactaatgatgttaaccacaaaaccgtattaattaagtgtctgcagaacaacatcacataatttatgaattatttaacaaaacattaagtatatatctctaattatttttttgaaaaggtgtacatttttagtaaccagagaacaaaattgtaatggtaggcagctagagcatatttttcatatttgtacatttttacatggtcaattggtcattactcattagcttaattgaaattatttctgcctatatagcttaatttttcgtaaatttattagagggagtag

SEQ ID NO: 36653 - DNA, 531 bp, Arabidopsis thaliana columbia
aaattttagtttcttcctatagcatctttggtatccaaaagaaaaagatacaaaattatctaaaagtctatggatacttacttgtatatttggccaacacagttttcaaatttcaaattctctaaaagtaatgcttctagaaaatattttctatacgaaatgtatagaagtttccatgtatagtgtttgagaaatttgtgaagaatctccgagaaaaaagtgttcagatacttgtctatttttagagatacacattttcaaaatcacctgtagaaaaagaaacaaacagtataacccaaaagcgtcttagataaattgactaattttggcaggtaagaaaaataaaccatagctgtgacttgtttgcctgttattgattagagacaagtaattatgttattgcccattgggtcatacatttttttaatgacccattaaactcatactttttttgtaatgacccattgggctttaagtctagtaatgagacaaaaaaaaaagagaaaaggaaaagcttgcaaaccataacga

SEQ ID NO: 36654 - DNA, 405 bp, Arabidopsis thaliana columbia
ttaagtaaaatagcatgttatctagaataaaacattatgcttttttataacaaaagatatctaggaaaataacacccacttttttgttttcctaaaaaatatataatacctttaatagttatatacctaattttatcgtcatttactgctacacatcaaaaaggtataaatatgattggcccaaatttattaggaagggcagtaaactccataggacaacacaataattatttataccaaagaagctgcaccaacggacaagttccagagacacatagttgtatatactcataacgtcctcgatcgatattatttaatgtcggtggatagtaagacagtaatgtaaaccgacaaaccaaatttaaaaagagatgatgacggaaataacattgcagatggacatga

SEQ ID NO: 36655 - DNA, 582 bp, Arabidopsis thaliana columbia
caaaaaaagttaggagtatatcattcatctgatctgctgagcaagattatgtgtgcctttgggtctaaactgtgatttctgcagtgaaaagctctagactgaggttgaagatctgaatggagtttttccatgaacagcttactgtttgacaaaaggcatgaagattatgtttgctttccttcaagattctcacaaatgactgacttcaacctttgtataaaatcttgcaaccgggcgtgtaatttggttcttgtgattcattctcccaagtgttcttctataaaactttgttcgtatttctgtacgtagttccctgtgttggggcataacctgggtttgctgtgtcatcaacattgtttgcagaaaatcaagagcaaagcatgagcagcttcagcagagatgccttcaaaggcttgagtcaagagttgcttgtggcagggacatgtcaccatcaagctaatgtgcagctgacgagaacgtaaaaggataagctatggctagcttctggaatgctccgagaaacacttcccccttttttcttctctgaatttcctattcagtttaatggtattctgtgtttga

SEQ ID NO: 36656 - DNA, 512 bp, Arabidopsis thaliana columbia
caaattcttttaagtaatgtgataagagagtttcacatttaaaatcaacatcaaaatgcaaaatttcatcttttttacttgtgaataatcgatctggaaacatgattaacgcaaaaatgtaatttttacatagagaagttccttcttttttttcacaattcgatcgaatttaacccatttcaagcttcaagtagcacaaaactgtgaaatgagctcaaataaggaaatgggtatgagagagactaaccggagaggagaaagcagtgggcttcttctggcagtggctctaaacaatggtggagcggatttcgcgttgagaggcgacggtgccagtagaagcagcggcgcatcgtgaggaagcagctcgaagctatcgatctggcaccggagaggacggcggacgtggccatcaggagagagaattgaagagaagatcaaaaactacggctgcgagagagaagaagagagaatgctgaagcctgaactccgattacgattacgggaaatgatga

SEQ ID NO: 36657 - DNA, 542 bp, Arabidopsis thaliana columbia
caagcaagctcaactaataaataccatgaaacgtaaaatccaattgactgaactgttttgtagtgtgggagagtaacactagacttatgaaaaatcaaaactttcagacacctcaagcagatccaaatacattagtttatcacttgatcagattcaaaagctgagcttcagatcaactaaagtgatcgaaagtcaaaacccatctcagattatagcaaatccaaagttttaaacaataaagaagtgatttttctaacgaatactgagatttaaggtcaacggtgagctcggattagaatcagaaccaatgaattaaagagcctaacctcccaaaatctcacctaatgattagacattaattcgtttacgaaatcaaactcagaacgcaaatctaatctctaaagcaatgtgaagcagatataagcaaagagtgtgagtgagatagagagagaggttactggaaagaggaggaaaagagagaaaggaggaggagcattggtgggagagtaaatggcggagaatacatagaaggaagagacgag

SEQ ID NO: 36658 - DNA, 521 bp, Arabidopsis thaliana columbia
atgataaaaagttttaaagtttaaaaaaaaaaaatcaatgtcactaaattaaagaaaatgatctgacattaaaatcgattagcgtatttctttcttagtctctattttccatttttgatttaatatttgtgtaatttaaataatataataacacataaaaatatgtaaagatttagtaaatgttaataagctgtaaattatttgtaaatgaaatattctctctgtcgcatttatggataaaaattgaaaagaaagaacaacatgtaacaaaagaaaaagcctaaaacattttatatattgggacaaaaggaatgttatttttgagttttacttatcaattaatatttagagatatttattttgcacaaaatctgcataatcttactatactatattagatatcacgaatattaattaaaacactcgtcgacttcaaaacaatatattgttgtttgagaagttgcaaaggttaggatattatcacgaatattaattaaaacactcgacgactcaaaacaata

SEQ ID NO: 36659 - DNA, 592 bp, Arabidopsis thaliana columbia
tatttgtgataatatcctaacctttgcaacttctcaaacaacaatatcttgttttgaagtcgtggagtgttttaattaatattcgtgatatctaatatctaatatcctaacctctctacaaaatctataagtctataaagtagaaaaatatttgttaagattttgaaaatttttgtttaaagtaaactattatgattatcgtagaaatatatggtatatacccattagaaaaatatttgtttgattatccatttacccgtggtttaataaatagatattgttgtttttagaaaataaggttgaattgatttttccaatggcattgatatgtaattaatttacaaaatcaaggttatttttaaaatgtacttcccaaataatatagtaggatgtaaaccattttgaaattattatgtttttaggagatctttttctttgacccgtttacaaatgatatttgatcaaagtaaaagtgatgcattatctagtacaaataaagatttattacgcaacaacaatgaaaaactagtgaaccaaacctgatgagtctaaagtagccggttgggttggaggttggcgtctgtagcagcac

SEQ ID NO: 36660 - DNA, 555 bp, Arabidopsis thaliana columbia
atcccccagtcggggaaaaataaaaatctcggattttctcacctgagaaatagaagggttttgtctaatggatttagctctcttggcagggagaatttgcaggttgatttgattgtcactgttgtgttctgtttatcttgtgtaaatgactagattaggatattgaataatcctagcgttgctgcagttaatgtatagtgatggtgataaagcatttggcacatcaagcgaactatgcattgacgaacgacttagaatttcttctgatggcattatagttctgaggtaaatctgaattgtaacattcctgtgccagtgcattttgttagtcgtatttaataatttgttggcttccttgtatgattttctataatccagcatggagatcatgcgtccaggggtctcagaaaacactttgaaaggacaaataagagtcacaacgcggtgcatgtggcttgacaaaggaagacttttagatgcacttcacaaagcagctcatgctgctctatcaagttgtcctgtgacatgtcccttgctcacatggaaagaacagtc

SEQ ID NO: 36661 - DNA, 616 bp, Arabidopsis thaliana columbia
accgtgttaatggcggccgtaggagtggaggcgagacctcctgtgacagcgatggaggaaacctgcaacgttaagggagcggcggcgaaacaaggagaagggcttaacaagtactacctccagcatctcgatgagctccagcgcctgcaacgcgaaaagtcgtataaccttaatcgtcctgaagcccagaggaatggaccccaattctcgaggtctctttttccttctctaactctaattttcattgaatttctttgcaaagttggatcttttgatcatcttcttaagtttagtaatctcgaattccatattaggactttagatttcgtctgggtgctttaaatttataaattgttgcggtgattgtttggattgagggtttctgatcttttccagaactggatctaaactatgctgcgccttgatttttagcatcactaagttaccctattgagatttcttcttgattctgtttgtgttgagtatgaatcagcttctgtcaatatttgattgtttagcaaagtatgtagtgattgatacaatcgatgtatactgctgaacattttaaccttgttgtcatggtaacctgacagtacgaatgctcagagaagagttc

SEQ ID NO: 36662 - DNA, 454 bp, Arabidopsis thaliana columbia
ccgatacaatcacatttaaattacaagatgatcaagaagctaagtgccatgttacctcatcaaacggtggtacttcatacatgctttcaataggcgtggctggtgcatcacgttcctccaggagcaatctgtgggttagatcagaaactgcggaagaaattccttggtgaaagcaaaatcctttgtgtatgctggtaaaggtagaacaagggattaatcagagtaagcgaaaaagaacacaaccaataacaagagagttgaaaaacgaacttagccttaccttatcagatatcttagtgtcatagaaaatactggatcatatgcttgcaaagaagctcgtaagacagatgacatcagtccagccatttcataccttcttttctctgcccactgaagaacagaaagcgcaattccttataatccaaaatacaaattctgcatgatgtatagcagc

SEQ ID NO: 36663 - DNA, 493 bp, Arabidopsis thaliana columbia
ctctagatattgctccatcaatcaatgttggatgaaggaccgcttttgatgcaaaatagaaaacatcagggacctgaaagaaaagaatccagatattttagtggcatacaataaggatcactctaggcatggttcagttttgcttggtctttcagcattatctgttctaaaggttcctagtatctatacggaacattttctctcttagccaaaagataatctttaaactgtagcagaagatatttcggtcagagaacaaaagcaagaagatacctgtataagggtcaatgcagaacactcaatgcaggtttctatctctcggtactccttcatgattggtgacataatatcctctagtctggcgggagatcgttcatcacgtaaatcaagcttgcagcccaccacaatcacaggtgctttgatctagatacattacatacatatataattataacttgaaaacatacttgtaggagaatgcgaagatacgata

SEQ ID NO: 36664 - DNA, 261 bp, Arabidopsis thaliana columbia
  unsure (1)..(261): unsure at all n locations
cacggtcacggcgtttgttagtattactgattggtactagtcgggctcgtttaggaaattcgaaaaaaggagacgaagtcgtgtatatatataaaatatgcgaaaatataaaagacaggtgaaggaagtaatcatattgntttccgggacgtttcgtgtgcagtttattatgttcctgatatcaactttatcacattaacattatacattgactatgggactctcgtgagcttggctggttcggtctttaaaaacacgtat

SEQ ID NO: 36665 - DNA, 445 bp, Arabidopsis thaliana columbia
atgatctttagatatatcatgactatacgttcaatgaatacatgttattgtatagttaatatttatgctagaaaagtatagagtaatcttattatttcattgaatgtaaaacataatcatcaagaaaactaatgcaaataaaacaaattaacaaaaaggagtaagataggaaaaaacataatcatggattaggataactggataagcattggattaagcaaaacggaaaaaggaaaaacaaatattgtagtattttaataaattacttcagtacaaatacaaccacataattaagaacataatgattttaaaaagctcgtaagaatcgcctacgtacttagttgaatgtttgaagatttgaagaatagacaacctccgaagtatttaaattttgaaagaagaaaaaaaaaaccgtttgagcaatcacaaaaatgtgaaagctgag

SEQ ID NO: 36666 - DNA, 446 bp, Arabidopsis thaliana columbia
actctagacgtagttgaaccttggtcgtccttatacacccaattgcttgtttaaatattaataatcattttgactttggaatgataattataaagttctgattatgatgttttaacaattcagaaactaaataatcatacaaaatctgttatcatgtaaaggttattagagagaagcggtcgctactcgatattggaagagcagtacttacgcatgacacaaaaatgtcagatatttatttaattcatatccatattttaattacggatttacataaaactgagagagtttttaggaaatcttccagatttagttgacaaaatttcgaaaatgagctagcgatcaagagaatcatccgcatcctttgggaaacacacaaatacgaatatctctcttagtccgattgtcgcttctcatttgtgtgattttggaacaataacaatatg

SEQ ID NO: 36667 - DNA, 498 bp, Arabidopsis thaliana columbia
tatgatcaaacccgaccactcgtaaatccatgttatgaactcagataatgttatctctgttaatatttcttgaatgtcccaaaatttaaagggggatggcaattagggaatgaacacttcgatatggttcaaaccttacgtttcgcatcgattcatgctctcgtccctatctcccccacacccaacacgtcggagcaaatcatctggtgtattaacactttcatgaagattggtctctatacaagtagagaatcgtatataaatagtcatagagataagaaagctaattagataaggatcatcattatctaaatgactaattataattaggagttatctcaatacttatcaaaaacttttgatctacttgcgtacgctatatagctagattaaccacaaatctttttcgaacatatccgaattttcgccttttttatatgacggttttttctaacgtatgatctttagatatatcatgactatacgttcaatgaatac

SEQ ID NO: 36668 - DNA, 402 bp, Arabidopsis thaliana columbia
  unsure (1)..(402): unsure at all n locations
cctgtaatgaannnngtaatttgcatcattgcatgatgggatatgatcctagaaatgatcgattgaatcggtgaatgttggtttctgggtatgcgtttgggtcaggaggtatgtcacttggtcttacgtagttgaagattgtgttgtctccttctgcgtcattttctgactcggagatgtagaaatcgtcgccggagaattgggatgatgcgtctgagtctgagtttgagtcggagtctgagccctttacttcatctgcattgggtaattgttgacttgggtcttctagttgctgtgactcagtgagtacttcgttagccaatagtgagaagggataacgatgagatgagaagtggataggtgaagagtgttgtagagcagataagcgttgtgagaaaggtt

SEQ ID NO: 36669 - DNA, 764 bp, Arabidopsis thaliana columbia
tataatatttgatattgattttactaaaccaagagagacaaattgagctgtgggttttatttcctttttctttagagtatcttttcttcattatatgatgatgatattaattaatctaaccgttggcatttttcagtaattgtaataaaaatcttcttttttttttcctgatcacgtgtaataaaatccattttatgattgatatcagagaggaaatctaatttagatctgattttcatttaccaatatcaatctaaccgttgtaaaaaaaaaattctacatattttactaatattttaattaaggtcagcaaaaaaatcttggttgtctgcactattttttataaataattgtttatagtttattagtatagaaaaatataaattagatcctatttccatttcactaatatcaatctaaccgttgtagtaaatattttcttatataataattactgataagatttgattgggaaataaaaatagccaataaggttacgagctcaagaagacgctattgcttttcatacagtaaacatgtgcaccaatcataatgatattgtttttgcccactttaatatatcctgcgtacgttggcatcttccaacttctcgtacccataatcctgcgccgtggtctccactcttaccactccacacacgcacaggcggcgcgtgtaatcatctcaggtaaatccgccgctctcctccactctccctccgtcgtatcatacagcaacacaaggctttctctaatccctctctc

SEQ ID NO: 36670 - DNA, 526 bp, Arabidopsis thaliana columbia
cttgcatgctcattacaaaaaacaatgaaaagtgtattaatattgaaaacattcatatatttctaaattcttcagctgactataaattctttcttctctttttcgattttgcagtatttcccggaaaacttgaggtggtgaattcggtggagtaaaaaagtgcccatggaggattagtcgttttatttacttacaaatatttttacacattttcgagttaatgtgaatctattgtaattgtgttatatatatcttatgttaatcatattcaggctgtctctgaaatgtaatcacaatcaaccctcgtgaatgctaaagagtttgtacgtcgggtgatataagatcttaaataatgaagtttatttataataatctaagcctccaaggtctaaaaattgtgcattgtaatgtaaacaaagttttattaacgtaactctaagtgtacaatattacattagtactgatacatccatgcgaacaatgtcatgacctttaatgctcatactcagatagaggtgtcaaattg

SEQ ID NO: 36671 - DNA, 552 bp, Arabidopsis thaliana columbia
gactcaaaattgaatcaagcaaaaataagcctaaaaacaatctcagatacaacgaaaccctaaaagcaaatagatcaacaacaacttaccacagacacgagatgcagcaatctgcaaaaagtaagttcataattcccgaaaaaaacaaaaatcagttcttcaatagaaaaaacaatgaagttaagagacataaaaacaaaaacaaaagagactgagatttacagggagtgtcggcggtgacggtgcccatgagatcggagtgccataaattccggtaatcttgcctaagtttcatcttatccaacttatcttgcgacgccgccattgctttggaaactcaaaaaagaagaagttcagattcgaaaaaccctaaatcagtgactatacagagcaaaagcaataaatcaaaatcggttacaaaatctataagaacctgatgatctgcttcacgcgtaaacctttaattgatgaaagcagaaacttctcgtcaccctcacttcaacgaagatatttttttttacaaatcagtttcttagaaaaaatgagaagttt

SEQ ID NO: 36672 - DNA, 495 bp, Arabidopsis thaliana columbia
taacaacgataataagagaggtccccagctatacgagcatataacccgcatgcaattccaaattatcaaattattggggaaaacaaataattacattactaaattaccatttctttagcgatttttaataaatttggagacagacaaagtgatactaaaatatgtttaggtgagaggtttctccacgcgtaacatataactaccgcgcaaggacttttgaggcccacacgacttcacacgtgcgaacgaaagacacgtgtccctacaaagatttcttacgatttcgatgttgtgtgtattttgtcacactgttcccattcttttcatttttcttttcattttgttttcattttcttttacattagctaattagctctttatattaattaacctgccataaagaatactcacaagcttaggcaaagcagtgtatatacaatcaatttttggaaccagatttgtaacattagataccttgaaataccatgcatgtga

SEQ ID NO: 36673 - DNA, 618 bp, Arabidopsis thaliana columbia
ttctcaagctaactcagctatggtaacagaggaaaagagccgttcccagttttctaagacacaactgatgatactaaaacttccaagacttataaccatttccttcttcttcaacatagaaacatttctgcctgaaacaagccaaagaaaagtaaaaacaagcttgatataagaaaaatgtaccgattcaacaaattattctcaatcaaatgcgactcggatgagcatcgtgcacagaggattcggaaccaaacataatcagtgaatcataaaagcatcattattactcgaacttgggaaatgaatcgcacatatacaaattcagaacatcaaaacgttaaccatttcggtttgaaaactggatataatcgaattgagctatataatcagcaaattttaaagcatttaccatccactaatcttaagaatctcacagatgaaggacatgtaatctaaatcaatacaaaattcgagctcaaaatcggagattcgattttctcaaattaacgaatgcgtcgagagttaaaacggcaagcaacagagcaaaaaccaaacggaattgaatcaaacacagaagagaatgattaagcctagatagacctgaggtgagagtaatgg

SEQ ID NO: 36674 - DNA, 484 bp, Arabidopsis thaliana columbia
tcatagcccttgcaagttgtaagataaaacagtttcatttgtttgtgactgcggctttctgttccctttctcaatttacatgtctttctggtccaatacctatgactgcttgagctcattttacccccttgttcaatttcgttgacgtctgttctggttccactccaagacggttggttctccagcaaatccagagaaatatccacctgtattgtcgaccagtgcaaacttgctggcgtttcagtatgtagtaggcttttatttgaaagacgagaccgcacgcggaactaaagccaatagactctagtaaagaagcaggagaaatcatgtgaaacaactgcaaaaacctagacacgaaatagcgggaaggagggctttgtgtaacgagtaaacgatgaaagacatggaaggcatcgttcatcatgacaaaagctaaagggattactttatttgttgtataacacggtaaatggaccacatgcag

SEQ ID NO: 36675 - DNA, 460 bp, Arabidopsis thaliana columbia
cagtaccttcctatcaaaaagaaaaagtgaaccacctataagggtggggagataatgtcagtttacagggaaaaaatatatgaaaagtgaagattgttgtcactaacaagcgatctaacaaaaagtatacttcttcttcgaaacaaaaaataggatgaattagagcagtgcaagtataatttgaagtcagtacatgtggaactttatatatgcaaaatttttgactgctatgcataaataaaattcatcctaatcctagtagttttcaaaaatggaagagaaagtgaccattcatccaccgaataactttataagatataaattgcaacaaaaaaaacgaaggaactcagacacaaacatactggcgggtcgggtgggagactctgatgctatatgaaacttgtgatagttctgaagaatttcacaaatctcagtaggcctaagcaccctgtgttgggct

SEQ ID NO: 36676 - DNA, 501 bp, Arabidopsis thaliana columbia
cgtctgatcaacaactgttaacatatgtgaacgaggagcacccggagtgggaagttaaagacgggttagttgtcttccaaaaaaccagagaaaccgcaccgtgcaaggagataccgtcacttcaactcatcaaccagactctcagttacaccagagagctcgagcgtatcttgtaaatcccattcaagtgttaccattgtttgacttacacgcctcagtcatcactagtattttcccaaacagttgatttgattcatcagataatttagctctgtcctttctttcttttgtcgtctggttataatgcaacttatatgttatggtcacatgaatgatttctggctcataaaggcaactccattaaatgagtccgtgattgaattttgattcttgtgtcccactgcttgtaaatatattatgtgtattatgttttttattcaagaaagagggacaagaatatcaaaattgttgagaagttgtattctctttaattaacaaaat

SEQ ID NO: 36677 - DNA, 587 bp, Arabidopsis thaliana columbia
cagtatacatactacatagcatattgcttaagaaaaccagagacgagaagcattctatttctacaaacagatgagatatagcttaccttaacattctatctctacacttattatgcatcaaagatgatgatgtcgttatggcttcacaagacgataggctataaatttatcatctctaaagagcatctccgcgtcttgaggaagagttatctcggggttccatgggcgacaaactacatgttggccagttggtatactcaggtggccagttcccattatgagcttctttttctcactctcatctactacacatgatgatgtttcactaccatcgtttgtgggattctgaggcatccacgaagaacaagcagcaatgttcctcttgataccattggcagctggtgcattaagagtaataacgtttgtaggattgtgaggtataggcaaagaagaagaagcaatgttcatcttcataccatcagtagttagtgcactaagagtaccatcgtttgtaggattctcaggctcattcaaagcaacgttaatctccttagcattactggctggtgcatcatgaagatctggaa

SEQ ID NO: 36678 - DNA, 585 bp, Arabidopsis thaliana columbia
tcagtttaacttccaacatcacaaagtaagaacttgagaataatcaagcagaccaatacctgtcctcgtaagacaataggaaattcatttggctctttcccaaatagtttgaacacaatccggcctgtgcgcatctgagatggaatcataacaaattacgaaaaggtcacaggaaaatatcagcaggctaagagatccagaaaataatggaatggatgaggtaagaatatacatacctgagcatcttcactagaacttgagggtgactggtcagatgctgaatctgaattcctacttgtctgaggcggactagactgatgtatccatgaaggataatcaagagaactggtcgctggattcgttggaggaggagatctttcgacgtctgtgtcatctgagtctatatagatatcattcaaatcaaaatcattcattttgacttgtttttctgatctgttctcggtagctgtcccatcttgccgagccgaaaattgctttaactcctcttgaggagcttgctcaatcccaagcaaagccgagtttccaatatttaaggaaccttgagatcatctccttgtagaagaa

SEQ ID NO: 36679 - DNA, 433 bp, Arabidopsis thaliana columbia
aagaataaaaacaaagaccaaaaaaaccaaaacttaaaacaaagaccaatctagcaaaataacaaagaccaataaacttgttaaatcaacgaccttctctctaatctctatataccccccttcattttcttttcttttatttcataacctctaaaaagattaaaaaacatggaaacaacaaagaaactctctgttcttctctgtctcttcttcaccatgaaccaagctatctccgaatccgattctgacgagcacatggcgactttttgcaatgattcatccggaaatttcactcgcaatacaacttacaacacaaatctcaacactcttctctccactcttagcaacgaatcatcattcgctaactactacaatctcacggacggtttaggttcagacatagtccatggaatgttcttatgcataggagatg

SEQ ID NO: 36680 - DNA, 506 bp, Arabidopsis thaliana columbia
ttccctctttctctaatctctaattctctatataatctttttcttcttcttcttctctttttttatttcataacctctaaaaagactttaagaatatggaaacaacaaagaaactctttgctcttctctgtctcttcgtcaccatgaaccaagctatctccgtatccgatcccgacgacatggaaactttctgcatgaaatcatccagaaacaccactagcaacacaacttacaacaaaaatctcaacactcttctctccactcttagcaaccaatcatcattcgctaactactacaatctcacgaccggtctagcttcagacaccgtccatggaatgttcttatgcacaggagacgtcaacagaactaacgtgcaacgcctgcgtcaagaacgcaacaatcgagattgccaaaaactgtactaaccatcgagaagcaatcatttacaacgtagattgtatggttcgatactcagataagttctacctcacgtccctagagaccaa

SEQ ID NO: 36681 - DNA, 429 bp, Arabidopsis thaliana columbia
ttgaaaaggtatatgtttgcatatttaacccacatatatatatatatatatatatatgtagaactttctttgtcctggttatcattatttgactaactgaaactcatgttctcgacatttttcttatatcacaaaaccctatgaaccatgcatcttttcagttcattgcaacaggatgcctatctttcttagtgggaggtacttcacagtaagtcactgttttcatgttcttggggcagtgtattgtacttgtaaccttcatttctgtgtaaactgtagtttggtaacaaatgaattcgcagatgaccgagcagatctttaacctcttatcgaggatcaatttcaattgatggttcgatcttatctttgcagtactccagaaatgttagtcaatcacgatggattattgatgatgtcagaatgggggaa

SEQ ID NO: 36682 - DNA, 450 bp, Arabidopsis thaliana columbia
tgtaattaaacacacgataaattagtgcaatgtgtaaaatattttataaatttgtgagtaatgggtaaaaaaaaaagtaaagaaggaagcaaagttcagttggtgaatcattttgctggccattactctataagagagagagatcctatctccataaaatcccatacccctcaaacacacacacactcaccatcccactaactcgaatagttaacatgcgcacaccgatccttggccttctcgttgctaaaatgagcatggtgcgtgattcacccgcttacttgctcgatttctccttcacccttttaaaaaggaacgtcttttagcttacctctgcctcctttaccctctctctctctctatctctatctctgttctttcctttttccggcgaatttctgggctgagattgttagtgtctctgagtgatgcagagatcaactgttgtag

SEQ ID NO: 36683 - DNA, 615 bp, Arabidopsis thaliana columbia
  unsure (1)..(615): unsure at all n locations
tataacatattcatttgttttacttaaaacactaatttaattcatgtttgaaaaaaaaaaaaaaaaattgctcggtcaaggttgggtgaagtcaaagtctatgtgccaaaatagcgagtagccgagtagaatgattgagtgcgtgcatattatatatacatactacaagatgcaagtggtggaacataggtcgtgtatataaagaggtgaaaggaaaatttcaagaaggaaaacaaaaacgaaacacacaaagacaaacagagaacgagaatggaaaaacaattgtatcaaaccatggaggctgctcacatcgaacgaggcatagactcatcgccagaaaaggagatggcaaaaacacataagcatagaggactattccacctccaccaccactcaaaagatgagaaagatgaagacaaaaagaaagaaggatcaaagagagagaagatagctgcagcaatggttggtctcggagccacactcaagaaagttaagcatccacgccaccatggaagtggtggacaagaggaacaagaaggagcagcagaggaagangaagtagaagaagaagaggaggaggaggaggaagatgatggtggagatgaagaagaggga

SEQ ID NO: 36684 - DNA, 546 bp, Arabidopsis thaliana columbia
tcaaaagagagaaagatatttatgaaaatatatcactatatacatatatatcatctgtcgaccgttggttagttggtgaatggttctaatcaaaataaatgtttcataggtacgaaaagtcgttttctttagaaagttcgtgtttctttttgtgtcatagaatattgctactcctttgaactagttgagaattcgattataatatttgtatacaatatattattgataaaacgttgtaaaaatatctttaggtttatgaaaagttatttttttcattaatgagaagaatactcgactatttttatatcatgttattaggagaaacttatcttcacgtatacatattcgactatatgagtacatgcaatttaaaatatcaattagtctgtataagatttgttaagttttggaaaaaaggacatgtatacacatctgtgtgttcatgaagaggcactgtggctgtagctgtctctgtcatgcgactcggcaattcactccaacgtttaaattggcattactcggatgagaagataatatgaattaaag

SEQ ID NO: 36685 - DNA, 1313 bp, Arabidopsis thaliana columbia
tctaagttgtaatgcctgctactcttgctcaggtttttatccaaaacccgaaatcttgaattttctttgattggtatcagagattttagacttgcctgagattcttattgggttgtggattttgtgtagtactcgaagattatacaaaatccgactcatgtcgagcttcagaaagcggctaaccaaggaagaagatgcacttgggagaagctctcagccataaaatcaaactgcgggatcgagcttgcgcttgatgattctgtagctattcttaaccatatgcggaggctcaagaaaagtgcggagagagccgccactgccacgtcttcgtctcatcacggattggcttcaaccaccagattcaatgcttcaagaagaatcccatcttggaacgtccttgccagagagaactcaacaggctcactggatgatctagtcactgacaataacctccacgcttcttcgggcaggaatttaagcgacagtgaaacagagagcgtggagttgagttcttggacaagaactggtggacctttaatgagaacagcttctgctaataagttcattgattttgttcagagtcttgatatcgacattgcattggtcagaggatttagtagcagtcccaattctccagcagttcctcctggtggctcgtttactccaagcccgagatccatagcggctcattcggatatcgaatcaaacagcaatagcaacaatcttggaacaagcacttcaagcataacagttactgaaggtgatcttctacagcctgagagaacgagtaacggatttgtgttaaacgtcgttaaaagagagaacttgggaatgccatcgattgggaaccaaaatacagagttaccagagagtgtacagctcgatataccggagaaggagatggattgtagctctgtatcagaacacgaagaagatgataacgacaatgaagaagaacataacggctcgagtctggttactgtttcttcagaagattccggtttacaagaaccggtgtctggtagtgttatagatgcttagagtgtgattgattcaagtgagtatagattcttaattaaatttgcagagtttccaaagggtttagtgcaccacttgtgtatgtttgtattgcttattgtttgaaattcatttgtgaaatcgaaatatatctgtaaattcagaaaatattctctcatccattacaaaatatttgagtcaaaaatcattagtcaacaaaataatctaaaatatatctgtaatttgtgtgtgtatgctgacaaatacgacaatttgtgttgaaaaaataatctaat

SEQ ID NO: 36686 - DNA, 617 bp, Arabidopsis thaliana columbia
cttaagtcacaatgttttgtttttgagatttgtgatgtaatcaatatatgttttacaatgcaagtataataatattaaagtcacattctaagaaaattatgatttgtgtcatacgtatacaaaaacacccgtcacacatcctgacttctgaacgttaaatctgtcgcacacaatcataaaaatttaaaaattcaccagagatgtactgaaaagaatataattaatcacatgatgatatatgcataggagatgaggattattcattttctgaaattccctatatgaaccattataattgtttagtaatcagttcagaaatgctaatcattatatgaaccattataattcccttcatttttatttaagatccacttaacaggatttgttaatatgcacccacatcactaaatacattggtacgcaaccgttgttccatttccattttcacatcgaccagaatgtttactatgcggtaaattgtgtagtatgcagatttttttgtatcatttaattttctaacacgtgttaagtcgaaactaattttgtcacaagtaaaagaaataaaaaaggctggaattattaatcagtagttagatgattagcttcgagttgaaatg

SEQ ID NO: 36687 - DNA, 557 bp, Arabidopsis thaliana columbia
gtgtcagactattttccctataataacttcaatttaaacctatgcttagcagaaatttaacgatgacgtaggagaaagatacctgttggaaatgccaccaaaaaagagctgacgcaattgtgtgtcactgccaatattcatatacttcgcatcggggcaatacttagatgcccaattacgaaacctactaccagcaacttgttgttccgctttggctactttctctatctcagcaagatactctctatctacaagtatcccttctgcttccatttttacaagaagttcaccaaagggtcgccagaactcatggtaaaaatccaacattgtccttcctaaaactggctttccatcaagatgccaatccatcaattgcagtttctttgtcatgctctcgtaaagctttagtgtgcttatcgcatccaaggcagagtatgaaatccaagcctctcgatcttctcgctgaagctcttcaacagggggaatgacaacgatttcccttcagatcatctttttcagttccgtttgcaaaaatagtctcatcgaaattttacaag

SEQ ID NO: 36688 - DNA, 438 bp, Arabidopsis thaliana columbia
tggatgcgatgactcggccggtgccactccggtgaatcttgctgagtcgtttaggagctctcgtaactcaaatgggtcttaaaggcccaataataatgattaatgggccgccgctaccaaagttgctcattaagaagaaaaaaaaaatctatgatatgagtttcatacaattggatgtttggaggttttcgtaacttaaatgggtcttaaaagctcaataagagtgattactttactaggccctcagctgaaattctggctatgcaaagtaaaatttcttaaacattataataatcttttttcgaaattactaactaattgtatagtttctttgggtatagaaatatatatttttttgtctaaaacaatcctttttagaattactaatctattgaatgatttttttatataatatgtttacatatgagtcgtgacaaa

SEQ ID NO: 36689 - DNA, 495 bp, Arabidopsis thaliana columbia
tttttgttagatgatgtaatagtttctctttttttcctttattcgtaaattcaaaagcacataacgtttatttcttggtcacgttccgtctctgatttttccactttggtgaagaagaaacatacatgcatgtgcctaattattatgaatagtgaaatctcctcaatgcatatatatacggagcacacaaacccaacattcatatcatctttcatctacaatttctctcttgagtttcttttcatgtgttaaagtcttattgtcttgctaaattctttaaatctttcatctgacacaaacaaaaaaagagagaagaaaaaaaagaagaagactttgatttcttggatacaaaatggagggaactagttttcccaagcgagtaatagtatgagaagaaactcatcggtgtggaagaaagattcaggaagggagattttctcgaggtcatctagagaagaagctgatgaagaagctttgagatgggctgctcttgag

SEQ ID NO: 36690 - DNA, 517 bp, Arabidopsis thaliana columbia
cagtcattatatcatttgcaatcagccaatttaaggaagatatagaaatggtactaaaacaaacatcaatcatattccaggaaagcttcaatctaatgaactacaatgtcattttacctgacaaagtttaaaatctggtggccacgatacccttttgtgcaatgccctcatagttacagaaactctcacttctttttcaatctaaaaatcaattctttttccaggaaaattgattcaggaaggtccaattacccttttaaatctcaataatttatcaaagccagctctttagattgaaccaattattctcatcccgagttatcgaaaaaccctaactttgtcaggaaaagatagagaatttaagaagagaagatgatgaattaatgaatccagagaggagacgaaacatctgcaagctaaatccgtcgagatagagagaaggaatcgattgtgaaccctagatcctctgggttcttcttcttatggtcacatcgtcattttatctgcctcagatttt

SEQ ID NO: 36691 - DNA, 564 bp, Arabidopsis thaliana columbia
gattctcaagaatcctacgaggtacaaaaacggtattttaaagggaaagacacaaagaacgcaaatagttctgaggatcaaggcaaaaggtatgctacctattgcttagtattattcatcttcatgcttgccgtgttagtttcatctatataagggtgactactcttttgttccacgctggtcacaatgatgtatttgttccctctgcattagtataagtcgtggattctggggattctttgtacggccttcaaggaagaagcttgatcctgagttatcggtaagctccattttgtgatcctatctcaagtattctggcaacgggctttgcagttgtagtatcctgaaattttctggtgactcttctacgtagcactctgtgtttgttcagtctgttacttagcatatactactcttttgttttcatttatgcatttaaaatccagtcatttccagtctagcacggataaaggtttcaggaattagtttcgcatatgcagggagatgaatatattgggaaatccagtggaaacttacttagcatagactcggaaccaattgaga

SEQ ID NO: 36692 - DNA, 551 bp, Arabidopsis thaliana columbia
gtagaaacttccggtttctagccagaccgaacacgacacaacgcgtttcaaataaaagtaggaggcgtccttgattctggtcgtctctgaaggttccaggtcaaaacacttcataacgagtcaatggacgtgttctcaccggtgttttgataagtaaccaaccttattgttgccttgtacgacccataatcaatcatgtatttgggccaatggtgttaaatcacgaatcagcttattaactctctaaatgacatcctcttaaaactaatacacaagatcaccaaagattaataagtgattcgtgatttggtgtccaaactggacgttttatttatagatgagataattaaactaagtgataaatgagcaatgtgggtttccttaggaaatagccaccgaacgcatcttctaaacactatcgacttggaatattttttaaggagctcccactattcaagggacctggctgcattcttcaacattccaatttactaaatcaacaacaccacaaataatccgttaccatgtaagtgacctaatgcatgactgca

SEQ ID NO: 36693 - DNA, 491 bp, Arabidopsis thaliana columbia
tggaacttaatgcatccactttaatattgaagcaatatcttacctttctgtaatttcgtaaactcatcactaaactagaaacatttttacatttacttctttcatatcacaaacatatcatgatatagttattatatatattcgttttaacatgacacttaagagggaggtgtaaggtttacttttggcataactcagatgaagttgtgatagtgtagtaaatagtattagcacgaggtatattaagaatttcaaataatttcaaaatatgtcaaaactatttcactaggacacagaattaatggcaattttatctttcacattgggtccatttcgaaatcccaaaattgtttgaaaatatgacaaaaatggttttgttatgtgatgagctcagatattatggagcgtgagatgctgagaacaacacgttacaaacataacctaagcaggaatggaaaataaatatgtccaaccatttctgagatttgact

SEQ ID NO: 36694 - DNA, 588 bp, Arabidopsis thaliana columbia
tttctttttgcctctttccatgtgacaaaacaattaatttaattattaataataaaatatgttattgaaaattttagcattagttaatttttctgtgaatttataattagaatgttgtcaaaggagattaaagattagaatatagatatctaattttaaaaaaaagtaaaaaaaaatatagtttcaaaacatgttgttttgaaacctacccaatgaaaattataaccaattgagaaaataagttttggcgaaagttttggattttagtaacaattgagcttgaatggagtatttttgttaaaagactttgaatagagttgttatcctaaaaattttaaaattgttaatgcataaaaaaagaagacaattatcccaaaagcaagttcataatcaactttgcatatcctaaacatagatacataaacatgcaatctcagagcaacacgaatggtaagagaccattaggggctcttcatatttttttaatcataattttgaaatttaaaagtttaagagatttttttggttctttaattttttgtttgccaatggtaggtcttaagcgggtttcttaaaaatcaatattat

SEQ ID NO: 36695 - DNA, 520 bp, Arabidopsis thaliana columbia
ggtagactctagactctacaatatttttggttctttaattttttgtttgtccaatggtaggtctttaagcgggtttcttaaaaaataaaatattattattaaattaaaaataacaaatatattatttcataaaatttaattattaatgtaaatacttaaatattaaacatacatgatataaatattgaaaaccaaaataacgattagtggttagcttgattcccgccaaaagtgtgccataaatgctcaattaaattatttttcaattgttgatcgatagtccgagcacgaaccaggctccagacgccataatattaccgagatttgaagccatatctgtaaaatagttgaaatccacttgtgaagaagcggttgattccggttgtgtgaattcggatgcatcaaaataagtatactcatctcgttcatcctcaactatcatattgtaaagtattatacatgctcgcatgatcattcctaccttttcattatctcaaataagagttggatttgtgacaat

SEQ ID NO: 36696 - DNA, 692 bp, Arabidopsis thaliana columbia
tattgactctcatgattgtcaagtgatggtcttgaagcttataaacgatcctcaaaaaagtgttttgatatttccataattctttagagtagcttgaccttattatataattcaaaactttggccttagataatgagattcaggcagggaggtgacgtgttactcacgcgcgagactgcgcgttcaaatcataaaaagccgacttgctataaaagcaaacttgttgatgatggttcaaaatttcgaaaagcttttcaaatttctcttcatatcgcgcgctcagtcaaaaagcagagccaaagatgaagaaaccgtataaaggaaagttgccgacgggaactccgtctctggcaatgtcaacactcgtcgtcgttgcttcccttctcgccggagcctccgttgtccacaacatctacaaaccagatctcgtaagcttcaccttctctttctgtacatatgttagggttctcaaatgtattaggtttgctcactttcttcgttcttgataatgcccataagcgtgatcggtttaaaaccattcatttcgttctctggctctgtgatctctcttttattgtaatgcacataaggtgttcgatgaattgcccatgagagatttgtaatctgattgctttttacttttgtgcagagtttacaccgttggaaagtagtgaagtggccaagaaggatga

SEQ ID NO: 36697 - DNA, 912 bp, Arabidopsis thaliana columbia
tgatcccctgattgtatgtgtggtattatattcccaacgctgcaaagattttccgttgtcagctcttggatggtttcagactgcagagtaacatgcgttccaaaatgtaggaaaacaaaaagagagagagagagaggtccttgaaatgtcaacaaagggagaacatagaatcaatatgacagtattacatagagttatcaagaacccagcaagcatttcataagatgtaaaactcaatgcagaaagatactcctatattgacaaaggtgcaacagaataggtaatgaaatcatgtcattttctagagttatccaataaaaaccaacgttatagtcaagtcaacaacgcgaatatacatgagtactttgtgagaggccaacctgagcttttagatgatgttcaaaactgggatgaagaggattgaggaacttggagccaaacgccgagcaaaggaaaagaattctaaagctgcagccaaagctaaagctgaagcggaagtagaagatcacttgaaaatctgatccgtgctgtatatatcgtaacaaacttgagcgatgtattgttagcagacacttaggcatagttgatcttgagatatccaatatatctatctagacgatgatcgtaaacccactacataatacaaaaaaaatatgttggtgtagcccttgaatacaaaaaaaaaaaaaaaggcaattaaaacttacttttaatttgatttgaagatgtgtagcatatgattgtattgggcaaaagaaatatgttgaggcctatttagagacccttgggccaaataaatctgttgatggctatttagatacccttgggccaaacaaatctgttgaggcccatttaaagacccaataaaagtcgtttttcttgggaaaatcagaaaaaacagagcaagaaaaa

SEQ ID NO: 36698 - DNA, 708 bp, Arabidopsis thaliana columbia
aactcagatcacatggagatctaaaaatatgggcaaatttatatgaaatctcagatttttgtgaagaagaaggtgggaggaaacgaagggaacgttgacttgaaacggaagaatcggaacattttaaagatattggctgccgttgttgaatcgttctaactttagccattaataacacaaattaatcttcaattaaactaataaattatttgttgttagtaacgacgactaagaggacttccactttggttgttggctgctcacgaaactctttctctctggtccctcttttgatgcaacttcatttgagtggtgatgttactatttttatatatcaactagaaattaaacattcgacttaatagtgtaagtaataattaagcatgacattttcttgaaatgaaatcatattactatttaatatttattatcaacaagaagtaaacattcgaaaaatcactaaattaaaccatataattgcgtattgaataataaatcaagacattttcttcaatggagaagacattttcattgttgaagtcttcctcaattttgaactataattttcaacagctctagtggattcatattatctatcagtcgtggtcttagcacatcattatcttatagtgaaaagaaaaaagttgaacttgtaaagaaatacaaactagtttgaaattcgaattgagggattaggatataatttat

SEQ ID NO: 36699 - DNA, 458 bp, Arabidopsis thaliana columbia
ttttcagccactcccaataatctaaccctagactgtggagtcgatgacaattgagacttagccttttctgaactaacttcatccctatctacataatcaaaattcccttctttcagtgaaacaaaacccgagcgatcccacaacaaatcaacggctgatatcaacgcatccctactgaggatttgactcaacctagtatctactctttctctattgtccctctggaaggcataagcatactctacatgtgaatgatgatcactgatctttgaaagcttcctcttaacctcagctaagttgcaactatgtttaatcgaactcttcttaacagatcctttcgtagaagcagacatttgcttatcttacacaatatacacgaaaaatcgacttctaaatcctagtcaactagttcgagccaatagctcaacaaagatctgttccaaaataacgcctcatgt

SEQ ID NO: 36700 - DNA, 475 bp, Arabidopsis thaliana columbia
gctacttcaaatccaacggcccacaatttttctcaattttctaaacataccccaccattttcagaaattaccaaaccgcccaagaatcttcaccgtccgttttcggatcttagatcaaacggcgatcatgaaagcgagagatagacctcgcattgtattgaagtcttcccaattctaaaccctggaacaaccgtgaacgcgacacgtggctcagactccggcgaactctccgccgccgggaaaaacgcttcttctgctacactcttcatatacacttcagagaatctacaacctttaggtactcgaaagatctcagcttcacgttcaaaagagagagccaagcaatgcaaaagccaaattcgtgtcgccatttcaagagatccagagaataagctcgtctccgggaattcaccagcagaaacttggtttctcaaatgcaaatgtccgaagaaagcttgctcatgtttggatgtat

SEQ ID NO: 36701 - DNA, 556 bp, Arabidopsis thaliana columbia
cttctccgtgtgattaaggaagatataaaaaccagacaaaacatttacgttatgtctcagagagagagtggttgggtgcatcaatggcggcccaatgagaatctctgagatctttttgacggcgaagtggccgcgattcaggagacaggagacaattaaaactttcttactcccgaccaatctctcagactctcttttactgttgtcttttgttttcgtgctttttgggcttatgtctctctgcaacaacggcgatttaatataaaataaaaaagagtttggatcagaatcatgtttagtgctacgcagaactaacgaaaatacacgattgtcgacaaaacccagattaagtaaattacccttgaatttcgaaaattctttctgacaatagtttttcttagctgcttacacacaaacaatagtgttattttcttgaatgcactttaatattttcttaaaatactttttttaaaaataattggcaaattattaacgtaaagttttaccattcatgatcatctttgggtaaggcagtgaattaattgtgggtgtgaaa

SEQ ID NO: 36702 - DNA, 533 bp, Arabidopsis thaliana columbia
accaataaatctgatattatttaacaccaattcatatatgagattatgtttatatctcttgagctagtaaaagggatagataattagatatcattgaaaacaatttcttaaaataaaattattccacatcacattctattttttttcttacaaattcactattgtttttagtttttttttgtatattgaaaaatttattattaaaataagtatgttcaatactaatcatatttacaagtaacatattattttaaaacttctcaatacaaattataacgagatttgtgtccatgtaaaacttatatagacagatatacctttctaattacgaattattgatatatatttatctatataatatacacatgtgggtgtcaaatccacaaaagacctcccaagcaaataaggaagtaacttgtgctcatcacttaatgtacatatagaggacacaacatttaggcctctcgtggcgtacaaactctatcaatctcgatttattggccagttacattgggtccgtgttatgggacgct

SEQ ID NO: 36703 - DNA, 288 bp, Arabidopsis thaliana columbia
aaggctatttttctgaattatatatctttatatcttataaaaccatataaataattgaatcgagtctccgagtattgagaagtaccttataaaccttataaatactatcaagtttagtgtagggcatatatgcttatcgtaccgctgcggtgtcatgtccagtgaaaatatgtacattggacgggagaatgtcccttacctgtcaaggaatgtctaagagcgcatataccctagagagtcacatgactttctgtcatcaagtactcgagattttgtacgtaccatttt

SEQ ID NO: 36704 - DNA, 528 bp, Arabidopsis thaliana columbia
acggggacttgttcactgatctctctctctctcgtagaagaagcacattgcattacatacgaagtaattgggcttaataaatgaggcccatctctagattgaagaactagccgcatgaatgctagtaccacgaaacccggacactagtcgaccgacattggaactaagttctcacggtatggctcaaaccggccatggctcaggctcaatatacttcgggagacggaaaagttcgtgatccgattcatatacgatctatccggtgctcatcatattacacaagtatgtatcaaatcttttagcgtgaagctcattttgtcctgtcaagactccattttctagcgatacaaattttcgatcatgtgcttcatctacaagatttggttatgcgaacagggacttgatatcgtcatctcccagcttgtgtacaacggcctcttcagagtcacctaacgtactgtaactgagcaaatatgtcttcatataggcgtcatacagttgacaataaggaacagcaaagttgagaga

SEQ ID NO: 36705 - DNA, 504 bp, Arabidopsis thaliana columbia
tatgtgaagtttattgtgtgtggtccatgtgtgtttttgaataacgtacaaacttttttaattggagattttggcccaagtacccactggcatatttgtttccatatgtaatgtaaccttttatatatcttaggcaattggtgcggcaggcggtgcgataacgatcatggagatgataccggaaaagtataagactaggattggaggaaagccttcattgcaatttggtgcacacaatggagctatttctgaagtggtcctaagttttagtgttacatttttggttttactaattatcctaagaggtcctcgaaaactgctcgcgaaaacgttcttgctcgcactcgctaccgtatcggtgtttgtcgtaggttctaaattcactagaccattcatgaatcctgccattgtaagttcatactcgtcctactcaagaattgttaattcatttttattacattttgagatgaatcttgatatatagtcttgtggtatatattgtga

SEQ ID NO: 36706 - DNA, 837 bp, Arabidopsis thaliana columbia
ggtaacatgcagagtcacaaaatcgtgtcaaatgaaataatgtatagaacagaatgacgaatgcatccacgactgcaagatagtggagatgacatagtgatatatttgatttggtcatcaaattttcaatagaatagctatattttagaaacaattttgcatatttgttcaatcctacgtaatccttaaaccattataggaatcagactgtattatccattatcgtctaatgtttctcaatattttgtgcatccctaacaaaatatctacctgcatagttgtaaacagaaaataatcttctaactgatttcaaattaacaccgggtcaagacaaaacattacgcaggtgaaagcgacctagcgcctccgcatataccactttatagctcagtgcattttgcttttgctattattcagaacgtggtccaatgagactacaattccacttatacatctattattatgtttcttgattaatatattatgcatataagaaagtgaagactttagacaaaagtaagaaattgaataaataggggtagatgaagttaactaacatgtgtagaaaaaatgagctactgatattattgaaaatatacaaaagtaactatccacttattgaataacttgttttaggatagagagattatatacattctaatgtataggactacccaaaacagcaaaactcatgatacactccaatatatgccaatattttaaatgttagtgcttgtttggggacaatcacataatcataacaattataatatataacagaacaaagaaaaaaacaaagagagaaaaacttacagaaacacatatgaagttggctgc

SEQ ID NO: 36707 - DNA, 571 bp, Arabidopsis thaliana columbia
agatctcacgctcacatgtctggagacgaacaaaaggtaatttctacaccattttgttctttaattttttttattagtaatgtctttttaacttaatctattgttttctttagaagggaaatttgcggaacacaaagcagaagggaaacttccagaatctgaacagtctcagaagaaggcaaagcctgaaaacgatgacggacgttctgtcaacggcgccggagatgctgcttcagagtacaatgagttctgcaaagcggttgaggagaatctgtccattgatcagattaaagaagttctcgaaatcaacggccaagattgttctgctccagaagagaccttgctagctcaatggttagtctctcattatttgaacaagtttttaaaatagattttaaagatttcttttttgttttttggtgaccagtcaagatttgctgttctatggggcattagctaaatgtcctttatgcggaggaactttaatttgcgacaatgaaaagagatttgtatgtggaggtgagataagtgagtggtgcagttgcgtgtttagtacgaaagatcctcctag

SEQ ID NO: 36708 - DNA, 591 bp, Arabidopsis thaliana columbia
cagttagcatatcaagttgttggaccattataagtgcgctttatgtgatcattctttctaaaacacaccaaattacttttgaaaaatctatatcttgatgatcaaattcatgatctataatatatacatgtgaatcataatctttccacttgtctatgataatagttatccgcatctaatcatatcttacaatatttgtctctgagcacgtgatattgaaagatcaagaagcttttcataattcttggattcaatagtgtcatcaagaagaacctcgtaacattgttttgacataaggagtccccacaatacaagaaatgaaccatgttagtatgaatagtcggcactattttgaccattgttttatcctatgttttttcgtttcacgataaacaatcagaactatgtttgagtttaaatcagaacaatcagaactaaatggtttatcatatgtgttttcgccttcggtcatgataacgttttttctacaatgactacaccaatttgcttgtggagaatctaatttctgagcatcaattttacgaggatcttcgatttttccctttcaccaagtgaaggtgacgctgggat

SEQ ID NO: 36709 - DNA, 805 bp, Arabidopsis thaliana columbia
catattttcaaagtgaaagccagcaactcctaaaagatcatgaaactaactcttttggcatgatgcatcccagtctcaataaatcagatattcttgtaaacggggaagaagccagagctcttgagcgtagaagaggatccttcgatgatggagaggaatcatacatggattataaaaggggggatgcatatctgcattacgaaagccaacaacttaagaaagatcatgactatggcattgatgacaggatatatcgtgatgtcaactcgtcagatattatagtagaccatggagatgccaaggcgctagagcttaggagagtagccttcattgatagaaatgaagcgtatttggataatgaaagcaaggatgtttatcagcattacaataaacaacaactgaagtactacgactctggcattgatgagaggatgtatcctgctgtcaccaaagcagagattgtggaccgaggaggtgctagagctctagagcgtaaaggaatgtcctcgaatgacggaagggaagcctatttgccctatgaaagccagcaactcctaagagatcatgaaattgattcgtatggggtgatgcatcctgatgtcagtagatcatcagctggcaagcaagatgaggaagctcttcgaggcaggagatatctttttgatgaccgagatcaagtctacttggatgatgagcgtttgcaacgacgtaatggtggtgatgtaaagtttatgcaatatgagatatcagatggtagacagaggtttacattcgaatgattcattttgcgtacagagatgattat

SEQ ID NO: 36710 - DNA, 565 bp, Arabidopsis thaliana columbia
tagatttatttttcatagggtagagttggagcaggcagcaccccgaatactaatcgttatgtgtttttttggcttgcacatagttttgacttttgatattaaataattaactacccgagaacaaaagtgttgtttctagtataataaaaggtaactcccatgttgtgagctgaaagcgtaaccagaagcaaaaaccagcggatttgggagagagtgacagcgtatccggcaaggttacttttgttgtgaacgacgaatcggagggtcccggtgcagtttatattccctctcatatttctccatgagcagtttttttactccggtggtctgaaaaagcccttgcacgtgtcaacagttgaggaaagattatttgacatcagtagtcagatatctcgaagagcatgtcaccctaaaactcctttcaacaacaaatgttggacattgaagaagaagagagcatcctctaccaagtgtatatggatgtctctaaaatctccaaatccttttctacatcaagagtgccacatactcgaccatctctacgaaaattgtgcttgtgaataag

SEQ ID NO: 36711 - DNA, 477 bp, Arabidopsis thaliana columbia
ggaaacagaggtgtgtaaattctcacttttaatcaaaaactccatttctatatacatgcgtgttcactgataagtcgttgttttttcctctgctttcgaaggttcggttttaaggccaggattcatacatgggactcgtcaggtcggtagcataaagctgccacttagtctcattggagctcctctcgaaatggtaaaacacgatttgcatcaatcttggtaatctttaggtgaaagtaagaatctttttttttttatctcaaaaacattatatcatttacaggttttgaagctgttgccaaaagaggtgacgaaaattcctgtgatcgggccacttttaatacctccggtcaatgtcaaatccgttgcagcaacagcggtaaaagctgcagttgatcccgagtttgcttctggagtcatcgatgtgtaccggattcttcaacatggtcactgaaaacaacacctgtcttaacaaag

SEQ ID NO: 36712 - DNA, 465 bp, Arabidopsis thaliana columbia
tgcaggcgcaggagaaggagctggtggatttatcttacttgtctcataaggctctccaggtacttcataaacaaattcaaaatcatcaaattattcttttcaaaaaccctaactttagcataaaaatcgaaactttcttaccggaatcaagtgggatataaaggagatcaccagctgtgatattatcaagattcaagatcccattaacatcctcaattcgatccatactaacaccaaatctgctcgagagagattgtacactatctccagccatagcaacgtagctcataagatagttccagagaccactagagcaaccacaaagaagctgaacagaaaccactgcaccagcgcgagtgcatctatgttgtattcggtggaaacgcgagaccagagtcagcagagacggtaacattgtaaacgtatccaacgttttgtctgattgtgactgttgtggttgttgtg

SEQ ID NO: 36713 - DNA, 528 bp, Arabidopsis thaliana columbia
agcttatttttgccgtcccaggcctatttgttttgtttgtttataatactattgcacatggcccagaccaagaaaaaagataacaaagtagtaacaaccctttgaaatttatacacgcaggcttcaataaccaaccaattctatggtagagatcacacaaattagacacagtaaagcttttttattatcattaagttacaatcctaggaatgtggtcaccatggccttacccaaggaacaaaaccgtgttaattttggtgggtttcagcatctgacgccgttgttgtatctttctccttctgtttctcctttttcttgctaagtctatcagagtaacgagcaaaaacagcagagagtgcggtcttcacagttttctcgggctcgggctccttcttcttgcgttttctcgagtcctccacaaaatcctcgtcttcttcaacaggttcctctgagttcacatccttctcaactggagcttcagggattggtggttctcaacagacgggtagctcgaagttgacgcttgaa

SEQ ID NO: 36714 - DNA, 595 bp, Arabidopsis thaliana columbia
ctatccccaattggctcttgtttctcccaactttgctaaccaagagaacccaagtactacatctaactcccccaaatcaaacaagtagaaatcttctctgaattcgatgccctggacctctagtctgacatccacacatttgccactacttctaattatcctgccacctcccgctcgcacaccaaaactacgggtaggagtgattatccagtctctagctctcaccaaatcttcgctaatgaagttacaagtggcgcgagaatcaataagtatcactactttagttctgcctatgtagcctctcattctcatggagtgttctttttcttttttcagtcaggcaacctaatgacattacctgaaaaccttcttcaggttcacctttttcttctgttaatggctcattgagctcttcaatgaggggactttcctcttgttcctcttctgtaacctctaggctcttgagtctttgctgcttgcagcgatgccctgtaaaccatcggtcaccacaatgacgacatgggttactattgctccagaagtacgctaccgaagctttgtttgtgctttagtaggacaaaagatggctagatgt

SEQ ID NO: 36715 - DNA, 870 bp, Arabidopsis thaliana columbia
acacggtttagtctatgaaagtaaacgtatactggtcggttatatatgacaccgaatgattacaaaagcaatccatagcgattagtgtaaaccagcctgatttgttctctacatatctgctcaatcgtctgagttgtactactgtccatgatgtctcctgatgtgctcacgtgtgatactctgctcctccctagcattccctgaaggtagatatgtacaaggcgatggtatctcaaacctcctccttgacacaaggcgatggactcgaatcataaccagaagtggccataggagctgttgtaggatctacgacaagtgatatagtgaaacaacattgcatgatcctcctcagcgcccggagaaatatacaacaactacaagctctactaacacatataaaggaagaaaacaacttaaaaattttggtttttttggaagaagacttaccaacaatcggttgccttatcctcgtttactactttatacactcaggtggtggtagaattcccaagttatgatctccttactttcacatgttttttggaggtggtgcactgccgtacgaagtggccccgctgcccacactctctataattatgattacccttaggataattgtccattacatggccaactttacgcactagccacgattgcttgaatccatcaaacaaaccctccatgattcctattattttggtacactttgggcaatggttatgacaatgtcattcatcagtgcatcacggttatcccatgcacgccgtaagttgtcagagtgttggtctcgtattactcaggtccgtttaagtcaatgtgaaaatcggttaacggtttatataattcaaattgataattttaaaaaaaata

SEQ ID NO: 36716 - DNA, 164 bp, Arabidopsis thaliana columbia
cttgaaagatgtatgaaacagaccctgcaaagtaggcaacaaagcagactgagttctaacttctaaagttgaaagcaacttaaatccaaaaacaaaaaaaagacgagatgactctgctttggagatcagaaataagttaccttcttgtctgttgacagggtttt

SEQ ID NO: 36717 - DNA, 994 bp, Arabidopsis thaliana columbia
ttcgattcggtctgaaacggtttcggtttctagaactaatgagtattgtgattcttcttcgccatggacaggcttctcttccacctgaaggacttgaagctttttggacagagaatcttaggaaatcttggggtatgaagctgttgtcatcaagttcccatgaagatctttatcaggttcgtatttcctaattgttgcagcgatttatagttatcttgtgggcaattctgattccttgaaactcacctgtttcaggttctcacaacgttagaggcagcactaaagagggatttcttgtcttcaaactttgaaacaacttctgaactcttgggtttacaagaaggagctctcgccagcgatcttacttgtggggttaatgtactaccgtggataccaaagacagcaggaggtgtagctttgagactctttgatttcgacagctcgattgtttacacaccgatcaaaacaacgatcctctaaaagacaaagaatctgaagatttcgtggtaagtatataataacgaatgctgatattttctttattcatatactgaaagttgtcttgtttacaagggtttggagacaaatattctgagaaacttacatgagaaggacgtaatggaaactccggtgcaagttgctgcttataagcaagaagagaactggacggatcctggtttaggtggtgtgtctagctctgggagaggaggtcgaccaccacgaggacgtggccggcctcgtgcccgtggcaatggcaagaaaccggcagtttctgttaaaccaccacgaggtgcagcaaactcaaatggtgaaaccatgttgagaccgagagcacaaccacgatgggggtagaaagaatgggcggcgtagtggcaccaaaggccgaaagagaccaacgcaaggaacactcggtatatgtaatgaagtaggaggaggacgtcgggttaaggaagttgctgtaaccgcaaaaccagtcttccctgatacgatgacg

SEQ ID NO: 36718 - DNA, 213 bp, Arabidopsis thaliana columbia
tcctgcaaagttggcaacaaagctgactgagttctaacttctaaagttgaaagcatcttaaatccaaaaacaaaaaaatgacgtgatgactctactttggagatctgaaataagtatccttcttgtctgttggcttggttttcatctcctgcgggctcatcctgtacaactgatcctgcgcttcgttagcatcatacggctcccggctctttc

SEQ ID NO: 36719 - DNA, 989 bp, Arabidopsis thaliana columbia
tatatctgaaagtagtggtcataaaaataattgtagactattttagtcccataaccacgtttccctttttaataaggtttccttctcctagaagttactaagaatcctattcaaattcttctaaatctcgtaattaaatcatgatgcatgcatatgcatcgatgttttctacatcagcagtggaagcttctatgagattttgagcatctgagattctagagtatgagaagaataaaattcaccggcgagtcatgaagatgacatgtgaggcaaatttcagataaaatggttcaggtaaatggacattcaaagaagaagtgaaaatgggattaattaagccatcgagtgaaaaagcatgtagttaaattccgttgagaatctgatatttgatcttactgcaggagggagtcttcgaacaatgaatatctgattctgccggataaattattgaatcgagttaaactcacgagtgaataaacgtgaatgactttggcacacaaccgtgactcgaactccgatgaatatttgtcagcgatgagatactaagccacgtggcattatataaatttcaacagtatagcatatatagctaaaagaaaataatacagttataacttataagaaggaaatgttccgatgcagttacgagaatcttttggcgtattataaaattacatgctaggagcatgattggctgatacaagtcttaatgcggtaatcgttaaaataataaactaaagtggtgattaaaaatgaaaaaatccttcaaattattttgaatttttacaattgtggaacgatgttacagagcatggtatttcaatttttatcgtactactactactacggtattgttccatttttttaataatacacaaaaggggttaatcatgataaatacaaaaatgaaggacaacactttgaagagaagattattgcctaatgtgtatttcttgaatttcaaatttcattttgaacattttgattga

SEQ ID NO: 36720 - DNA, 488 bp, Arabidopsis thaliana columbia
tcattttctttagattgttccagcgaatcctctctctttcttttgcctctctcagttgccattgcctcttgatcacattgagtttggggacatcacctcttcacgtgggtggatggatgcagagtatcttgcatagctttcatcaccgggaatgtctcctgtagcatttgcaaagattgatattgggttgaagagttcatttgtgtcactttctccctggtacatgctgtaaggttgatagtcttgaagatcatcatctgcattctccagcaagttttgttggggatctagggcatattatcgtctggagcctcaaccaccagagccatgttaggaccgccattctcttcaccctcttcaatctcacagatttctataccttggttttggattccagcattgggtatgtcatcatcatcgtcaccctcagagtcggaatcatgtccaccattggtgatcacacaagctccggagtcatgggttacata

SEQ ID NO: 36721 - DNA, 548 bp, Arabidopsis thaliana columbia
tcccctaatcttttttatctagaaattgtggatggaaactgaacatttctttgataaggaataagatggttctgtatatcaaaaagatatttataatcagtttgagaagaagaaaaatcatccataaatccaatgataacagggaaaatgaaaggcaattagataggagtaggacaagaacatagtaaatagttgttaacccaaaacaaaacaaaaaaaaagaggggaaaaatatgacagagaaatgaaaaatcttgattttagtaccaagtatttttccattttatgttcgacattttaatgagatttataaccaccaaaattggtatatatgtattatttttccgttaacttgttgtatgctattgacgttatttgggaatcaagaatacaggaacaaatcactaaaatctattgcaactgtagttgtaattgattatacaaaaacttccaaaaaatttaaagctccaacaaaagcatatatattcacacagctttgtaaacaatagctcacggtttacatttgttaccttggtccttttttaacg

SEQ ID NO: 36722 - DNA, 1115 bp, Arabidopsis thaliana
tcagtaaaatgatgattgggatctgaaatatcaatggcatgtcttccagttgaactgaggtgactaggacggctaagcttttcagtcttgtgaatatcctctaccaaatgaatgtcctcttcaagcattaccactctcgtttgttcgccatggggtccttgcactatggtttcttggactttgaggtgttcatcaaactcgataatctcagcctttgtagaagactttcttcttttcttgagatagcagaagagagcagcagcgaggaatgcaagaaaaaacaaacttccaagagagataacaaccacaatgataacatgatgccccggtgctggtgttggtggtggtggtggaagaacgtgaggtggaggcggtggctgatggggatgaggatatggtgatggtggtggcggatgaggatgaggatatggtgatggcggtggctgatgaggaggagaaaaatgtggtggtggtgggtgatgaggaggagaaaatggaggtggtggaggggaaatgtgggaaggagggggtggaactggagaagggagaggatgttgatgggagggtggtgagtaatagggaaagtattccacagaggcagccattttgggagtatgtatgtacttaaatggttgttgcaaaggtgaagtgcatagtctctaatgttgaagcctatttgtagtagtaatagtagtagtgtaaaggtcggatttgtggaatgtgcttctaagcttctgcttgcgtgactctcatgctaagctttgcattagtttagtcccaacttggcttcctcttgtctcataaataatcaaatctctttgtctgcgcaaatgcataagattattcggttattcggttagagttctaactatctttagatatgacaacaaaacggttcagagttgccgaaccgaaccgatccaaagaccgaaattccaaaataatttcgccgatcggttaactcctccttgcagcttcagcgccgataactgaataaatcggtttattcggttcggtttaatcggttttcgaccacaatctttattatatcttgttatgcgtcttacatagccacacgtaggaatctttgttgattctcaatgaacccaacacag

SEQ ID NO: 36723 - DNA, 598 bp, Arabidopsis thaliana columbia
ttcttttttagatgtcgtagaagtagtttttatattggtgaaagatcatgtttctctcttcttttttagatgttgtaagagttttaatggattttggaatcttttattgtatttacgggaggaattcaaaacatgcgagggtaatgtgacctctgccatgtgatgaaccactcataggtgcattcccactttgaactttttttttagactcacttttgatgatttgaaaatacgtatagccccaaatgaacatatcttgagaaacacgagcaatttctcataaatgcctaatagtttagccgtttaggcatctcatgatctcactgtaaactattaggatagttacacatacacttaaataatagttacacatacatctaatattttgaaaatcctttatattctatgaattatccacaccaaatgacatcatgtgtgactgtataaatacgactacaaatctatgtaacctataccaattacaaatatgtttttctatgtttaatagctataccgtttgtgtgtgatatatatgattagttacattaagatactttaacacaattctagatttctagtgcaatgcagttatcaaata

SEQ ID NO: 36724 - DNA, 587 bp, Arabidopsis thaliana columbia
tttttattctagcaaaagagaacgagaccatggagaaaactgaggttgtggatcgacgagaccatggagaaagcaatatatcgagatatcttctctcactctctctgttttttcctaaaatttttttcatatttttctcacatagcgtgtgagattaaaatgtagaagcacacatgattatgttaaagtatgtcttgctttctaattatttatcttttatccaaagtaatatgttaagctttttttacctctctatatttataagatgagtaattttgattgaattttttgatagggattatggtctttttcctgttaatttgcagaaacccgatgatgatttataatttgactactatcttacaatgaacaacaaaattataaggtatgcaatattttttcttaaatctgattgataaattctctttcactaatgtattgtgattgtgtaaatatttttgactgtaatttagatttgcaggtagactattgtccacagccgcagttccccaaccagatgcattgtcagtttttcatattttaatttattttattttgaaattttcaatattgttacaataataata

SEQ ID NO: 36725 - DNA, 386 bp, Arabidopsis thaliana columbia
  unsure (1)..(386): unsure at all n locations
nnnnnnnnnnnnnnnnnnnctaaaagctttttttacctctctatatatttataagatgagtaattctgattgaattttttttattgggattacggtctttttcctgttaatttgcagaaacatgatgatgatttataatttgactactatcttccaatgaacaacaaaattataaggtatgcaataattttcttaaatctgatcgatagattctctgtcactaatatattgagatggtgtacatagttgtgactgtacttgagagctcactatattggtattgttaattaaattaattgaattttaatataagtgtaattttgataaaatttatttttgtcttattaatttgtcacatttgataattaatatatgtattaataaaa

SEQ ID NO: 36726 - DNA, 621 bp, Arabidopsis thaliana columbia
tgatcaatgtaaaattcgagataatggagtataaaggaagacgagagattcaggaaacataccttcgaatttttcagatcttcaacgatcgcaagagaattggagaagacaattggaaaattccgaggaaaacgtgaagaattttcgacggtgacgaagctgaggaagtagcgaaagaaacggagaagaagaagaatcaaaattcaaaaaagagtcttctcgttcgtcacacagcaaaaatagaagaagaagagaacgaacactaaagactcctggagagggaagagtctacgggaattcattatatactgcttgcacttacgaaaatacccttctcgttttcactcttttacaatagcgggtaggtacacgacttgactcgcgtgttgatgatcgcgcgttttgtcaaacattaacttcgcatgtcagctaattactaacatgttatagtctaaaattagtctagatttgatttagaaaatggaattttataattataaaagactaaaaatgtgaatatgaagtatgaagtaacgattgtacgaaaaagaaacaagaatagagaatgattattgacgatttttaataaagtcaatgaagttaaaaacaaaattaggtaag

SEQ ID NO: 36727 - DNA, 242 bp, Arabidopsis thaliana columbia
tttcacttttgtatgttatgttctcttgaagatggaaggctggtcctataccagaagatggagtatgggcaccatggtggtacaagagtgttcacgaatcaacgggtttctcatctccaaagaagtatcctcgggtaaggctcttgtttcttgtgtggttaataattctgaattcagtctaagatgtgtttggtattgttcttttccttcagacattccctttgtcgcattacgattagctg

SEQ ID NO: 36728 - DNA, 521 bp, Arabidopsis thaliana columbia
ccctgtgctttcatactcgaataaacataacaagcaaacaataaagaaagtagagtaatgcaaaagagcaaatcgcgctctttctgatacaactttaagagagttttaacattaaccattcaaacaaattacattaccttcttctccttctgaagtagctttgcatcccaaaaccgttactagttgttcattcagattttatttccatggagaataatagcaaactccctgcaaaaacatcaattttgtaagacagggatagagcagaaagatagttacggaaactaactgttcattacggctcaagttcttgaaatgcccaaagaaattagatacagagcagtctaccttgtcacaaatacattctaaaaggctgcgtaaactctagacctcagcttttaagtttgcaacagaagattaaaagagcaaggactggagatgcaaacctctggttaacaaggtacttaagcagcagcctgtagcaactccctttcagcgcgttccctgatccttctctcgag

SEQ ID NO: 36729 - DNA, 1349 bp, Arabidopsis thaliana
  unsure (1)..(1349): unsure at all n locations
taaccattgtcactactactctgcttcttatatttgaaagatggtgaagtcttcaccgaattcacatagtcaaaattaacaaaaggttatataatgaaacaaagaaaaaaaatactatggatggattttgatttagcaaaatagattgtttgaatattgattgataaatcctcttagcctacgcagagtatcataactactaataacgcaagcgatagttacagaaactataagaacttaatagaagagagttttaaaagtaaacagcaactggaagttgaggtgttcttatcatctgtttcttcaataagtttcttcttgctcgtactcagcttcttcctcttcatattctccttcttcatcagccgttgcatcttgatactgctgatactcagagacaagatcgttcatgttgctttcagcttcagtgaactccatctcgtccattccttcacctgtgtaccaatgcaagaaagctttcctcctgaacatagcagtgaactgctcgctcacccgcctaaacatctcttggatcgatgtggaattcccaataaatgtcgatgccattgagagacctcggggagctatgtcacagacgcttgacttcacgttgtttggaatccattccacaaagtaggaagagtttttgttctgtacgtttatcatctgctcgtccacttcttttgtgctcatcttgccacggaacatggccgaggcagttaggtaccgcccgtgccgggtctgctgcgcacatcatgttctttgaatcccacatctgttgggtcagctcagggacagtgagtgcacggtactgctgagacccacgggaggtgagaggggcaaaaccaaccatgaaaaagtggagacgagggaaaggaatgaggttcactgcgagcttcctcagatcagagttgagctgacccgggaacctaagacagcatgtaactccactcatggttgcagagataagatgattcagatcaccaactgttgcaatcaacccatcacaaaacattagcaaacagttgatgcaggatgagtcaaaactggagattggatcaaggatacgttgatatttccaaacagaaacattttttattttggtcacaaccaaacacaccattcatggttaccaagatcagtgattcaattttcacaaaaccactgcagagaagaaaggacatggaaagggacttacagctaggagtggtaagcttaagtgntctaaaacagatgtcgtaaagggcttcattgtccaaacgatacactcatcagcattttcaccagctgatgactgaaagtgcgcattgtatggctcacactgtgcagagacttggtgatgggagcag

SEQ ID NO: 36730 - DNA, 790 bp, Arabidopsis thaliana columbia
tgaggctattaaagcatatagaagatcttgtagcatgtaaatttagaattttctaaatatgttttgtctattgcaaatgaatgacaattttaacattttgaactcaaaacatatccgttttaattatctttcaattgaattagcataagaataaaatattcttttctattctaggagaatcatataagattaatgcgacttggttagacagaccaactaatattcttcggatccgattctaaatacagagcttatacaacaatacaattgaagtgacttaaaatgtgatagtaatttagttgaattaataaccaataataatacatgtgtgactttgaacattatcatatactatttcgaaatcatccaataacataagatatgttcgacctatcaaatttaaaaatgctacacacatcacttgaatatgctgaaccaaacaaacagaactaacgcactagtaaatcaacattattttttgctcacttcataacatcaaattacaaccaaccatctattccgcaataatgatcttttaaactcaaaaacttgtgcatttgataaagaagaaaaaggctatttgtaattaacgttacataatcgagctgctgcatcattctctcaagcaaaaaacatggctcctctcttctctaagtaagtcatactgactcaagccatgccaatgatccagcgaccaacaacttgctaggtaatgtccaggcgatggtgctaaatacgttatctcttcttctgcacattaacttctgtcacatacacaaacccagaaaca

SEQ ID NO: 36731 - DNA, 867 bp, Arabidopsis thaliana columbia
tctcctcatctccatgtatcaagataaaaacaagttgaaatcggactgatggcactatgacttgtgtggtttctgaaaactgccttacatctataaaagttgtacccaaattttaaaactaacataaaatgaaatcttaggacagagaagaagacgtagaagaatacctccaacaaattatttctacatctatgttgataacaaccattcccctgtgtcatggaaccccgaacaaacccagtacgcactaaagatgaggccatacacctatatataaatcaaactctttcatgagcaatattccatttggatatttacaaacattcagtgataaagttaagttaaataacctggattcactccctctcacttcgcccaacattctgtcaggtgcacgtgcactattgatatccgtacaagacccatctgaatacgcaacaaaatatgtacaataatctgctaaggaagactggccgcctgcaatacgttgcgtatgaaattcattagtctttaccaaacaagaaacgactacaggattgcataatttggtatatactatacaaccaaggcaaaagaaatatatattttgcgtatcaaattaacatgttgaagcaggtaacaacctaagaatatatagtattaataaaaactgaaagaactagataatcgtatcagcatgttccaattaatcatcaggacatacctttgttaggctgtggaaagtaacgggcccattgtggcaattctccgttatagcttagaattgggcagtaacttcagcctctctgttgtatgtcaaccagatagttgagttgtgttacaatggtaagcacctttccacatgttacatggagatgtgaccaactg

SEQ ID NO: 36732 - DNA, 766 bp, Arabidopsis thaliana columbia
agtttgtgaatctaaaggggtttagttacttgttatataaacgaacgtatgaaagaaatgattaagtatttttgaggtttttctttttaattacagagcacatggctttgggttgtagatactaaaccaagaacaaatcaataaatggtgtctgagaagttagtgtctaatgatgtcctacatgataacttcattggggcttatttgtctcaaagacatcacatgccaaatctctctatagattatgtagggacatgaagttgtgtacctaatgaaccacaagtctctatcactgattaagtcataccttcttctcaatgatattcaaaagacaggaccacatgatttgattatatactgacaaagtcacaaaagccttcaaaaaaattctgtggcaagaaaggaaaatttgactagttatagtgtctatctaacaaacaagtggtcatattgatttctgtcttcacatcagaaatcatgaagattgatcactatagggcccttacttatcatgccgtggtccggcaaagccatgtgcttgcttgttggtgtaaaaatttatgagctgaaacttttgaaaccaataaagggttatctacaagtaatgttcttatctatatatactcatcactgactcctttctgatctgcaagtttctcacattttccaataaagcatctaacttacaattaaagacaatccatggcgatcagaatccctcgtgtgctgcaatcatcgaagcagattctccgacaagccaaactgt

SEQ ID NO: 36733 - DNA, 686 bp, Arabidopsis thaliana columbia
caacatgttgattatcttcctaatcaatactggctaaccatatttattcttctaatgaccttctttggttatttccccttgaaatcagtcaccaaactatatgatttgtttccctcgatgcctctctaatttcaaaattcagtggtagctcaaattatcttcttaatttcaaagaaaacacacaaacaaataatgttaattatcttgaacgcaaacacattcaaattaaatgtgaaaatgcaaaagcaaacaattaactctaatgcatacaacatacctaaaaaaagtaaatgccaaactacatcaacgttagacaatagcgctaaatatatattttaagagttaagacatcagtttcaatatttctaaacccaaacaaaaaacctaaatgcaaacgcaaaacatataatatttcttcttctctttttcaatcaaaatccacaaaagcaaaacaaacaaaaaagcacaaataggctcaagaaaaactaatttggaagtggttagaattttaagattgtttatacgctttttattttttttatgaactggattgtttatacgtcaacaataacaaaaatgaaatatgagttttccgtttataaaacttctaaacgtgaagctattatctggtcccctcgatatgatttttgtaggcaagccactacgagaactttacttatcataag

SEQ ID NO: 36734 - DNA, 582 bp, Arabidopsis thaliana columbia
catcaatcaacaagctacataaagaggttgtctaaaagcattttctgtgaaaaatggctggccctgatccctcgtaatctgcctttgatatccacaccaaacatcagtactttgtgtgaataacttgaatcatcatcacacggttaaagagtttacggtacctgttggaatgtgctaagagaagccaagatggatcctccaatattcttctcaggtggtgcaaccacctgctgctaggtgccaacccgtgatctctttggttatccgatcagcaattcctggaaacatggttgatccgccactgagcacaatgttaacatactagtcctttctgatgtcgaaatcacatttcatgattaaattataagttgtctcatgaatcctcggtgcttccaatatgataaacgatggttgaaagaggacttctggaaagcagaatcattctgcactaatattgatcacctgaccatcagggcgtctcgtagcttttctcaaattgcaaagctcgctttcgttgtctcaagttatctttatgtttgatcacagcgttgcgagaaattgattttagtgtagtgactgaag

SEQ ID NO: 36735 - DNA, 802 bp, Arabidopsis thaliana columbia
gtttttccagcttcgtcatttcattacatttgagtatctttactttatttttgaagaatttagaattgatgatatacgaacaagatatttgtcgatgaatcaatcattgtaggtaaaagaatcagccacttcaacacgttatttccaaaatttgataactaagttttgtttgctcaaccaaaaaaattctgtctgttttaaagatttcgtcactcttttctcattttttcttacaattatacaatttcacatcattattatgaaaaaggatacacggtgtgtagtagctacaaaaattagaaagatgaatatatgtcaccaaattaaatcattttatttaaattttccctttagtcaagttgccatataagtatataacgtgtttacatgtgaacaactgaaataggaatcaattctatttttcttcattcgaatttcaaaagtaagtaagtcatccacttcaattcataaccgaaaaataaaagtaaattgatagtatgtaaaagtaaaacattctttaagaaaaatgagatgtaaaatttcacatacaagatacagtaaagtgaccatgtgaatcttttttgttcataaaaaatcattttggttaatctagaggaacatggtgtgcgaatctatgaccataacttcaaggacacgatgatgagttgtgtttttcgtctttgcttcttggaactttgtgattttttgatctgtgaatcttgtgattagtacgaatcataaagccttgtttggctgtttcccattcacgacaaaatactgactctgtcacttattatttatc

SEQ ID NO: 36736 - DNA, 958 bp, Arabidopsis thaliana columbia
tgttaacttccattattcgttgcggagttggttttggtccaataattaaactttcataaaattaagcataactaaatgtgacgtttgtcaccaaactttagaacaacgacatcgtaatttatttatttggataatcaatataatttacgatttcttcctacatatatatcatatcactataccaccgtcattatcactatcactaaatataaaaatgttaaaatgatttcttaatggaattttttttgttaaaagtttattgacacaaaaaatgaattaaaactcagaaatctgtatactgaattaaaacttgtaaatataacaacaaaatgggattaaaaaaagaagtggcatccatttaaaaattatttgcgaattcgcccgtaacttcttaagctaacaattagaacctaatcaacactagttattttgagtccaccgacaggtgatagcaaataaaaaagaacaggctggtaccagagccaacaacaacgtggcttcttcttttttttttttaatataatcaaacaatcatactttgtcctatctctttcttgcaataagattttgccacgtcacatactaagaagctggcgcgtctagtggggaagccagaacggctcactttaaaaagtagagagatgataacttgagccgaatagagccgagctgagctaaaacggtgggagaggaagaggctactactaccgtcagcgatctccggtagaataatgtacgtgtcatttatagattaagaaagaacacatcactctgcgataaaataggcaaaagcagattggaagaagaagcagcttgagatatctaatagagagagagtgtgacagaggagtgtgtgaacatccgttttttagtagatttgggttttcgagatgccgtagtgaatcggctacgaatttcccagttttgaattttgtgaatctctctctttctctgtgtg

SEQ ID NO: 36737 - DNA, 859 bp, Arabidopsis thaliana columbia
tatttgattgttatataagtatttctcattattattttgtttaattgaacgtgaggaccgcttaaaagcaagtttgtagggatcgtatattgtataacataatgatataaattgcattttcaacgattgttcatctccgtggacagtttaacaaacatgcaagtcataaacattaccattttctgcaaagccacgttttcttgaccattattgccaggttaatgttattaaacacatcttagaaaattacgtatatatatatagaaatatacaattctccatcagctttcattcgggtaaaataataatacagggattaaaatttaaacataagtttcaccgaactaattaaatccacaagttatggagagaatttgtgtgatcttataaaataccggctttttaaaacagacctgaaaaaattcttgaggtattcttcattactctcacttcaaattgtcataatatatgttccattaccattattctactctcaaaacttcattacaagcgggtaaatgtaattttgaaatgctctacagagaaacctacagttcagttctgatatagctattgctttaaactaaataagggaataaaaatgggcaaaacttgaaagtttctcgcctctccttacactctgctatggttaagtaagtgtgtcatgagtatggaactaagttggaacctgtacagaaaatttctgggctctctggtgattgtgtgctctcttgattcatctggttcagccattactggggaaatgctactggggcagcgaggggctgtgccacgttagcaccaacgggatccaaaaccacttgtctacgttgtctcccccggagatatataacggtta

SEQ ID NO: 36738 - DNA, 478 bp, Arabidopsis thaliana columbia
ttttattgtgccgacgtcaagaacctagttgaagattgaaaatatatattagatacaatttttaattatatgttatcttttttttttttcttgtctaaattatatgtatcttaaaatcgttaaatcacaatggtttttgtggagtcaagtcaaatgcatatggtgaatgattaggagcatctaacttctggctgatagctatttgacggctacgatgcatctgtcatataaaatggaataacggccagtagttctcatagaccgctattattttggccaacagattgatcgtaagaaaatataatagttgtatacattagtctttttggacacaaaatttttgatgaaaactttaacgaagttgagacgataagataagaaaaaaatgtttctcatgaaaatatagttacatgacataaggaatgcgtatggtaaatgtttgttttttgaaagtttcattatgataaaattagtatat

SEQ ID NO: 36739 - DNA, 930 bp, Arabidopsis thaliana columbia
tttaaatcatgcatctccattatgagtggagaggatagagaatgaagggagtaggtgtgcgtatttttctttgggaccaaggaaggctgaaacagaaatttccgttttatatttttatccaaacataaccgacgggaataaaatatatccaaatttgaccaatcagttcatgacacgtatgtagcacaacatgctaacttgcgcaaagacggtggctaacttgtgccaatgataaggtaaagaacttgtgacgacgacgataccgtgaagtgcagaaactctctattgtcgtggacttgggaccaacgcagagagctgcatgcaataaacccacatggccacactacatcttataaaatcttattcaaataagaaagagttgtaactggtctctcttataaattaatctgcatacaagaagtgagcagcaagtaacaaaaaaacatccgaaaattaactattgctaaatctcaagatcaaagataattgtgaatgatcatcataacaaccgtactcaatcaaattcctgataattacgctctctctttatccatttcatgaaaattgattttttcgtttttgtttgattttgtggcatgaagattggtgttttcgtatttttttatgtgtcctaatattagttaattaatatcagttcttcttcattaagcaatgctcttgggctcatttaggacttaaaaatgtttcttgtaatctcaatgttcgtggggtttttggttttctagcccatgtgtgggttgattaactttctaaaagattttactcttatgggattttttaaaattaaagccaatgactaacttgttggattatgatttataacctattggtgcataattatgatgtgtgaacaagtttttaaggaatcttggcgaatgacaaaactttggaaagaagagaagaataagg

SEQ ID NO: 36740 - DNA, 903 bp, Arabidopsis thaliana columbia
ctaatcgccggcctgtagcagttggatcgtcttacgggaactgagaaaattataaaaagacgcctcttatgtttctaaatgctaattgttcccaatactttataattatttcatattcgacccacatattttacgtttatcgaagtttaggatagtttcataccggaccagaatatttgggcctggaccaagagaggcccataaaatagagagaagcttaacgtcaagaagacgcggagtaatctaaaccaaacagcttatctcgagttcgtcggtctcaggtgggcagtgattataacttcgtctccgtgtctgttcaagctcccattcttgtggccttcacgcttcaggaacaaagaccagtatctctctgaaagactacttctcggaaattttcgtctccatggtaagcaatctcttttcgcgcactcactttgatgatctccgttttcatttctaggttatacgattttcttctcgatcgcatttgttagggttttcaaaattaagactttgagtgtatttatcttgaattcagctgaacaatttcaaaatgcggcatcttcttatacatagatctagcgggttatgattgatctggtcgagcttatcgatttagagcgattgggtttattcacctgcttttgttggttttgtttggtttcctaatgttgaaacagcgattttatacgcgacacttaactcctgtatcatcaattttactgatttcgtgcttcaattttttgtatgcttttaaagtagatcatgtgttactttgagttaatttgccatttaccgtctttgttatatggatttgatgataggcacccgtgaggggaattcttggcttgcaaagggcagtgtccacttggaaggaaagtaacatactgactccagctttga

SEQ ID NO: 36741 - DNA, 428 bp, Arabidopsis thaliana columbia
tatgacagtgatcgccataacttcttctaaacccaatttttatttctaacgaactcactctgtttcataaaataagttgtattagattcgtttcataatataagttgtattgaaccatttttttgttttataatataaattgttttcaaatttttatgtaaattatatattattttaaatactttataattatctatattataaaatctttttttatgattggttggaactttaaaaaagtaaatattactaatttgtgtatttttaactaaaacaatttatattgcgaaatggagataatattaattaatcattggatcaaatgttccgagtcgataattttcatgatcgtgcaaaattaaatgattgaagaaaaaatatcatatgccagaccttttgtggccacagaccaataaaaatctgcccaa

SEQ ID NO: 36742 - DNA, 546 bp, Arabidopsis thaliana columbia
tgtttgggttttggctatatgagagagataataatattgtgggagattgaataagtgagaggacctacctaccttgttggtcttttaacattactacaagtcacaacattggtattggtctgaaattattcttcttttgaatgtcggcaaggaatttgtttaagtactctctacatgatttttttttaagagaaacagaggctgatgtattatgatataggaagcttatgttatacaatgattggaggatcaaccagaagattagacttaagacataacataaagaataaaaatcacattatttgattattattattatttataataaaaaaaaggagaagaagcaagaaatagaaaaaagcattgggctgatgattcgttggtcgagttcaacgacattaactcattggaacgcttcagttttgttcccctcagggtccgttacgcttcttcttcttcttcttcttctttcttcttcctcctttgtttctgattcccaaaaattcgatccttttgaaatggcggaacaacacaataaggaagtga

SEQ ID NO: 36743 - DNA, 511 bp, Arabidopsis thaliana columbia
tcctgtgtagatgtgttgccttgctatatatggttttaattctatatgctcttgcgttatatctagacccttacagaaaaaggaaaagaaaaaacatgattgatcgcttttaatgttttgttcattttgttgtttgtctaataaagaacccatcttttgccctttgaatttcagaacgttcctgtccaattggagaaagacatcttattatctggtgaggtttaaaattctgtctctgatgaatataacagagaagaactgttcactagatgtttctgtcatctaattctaagtttgaataggttggaagagaaggataggtgcttctagttttagaaacctatcatccatacatcccttgcttcttattttcctgattttccaaaggtgactgcagacatgtctagcattcaaagcggcaaacccagatgcagtgtctgaggactttatcagatgggatcatctggagagtgggagagctttgaacctaaaaccactgaaccatcagcag

SEQ ID NO: 36744 - DNA, 464 bp, Arabidopsis thaliana columbia
  unsure (1)..(464): unsure at all n locations
tagaggatcccccatattggtgatatgaacacaaacgttcaatacgaatcataccttggttcttggaaaaatatagaccttggacagcggtatccgtgtctaagaaatatttacttctggtcttaactctgtatggcttgtaagaagtcacttgctggtattgacatctattacgatttatgtgcagaaaaaagctgtgatacagcacctttacatgggaagaaacccacctctgttgactgatattagggtccttcgtcaatctacgggtgatgatcacttggtatatttgtaacgcctcatagaacatcatactttggcctcttccctctttgatctatagtagaacttatgctggangttatgcaggtactggacttggtatgaatttctcgcagcagatgatatgagtgcatacttgctgtgaaattaaggaaaggcttggttttgggatgtggacaaag

SEQ ID NO: 36745 - DNA, 862 bp, Arabidopsis thaliana columbia
ctcatatcatctgctgtgaggaattcattccaagttccagtacctgtacacactccaatataagttatactttctctatagaacttagagcttatagaactgaaattgtgcaactataccaagtgatcatcacccgtagattgccgtagaaccctaatatctgtcaacaaaggagggtttcttcccaaataaaggtgttgtatcacaacttttttctgcacaaattatcattccatcaatactaagtcggtttttcgactgtaaactgagctacagttagtggcctagctagtactactacaaagggctaactagacacaaaacgaaactggaaagactcaaaatttgaaagagttaccgcagtccaaggtctatacttgtccaagaaccaaggtatgatcggacgaagaatcttctgagaagcaatctgttccatacaaataggccatatcctctccacggcatgattcaaccaccgcaccgattcagaatcagatagaacctacaaagttgtatttaaaaaataaaaataaaaaaagattaccatttcatgcaaacaaaggtaaagtcagtatcttccaatacaagattgagaagaaccctagaacttgaacaaatgtatacacaaagcaacttaaagtcttaaacaacaaagtagaaaattacacgtctctggttagcttgcttcctctcttcaaactgcaatttcttcctcaatctcatcacatagcgttcatgaacctaaaagaaacccaccaaaacaatatttttcccaaatccaataaaaattgaagctttaacatctaaaagaaacatttctccagagaaggacaacacaccaggtaaagataaacgagagaga

SEQ ID NO: 36746 - DNA, 948 bp, Arabidopsis thaliana columbia
cttttgtctctcaaatcatttcattatttaagagaatctgactaaatctatcaaaatgtttggtgaagaaagtaaaaaggtaaaaatacggaataaattcgaaaaggattctataggataaaattttgtcaactaaccaattttagcaaaagaaaaaaatcatttgtcttaaaaaaaaaaaacatttgtcaacggtcgtaggaacaaatgtgttttaatctgaaatttttacacgtagaactccatatttgttttttttttggttaaaaactccatatttgttggggttgtattaacttgtgttgacaagaacaaatcaacaaaagtacttagtgtaagggatttgacaatttagacagtcaaagatataaatctagaagcagagaaaaatggtgaaagtcgtctcatctcaaataaattgatggaagaaattaaacacaaataccaacaaacgaaatgcacgagtcttttacatactgattaaagtttggtacattttttaaggtttataaaatgaagaattaaagtatttttttctttgcaaaagtatcatattctccaaaaaatactcaaactaaatgtgttaaattttaactcaatatattaccaatacctttttgctatttacaaaagtggttgcgaatatgatcacactataatttacaaaattggtataacaatcatttatactttcagacgtaagccggcttggatcaggagctagtggatcactggaggatcttctttgctgctccaaggtcagagtcagagacgtaccacatcacaacaattgttttctctctatgttactcatttcctatcgtctgttacgttgagccatttgaaccgcattctcgccaatggggttatcgaggccgaggggactaggatggatagttcttgtgaagaggatctgaaatgtctaagtcgttgtgagaagtatatatt

SEQ ID NO: 36747 - DNA, 853 bp, Arabidopsis thaliana columbia
ttgtcaacattcttgttaagttttattgcatgcatagtattggtgtagtactgttttaaagctgccttggattcaatgcgacatgagtatgtaaatatagctatggctagtctatcgatattgtggcatagctatatttacttagccatgtggattcaaaggtcgaattaccaagtgagattttgtatattgtggcagattaattgagttcttaatttcagtctgatattttgagtgaatatgatagagaaaaatatggtagaatttaaagtattaaactagttaaatgaaaaaaattatattagaatttggtcaaagaaacttatttatttgtccacatgtgtaatttaatatttccgatgaaatttgtagcctttaccatctgttttctaggttgttcaataatggaaagacttttacagtgaagcagaaaaaggagaataagaacatgaatccaaagttcggtttttatatttttcctctttatatcgtgttgttttgttttggagggtcataatgcatgtggaatcatcacagaagcgcacatgataagtacgacattcccatcctctccattattattattcaacgccactctttatacttatacatatacaaacatacattgatatccattttatacatatatcactatatttctcacaaattttaaacaacaatatccacatgtgattagcttactcgacgagtagaaatataaggagttttcttcggcaaagagagaatagctcagtctcatgattcattcttcaatagtcgggaaacaattatttggcatctggaatggggactgttgtgcgaggacgcctcatgggaatatcttggaggttga

SEQ ID NO: 36748 - DNA, 633 bp, Arabidopsis thaliana columbia
ccgagtcgatatacttgtgattcaatattaacttagtcgtaactcagtcgtcatattatacgactatgttacgacagatcttacgacatcgagtattagtcgtctcgtagtcgttatttagcgactaatgttacgactattttggttagcgactatggattcccgacatcgggaattagtcgtaacatagtcgtaactactcctttaacgactactttgcgactactattgcagtcgtaaaaaccgtgttttcttggtatgtgataaaaagaatgtgtttctcttcccttataaaaaaaaaagataatgagagattgacaggattttcggatagtgtataggggtaggaatgtttcctatgaccccattattatacattatttggaatgatcaattacaaagcttggaaaaatgccgagggtgtcgatccagtatgcgagtttccctttgtttactctctaaaatgaataagtctgggggagagaaagaacaccaaagagaaaactatataaagaatggtcgatttatcatggtatagtacatgagtgagtctagaaggatcttgaatgttaaattgtttgatgagcccagcgatgaaagcctagtggatatagttgttgaccttaggtatgg

SEQ ID NO: 36749 - DNA, 488 bp, Arabidopsis thaliana columbia
ggtcgataatttcgttgaaaagcagattctggtgtccttttgatcgagtttgcctacaacgactaacaactagactttaacacatacatgagcttgataataggtttttaagatcaattaatcctaaagcactatcatgtcgttgtagtactgaaggttgtcaatccacatgagtgtgatgctagcaatcaagatgcaatcagagttcacagagtcaagccaagcaataacagggtttgagtttctagcagtccttagtgaacatgcagatgacaggaattcaagcagaacaatcaaaacactcgaccaacacagcttgttaccaaccattcggtgtggttgagtaacaagcagacactgtaacaaagatactcgactgcacagtctgttaccagacaactgggtgtggtcgagtatgttaatgataacaggtatgacatgcgagaactaagcaacgagtagtaagaacaagtgaacaatagtagtgt

SEQ ID NO: 36750 - DNA, 569 bp, Arabidopsis thaliana columbia
cactaaggagacatcacgtgatcccacttggaactgaaaacgtcaaaggtacgaggaagagacgtggaaaacagactcgaacttttttgcttgattctagattgcgatccaaacagttgctaggaaggaaaatacttactccattagtgaacgattcacatggtgaagaggaacaggtggaagatagagtatcaaggccctcagatgaaaacctaagaagatgtctaagcaactttgagagttattatggtgagaataacattccggagcatgagaggttacaaattgtttattcaaacttggatggagagactggttaatggataaagcatctctcgaaaaagaattcacctacaagctggaaggaatttaagtgtatgatggcccgagagacaaagacaacaatgaatgtaaatcatcaacctcattattcgggaatacaacatgaaggatcagtgcgtgaatacagagaaagatttgaagctatttgtctaggcttagttactttaccaggacaacacttagaggagatattcatcaaggtttaaagcctctttcaagatgcagtt

SEQ ID NO: 36751 - DNA, 567 bp, Arabidopsis thaliana
gggtttaatgatttttcgactgttttaatccaatttgatagctcacaagtttaatagaaatttaacgaggaccaatccggttgagttggaacacggtccgaccgctggatcattcctaattttaataaaaatgaaccattattatttgaactagattttaacccgcgatacaccgggaacaatttgttttttaaagttattatatataaaagtttacaaattgtatttatctataaaatattttatataatagttaacaaatgttattaagtaacgtcctgccaaacccgtcccgtaaaaaaaacatttattttattaacgttgatcttatttatgatatgtttataaatcattgtctatagattttgtaattttgtagtaattaaatgctatcaaattatatctctgcgctttgatgattataattgaattgttatagtcatggagaaaagcaatatcaaaaatgataattttgtagtaattaaatgatactccctctgtttctagatcattgtagtttaaggtttttcacacaaattaagaaaacatacaaatttcatttaattt

SEQ ID NO: 36752 - DNA, 416 bp, Arabidopsis thaliana columbia
cccgccaaaaacgtaaacccgagattttcccgccaaaaacgtaaacccgtaaaaagtggaatccgtaaatatattaagttttgatgataatgaattaataatgataattatttattattattttataataataattaattatgttattacttaaatgggttaacccatttaacaactcaacccattaaattaaatgagttatgggttgacttaacccatttaacacaatgagttggatcaacccataactcatttaaccctaaactcatttgattatgagtaccgtcacgttctgtacccattcgtgcacacttagatctactaccctctcaattaattatacaggattcgagaaaatttaacaagatttatttagttacatatagtagaattcaaatctcatatttttactggaa

SEQ ID NO: 36753 - DNA, 575 bp, Arabidopsis thaliana columbia
caaggtttattggagtggttaaatagagtaagtggccgaggacatgccacattacttaaatttttggctgtatagtcgtttgcgggattttgcggccatgtcgtggaggtgcttgtggtggaaggagctccgtcgcaagcttggcgtgtgttggcacacgtttaggataaggataggatcaagagtggacaaagacgagtttagataagggtaagcttgaaatcagataaggataaggttttagataatgtttatccgccacctcgtgcttccgttgcttgctccccacgttttcccacccctataaatcgctcagctcgccatttgctctctaaaccacgaaaaatcacatttagactagttaggttgtgaagcttctcggagaagccgtggtcgagagttgagttagtcagataataggtaagtagttccgcccttagtctttattctcattagaatatttttctaagttttattttttgtcggcggcttagatccatcatttgtaacgcacccagaccgtactagaactcggccagtccgatacggcccggagacgccacaatggaaatgag

SEQ ID NO: 36754 - DNA, 555 bp, Arabidopsis thaliana columbia
tgtgctttctcgagtaaagttacttttggatataattattggtggccgggttaagcatagcagaatgagaagggaaggaattttgtgaatccatttcaagttagatcaataaagtgacaaagcattcgtgaagcgtatgatacttgttcaggagacaaggcatggcatcacatactaggacagattcgttgcttaatttatcagcttttagagaatcatataagtggagaaagaataactcaaagcaagaaaaggaatataaactgcattaatacaaaaacttatcatatccctaatatgtaacaagaaagccattccttctcagctatgaacaacaacagaaatggctattcctctgttccaaatcaacccaattatagttatgattcggatacacgatcgtcgggttggcgagttcctgctttctcttcgcggaatgcttggtctaggagtaattcagtaaatcaacttttcgtcttgtcatagatatacacctaggaatgttttagcctccttatgttttaatattctctttcagatagttacagacacttg

SEQ ID NO: 36755 - DNA, 541 bp, Arabidopsis thaliana
gttgattctgttcgtcagccatttcgagtggttgctgaggtacaaggttaactgtggttctcctttttctgagttcgcgagttgtgcggttgatgttgtcgttgaaaatgaggttctgattgcctgttgatcgagttcgcatacagcagaggtatacctggatcaagaagacaacaagtaaaacacacagttagtaactgaaaagaaaattgaaaatgaacttgatctaagcaagtctgaaatctcaaatgtaacaaacaaacacccaattggcaacggcgccaaattgataataggtttttggtcaattatcctaaaacaccaatcatatcgttgtagtattttaggttgtcaatccaaatgggtgtgatgctaacaataaagatgtgatcagaagtcactaagtcaagccaagcaataacaggttttggtgtgttctagcagttctaagtgaacatgcagaaaacagaaaatcaaacagaaacagtaaaacactcgaccaacacagctctttgcagacactgggtgaggtcgagtgaca

SEQ ID NO: 36756 - DNA, 609 bp, Arabidopsis thaliana columbia
agagtctcgtctgattggtttggttagctcaaagttatagtgcagatcgagacaaatgtacatttttgtgattcgttgatgatgaatattgtagtctttatgtatcgatgcatgtagcttaatctcgttagtggtttcgattatctaatcagaccaaattgatgtttgatcatatattttaccaatgcactgtgttatagtgcggccaaatgatgagtcttttgaatgatttactctgatttttgccgaaatggctttggtctaaggttagctagtgaacatggcaacgggggctgagaaccagtggctcaaagggagagtgaaggctgttacctccggagactgcttggtgatcacggctttgacccacaacagagctggcccacctccggaaaagaccatcactctttcttctcttatggctcctaagatggtgagttttaatctcaagtttttttaccagatattagtgtttgaaacaaaagcttgtgatcacacaaccaatcaaaaaatctttttgatatttgattttttatggtcatactgcttatgaagcttaaactgcagattatattatttctcgttggaattaaatgtcatgttgtttgg

SEQ ID NO: 36757 - DNA, 523 bp, Arabidopsis thaliana columbia
ttggtcaattcttaatttgaatctttgaattttaattgaagattcagtttcttgttatggtttaatctgtttgtgtagtggcattgtggtatataggatagatgaaaagtgaagctccaagttcgattttacggtgtatgattagagttatgtggttattcatagaaactttttagcctttttacccgaaattagactcaatctttttagtcgaagtagatttaagttcatagttcggatgtttttttatagtggtagacttgcagaaaacatccgagctatgaatttatatcgcttttatgattagttagaagttttggagaaatttgatatccaagtaataaagtatttgagtttattgtaattttaagaagcatgattgcttccgtgattactcagaagttttgaaaaaatccgattatcaagtaataatacatttgagctacgaacttatagtaaattaaaaaaaaaaaacttgatcacttctctaactacttagaaatttggagaaatccgaatattt

SEQ ID NO: 36758 - DNA, 524 bp, Arabidopsis thaliana
tatctcctcgttagttcctaggttgttattcgcttatctcccttcaccaggtgaccgggctgatcaggcccaagtacccattcacgtatgtgggctcatcagttgcggaggtcctctacttggtgggcttggtgggctttgttggctggcttggtatttttgtaggtggattcctagaggggaatccagctccaacagtctttaagtcggtttagcaagctgctgcatcaccgagcggacatataggtcaggaaagattgcgaaaatattctagatgagatgatagatatgataagatcagtcagtttttatgataagatcacttcggcgcaccgcatctgacggcccagatcaggcgcgaggaagagatctctacaatctcgaaaatcgtggtgatgatggctcctttaaataacttcccacatctccacttgatttcacgttaactcacacgactctcaaggtaacttctcttcatcttaactatttactccgtttagttttcatttttagagatagaaaag

SEQ ID NO: 36759 - DNA, 498 bp, Arabidopsis thaliana columbia
tgctagattctcaaatgtggtgtgtcaccgatgaaggtgctctgatggatttaggtattgattaattaggacatatcttactttgttttcattcttaaaattattgtttatgtacaaacaaatcaaaaaattatctttagatttagtgactaactagcgcgatgcaattcaagttaaagataatctgattaaaaacgaaaaattatatgttagtatttatctaacatcgacattcttcagaaaaataacataaaattatgtggtgagttaaggtttcaaataggggtgtcaaaatgggtcaaaattcatgggccaactcaactcaactcaacccatgaagcctaatgagttaaattttttgactcaaatgagttgatgagtcaaatgagttattggatcaatttgtttgatgagtcaaatgagttgggttgtaatggttaatggtttcaattgtttcccaattacccatcaatttttgtaaaattgaattaaccaact

SEQ ID NO: 36760 - DNA, 716 bp, Arabidopsis thaliana columbia
cacatcacattactcaacacctacatgagaaaggatcctaaaatactcgcgaagaagtatattcgaacactagccttctcgatagtgacagacaagaatacgaatctaagaggcgagaagagaacgaagatagaagacaaacctgatagacataaggctgaaatggagtagagaaaaacggagcagccatggcggtgaaaaccgcagaaagatcttccaaacaaaaacctccgaatccaaatttccacagaaccaattggattagaaaacctttcacgtcgatgcgagacgatcagatcgcagatccaaataacacactcgaaacactctgagctctctcaaaactccggtcgaaatgttcgcggtggatgtcaccgacgggaacccaacaaaacgacagattaaattcgcttaaatcggcctgaagctgcacgtggaatctgtttacgtggagagatctcattggtcacaaaatacacatcgacgtaaaatttcatttccggtttaatataattacatttcttctcaaccaaccctctttcactagatttatttggtacaaaatttcttattcaatagccggtttaaagacattggtacaacaattacaaatcttgtcgaccactagagacatctacagaactcacaaaacctttactaagcaaccatcccacgcaacctttactcttccattgttgtgtgtgaataacagaaag

SEQ ID NO: 36761 - DNA, 508 bp, Arabidopsis thaliana columbia
gtcttggttgtgtttgtggttctcaggaacgaaggaacaatgtggtgattgagtaaaaattcaaaacttttactctacagaagacctggagatcgagggtatagcccgttggagtacaaaattttgaaaatcatctgttgcacctggagaccttgcactcgagtacattggtcgagtatgtgtgatgtttaaaacccaaaaacttttaaatcatcattttactcgaccaacagaagctacagagtcttacagggagtttatcaaattttaagtagatttcctgcagttttccagtcaacagagtgtggaccacacgctgaggataagatggagagagaatctcaaactcaatctcagccattcctttcactcgaccttattctctcctgttctccaccactcgacctaaacaatcaactcgacctcataagccctagtcgtactcgacctccgccggcgtcacacagttcaacaattcactcgacctccgaggaccactcgacctagg

SEQ ID NO: 36762 - DNA, 844 bp, Arabidopsis thaliana columbia
gaggtttaaatttgagaagactaaaaagagattttttgactgtcttcatgagaaaatgcttttgaaattaaaaacaaagtagagaaaggtgattctttctttcttattaccggcactttttcttcagacagatatattttctgtttctaaggtttttgcgtgtgagattggaattataatgaaaatagtttagctttttgttttttttctcagacagagcttgtgcgtctcttagtgttaataacgatgtttacataaatttataacaggagttggaatttatatatctgaaaaatacacacccaaatatgaaaaactgttcattttaaaagttaaaacccaacttataacaattaatgtatccaacgagagcatgagtatatatttgagaatttgaatcgtccgatgaagatatatcgaagggtggaaaaagagaagagcacgtcaagtttggtcacaccaaagagaaatgtgtggtttgatcttatccgttagtgtcgtagaccgaagtgggacctctaagcagctgtcacatggggttttggtctcagcaaaacaccacgtggtgtccgttgctcagcatgctacgtggcgagatctcagtgcttttgtcaactaaagatagagtgtcatttattttatatttagcattactttattttaaaaaaattcaatataatatattccttcggttacttattaaacacaattttagaaaacaaaacattatacaaaataaaaatatttgttttgctaaaatgtttctatttttttattagttattgacgataaattgtaaatttataattaaattgaaaactataggtttaaagtttgaaagaat

SEQ ID NO: 36763 - DNA, 528 bp, Arabidopsis thaliana columbia
ttcgttgatgaagatagatgaattgtgtagaattaaaatcgagttttttatgaaatagatagttaaattgtattacaaaattgaatgtgtaagataaaaatttgtctttttcttctaaatactaaattataataaagaaaaagtgtgtaggttattatttagacttcaaatatcatcaataaaattaatagggtacaagaaaataaagggcttattagagaagtagacactttttagaaaataatttggaaactaggtacttcttttagaaatatgaggaatgggtagtttttgttgggcttgtgagatggagagcatgtgagatgagaaaaaatgtggctaaaatctaaaagaggtgtcaaatactattgtagccttgtgttttaaaacacaaatttcgtctgggttcgaaaaaataaagactaatgggtatactaatttattagtggcccatttactctattcagtgttaagtgacccaattattgagcccgaatgttacatttcgattttatcagaaaattattg

SEQ ID NO: 36764 - DNA, 511 bp, Arabidopsis thaliana columbia
tatttggcgtcaattagaattcagagaatactgattctgttgtctggcaacagactgtgcagccgagtatccctgttacattttctgtttgttacttgacctgtcactcgaccacacccagtactctgcaacgagctgtgttggtcgagtgttttattgtttctgcttgattttctgttttctacatgttcaattagaactgctagaacacaccaaaacctgttattgcttcgcttgacttagtgacttctgatcacatcttgattgttagcatcacaaccatttggattgacaacctttagtactacaacgacatgatagtgctttaggattaattgatctcaaaaacctattatcactttgtaaatcattttaaaatctttttaaaactcttataaagtttttaaatctttttttactcttaaaaagaatttgtaaatattttaaaacatctgtaactcttttaaaagtattgtgacccttataaaaggtttaaaaagattacaagagt

SEQ ID NO: 36765 - DNA, 552 bp, Arabidopsis thaliana columbia
tgctgctcttttaaacgaatcgcgagaagaagaagaacccaagatttaaagatacgaatcagaattatttatctatctcagagatgcgattccaaggtatcgcgaagaagataacaataaaaatttagagagaaaacaaaaaccctaaaaatggattcgatgattttggtaaagtgaagaagaaggcagatgtgagctttgatttggttttttctttccttttgtgagttctatatggtgatggcagcgcgtggtgtgtacacgcggcaaaccaagtacgttacgcggtttggaaattgttaaagtatggttttgcccttgagcgactttgggatattaactagatgcaggggtaaaagcgagaagtgaatgactgttgtaaaagaaggtgatgagaaatgtcatagaacgaatgatgtaatgacacgtggaaaggaatggaagtttcggtgcatgtcactttgtttttgggatggtgtacgcttttcttgacttttggaacttgtcttttttaatttatttagattttttcgctttctttgacttttggaa

SEQ ID NO: 36766 - DNA, 1354 bp, Arabidopsis thaliana columbia
tgaacgcaaggcattttgtttaactggagatcctgaagttccataataatggtggatattctgatccagcttgtcttgagagtgtatcaaaaagttgtgagatctttgatattaccacgctgtttgtaggatctcttggagcatgctccgaaaacctttcttatgcatcaaactcatatgttctggctcaatctctactatgttcttactgctgatggcacactatatgcaggttcttatcaaccaattaaaggaagtttctccagccatacaaaagtccatatcggaatgtactgagatggttaatagtcttcccccaaccttgcctccagttacgagaagtaatggacaagcatcttcacttctacaatctcagggcagtgggagaattatggtaataggggatgacttgatttttattctcttctgatgcataatttattgagatgctcatgtaaatttttttcttgtgatacaggaaggtgtatcaaatgatgttgctgagctgacctcgacaatgtctaatgttcagctcgagaaagtctcagctagtcctacattaaagcttccacagttatttagttccactcctacttcttctggtaaaggaggaaatggacaaaagcgacagacaatggcttcccaggtcaataaaatggaaagcttgtctgagaagaactctacagaccaagcactatcaaatgctcgaccagacaacttaccgactggtttgtgacataataaccttctctactaaaacgaaacatgtatagtaatagaatatcaaaagaaggttttgctgatgtgaatttttaacgcttttagttttggtaccaatcatccattctacgcctattccacttcaaactaattaatgagtagttcatcacaatatgtgttatctactaattcaaatttacactctaattttggtgtcagatacaagcagttcttttgtccataacctgaagaaatctgtgagggaagcggctttattgattccttcttcagcaggctcatcacgggatagtcaatccgatgagggctccgagcattattttgtacctctttcagcaactggcttttcccgttttccatcagaaaccaaagccctgcctctcagagggtcgagagcacttacctctctgagcgagccttcgtttcttgaacccaatgttcccgatagctttgcaccaagcaagtacagcgatatacctgacacgtatgatgatcttgattcattcaaagattacgataatgggaacgggttcctgtcggttgctggatcaaacagtgtagcttctgatgcacaacaatcattttacgatatcgatgatcaagtattttccccacc

SEQ ID NO: 36767 - DNA, 538 bp, Arabidopsis thaliana columbia
tttaataccggagaagtccacaaatattgttaattttgccaacatcggtaactagaaaaaccctgacgatatgacccaaagtatgaatcttttgagttttgcatcttagacagataataacgatactgaacaagaatcatagagataaaaaacttcagaaactaacaatccttgttgaatctaaagcaaatttgggtcaaatcaatcagaaaactcaccgattttcatagcattgctattggtgaatagatacataagaagatgaacagttctcatactgaatctctgttgataagaagagagagctccttgaagctccttatcatcaataaagccactaccatcttgatctgcagcctgaaagcaagccactatattcggatctgtccccggagcaaaacctgacggaatcagagaagcaaaaggacttccataagaggcttgcggaggatacctccgtatccgccaccgtgaccagaagacgctggacgaggtggagcaccacgtaacttccatagtcagaaccccatgcggtgga

SEQ ID NO: 36768 - DNA, 526 bp, Arabidopsis thaliana columbia
gttagataattaaaagggagattcttaagatatttatcatattgaaaagacatgtatgaacaaaaatcattgaagatagggccatgcttatctctctaatgattctttatcacaaaatctatactattaactgaaaaacattttgtgaactacaactgtgaggatatctttgacaaataaataaataacctgataaattaacaactaatacaactaaataaatatttttgatttggatcctttattaattttttgcaaaaacaaataacctgattaaatgatccaatatattccgagatttgcttcgtcactatttttactatgatttgtctactaaacaaaacatcaaatattaaataactaaatattcagcatcaatatatttatttcgaatataaatcgaactattttgtatttttcaatttattatagataagacaaaaaacaatcaacataaatcaaatgccattaattgaaaaatacaaaatattttaataataggggctaagtaataataattatgtta

SEQ ID NO: 36769 - DNA, 540 bp, Arabidopsis thaliana columbia
ttatacttgattaaagatgtttagaatatttaacgaaaaaacgtttagaatatatataatatatgaaatctataaaattaaataaccatttcaaaaaaaaactttgaaattgatttaaattataaatcttttaataaaaatattattagaacaaaaaaagaaacaataatgtataattttaccgaactgaattagatggtaggacgggtttaaaatattataatgtatggattttataacaattaaataactacttgaaagaaaattttaaatttaatttgaattatatatctttgaaattaaaatattattaaaacaaaataacaaaaccaaaatgtttaatttactgaacggggttagatggcaggacgggtttgggtcgacagtaatacgagacggtatatcaggggtgaaatccattagatatgtttagtttcacttaaggggattagatggtatgacgggtttggatcgatagtaatacgagacggtatactaagggtgaaatcctagatataacaatcaaatacaattatatta

SEQ ID NO: 36770 - DNA, 226 bp, Arabidopsis thaliana columbia
ggataacaaagtcaaaacagcccgatgatgatcatcatctacataattagagtgtcaatgactctgtattcacacgttctcgctctcatgatatgtatgccgatagaatggcttctccttgtcgagattcagtttcactattctgaggatctggtgctgcgtggagtgagagtacatagagcccgtcatgaacctctagttacaagttacaatgtagagagagatt

SEQ ID NO: 36771 - DNA, 548 bp, Arabidopsis thaliana columbia
gtcgacatcacccaaaacccttagaggcttatttatactaaaaacgataaggataagaaagcgggctccaagcccacgttaacggcccatggacgatgtgatcaagagtgtcggctcaaagcaggcttccgaatgggcttcgaatgggccttctcttctcttctctttccgttgctaaggttgtctggttgtgtgcagattgattagagggtcgaggtggtggtcgagtaggttggtgacagaatggctgcttccctctctactactggtgatcgagtatgttggtggaaatgggactttatgttctgtttttcctctttctgatcaccaatatctccaaagtacctgaaacaactccagaatgcagaatgtatgcaagactagtcctagactcgactaaagatgcaaaatgtacaaaactgatgatgaatgctatgaaagatggatgaaactagactcaaaatggtgataaaaggatgtgtaaaacatgcaaattatagacatatcggaaatcagcttatatagagctgagtacaacgttctaagac

SEQ ID NO: 36772 - DNA, 409 bp, Arabidopsis thaliana columbia
cccccctgccgtcccccccccccccccccacaccagatctccagacgcctttccttctgtaaacctgcaaaactacaccggatcaaatagcgatacggcgtcatacacgccatctggtaaggctggtaagcagaattctgcttccttttcgtatgttcttgattactttaaaaagcttatacatgaaatgatagggtttttatgttttgataacgtacttatttgacctgggataagcactcaaagtttatgcatgttggagtgtatgggaggaattgtttgtcttgtaggtcgagatagtagcgaattaaatatgtgcgacatgcataaatgagtcaatctactgatagacatgggagttggttctacaggactaacaacaatggtgtgtttgtttgaacattggttt

SEQ ID NO: 36773 - DNA, 600 bp, Arabidopsis thaliana columbia
  unsure (1)..(600): unsure at all n locations
ccctttttgctgtcagccaactaataactttgactctgttttcgttttttttcaggggacgaatcatgcgtctccatggtcggccgctggatttgctactcgaatggttggtgggacttcaaaattgataaaactaggccaggaaaggggaaaatgcttaattatttcctaaaatatccaaaatgcgcagattaattccccaattacctcagacgcataataaactcccaattatactttgacgtagcaaagttagacttcattattgtcaacgttaaatattaaacatgtcgttaaatatgtcgattctcatcttcttcttctccaaatcaaaaaccctaaattcctaaagctttatctttaaactcgaaacaatcaactgtaaatctactttccaaacttatcttccctaaatcaaacatcaaaacctaatccgattggcaaaacgaaagttttaattttgcaaactgaaccatgacaggaagaagacgaaagcttccaatacgaaggtatgcacaaaccgataggtggaatcaaaattgtttctaatattaaatccattgatgtntcttttacttgtggtttctgattttattgtag

SEQ ID NO: 36774 - DNA, 378 bp, Arabidopsis thaliana columbia
aaaaacacaagggagttatagatacgaaacacaaacctaagacacaacgcatatagtgtaaaacctctataaattaataatgttgggaccgcaaaattctattaatttatagaggtattaatttatagatacattttcttaatgtcctaattaaatattttgctatgacaatataatatatctcactatatataaaagatattgaccgaaccaaatacaagtaaaaacagttattatgtctaaagaacaaaaccataagtttttgatacaataaaaatagatgaactaaattcaaacaagaactaatatgaatttaagatgacaaaaacaatactagaattatatatcattgaagtttcttacatataatagatagat

SEQ ID NO: 36775 - DNA, 804 bp, Arabidopsis thaliana columbia
tgtctaaaaagaacactcgatacttccttttaattccaccggtctaagtcttctttcattttatatatttgtataacctaatgccgtcacgcacgttaaacatagtcaaattctttattcatatattattattttaatcgcttcttaatcacagttaacatacttggaccaaacctagtccatatatccaacttttaaagcatggatgtccgataacatagttgaaacatatacatataaggtgtgcataaaaatataaataatatgtatgcatgacaaaaaagaaaaatacaaaacattactaaacgaatggaataaaaaaaatctgtatattaatagatgagtatacttattagtaaaaatttattttaaagtaaattgaaattagccaaaaagataaagtgaaaaagatgtaaaaaattgaatttttcttgaaagccaaaaattatttgtttgggcccctatttgtttaccaaataaaatgaaatgaaggagaactcatatatttgaatatgaaaattgaaaacaaacacatttttaaagggagataaattcttttgtatgtaaaatactctcagtgtatatatatacaaaccaaaacttcatttcatttgttcacaatgaaactccaaaactctatctctcactctcctccacacaccaatttcttcatgaccttcttcttctagcagagaagattaaagaaacccccaaatccagcttatactacatgggtcatgataacatcacaaagctcgggagtctactcgtaaagctacacaaaggtccttcaagttggctttg

SEQ ID NO: 36776 - DNA, 456 bp, Arabidopsis thaliana columbia
aatacacacaaattttagaagatatacgtgcatctttctttcccataactgaaattatttcaaaaatcatgatcccatgcatatatgaatctaattatctttgtaacgtaaaaatctataacttctaatagttttattcgtggctcatttatgtaggaatctattaattaaaatacatttttttgttcattaatcccctggtttatgtttcttccataaactataaaataattaacatcatgtacaaatcggtgcattcaaccaccacgacccatatacatagacgacggaaactctaaagctcctctttgccgctagctaatgaaattggggtgctggtcttgaaccacttggcggtgttcttatttccactgttggataaatcgacgttaattagtcctacaaaaagaaaaaaaaaaatatatatatatatatatatatatatatatatatatt

SEQ ID NO: 36777 - DNA, 582 bp, Arabidopsis thaliana columbia
cacacaaaggcgcaaactttgcagcaccctctttactcaatccccaagatcaagcactcgcccaaaccgcctcaagtcccttgtcttatagtgaatctagaattttcaacattttactataaatagatcactttcggatttgtccaaaggatctagcttttatcctttagtttttctttctgttcttgaatcttcaaaacttaattactcttaatctatttcgttttcgcttttagttctttacgtaaagttttttagcttgtttagatctacattttggtatgatttcagtaatttttgggtttgtgttcttagttatgttgcttgagtagtgattagttttcttgatgatgaattagattagggtaatctttaggttagtcaggtggttaagattatgttagatcccttctggattcggttggcccctatgcggttttcgctggctaatgtggagattcaatcatagacgtccaacgtctaaaagacgttcaaatggatgtctgatctacgaattccagagatttgtagacttgatcaagagattggctagtatgcttagtggctttggtagattattgc

SEQ ID NO: 36778 - DNA, 201 bp, Arabidopsis thaliana columbia
actgagtcgagttgtctagacgatggtatagcgttttggtagggatgctccggatacatgcctttgtggttgtaaagcggaagatcctaggagtgtgtgtatttggtgtgggggtgtttaaaggaatgcactccattaccttgcgttcttgatatgcaattggagtcatgattacatgtgcatgctcatgggaaatactgc

SEQ ID NO: 36779 - DNA, 1036 bp, Arabidopsis thaliana
tctccacacatgtcccctaggaataatggtactccagtacatcgaactttgccatgattaatcaatgaaatcatgaacaaaggcaagaggatggcatatgaggagctctgtaacgcagtcttgccggtattgttatgtctccttaccaaatatatttctgatctgagacatatcatcatctaggctctaggtcacagactagctgttctaatgtgttgtgttgttctctttcttgtagcactggcctcacttgaggaaacacaacggagaacgatatgcatattcaagccattcacaggctgttcttgattgcctgaggaataggcatgagtgggctcgtctggttgatcgtggccccaaggtttttttactaactctccatatgtttcttttctgttgtcttcaacatataaccgataagaaaatgatcttaatatttgcggttgttttcagactaattccgggaaaaagaaacggaagctcgatgcagcagaggaggattcagatgagaacgaaagcagtaagggaggaaggaagcgactgcatcaacatcactctcaaggagaagagtttcccaaaggaaaaaggaaagcaagaaaaccggagaaggctttctattcaaagaaaaggcattaaagtgttgagaaagaagagaaacgaagaagaagttagcgaagaagacgaggaagatgcgttctcggacacaagcgaggagagcatcttctgcgatgaagaagaagaagaagaagaagagggccacactgctactggtactggacaagtctctgctagtagctctgaggaagctcaagccacttcatgagcctcctctctcttctctctatgtaatatagaaagtatatgtgtattatatagctcttgtgtattttaccaaaaagctttttcctcagtagacaatactaataatttaagcttgtctagagtgacatattgggaatgggatgatctttttgtgagctgtatttatgtttttgtggtataatataaagttaggaacacaaatctagtttgatgt

SEQ ID NO: 36780 - DNA, 607 bp, Arabidopsis thaliana columbia
cgagttcagaaggcacttcaccatatagcccaggaatcgagctttcttcttcaaactttggaggcctggaaacaaatacagatggaggcactcatccacactttcagcaggagggaatttggtgcttttgatctgctgttcaacatatgttaaagcattgttcccacagcgaaaagcttcacaaactgcatcagctacatggatagaagctatgagactgttggtaatgcttgcatcatcaccatcaaaagcaattagatccatggcttctttgtctgacgaaacacctagcgcaaagaagaggagccagactggaatctcagtcgacaagaagtacactgtcagtactttctcccttctcttatagtcttctgctttctcattctccgagaggcgcacaatgaatctatttcttttattttcggacctgaaggagactgtccatggtgaattagaaatccacagtctctttgtgcacatctgttcttgagctataaacacctgcaaaacaatataataacgttagggagaagtatacaacttgaaaatattttttccagaatatattagagtcaaatcatctgtcccagagcctaagattgcaaag

SEQ ID NO: 36781 - DNA, 556 bp, Arabidopsis thaliana columbia
cgatacttcttcgtcttctttctccggtacatgacccgatttatggttgttcattcttggtttttagtggaatttgccaaattgggtcttcactgaacttaggaattgagaaaaaagtttcgatctttttgcgtgatttctatgtagaaatgtgaaagtttcatcttttgagttctgattaccatcgaattcgtttccttgtaggttcttcgtcttcttcatcagtacgcacacaactagatctccttgagcagctaacttcaacaagtgatggtacatgacttgctcttttctcttagaattggattttgattagaatcgtagaatcacctgaggttttatatcaatcatcagggtacttaagtgatggtggtggctcaagaggactcactattcgtgaccaattggctggacttgttggtgacagagacgatgatttcagcattcccttaggcaagaacttaaagaaagtgagtcctaaattcttaacgatatctcagaaaaggaacattaagagacaaagctaccttaatgaggtcctcagaggaatgatctg

SEQ ID NO: 36782 - DNA, 503 bp, Arabidopsis thaliana columbia
ttatcactaagttttattttattttaataatattaatttagaatgatatgtagcattcactggtgtgatgatgtgtcattcataaggaaaaaattggtcaacttttatatatatgatttcttttcctttctagcatctcgattttatagcaaatttcatcaactttttgttgataactaacattaaatgaagtcaatgcttgttcatgtatgaggaccaatcttcctaatttgactacgggcgttaaccaaaacagaaaattaattttaactcaaaagcggattctttagttttatttgatatgcatgacgtggaaatcattcaaattagttttgaatgtactctataatattattgtcaaacaatgatttaatatgaagatatcaatttgtactttaaaatgcattaatctaaacgattatctggttctttaattattgtttttctatcgtacgtgtatatatccaaactaatatcttttgagttaggcattttgtcactac

SEQ ID NO: 36783 - DNA, 448 bp, Arabidopsis thaliana columbia
cgtttactaagggaatctgtcggaatactaggctatcggggaccaaaattcttacctggagaaggagaacctaacatacttttgctagattgtcccattgatgtctctgctgctaggattcgagagggagtggattactatggaagcttttgtagacagcttcgttcgtattctgttttcgttggatgggcttttgcgagcccagatccgtgaatgttgttggtgttggatttcttcactcctccgaaatcggcccattattatgtttaaggcccaataaatttggaaaattcattagattgagttttgactaacaaaaaaatttgatctaaaccaaatcctagttaatacggtttagtaactcgtttagggaaaatcagctactgtatatcatggctttggccggtttagtaaactaacttttgactttctacttacttaccgaact

SEQ ID NO: 36784 - DNA, 548 bp, Arabidopsis thaliana columbia
gaagtttttgtcctcaaaacatgtgagccatattgtgagtttataagatcttggatgtttaaagccgaacttaacgatcctcacaaggagttcattgtggaatgtcgcagtgagtcaacatctttttcttggaataagcctggcatctccccattgaagagcgtaagggtaatattttatttgcgtttactgcatctttgactttggtatctttaaaccatgggtatcaaattgcttcatattctgcccctaggagcgaggagggcttgttccgtgtttcttaaacggcttcttggaacctatagtaagggctggtcaacagcttcaagtaattacaaaacttctggaactgtgtaatcttcctgcgtctggacacaaaaattacacagatcttcttccgtgttggacctatttttctaccactagtccagggtacccatctccaataactttcagcaaattacatatagaagtgatgataaagaaaagagacgattactacagaatgatgcaagaaaacttggtgactttcagaaagtttgaagtgt

SEQ ID NO: 36785 - DNA, 336 bp, Arabidopsis thaliana columbia
tcagtatagagttttgtctcaggaaaaattgcgtttctcatgggaatcagcaagcgtgggtttgatgcagtacaccagggtaattgtcgacggtcagtgcttctttcccgtttaagcttcatttaatatacccgttaccaaaaacgttacttctctgtctcctttgatatcatatgaggatgttcagcggttgcgtcagtctcaagccatcatttgagactctgaagccctacagaactttatgaagcaagcagtctcttcaacgagtctattagacgacgcataggttgtgcacgtagtctacgacactgataggaagctatcgtactgcagacg

SEQ ID NO: 36786 - DNA, 636 bp, Arabidopsis thaliana columbia
gttttcagcagagtagtgatccgtgcgatgctacattaggacctgagttcaggacgcaaagacaaaacgagtttctgctcgagtgtttcagacttcagcaacgggcatcggagacagggcagaagctagtttcattgcagacggaaatcaccaggagtaatcaaggagatcagttaagccaagccaagatgaacacagggaggtcattggatttgatcaagaacaacttgaaagaagttcagagaaacttggagatttggctggctagaattattggagatcttgaaggtatacttgctagagacggggcttcacgtgtaagagaattctacgttgctcgatacccttttgttcagtagaatcagaaatctctctatcacttaagactaactcgccattttttttttgtttctgttgccttatgtatgtgtgtctgtaactgtgttaacctgctaaagatcagtgtagaagtctaggtttgatctgataaataagcaagttgtgttatattattaatcattccaaatgttgtggggtcaaatgtgaaaaatgtcaggtatgtttgttagtcgcaatgaattttaaaaagcagattagaatctcaagcacaatgagataatgtcacatatatgatat

SEQ ID NO: 36787 - DNA, 583 bp, Arabidopsis thaliana columbia
ccttactcactcaattttgtcttcttcttcttcatgtgagcttcgatttcatgtgattttcaatcgaatttatagcttttaagatctctttttagggttttgatattgcgaagtaaatcctgaatgtacgacctgattttgttgtaattagtggatattgaagctgggaagaagcttagattgttgttttgagctctgaagaagtgaaattatgagcagcagctctagagagggatctccagattggcttcgctcttacgaggttccagattcaatctgatttctgtttctattttatatatttgtttgaaatatatagaaattaacaattgaaagtggatggttttgttacgcaggcacccatgactacttcattgttgtcgctatcatcttcagatgatgatagtccttatagggaatctgaagtcatttcgtctcttcctttgcctgatgatgacggtgacgacattgtggttcttgagacagaatctgtggagttactgactaggaagaattccgaaacgaaggttgtgacgaagccagtgagtatcgagcaggtgttttctagaaagaagaaagcaga

SEQ ID NO: 36788 - DNA, 558 bp, Arabidopsis thaliana columbia
gaatccacgaaatttgcataatttgagtaagaaatatagaacataattattcaaaaaaaaaagtttagttggttaaacgtgtaatatactaatgtgttactaaataaatcgcgttttaacaaaactatatactattttttttaataaactaacaaaactacacgtaatgtatactaccaaaatttctttgtttcacgattttaatgatgaaataatctgttgttaaaacaccaagaatattgattaatcttctattgctagatcgacctttgcattaatatcaagtttataatcttagaccaaccaccaattttgcttatcaaaaaataaaaaaaccaatatttttttaatgcgtctacgtttacaaccacctatttttacctagtccgtatcttctttctaatcttaagaccaaaaaaggtgattagattgatgtgtgaaaagaagaaaagctatcaacaagttcgagaaataaataaacagagacaaacaatacaaacaaacaatagcataaccaaaaatggccgcgcagatctaaaatgaaaaagacgaaaaaac

SEQ ID NO: 36789 - DNA, 543 bp, Arabidopsis thaliana columbia
  unsure (1)..(543): unsure at all n locations
nnnnnnnnnnnnnnnnnnncagtgtgctctaaaggctgatcaagcaaggtttgtatacaaaacgagtctacacttctcagatgcagcatctaaaggtaaatataccatgtccaaggtgaacttgatgtgtgtgtgtgtttatttttatttttttggtggaaatttcagaatgatttcagcagcaactgattttacataagaaatctgttaagggattatgttgagatctaggtcttagtcgctgaagaacttgtttgccatgtgagatctgatatgggaatgcttgcttaggatattgccggtactttggcttcggaagaggcagaagatgctggtcaagtcgcgacgttcgatcagctctcgagtctgttgaccacaaaagaagaaaggtaaaccctgaaaaagaaccgtatgatgtcatatcgttaatcccactcttgttatctcttcagagtttttctcgaacctaaattccattttctactatatcagattttgcaacaaatgagaagtgatgcagctttgtttaccttggaagaaggc

SEQ ID NO: 36790 - DNA, 442 bp, Arabidopsis thaliana columbia
gttttattttgcctctggcttttacctgaaagaccacacaactactgcaagtgcacagtatatcggaatagtattttaggatcgaatccacaaggagagaaatagttcagagaaatccttaagaagagagtgaggcaaggaccaaaataaaagagagggggttgttgtaagcaatgagtaaccaaaacaaaaggcaagtaactaaactaaacggcaagcaataagagagaagcgttaggtattcaggggtttctccaaatgtcatggttcaataaataagttgtagatctcaatctaggtcataacatggctaggtttgtttacttccaaattctcggacatacgaaactctatcaaaactagctaaccctaacggttagttggtgaaagccggctattatcactaatattatgtgtactcagttgccctatcggctagtag

SEQ ID NO: 36791 - DNA, 435 bp, Arabidopsis thaliana columbia
cagatgcgctcttgtaagtcttttaaagccctttaaaatctcttgtaaatcttttaaaacctttttaaaatctcttgtaaatcttttaaacccttttaaaatctcttgtaaatcttttaaacccttttaaaatttcttgtaaatcttttaaaacccttttaaaatcccttgtaaatctatttcctgccaaaaacaaaaattttacgggaatatattttcgaaaaaaaatttggcgggaaatttttttcagagaaaatttttagcgggattttttttccgaaatttttggcgggaaaaatgtttttgaaaaaaaaatttggcgggaaatttttttcacgaaatttttggcgggaagtttttcccgaaattttttggcgggaaattttattttagaatgttttaggcgaaaaatattaatacttcattttattaacc

SEQ ID NO: 36792 - DNA, 505 bp, Arabidopsis thaliana columbia
cggaatcaatagtttcgacaactttggtttcgtcggacgagagattaagccgagctccacgctcgcaccgttacgacggaatcaatagtttcgacaactttggttttgtcggacgacagattaagccgagctccgcgctcgtaccgttacgttggaatcaatagtttcgacgaactttggtttcgtcagaataatcccaaagttttgtgatcgaattcattactttcgcttcacaccgaaccggggcattcccctaaactgaattcccaggaataacgaaacgtcctaaaggtttgaaaccgaactcatctcgttcgcttcaaaaacgacgcatcattcgcaatgagcaccgagttcaccgttcgcacgttcgtgtcaacgcctgcacactcaaccgccacgccgattcgcaaaaattctcaaatgatcgagttcccaccggctttgttttcaaaaaaaaaaggggggggtattatcacatatatatatatatatatatgtatgc

SEQ ID NO: 36793 - DNA, 527 bp, Arabidopsis thaliana columbia
ccaactaaaagttactagtacacgtggatgaatgaatcagctgctaaatacaactcagtgataactttcacttctgaagtcatgttttctttttttttttttttttttttttttttttggatcaccaaatctgaagtcatgtttaacttccaaaaagtttccttaagattcgttaagacatatcttcaaaaaaatgtggtattcactcatatatagtactaataacatgaaaaatatgccctacatggccaaattctttcctttaacttacaaaaacggatgaaaaggaaatcataaattagtttctaatttccaaaattgacccgaaatgaaaattcataaataagtaagttcatttctcccatgctttttttaataacagattttattagggttttccaaattttcgttgaaatatataaggttggggtgtttgtggtaaagtttatgaggtttccatcgtgtaaaggatatggtcactggggggtcaccctattattgaactgacgaaagaaacatcacacgaa

SEQ ID NO: 36794 - DNA, 239 bp, Arabidopsis thaliana columbia
taaaacaagctcacttgggaggaagtcccatgactatccttgtaaataattttttttactttcttgttatttttgatttgttttggttgtgtttgtggttctcaggaagaaaggagtaacgtgaaggtagagtaaaaattcaaaacttttactctaccgatggcctagagatcgggagctacagagtcttacagagagttcatcaagtttacagaagactgcgggatttcctggagctt

SEQ ID NO: 36795 - DNA, 587 bp, Arabidopsis thaliana columbia
ctatttttgccaaattctaaccccatatctccccactataaacagaaattaatattgatttaattttaagtggggattttaccaatataccccaatcgaaatctaacttttacagagaaaacatggatctattcgaacctacacccgacccatctctcccaaacggatactcaagtttcgataattggatttcaattttcgaggggactcttcgatttctcaaactctctgttctcaacgaagaaccctaatctgctcttcttattcttctcattcttctacgcgtaattgctaagtgttcttggagaatttgatttcgaaagcaaatgaaattttttgagtttcgtttctcttttgtaaccttcattttctcgtttcaaataatgcctctaaagaaaactgggttaaagaggaagagaggagtaacaaacgacgccaattgatggaggaacaaaggtaacgacagagcagccatcctcgacggaggagccatcctcgacggaggaaaataaggtaatttagaggcaatggaagaagagaagtctgacaagaatgaggaggaaaagtctgagaaatgaggaagagag

SEQ ID NO: 36796 - DNA, 558 bp, Arabidopsis thaliana columbia
cttgatgattaaaggagtaaaggaatcaagctaatgacttttaacaagctcacttgggagaaagtcccatgactatctgtgtaaatatattttacttttcttgctatttttgatttgtttttgttgtgtttgtggttctcaggaacaaaggaacaacttggagatagagttaaaattcaaaacttttactctacaaaaggcctatagatcgagtgtataacccagtggagtacaaaattttgaaaactttctgttgcacttgaagaccttgcattcgagtacatcagtcgagtatatgtgatgtttaaaacccaaaaaattttaaatcatgattatactcgaccaacaggagctacagagacttgcagggagtttatcaagtttacagaagatttcctgaagttttcccagtcaacagggaacaaagttcaaagacaagtcaacagagtgtgggccacgcgctttctccttgaagataaaatggagagagaatctcaaactcaatctccaccactccttttgaaatcgccatcattctaaccatggagtaaaatttca

SEQ ID NO: 36797 - DNA, 517 bp, Arabidopsis thaliana columbia
attcatcgtcaaccctcctctcggatatattttctttttttttttgtggaacttttggatatattttcttataaaacaacggaatgggttgtagtttatagagtttgtttgcaaactaatatgtttttggaaaataattagaaaattagtacggttactatttaaatttggatatgtagtacagttcattactgtataattttttgtgaagccctttttgcaactctgactcacaaatagttacgtgtaatgccactgaaaccgtaatcaaggtttcttctcctgactgttcatatttaacttctctcagacaactgttttatagtttatttctcagttgggtccggaatttcagagaaatgacgaagaagaaagcagttaaatcgaagattccaatcagtccagtccaaataaaacaagaaaataaatgacgaaacacaaaaagggaaacaaacaaaggtaatcccgactcgaaaaagttctgctttccttaaactcaatacaatcaaaattgaga

SEQ ID NO: 36798 - DNA, 529 bp, Arabidopsis thaliana columbia
  unsure (1)..(529): unsure at all n locations
taatgcaagttaaaattataaataagcagattaccatcacgatggatgtacctctcacatacacacctatcaaaaacttaaaacctttcaaaacctcttggtatattcaaattaggattcttcatttatggaatcattattccaagggttttgggatgtcttatgaaatgattttggcagaagaggatgtaaatttttttgaatanaaagtagtcagcaaaacatatgttttattgaaattttttagataattaaatcagagaatagggctgggcatatgagtaacccattcgagttcgggtagaaccattcgggtttgggattaatgggtatatgatttactacctaatagaataattctaaatattcggttcgggtcgggtccagttgggtttgggtcagtttggataaaaagtttcaggccctaaaaatagaaacgggtattttgtatgtagatagtgcgtctccaaacaaaaaaaacttttaaatttattaagttttaataaatttaattatatttgaatatatt

SEQ ID NO: 36799 - DNA, 413 bp, Arabidopsis thaliana columbia
tagaaaacctaaggtagagaatcaaaagctaaattatactcaatataaccaatgataatgtaaaccaataagaaagatgatcacaaatgtgtaagagccaggaatgagaaaatgatgaatgacctgcccatagatgtgatgtatagagccaatcgatctatcccctctttggtcttgagtaaatgtctacaagtttccgtattgtcttgatcataatctagcatcgcaatggcatacaagatgatcctacacagaagaagaggaaacaaagccttacctatcaacatttcagagacaaaattctaagaagcattaagcagagacaaatgtccaaagagctgccattaacagagaaggaggttatacgatttgattttgggtggtgacgcatctttgacaagaagtccacaaat

SEQ ID NO: 36800 - DNA, 446 bp, Arabidopsis thaliana columbia
ttatctatacttcttcttgagctcgagtttgagctgtgattacttggttatatattctcacagtgtttatctctgatgtttcagggatgatccggagcttgatcaaatgatgaaggaaagagttagattatggagatccaatggctcatttggtcaaagtattgataatacatctgcttacgacaatattatgaataagcatgattatcttgtcataacagcattatcctaacgtattgccgagtttctatatcgcagaatagaaagtacgagacaactcttgtggatctaggagacgatgaggagatgaaaaaatctgggttcattataccacaaagtgtgcctaaacatagttggttgacgagacggttggaagctgcatcaaaccaggtatgggattaaaccgggtagacactgggatggggtcgaccgtagtaacggtaagc

SEQ ID NO: 36801 - DNA, 572 bp, Arabidopsis thaliana columbia
  unsure (1)..(572): unsure at all n locations
tgtataagtgtaatcataaaccataaacataatttatttgtgggatagtggagaatacaaagacgctaagaaaacatcaacaacaagaagaagacgacaaaagccactagaggaaagaagagaagcaacaatgcatggaggaaacaaagattcacgatatatttggatgatctcatcagttcttgcgaagtacgatgaggtattgcattgtgggtttggcattctggagacgagaaaattcttggtgtgccttggcctcgacgagctcaaaggctttcatcatcgcttcggctccaaaatgtgcggagaggatacctccaaaggcagacttcaaggagacagccaagattttggggtcaagcgactccccgtttggctgaatgatatcctcgaatgcctcaattgtgaacttcccgttctcttctatgatttgcctcaactcgccttcttctgcaatgtagagtgtgatgttgaaagactccaccttgtctttctcaatgacaccctttttgttataaaaaaaaggttanagaagataatgttagtttttcattgtagatggtttgtaaaga

SEQ ID NO: 36802 - DNA, 755 bp, Arabidopsis thaliana columbia
cgagtgattccttctaacacaatcaattccatacaacacaattacactaacagaaacgataaccaaatttgtaaataatatgaaacacaatcaattacattaggttatgatattcaaatccattacataatgtttacttatatgaatttgattagtaattttgtagagcaacaaaaaggttataattccgtccaaaagatgacaaacatttgatgctagcgtagtagcattaacaaacaagaagaagatagccgtcgaaagtatcagaacagctaaactgatatgattgagggattagacctcattgtatagcttttgaacagaaacatgtcttaaataagtaacataatcaattaaaaagtatatcaaatacaacgaaatctgtatggaaacaaacaatacaaaatataacaggatacaattatacaagtataagtgtatagtctttacccaaaaaaaaacaagaactatgactatgagaccaaccatacgacatggtttttactaaggaaacaatgatgtagacagacataagtgcatctctgcaaatagacaaatggtataacggtaaaacggtactttaagattgtgggatgggcttcaaagtagctgggccttctcttcgcttaaggagttccgggaacttttgggaattccggcaacttgggaagttgaggcatcgtcggtagctctggcttttgaatctctggaactgcaggttttgtaatttctggaaccttgggcagttcaggttt

SEQ ID NO: 36803 - DNA, 584 bp, Arabidopsis thaliana columbia
tcgtctacattgacgtttgttgctgtgagcccaggctgagcttttccactgaagacgatctcagcagctgcctctgttttcccgctgtctctaatgctgatatagatgttttcctcatcatatttgacagggtatacaaatagtttcctcagtgcaggtgtcaagactctgagaaccgggtttttcgggtaccattcccggatctctccagttctaagatcaaacgtactatccgtcgatggacacacaatgcaaccatcctgatataattgccaaaaagagatcactcaccatgagagaaaccaagagtacttcgagcaaaaactactattaaaaccaagaccctaatacattatagcaacagtttaaaaccataaccaatgtgatgaagcaactcaagctatgtgttgattaaggagctaaagatgtcttatgttataagcttggtttcctaaagctatcacactactcggtcaggcatttcacaaagtgctttcatgctcgaaattttccaaacgacgaaaaaagctcaaatctataaaagtacaaagacgaagaaaacctgagtgagcctagcgttgaga

SEQ ID NO: 36804 - DNA, 596 bp, Arabidopsis thaliana columbia
tctactccaaattttgaccttaatgtatttaaagggcctttttgtgatctttgctatattacatgcaaaaattatatttacgaatattttgatgtatcaaagctcttataaacaagataaggtattcctacaaagatggtgggacccacggcaaatggatcataaagtcttcaaaaaagaatagttacgattgcattgcatgtagtaacagatgcgttcataccagcactaatgcaccagatcccataagaactccgtagttaagcgtgcttaggcgagagtagtaataggatgggtgacctcccggaaagtcctcgtgttgcatccctctttttttcagttttccctttttttgttaaaaatgtatgactctataacttttagaccgtgaggccaaacttggcatgtgataccttttcggaaagcccaaagagagctctccaataaatgaagaaggaaaatggaattcttctactgtttttctttttactcaaaattatgacctttatgtacttttttgggccttttcgtgatctttgccatattgcggggcgaaaattatatgttttgacgttcttttcgaatattttgcatgt

SEQ ID NO: 36805 - DNA, 497 bp, Arabidopsis thaliana
gggcttttaaatttcgaagcctaaacccattattataggcgacaaaaatgcgactacttaccgacaccaatttgatatgttgggcttttaaatttccaagaccaaacccattattatatgtgacaaaaatgagactacttagcgaatacggtttgatttgttgggcttttaaatttcaaggcccaaacccaaatgattatgtgactatcatgcgactagtttccgactactttagtgttgaaaaccctaaatcgagttatttctcttcgatccaaacacttagtcattttcgatccaacttcttcttcttcttcttctctcaaaccctaatccccattttatctcgatcttcttcttcttctaagatcgatctctcttcttcctcttcttcgatctgcaacttcatcttcttcttcttctcagatcgatcgatcttcttcgatctctcatcttcaacctttcgatcttcaacttcatcttcttcttctcttcgatct

SEQ ID NO: 36806 - DNA, 388 bp, Arabidopsis thaliana columbia
  unsure (1)..(388): unsure at all n locations
nnnnnnnnnnnnnnnnnnnnnnctaaagcatgatctggtgaaattcccccgccgacagtatagtctggatgaaagaagcactacaagtatcttcgtgcttctctgcgtggtctgaaatgacttactcgtcatttcacgaccatttttcgctaatgggaccagtctccttttgtatgncttgagtagtnccctattccccgtatatctccccgaggtagtgagatgactgatctcacaatacctgacattagcactaccactggcataaaccgggggtggttcacgtcaacgcncatgctatggtcggcgcagttcttgtaaaagataatcacacgatcggacaaggtctatgatgcgttctttggtggcccacatgctgagagaaatg

SEQ ID NO: 36807 - DNA, 513 bp, Arabidopsis thaliana columbia
gaacacatggaaaaaagtctcatattgaaaacatggagaaatgtttgtgtctaggctcaaagacttgagaccaaaatgttgtaaagaaagaaagcatatccatactcaactaggttaggttctgatttgagtttgagtaatgggctggatgcttaatggagtagtttatctttttagctcgtaatttgtttgaaacttttaattgatttagtcaaagcaacaaacaaatatccagtgccggctctagggggtgccagaggagctaaagcacagagtcatcaattttattccaattttacttaagattttaggtccaaaaatctatatatacatttttgcagccactttgtgaaataaatcctagagttgagatttatttacagcggctgccattgacatttaataattgtttttgataattagaaagaaaatattctaattaaatatttgacatttaacaatctttccaaaatctctctaccttaactacactattaattactaaaataaaat

SEQ ID NO: 36808 - DNA, 524 bp, Arabidopsis thaliana columbia
cttcatattaatcttctttctatgttactggtacttattcgtcgtctctgtagattaaatacattatacttttagtttcgctctacatagtccccctacccaattcatcattctcaagtatctatcgtcacacataccttgaaaactcaaaagtctcacgaaatatagttttctcttcttttactttagaccgtcatttctttaaatctatagtagtctgtaatctacatatattgtatatatatatatatatatatatatatatatatttacttggttatatataagtatattttaattaactaaagacaaatacgtagttgatcattactaatttactatgattgcgccgtaactgagtttgtgtatgaatctttcaggaaataatggcatttcgtatgagccgagatcatgcggactttgttgctcatggtggaccgagtgggatgatggggccttcgtgaacgttaagaagataaagctatttcacgattgggctggtatcccttggttcagtttgacta

SEQ ID NO: 36809 - DNA, 497 bp, Arabidopsis thaliana columbia
aaatccatgctaattaaacaaaattacctaatttttaatgactttgtggctttggtaactggtctttcactttttcttttgtcctttggctttacctttgttgactcatcttggccaaaaaatagatgtttaattgtctattatgattttgccaaaaaaaaaattgtttattatgatttcagttactttttcagtcaagtgtaataataatgatacattttgtggataagtagatacagactcaacggagactgacataacgtcagatcgatggcaacaatatttatgtaaggagaaaaaaacgttgtatatatatatttcacaaatttattactgttgcacaatttgatttgtataatttgtctttgggaacaccagcggaatcttgtccgttgcattagccaattttctgccactaaaattggatccactttaatcattttataaatactggttccgtctaaataaattccgtccaatgagaatagaaatataca

SEQ ID NO: 36810 - DNA, 547 bp, Arabidopsis thaliana columbia
ctgattgaagttcctttgcattgacgccgtgcattgcgatccctgaatgcaacacatcttctccagaatttggtgtatctatgaggtaatctccgctatcacgtgagacatggcgactcctcaaacttcctgtagagctacgaactcccattaaaggtcctgatgcattcaccaatgatggcaggagctgaccagaacgaccagtagctacaggaacaatattcaactcaggaggcattggacttaaaggcccagaagcacttcgcccagtcatccctgctgttctccagcttaggcttccacttgtattcctaaggggaccatcaagggagcctctgacaagaagtggtgacatatgtggttggctgtctgcaactgaaacaacttgaggtgctgtggcaggtccctgagagaactccagcacaaagtttccattggaatcccccggtttgcactataaccaatgggttcaatactgtcttccagcatccgctgtgacagttggtaaccaggtgatcaatagtacgctgaggacatattcgtgcga

SEQ ID NO: 36811 - DNA, 505 bp, Arabidopsis thaliana columbia
catgtgggacccagcccccgcgccgcagggagggccttggagcgtgttggagaagactcagcccgtgacgactggggacgcaagtagggatagtcgcctttaaaaggagggtgacccccttggaagtaggccatgtcttcgcgctccctcatgcatcgtgtctttccaccttccaagcccccggatggggatacccgccgtctttccgcctcatcgttggaggaacgcaactccgcgggagttggtacctttcagccatcattcggcttcaaggattttcatcagccagcccgactgcaccccttcaccggcggtcacccgagatggcgaccaccagcccctgggtggggagaagcaagccgggctgcgatcttggtcccaccctcagcttcaaggatgttcattatcctcgctggggtggaggccgggctgagcggagctctagctcccgcgcgggttcgtgggtcacctcccctgcggcgttcgagggagagggcgctcgctg

SEQ ID NO: 36812 - DNA, 501 bp, Arabidopsis thaliana columbia
tggcgtcgtctgaccatggtggaggatgtctttgccacgtggtgcaaacagagagcatccttattgtaaacctgtgaagatgatcatcaagtcgtcgacggtgacaaggacgatggtgtgcgtggccgagatggatctgctcatggacagcaacatggagatgtgcgatggtaatgaggacgtgatcaagcgcgtgttgcacaaaggcgttggtcacgcgtttcatattctcggaaagtctcagcttgctcacaccacaactctggagatgttgtgccagatcgacgcttttatccaccactacgatcccttaaattagttctgtattatagtatatattatttttcattgtagctcatagtatatgtttgtatcttaagtaccaaaaggtttttgtgttgtatataatatagttactatagtctttagggattcctacaagatgtaagttttaggaatcatatgcttatcggttatagatcatctagtcattaaaagaat

SEQ ID NO: 36813 - DNA, 569 bp, Arabidopsis thaliana columbia
  unsure (1)..(569): unsure at all n locations
gtaaagtttaacaactgatgttgttcgattgtgtatgagaaattttaaaattctattgacccattgaccgttgtgttgactgttgaatgttgttctacgtgactagacaaacaatgagaccaaaaagaattcttcttataaccttggtaggtttctggcgttcgagcaacgtgagagctggaccaatggtggtcgcaccgccaattatttcatttttaccgacagacgagtttcataatagctaaactgtcggttttggaccgccggtttcttcacttttattggcgtttaagctttggtataggcagaccgctggtacggtattgtcccgccacttgtgaaaagtttgcaaaaattatattctaaaaattagaagccgattccgccggtcttgttgacttggctccatgcatccatgatccatccttgtgtttttcttctcaattacttctgtattaaaaagtgaaagaagataacagaggcaaaagctaagtcgtgatcccanaagaataaggtacactttgcatgagtttgaaatggtaataaatgacatatatagtgtataagta

SEQ ID NO: 36814 - DNA, 492 bp, Arabidopsis thaliana columbia
agaaaaacataaggatggatcatggatgcatggagccaagtcaacaagaccggccgaatcggttctaatttttagaatataatttttgcaaacttttcacaagtggcgggacaataccagcggtctacgtataccgaagcttaaacgccggtaaaagtgaagaaaccggctgtccaaaaccgacaatttagctatgatgaaactcgttggtcggtaaaaacaaaataattggcggcccgaccaccattggtcgagctctcacgttgctcgaacgccagaatcctaccaaggttataagaataattctttttggtcttattttttgtctagtcacgtagaacaacattcaccagtcaacacaaggttcagtggctcaatagatttttaatatctcccatacacagggggacaacatcagttgttaatcaaggtgaatcaaatgagagtgtgatggatcgattatttattgaagcacacaatttttggtgtggt

SEQ ID NO: 36815 - DNA, 986 bp, Arabidopsis thaliana columbia
catttacaatctcctccctctctttatgaagtttagctgcttcttcttccaaacgtctttgctctgtttgaagactcttgtgagtttcctccatgaataaaatagagtcttctaattcctcctttcttgatctcagtttctcaagctctccaacgtccaccccacataatagaagacgtgattgatatacagaatctacacttgcagaggaatgaccaccatatcttgaggaagaccaccggtagtgattgtctggggtccaaaaatctttaatacccaacttatagacttcttcagccctctgatcggtaatctttgatccaatgtacgagtcctccagaccaaactgggaatttaaaacctccttgacggcatcaggagcatcaaatatttgatcaagccgagcatggatcccaagagaacgcatctgatcagaaatatgaaagggagccttttgattgccgctattgcccacatagtttagaacaggaacatcaaatcgttttaaatttttaaccagcaaatcacggtcctccggatcctgagtgataaaagacttccagatataaaaagaaacatgaccctccaaaaagcaagcgttctctcgatttggaacgttaacctccaccaaaacaggaccatatacttcccttttaaactcatgacgattctgttgcacccattgatatgcgtcaaatatcctatcagctccagagttacgtaacgctttcaagagtttgttatttgcattctccatgtcctttaacttatctacgcattgcctcagggtgtatctcttctgagacaaaagcttctcgttgtcctccttctgattcttctttccgttaatgctatgatgcagctctgtaacctgagagctcaattcttcaagtttggctacaggacgttcgtatacaggcaggttttggagttcccgttccgcagcaacgagatcctcagtagctttcagaatcctttcttgacga

SEQ ID NO: 36816 - DNA, 540 bp, Arabidopsis thaliana columbia
ggagaaatcatcacccgcagctagataacggtttttagttgtatcaaactgcacaacacctagagaacgcttgtggaatccttgataagttcttttaacagctccttcgctttcattccactcaacaatgaaagactctccatctttactcgtcccacaagagaatagcctagtaccatcggcactataagccattgtagtacaccagcgaccaggtgcatcatagtcaactcgggaacccatattatcatacaaccaagccttaattttcccatcaagagctgttgaaaatatgaacttgatgacaggaaaaatacaacacatcaaaaaactgaaacatttaatagaagggagggagatcaacggttagctaagcttacctgaatgttttccttgtaatgaggacaaacggaataaacaggagcttcatggccttcaaaagtatgcgttttgacacctgttgcagcgtcccaaaccttgatggttttgtcatcccacaagttattaccatagttgcttgtttggagtcgagaaggaaat

SEQ ID NO: 36817 - DNA, 542 bp, Arabidopsis thaliana columbia
tgttaaaactggtacattagaataatatgttagatgtgagtttaaacacttaattaaattatttgaatgttaatttccgaaaatttatttgtttgattcgataattaatatagatatgattttgttaataagatatgttattctgttaagactggtatcagcatggcactttgacttagctagatctatagggcaatctgtggcggccggcatcgccaacagatgtattctgtattctgttagtctgttagtggtattgaggtcggttaatgccgtgaaccgtacttccttaccatctcgttaggggccaacatccttatagagtatattatgtatatattatgttagtatatggtttgggtcgaccaatgctagggttgtacattccaacgtgcattgctggatacttggtcgttcggttctgatgttattactctgtctgacgatattattctgttctgatgattaagttatgtattttgctagcataagttctgatgtgttttactttacttaaaattaattgaattgaaactatgttt

SEQ ID NO: 36818 - DNA, 583 bp, Arabidopsis thaliana columbia
tgtgttgttgacaccaatccttaggtcttcttctctccaacatgagagtgaaattcgtgttctataggataaaaacaagattaggctgaactaaattctgtcacaggctgaactaaatttttatctctgaaatcgaaaatacttaaaagtcttctgatagcacatgaacataaaagtgtcttatactaaaaataaaaaaagatggggtgttccgagaatcgaactcgggacctcgcgcacccgaagcgcgaatcataccactagaccaaacacccgatttgttaaatcgatagaggtaaacatatttatacggataacatatcaccaccgtctttatagggagagactctagttgtttgttcatcggagacggaagaaaattcgaatcatcagtgtttgtttcctcctctcttaaagcttagcccttctcaggtcattgttcttcaatggcttcgagcaacacggtaagcatacggtagtttctctagttttacttagggtttattgggatacgaatctgagattgctttctgtgtttttgtagactactggggttgataataggtttagaaagaagtttgat

SEQ ID NO: 36819 - DNA, 519 bp, Arabidopsis thaliana columbia
ccagcttttcaaatgcataaatataatacttcagtactaaagcagaataatttaagaaacgattttaacaacaaataatgattcggaaatacaaaatgactagattttaacatgtggtacaccgcaaaactatttttttcttttaaaaataaaatattaatttgtttagtcaattaaaaatatatatgatttagtgagaattaccaaaatagcattaaaaaggttttcttttccaaaattaaaatcacatttctaaaattccacaaattgctttctaaactttaattaaatattagattagtttaatttaaatatgattctttctttttccacgacgccttccttcattagaaatgatctcatttctctctttatgcaaacaataaatctctcaactcctcttattatctctatatccatttctcttttaatgagaagtgtagagaccaatttacccctcctccttattttctaatattcattttaaaattacataatttaagagaagacgaaaaaatt

SEQ ID NO: 36820 - DNA, 501 bp, Arabidopsis thaliana columbia
caacttcatctatatatacatttttgcagtcattttatgaaataaatcctgcagttggaacttatttacaatggctggcactggcttattaaagcgaaaattaactaccaaatcaaagcaaatcttattcaaaagaatatgcttttattccatagcctaattatttttgccaaaatggttaaaatatttaaaaattaaataatcatttgaaagaaaactttaaattgatttaaattataaatcttttaataaaaatattattaaaaaaaatagaaaaataatttcaccgaacatgattagatagtaggactagatggtaggacgtgtttataatattataatatataaactttataacaattaaataaccatttgaaaaaaacttttaaattgatttgaattaaatattttttaaattaaagtattattaaaacaaaaataacaaaataatgtctaattttactgaacggggttagtggtaggacgggtttggtcgatagt

SEQ ID NO: 36821 - DNA, 453 bp, Arabidopsis thaliana columbia
ctttgctgagtctctgataaagaactacacacaacagctcacggtaagggttgatcagtaagacaataatgcatatatctatctcaatagattttctatatcttgattcttttttttttctttttttcgtagcgattgtaccaatttggagctcggaaagtgattgtgactggagtgggacagatcggttgcataccttaccagctcgcccgctacaataatcgtaacaatagtactggcagatgcaacgaaaagattaacaacgcaattgtggtgtttaacactcaagtcaagaaactagtggaccgtttaaacaaaggtcagttgaagggagcaaagtttgtttaccttgattcctacaagagtacctatgatctcgccgtcaatggagccgcttacggtgagttacatacattgaaaatatattagtctaattgtttttaaaatgtcttc

SEQ ID NO: 36822 - DNA, 605 bp, Arabidopsis thaliana columbia
tttccttaccctaaactcaaaccctcaatccctaatctttatccattaaatccaaaatcgtaaaacaaaactctaaaccataaaatatattgtaagcataaacaagaaagtgataattatactgagagataaaacaaattcacagcaaatcaaagctaacatgtgtccattgatgattgtccaagaagtttagttcatgtggtcaactagtgactcatagggtcgttttatttcaatacacaagtttatgtatgaacgataatcaccagaatcagattagatggaaaaaaacaaaaacttttggaacaatttaaatcgtaaaaatgtgatctttactaaattcgaccaatatcaattgcagatctaaatgctaaacataaggacaatgtgaaagaatatgcggaattgtattaaagattaagagagttatgaagaacaagagagtttgtatgtgagagaatatgagaccaaatcatattgatagaattagatagtaacctttgtgtgtttcaatgcttttaaagcacacaaagagaatatggctgtttcaattaacgtaagctgaaagagccatagagaagaggtccttggtcttggtgatgaga

SEQ ID NO: 36823 - DNA, 481 bp, Arabidopsis thaliana columbia
tttttattaagaaatattgcattttatacgcgaaattttaaaaagtaattattttaaatatgtgaacttcgtatatggccatttaatatataaaaatacgttgatcgggcaccatttcatacaaaattatttgttgatcatgccataatacacacgacgttatctaccgctaacagatccgataacatccgttaactagtcacctttagtttccaatacaacgtcgtttcaccataatcgaaatgagaaaaatgtcatttaatactccaactttcaaattgtgacagttttatacatcaacttcacatgtgattattttatacataaattaaacattgaccagcagtttgaaatatgacaatgcgttgacagaccagaaaaacatatcgctatctaggcctagatattcggattttagtttggattcatagggaacagcacttctatcgggaaatgggtgtccgccgcgatccaaaagtgt

SEQ ID NO: 36824 - DNA, 566 bp, Arabidopsis thaliana columbia
acacaaaaagtccataagttaaacactgggcctgacaatttaggcccatatactgaaggaaaacgagtctataaataattgggcctaatgaaatataaaagcccacgatactagattatcgaatggtggtccctattagttacgtaacgtacgaagatttatctacaagtttgaatcactccaaaaatttaaaattcagtgttcaccattttttatttttctccacaaacccaatctttctacaatggttctcttcttctccactcgttttctcttcttctccatcttcttcccttgcctcatctctatcactctctaccaactcgactcattcgagccagcttcacttcccgcggactcactcatcacctctcccacttcaatcccgccacttctcaacgacagatttctcaccggagctgagtttatcggcgtcggtcttctcaataaccccgaggatatcgcctaccataaggactctaatctcatctatactggttgtgttgatggatgggtgaaacgagtcagtgtcacgactcagctaatgactcaatcgtagaggattg

SEQ ID NO: 36825 - DNA, 546 bp, Arabidopsis thaliana columbia
cctgttaatcttaaccttaaccgttacatgtacggttaaaacggttacggttaaatacggttacggttaaatacggttatggttaaatacgattacggttatttgataattatgatatagttaatatacgaagtaaaatattatattttttaaccttcataataaaaaaataaataaatagtaatatatcaaataatatttattttccgcgattatgtgcttcaaatatctatagtgaatcatctatctattttcttaagtaaatcaacgaataaacaaattaatggtcataattataataatttaattacattttcgaaacaaaaataattctaaagagaagatgttgtgaacattaaaaaacaattttaagagtataaataataataatatgaactacttataatttaatttatggtcacacgcacactggagtaacttcgattgtagtagtgacatattaaacgatttaaggtgtcttcactgattgcatcacacactgctggaaatcagttgtcagtcatgccctagggagagacagagaga

SEQ ID NO: 36826 - DNA, 436 bp, Arabidopsis thaliana columbia
cctttagctccaaaactcttaagaccttcttggcacctagaatacgtgtttctcctcttcttggctctagaatgccaccaaatgctctctgaaacataagaaatcaatagctaaaacgggttaaaagccgtgttatcaattttgaggaccattgtcgataccaaacctcaaatctagaaaattaacaaattagacacacaattaggttttgtttcacaaatagatgttggaacaatatactaattagaaacaattcagttaaatgtagataattttgtttaaggttaaaaaataatcaagttttaatttactcacgttttctgttttactcaagtaaatgtaaaccttttttgttttttttttttttttttttttttttttttaacggcaaccggaattttatccagggaggtggtcctttacaaaaaattttttg

SEQ ID NO: 36827 - DNA, 262 bp, Arabidopsis thaliana columbia
ccatgtaatgtaattatatcgagagctcgtcataccaggaacacatgactcagccgtgacatgtagatagactgaacctttcaacagcccataggcatataactcagtcgcgataggtaaatctgtagcgacacaataggagacgcaacatatcgtctgaccttatcatcgagcgacgacttcactcgtcggtcgtgcgatggtcccgcacccatctgcacaaggctaaacgctctctccgcagcgttagatagggtttcgt

SEQ ID NO: 36828 - DNA, 618 bp, Arabidopsis thaliana columbia
  unsure (1)..(618): unsure at all n locations
tatcatatatcaacaataattgatgatgtatttactaaaaaaatctactcgattccaatgaatctaggattacaattacttttctttctaaaagtaaaatttaaaataatacgaaaaatcactaatcataaaatgaaaaaatattaaaattaatagaaagttttgtttatttatttcagtttctttttatatttaggaatatttaagatcaatatgtgctttttaatattcatatattattgtgctaacaaattatgttacttttaatttgtctatatttattggttggttatatttcttgtatacacattttgaataaataatagtgtaaatcttttaacatttagaatttgtaatttataataaattttcatttttagcattaaataatataaatattaaataagttgaggatatagtttaactaaagcgtgtatacgatatttcagattcttaattggaaaaggagaatctgtcctagctccagctgaaaaaacggaccacgcacctgccgtcagaaaatatatatatataggtatagagagactgatgaaaacctaaagacaatcgaatacggtaaagcttcactatgatgatggacnaatttgcagagatgat

SEQ ID NO: 36829 - DNA, 463 bp, Arabidopsis thaliana columbia
taatataaaatccgagatactactttccattttagtcgtttattgaataatcgattgtgaatttgtgatacacattatatttatataatatatgcatagtctacctaaatatacacgaatctctttttactatcacgtacacatatacaaacgtagcatgtagaacaattatgtcatgccaagcagaagaaaaacatatgagtatatgacgtcttcttgccaagaagtgatcacatattcaaattacacatatgatatttaagaattccaaatatcacggtaaaatgtctaagtgacaaattgatcacatattcaaattaattaagtatctcattcgtggccaagaagtgatttgatgacatccttgttacttgattacaatatattccatagaacaaaaaaaaatatcaaaaaaagaggggttcaagaccagaaacttggaaaataatcacttgttgaacta

SEQ ID NO: 36830 - DNA, 657 bp, Arabidopsis thaliana columbia
ataaatagtgctgagaacaaaaattttttaaatcaattgtgatgttgtatatctttatgagttatcatttttggcaagaacttgagatttattagtgtttagagaaggatgcgcagatgtgtctttatcatgtttcctggcagactgatttcggtttttgttgtgagtttttcaaatggaaatgtcagacaacaatgtttgttgacttgttctaaactaaagttaggagatgaaaacagattgtgtttaattgatgcacgcgtgcgtggctgatcttgttgtggttcctgattacgaaggtctgtcttggatactgatcttacggatcaaaaacaatgtgctactatattgcttagaatctttgtaaacttacctttagcttattttgatgagtatcagtgtataatctcactttgtagtaactttggcgctctcttttcctttccaaaaggcgataagtacacaagattcacgagatcaagatgattcagaatcttctcccgtagagacgaagaagctgtttataactggctatctaacacttgagattgtatgcatgaattgggtccatagccatatatcatgttatagtgacaaaacatccatagcatttaaaggacaaacacatacatatatctggtcagtgcatgatggatg

SEQ ID NO: 36831 - DNA, 527 bp, Arabidopsis thaliana columbia
tagaggatcccctattacctgacaccatttattttggcctagcattatatatgccataaagaaaattcttaagattatatcacataactcaatacatgcattacgccttggttcaagtttaattatcactaattgatattattccatctttgcttttaggattgaacgctttgattatatagctggtgagcaaattcatttaaaacaccaagtagtattctactgtttatacatttcaataaaattcaaatgatgtatagttttactttgttcttctcttaacataaaggaaaacgaatcatctcaatcagcacatgtatgggttttctgattgcccacaattgttcagatctcttcatatatagtagatatgccaatgattatattaatcaaattgtttgtgtaatacattattatgtaggttatcaaaattaatgaaattagacataataatatcggaaatatcgtaacaatataccccatgcattatagctgaatcactatatagtctatattgtttcatgatt

SEQ ID NO: 36832 - DNA, 165 bp, Arabidopsis thaliana
  unsure (1)..(165): unsure at all n locations
tatacacacacacacacacacacacacacacacgacatatacaancacacacacacatatngagacagacacacagaaacatatacacacagacacagagatacgatatacatatatatngagacagagagacacacatacacagagagagacacacagagatac

SEQ ID NO: 36833 - DNA, 382 bp, Arabidopsis thaliana columbia
tcaaaacacaaaatattaatgaacttataagaataaaattttgaatatttatgttttattctaagaattttaactcatcgtatgatggagcgtcttgcatcttttgatgtgatactatacctatgttttattttaagaattttcactcatgtaatcataagtgaaaatagaacattttgagaaaaaaatagcttagcttataggatttaacttttcaattatttttaatgagaatattttcatttattaattttaactcatttaatattaatttgcatgatgtaaaattaacttacgagattaccgcatatataaaaaatatattttcaacaatgtttggttttagatatttttgtggatttctgtgtttttaattaattat

SEQ ID NO: 36834 - DNA, 209 bp, Arabidopsis thaliana columbia
gaaacgaaaacacaaaaacttaaagaaaggagcataagtaatcactccttcggttccccgaccggcgtggcaaagacagtaccgggatcctcagcgacacatcctctacatgattccttcgcaggctcgcacgcaataagtcattctctgtatacatgctacagcatcatcaaacttctggcattcaaatgcttcgacgttagagtcag

SEQ ID NO: 36835 - DNA, 497 bp, Arabidopsis thaliana columbia
gaatatatttggaatatttttagtttattaatcaatttattgctggaaaaaaatcaataattaatactcaatggcagcctagtaaataagtcccaactctaagatttatttcacaaaatggctgcaaaaatgtatatatagatgattcattatttcattttatgcggtaggagtaaaaacaacattaactagcaaaaactataatacacacacaacagtaactactcatcgagtatggcattcatggatacgaatcaaatctcaaatcgtataagcctggccattattttattttacaatatttgataatgtgctacctaaatatcaaaattttagaatattctgaaataaaatgtcgaatttttgtgatagccttaaattactacatgctcacgtatgtaaattttctattctttcatagttaattttctattaaaatgtacaatttccagtttgatggtatgaagatcaacaaagtaccataaaaatgtataatt

SEQ ID NO: 36836 - DNA, 520 bp, Arabidopsis thaliana columbia
gtatgtccggaacgctacctagtacttgaccttaggtatttcattctttggcaaaatctcgtttgaatgcttgacctaactcaactgaataaacaactataaccgttgcacgcccgccgagtgatagggacttatggactagaatcgaatttgaacttaatgctttgatcttgtattttgaaactatgttagcaccaactagccgataggcaactgagtacgcaagatattagtgataatagcaagctttcacctactagctgttaggtttagctggtcttgatagagtttcgtatctccaagaatttggaagtaaacaaacctagccatgttatcacctagattgagatctataccttattattgaaccttgacatccggagaaacccctgatgacctaacgcttctctcttatagtttaccgtttaatttagttattcgtcttttattttggttactcatagcttacaacaacccctcgtcttttatgttgatcctagcttcactctcttcttaagga

SEQ ID NO: 36837 - DNA, 544 bp, Arabidopsis thaliana columbia
tctagaggagtctttgtgattgactaaacaaaatctttcttgacaaaaaaaattctattatctatatagtggattgatcatgttatagtaattgaattttcttaaaagctatcttccacctgaccgtaattaaggtggaatgaaaactttacacttgttactaattaatgaattttttttttttgttgaaatatatcccaaaataaatttgaaatttgtattgaaatttggaaattatctctggcaaatgtctagagacattgcagacgccttacacttgtaacattacgtttttgacaaggaaaacttctttagaaaaatactcttaccattcgttaaacatacgcaccattgcataaacaatgatccattaataatttcatctctctttatgatttcattatcattaacagcgacggcctcgccgacaactcaaagtgcctgctgtcgtggtgatggaacccacaagtgacgatggcctcgcactcaggcttgaagctcttgcataagtagacggagcttcacacctggctcgcggaaataa

SEQ ID NO: 36838 - DNA, 621 bp, Arabidopsis thaliana
  unsure (1)..(621): unsure at all n locations
aaattgttgtaaaagggttttttaaatgatcaaaggatacgaaatctgagagaatagagagatcattaccaagaaaatcagagcgcttgagacctttgccactgatcagactaacctcaaggattccaacagccatctctgtagagttattttttaagtttttggggtttgtgttgtttctaaagaaaaagaagaagaagaagaagaagaagaagaagaagaagaagaagaagaaggagaaagagaaacgattgatgaagtggatgtgtcagacaaagtctttaaatacagaagcaagaacacgcagactttctcgttcacataatgattttttactattcttatttactctttttcaattttcaaacataacctgcgtcgtggttccaagacttgatcaaaccaaaccaaaccattattacgtaacaggaggcaaaacctaaagtttataagtctggtcaactaagctaaaatgaccatcttacccttacttagtttaaggaaagactcttggctgcttgaaaaatgtatacgaaccaattanaagtagaagtctttggacttttgatcaaacagcccaataaacatcattatggcttctctagatgaatgagcttttta

SEQ ID NO: 36839 - DNA, 266 bp, Arabidopsis thaliana columbia
gttgatgatttaccttcattgttgtctttgtctctcgggccatcatacacttaaattccttccagcttgtaggtgaattctttttccagagatgctttatccattgaccaatgtctccttccaagttagaataaacaatttgtaacctctcctgctccgggatgttattctcaccaaaatagttctcaaagttgctaagacatcttcttagattttcatctaagggccttgacactctagcttccctatgttcctcttcacaatgt

SEQ ID NO: 36840 - DNA, 555 bp, Arabidopsis thaliana columbia
actctagaccgggtaccgagcttgttcgatccaaggaatcagcgcacttttgttatactctaattagatttgtggtatcttcgtgaaccttcaattcaatttagggtttctcaattcgattacaaagattcgtacttgatttgttttcgaattgctggacgagtttgtcttattgggaaatgattttagtaaatcgttgaagagaaatcaggaaagttgaatactttctctcttaaagttttgagctttttggattgtaaaattggactaatggagaattcaattctgtgttagagttgttatcatgaagaaaggtttgatgcgatgggatgatgatgatgatgatgatgatgaagactcttctgaggaatcatcatcgtcttctgcttctgattcaaatgtggataatacagagattggggagaagaagaagaagagaaagagcaagaagccaataggtaggagaaaagcttcattgttttaactttgtgagagctcttttatggtacttggtttttttttttacggttgcagcgaggttttcgaagaaagata

SEQ ID NO: 36841 - DNA, 527 bp, Arabidopsis thaliana columbia
atatgatggaatgaatagtacaattgtatgtgcatgaatgtttttctaaaaactgacatccgtttgtatgctattttatccttgtttgttatttaatagtagaaaacttgcgaggaccaaaataattagcatgcaaagaaccagaagaaatcgtgagaactaaaacgtaaagaactcttgtgacttgtataatatatagtttgtatgcatgtttgatgttgacacaacatatctccatcattaattcgtcccttgcagtctctcaaacttattaatctcaaataatcgatgtttatagattaagtccctcgagactaataatgtaaatccaatgatacaatgtggttccttcgacgacgaatcatattctgatttctgtatatctgtaatataaagtacgattattattatatttgaatacaatcatacttaataaaatattgtgtcatatatatttatctccataaatgtttctcttgactgaaatgtgaatcccaaacataaaaacatatacagtaaatactttg

SEQ ID NO: 36842 - DNA, 557 bp, Arabidopsis thaliana
tattttaagggcccaacccaaacgctgaatcgtcgctcgtcttagtcaacaaccccgacaaagaaacgatgagcgtttcgccggagatatttaaacgggacggcatggaagtgaagacccgaaaaaaaaaaggcaaaaaagaaaaataaaagggaagagagaaaatcagaaaaatggaggagataaagattttgggacatctcttccacatttacccttcacttaaagccaatcctctctcgagagacttcttcttcttcttcttcttcttcttcttcttcttcttcttcttcttcttcttctcaactccattatctaattctagggtttttctctccttcttcttcgcacttctctttctctctcccgccgcttgtttcttctttccctcgaaacactggtgttactgtgagattctcgtttgaatttaggggatttcttaacgaattcactgagaagcactaattgcgaaggtgttgttagaggtgggtttagtgtatgcttattcgttctttaggtttagatatcattctacttgagtagatgcttgatggttt

SEQ ID NO: 36843 - DNA, 574 bp, Arabidopsis thaliana columbia
catcaatccgtaatttctggatgagaatgagagaaaaatttcaacaatcagaaatataaaatcaatctgatcttgaaacgagagacattgaaaatggatacttacaggatccgaagaaatggaggtccgacccgaagcaatgctcttgagacgacgcatcacgttcatcttcgctttattcaccaaccaaacgaggaacaactcagaaaccctaaatctccgaaaaacttcaccaacacagcttcatgcggagaataaatgaatcaacagattcagatatttcaaattcgaataactccgaaagcaaaaccaaaaatctaagtttttcgattcttcttcaaacgaaaaatctggggaaaggaagaatctccttcgttcttcttcgagcttcttcggtttcttcttctctttcttcacgacccaacccaggtggaatctttctctctctctcgtgggcaaagccaatcatgccagcctcgttctctttctctatctctctctactctttttttggtcaaacattgactcctcaccgttgatttatcgcagcagctcatccgacgggttaggatga

SEQ ID NO: 36844 - DNA, 597 bp, Arabidopsis thaliana columbia
tagaggatctttaaggtatattctgagcagcttctggaaccgctattgcgtacgatacttgcattatcagggccaaagacaacagttatggtatgaattaagatacttgggatatttgcttttaagatatcattggaactacaagatcattcgttgttgttgttttatagttgggatatgagatacgttcgacggttgttcatgagaaaatgcttcagatgtggaaagacaactttgaagtcaaaaccataccgagatccaaggtacgttgatggcacagttactgtttaagtttcatgaaatatacaaccgcttattctggaacgcaatctgcagatggatggtgaatccaagacccgagcattcatctgtacatcatggcacagaaatctgctgccgagagctctggaaacgtaagccgagatgaagttgttatagacacagacgaaacaaagtgtgagacgaaagtcccaccggagaatgccataagagggtggaagaggaagctgttgttcacatggtcctcgcttaatgaagatagtttgttgatgagactacgggatggaaagctaagtgaatgggagatgagaaggtatg

SEQ ID NO: 36845 - DNA, 598 bp, Arabidopsis thaliana columbia
tgaaaaattgaatttgtaagattaaattttggttgaaaaaaatactaaattaaatatttgaaaagtgtatgagtttttttttttgtaggctgaaaagtgtatgagttaatatataaaattcaaatatcaactataagatggagcgtataaaattaaaatagatttaattatcctcaaataaatagttaaaatgtatagtaaaatcgaatgtatatgattaatattttgtttaatacaaaaattactaaattaaatattaaaaaggtgtgtgaaacactatttactattcaaattttaaaattatcgataaaaatttgaatttatatcttacacccacctatttaggcgggctttatctagtttaatataactggtgatgcggaaaagaaagtaacttatttttactcttttttttcttcctctgtagaagaaaaacttatgactacaaaaaaccataatcaatatatgaaaaatataaatttttaatgttgtctaatttggtagcttacaagtagcaattgtgtggtgtgatgccaaatctgtggatactaatctcaatttaacgtatatatagttgataagattttagtcttttttt

SEQ ID NO: 36846 - DNA, 462 bp, Arabidopsis thaliana columbia
tagcaaaatgaaaagtggtttaacaaacgaaaagaaaataaaaatacatcaatcattgcccattactcattagccgattaacaaatcattcctctttgtctccattacaatcatatcagtgatcgtgcttggcactatccaatatacatattccaaacacacaaaattaaaagacagaagttacacaagaggccgtaattatcccgtaagaccacaattttatgatatatagttcgtataataattcaacaacagattctcaagtgaccatcatgtgctccaacgatgaacaatctcgaaaatggtaaaacacaaatagtcgataaatccgactttactcttcctcccttctctgccatatacagtttctgtggtataatccgctgctgctgttgctcctcctgtcaagagaaaaaccggacattctcacatactagatcttgttttcacgaagcttatgtg

SEQ ID NO: 36847 - DNA, 317 bp, Arabidopsis thaliana columbia
  unsure (1)..(317): unsure at all n locations
gaaaaaataaaacacacgaccaaaacaactcgaagcagagactgggtgtaatcgagtaacagacagtaaatgaaacaaagaaactcgactacacaatctgtaatcaatcaatcaagatgtaatcagaagtaattaagtcaagccaagcattaacaggttttgatgtattctagcngtcctcngtaagcatgcagaaccctgaccatcacgcagacaccatccccaactcgaccaacacagctcgttgccgagcactgggtgtggtcgagtcacagaccgtccctgccatacagcccctcgcctgcccactctgttgc

SEQ ID NO: 36848 - DNA, 600 bp, Arabidopsis thaliana columbia
ttggtaataaaaaaaacagatgaaggtggactacccagatcttttgaaggacaaaagtgaagaacaaggtgacaaatcaaatttggagacgaattccattgtagttaggaagaattgtaacgatccaaatttttggattaaacctgaaccaaaccctatgattcccacgagtgtataaaagaaagacacaagcctcaaaacaagcctcaaaaatggttggccatcaagttacaccgtaagcctcgcatcctggttttgagtctcaatttctcataggtttgatcgagtcctaactcgaacctcgtttgtggcctgttataacaccacccaagtcaccgaagactttcgtcgtggtgagtttgtgcggccttatgattgtcactggaacgataaaaccatcacttaatcttgattccaatctctgtttttgttatggattgttgtatcaatctaattagtgaaagctggaatcatcacagatattggtatagaaatgtggttagtgtaatccgggaaatcaagtgtgataccggaacactccactataaatagaatctttgactgtgatcaatactcaagagaaataacagaaagtttgtt

SEQ ID NO: 36849 - DNA, 351 bp, Arabidopsis thaliana columbia
gtacatttattcaaatagggccaagtttttttgagtaaaagtgaaccataactgtgatataattttatgttactacattactctgtaattttggtccaatccagtgttttcaaattgtgctctgcagggtccttgggattctataaacataaatatgcctaaagagcactatgtggtgcggagaggttagagatgaaagggaatgagagagaatgagagggggggtggggggaggaggagggaggaggaggaggagacagaagaagagagggaggaggagagaaaggaaggtcaagaggaagggaaggtgacaggaagggaaagggatagagggagagagagagaggagag

SEQ ID NO: 36850 - DNA, 516 bp, Arabidopsis thaliana columbia
cacaaaagtgaccctgaggcttgctccaaaggagaagcccgtcggatccagcgacgacaccaaccggagctggagaaaacaaggatagagaggcccgagaaaagaagaaccgtcccatcaagacaatccggagagtccgcaccccaaagaaacaacgacgatgactgaagaacacggcgatgcaccaccggtttctcaggccgagcgaaaggtcctgccgctaggagctaaaccgttgaaaagacgcctcatcggagccacgaccagaaactacgagtagctcgccgcacgagagcagaaaaaagctacacactccggcgaagaaccctgtcatagcaccgtccacaagcaccgtaaacaagagctcgacatgagacagtagcaaacatgcccacaagcgaaacttcttgcggcaacaccaccatcaagagacgaaaatccaaccaaggtcagagcacaccggatcgacaaagacaacacggagaagacaactagagacagggaaagaagagagtg

SEQ ID NO: 36851 - DNA, 226 bp, Arabidopsis thaliana columbia
taaatcatgaaatttaaaacttttaaattgtggatcaatcaatcgaatttcgggtaatagcacgacctttaaatagctgcgtactgcttcaccctcatacagtttcagccttgccccaaatgagtcagaggctttaatctgatcagtcagttcttgctgttcagctttgctggtgtagaaaggtgtgccaagcttggtgagaaacacatagttttcatccgagtcg

SEQ ID NO: 36852 - DNA, 568 bp, Arabidopsis thaliana columbia
aagcagcttaccaaaaaaaaaaaagaaagacaaaagcaatgaactggtttatagaaatagtaatattttaggtgatccctcgcattatttgatatatacacctccactgatgccaacatagaatcacaaaacaaatatctaaacttgttaaataaagaaaagaacctaatacagtagttagctacttagcttatcatatgtaattacaaaagaattttatacttttcaaatacatttgttgttttcctataaccagtataaatgctaatagagacaacgcatgagacctctttgacgtgtgatttacggaatgaagctcagccatttgatcttactttactacaagattagttaacgatcttgataaaattttcatatactaatgtcttttaaaataatgataattagtgctctattttttgtttgttcttatgaaaatgtcctaataccgagaacgtaaccctatttatctactgcctagtgtaaatttcacgtgttaaataacattcaacgaatcccaaaaattaaaattaaaaaacgtaattccatttataaaaaaataggacga

SEQ ID NO: 36853 - DNA, 599 bp, Arabidopsis thaliana columbia
taaattgatcattctaagattgtattggatgaattgagatagtcagctagattaattctctaattgctaagttaagttagatgaattgagacaatcagctatattaattctatatagcatatttttcctaagcggtttcagattaaagatgtcaaagtgggttaagcaattgtttagatataatggatcaagatttcaagataaacgattatcaaatccattgaattcatgcatgcggttaggaagatagcttaagtagcaattcaatcctataaatataatgttttaagggaattttcatccattcaaactaacaaaaagacaaaaaaatgcatgatcctaaagcaattgatagttaaccttaagactaaaaaattcccaaagagagtatacagtaaagtagacaacggtcgagtgaaaccgtgaatccgaagagagtacataacggtcacaaagtttgcgagtttacaaaaatgctagttgatatgattggaaatgggttgggttaaggaattgtttgattaaatatgtcatcaagacaattatttcatattccacatgacttggtttgtttatgacacgaatacatgatagagaga

SEQ ID NO: 36854 - DNA, 449 bp, Arabidopsis thaliana columbia
tccacctacacaaaaacacacaagttcatagagaagaaagagatctttcaccattaaacacacgttacacaccttgcaaccaagagctacatacaaatggagccgtaaaagtcattagttatactttgtgcaatgagattagctcctttataagtcactttggattcactgccatcttctattcaaaaccttaaaacgagatgataatattaacacatataccacaaaaaagcattgaccatttcacatgccattcgttaatcaattgtaaacaaatttaatgaaacaatctacctaaactatcataattatatcacgattagaccgaaactatcattctaattagttcacactacacaatatagaatctatcatctatatgtagcaaccaattctttatctaaaaaaaagtcagattttgatacacccatataaatatttaacatttc

SEQ ID NO: 36855 - DNA, 437 bp, Arabidopsis thaliana columbia
ttcttgaagcatcccaagttgcgtgtttaactgcagcatctgaagagacgaacacaattaataaatggaggtatccttatgtaaatgttttgtagtttttggccataacaatttgtttctcataagggaaactctacttttgaagcacacaaactgaagtagaaactctcacctttagatcctttgtcaaacaccattagacaagactgttgggagtcgcgcacagcttttgcgaatccatcatcttgatttagggactgttccagtcggatcttaaaggagtccagtgcatatgaccgtagatggtcccaacatggtagcatatgaagcgtacactacatgatgatttagagcaacattcaaaataagatgacgcgatcatcagtcctcataagtaaccagatccagagtctacactgtttaatgcaagcccaaag

SEQ ID NO: 36856 - DNA, 310 bp, Arabidopsis thaliana columbia
tcactcgaatcaattctcgctctccctcttgtgtgtaactctatagtttgtgtagaaggcacaactataagcctttagagagtggacaagagctgctaagagctagagcaaggtcttgagcgtatcgttactctaccgaggtgctgccgaaaagtttgtaaacagccacggtgttgttgtaacccatctcaatagtgaaaggctctatctgtcatactgacagatctgagcaaacggaggaaggagttgaaatagactccaagcccaggtgtggctaactccaacgaggactaggcaagcatttcaggtt

SEQ ID NO: 36857 - DNA, 424 bp, Arabidopsis thaliana columbia
attgtgataaaccggaaaaaagtctagaaaatttcaaggaccaaagcgagttcagctatatctcatgaaactctgctaagtggttggaccaagtcttaatgtgtagtgactgttcattgaaaacataattatatgccaatgttaacattatgtattaactgatttaaagtttactaaaaaccacctttacaataaataaaatttcacttctagaaatacagattgttttcaccttataggttaaagatattgagttcaatttacgccaatgtataaatcctctacataaataagaagatggaaactctttgacaaaatgggcttataaataagaaatgatctagtttttgtatccctcttgtttaatatttttacccacaaattaagaaacataaaatattcatttaattgttctctttacata

SEQ ID NO: 36858 - DNA, 557 bp, Arabidopsis thaliana columbia
cctagattgaatcgaagagggctgcaagtatacttgagagtgtggccgggtctttgccggctgactttgagttcggccgggacgaccggcaagatgatgaccgggccgccaagtggggcaagttcggcgatggtgtggcacaaccggtggactctggtcaaaggtcagcatgctttggcgggctctgacaaaggtttggcatgtctcggcggactctggccaaaggttggcgcgcacagcgggcttcggtcaaggtcagtatagtacgacggacttagagcaaaggtcaacacatatcggcaggctctggccaaaggtcggcgcatctcggcgggctccggagaaggttcttcaggcagcaccggttactcgggcgagtaacgggtcggttgtcacggtgcttagtgacgggtcaaggtgaccctctttccttctcttctttttgggtaattctgttttctattttacgattttataaaaatctgaaacaaatactaaaaatgtcaaaagagaagcaaaattaaaattctaaggaaaaaggtagctacctagtgggt

SEQ ID NO: 36859 - DNA, 437 bp, Arabidopsis thaliana columbia
gtttcaatatttatgaaaccgtaaaaccgtaaaaaccaaatcgtaaccaaaccgaattacatacggtttttacattgttatagttttggtaaaactgtaaaatcgtaaaaaaaaaaagaaccgaaatcaaaccgaaaaactgtacgcccaccccaaggttacatagatcatcgcaatttgcaaacccaaaatttctgtttgaaccaaaagatcatagtacgatatataaaacaaatgaattttaaaatacataatacagtttgatctctagtgtttatcacttgtttatgtgaaagaaaatgattaaccttaaaaaagatcaaatagaaaaaataattggcaaaaaatttaaagactatatatatattttttaaatatgctattcttattcatatatatatatatatatatgtatatatatatatctatttgaacat

SEQ ID NO: 36860 - DNA, 554 bp, Arabidopsis thaliana
cgagaggaattacaacatgcaagtgctaagaagatgcatcaacagattactaaatcaagcagagcaattttaacatttaattgactagaacaacagaagtaaagaaatattggagtagagaacccatcacaagctaaacacatctggagaagagaaagacagagaaatgagaaaaatcattactctgattggtctccagatatagaagatggacttctttctttagaatctgaaacagaaacaaagagagagaaccaaatcgatcacatgaacaaacacaaaacactctcacgtttacacgagagtagaagaaacaaaaacacatcctttaccttcttcttcttcttcttcttcctcttcttcttcttcctcttcctctgcttcttcatgttcctctgcttctacttcttcttcctcgtcctcctctgcatcgtcaccatcatcatcttcctcggcgtcgttgggttcactacttcttggtctcctccgcttcgtcgtgttcacttcctcatctccttctttctcttctttcgtctcatccttctcttgtagat

SEQ ID NO: 36861 - DNA, 465 bp, Arabidopsis thaliana columbia
tttctctcccttgataaaaaatatgtatactaatgagagattgaaaggattttcagataatgtataggggtaagaatgtttccatattatcccattgataatacattgaaagaaatgatcaattacaaaggttggccccctgccgagggtgtcgatccagtatgcgagtccccctttctctactctctaacacggataagtttaggggagagcagaagtaccggaaataacgagaaaatgagtggtcgaattgttatggtatactacatgactaagtctagaaggtttattaaacgttaccctgattgatgagaaaccaacgatgaaagcctaatgtattaacgactctacagagtttgcggacctagtcatgatcccaacgatcacctaaccatataaggcagttgctctgtttttcactcaatctgtatacgattgactcgattgtgattatgcattgattgt

SEQ ID NO: 36862 - DNA, 607 bp, Arabidopsis thaliana columbia
  unsure (1)..(607): unsure at all n locations
gatgaaacctcaaggaaggtgaaattgagttacaaacagtggaggcttgctgcagcctgaagaagtttgattaagtcttctacagaaagggttcaactggaacaacctggccaactgcagaaagggttcaaccaatactactgagttcacttgtatttgtattatattatttgcaagtatgatgtactatcttaaacttcgacaactcttttttatgttttcgtatttgtattgaatatgtgcaagtttattgaattcttgcaagtttaatgtatttttttaagttcaactgagacaactgatatatgtatctgtattttagggttaacaaaattaataaataattctcattattttcagctattaacaagaactaaacattgaataaatctaaaatatgatattacaacattgttattattaaactttaaggtttcctaataaatcacctatgtataacaaggaacatttagttcatgattgtccaatgtacatacattatgtatgaaaatagatatttcttaaatatgtttctacaaaacttattaaaagtcattaatatgttaaaacttatgggacgactanaaaaatgaattggtttttgagg

SEQ ID NO: 36863 - DNA, 553 bp, Arabidopsis thaliana columbia
  unsure (1)..(553): unsure at all n locations
gtacttgaagctccaccaaatagtttccacaatggcactcttacactcttagcagctgcatcaatcatagccatctccatcccagctcttacctaaaacccacttcagaaattttcttatttacttccttgagagaaagatcaaagccaatgtagacccaaaatttgaactttaacttgacctcaaaatcacaactttagcatcaactatacaagatgtcagacttacagaagcaaactgatgaccaggaagaaatcttccgatctcctgaagaacattaccgagtttcatctccggtaactctctcagaaactcactagcttcccgcgcttttaccatagccattatctgatcctccgccgttaccgacggcaaaatcggagcttctccccaacccacaaatccatcgttgagctcaatccgaatcgcaacattactgacagaatcaagccgtgaagaagcgatagtgaaaggtgagagcagagcccgttcagttcgcgattcactgctttaagcactctcacggtganattctccgtcagggttttgaatt

SEQ ID NO: 36864 - DNA, 145 bp, Arabidopsis thaliana
cttcttcttcttcttcttcttcttcttcttcttcttcttcttcttcttcttcttcttcttcttcttcttcttcttcttcatcttcatcatcttctgcttcatcttcttcttcttcttcatcagcgtcgtcttcttcttcagcatc

SEQ ID NO: 36865 - DNA, 463 bp, Arabidopsis thaliana columbia
gtgttacaattcataaaattcataactaaactttttatgttatatatgcatgaagactatgagattgtgcctttacaaactcttatcgattacaaaaacgatattgaggtaagtgcttttgaagatattaatagtttttaacaagaaaactattagtttgatgtctttaattaaggttcaatttatgaaaatgcttgcgagtttaaagagaaagtatgagaacaatcttgtgaaagccaagaatggtgatgaacatatcagacttcatgatctcagggcttttcaattgtctaagtttgtttggggagatattgaagaatcacctgtgaaatcgaagaaagttatgtctatgaaccttgagcttgggtaaaacaaagatacttttcgcaattcttctcttgttagatcactagagcgttttggtgttgatgacttagcctcaacaaggattgagtagcttgac

SEQ ID NO: 36866 - DNA, 459 bp, Arabidopsis thaliana columbia
tctcgagtaacaggtcgagtaacagacaggatatgaaacagctatactcgactatacagtgtgttgccagacactgggtgtggtcgagtatactggtcgagtaatagacaggaaacaagataatcttactcgactgcacagtctgttgccagacactgggtgtggtcgagtaagatggtcgagtgattgtaaaaactaagaaacaggcaatgagaacgattaagcgataacgataaaacagagaaataagatagacgagaaatgcctaaggatagggtaatcgagtagagtggtatcctagcctattcgaatggttaacaagcgcaatcaagctatcccctagcaacaggttcaacaacagatcaattcactcccgtgatagaaatcctcaagcaaagctagcccagactaattcccattaacggaatctaactgatgcaggcagtaagacagactgat

SEQ ID NO: 36867 - DNA, 516 bp, Arabidopsis thaliana columbia
tgggtagtaaatccattacccatttaacccgaacccgaacggttacccatatgctcagccctacacgtaccgcagttaaaccgtacggtactataataacgctttccccgcacaacaaaaaccgccgcggttaccatccgaaccttcaggctagcttgtttattgttttaagataagttagcgttcttctggatcctctcttgtttacaacaacaatgtttatggtgttggtttctgactttcttcgatattgaagactactgaaacatgtttcttctatagtactccagtcttatggtggtatcacatatatgtgtgaaacagaaacctgaagaatgtcatacaccatatacaaaacatacatagtaacaaattacgagagcttaggatctgtaaagttttttatcacatatacttcttttcaacaagcttcttgagttgttcgattttggcgatgactcaggatgcataaggtcttttgcttcttcactagactcccttctctgctgaaatgat

SEQ ID NO: 36868 - DNA, 539 bp, Arabidopsis thaliana columbia
ccgatactagcaaccattagttgaccatctgcaataagtgcaattgtagccgttgaacctgaattcagctttctgtttgatgcttcctggagaaaaacaaagtgtagctggttatatccttatcatgatagtaacaacgctcgacggagtgtatagaagatatccactataccttagtaaatgtgacatcaatgtcatggatcgctctcagcaatgcttccttcataatatccaaggggagagaatcatcaaaatgaagtggcaatgagtctcgaaacctgcaagaaaattgggacactgcaatgaagcgaaaatgacgacttgataaacgaaagagaaataaaatgaaaaggcactcaactgcatttgaaaatccaggttgtatagatgcatgatttcatcccgacttacgccgtgcaaaatgacactgtggtctcctttagttgggaatcgtccaatcaacttcctcgtcatagcagaaaatgtagcgtccaagagaaagttgatatgcaaagcaaagtaatccaataaaagttttg

SEQ ID NO: 36869 - DNA, 558 bp, Arabidopsis thaliana columbia
attatcatctatccaattggagacgaatcatatcgagcgatggatttggcagaactgtgggcgattttcggacccggattctccggcgccgttttcggaaccgggtggtggttttgggtcgacgccgtcgtttgcagttccatccaagttcccttcgtccattaccttcccggtaaatatatctaactctcgataatttatcaattagggtttccgaattttgagcgattttggtccgttggatttggggatttcgcaggcatattcgcttctctcggagctttgatgttcaattgcgtcagaaaagaagacattgattactgctcttacgacgaaggcgagtggaggttagtttttcaaattgatctgagtcaacataagagcttggttacttcttgtttaaatctgtaattctgtggaaagtagaaggtagttgagataagtgtacaaattttagctgatttttgtgactgatccatttagtttgaagtatttgagtgatcattgcttctataagtgttgaagtattcatgatttgtgttttatggatttggattg

SEQ ID NO: 36870 - DNA, 476 bp, Arabidopsis thaliana columbia
  unsure (1)..(476): unsure at all n locations
agaggatccccaagattatttgattgatatcatgtattaccaaaacgattctcccatgaataatgatgtatcttataagctaagaatcattattgttaataaatatataatgatccaaaaaagaattgaataatggctaagaaattgatgtaagagtgtagaaaaatgaaaatttattgaagagtcaagaattgtggaagttgaacaggagagccgtccctaacaaaatgaaaaccacaagcccaaaaaacaatataatattttaatagtgtgtttaaaaaataaaaaagagatttgtaaaaaagaaattcgaactgttgccctgtttgttcccaatctgaccaataaccactagactaacaagagtttttgacaaatttgccgccgaaaaactatatgatatatgtanaggccgcaaacccatgcttggcctgttttgtctcatggccggctctgagttggagtgtaactgtgta

SEQ ID NO: 36871 - DNA, 383 bp, Arabidopsis thaliana columbia
gtgctctaaagatcgcttgagaattgcgccgcaaaatagattctccgcggttcttcactggtgtggggcttcgatcaccttcttgtcgcctcctactgcaactcattatcaacccaacatcgtccgacttgctctctgcgcggtctgttctttagtactacggtgaccagcgacttctaactctcacctccgacgtctcaacgttgtgtctctcgcctgctactatccgggcccagttccttctatcccgcattatcgcaagatcgcgatacacacttgatcaatctagagtatactagcgtgatgctcgctcgcaggcttcccgcactacagctgtttaccgagtatttcgataattcgcaaataggttgaacaatgtctga

SEQ ID NO: 36872 - DNA, 878 bp, Arabidopsis thaliana columbia
tctctcagagacgggccaaatctcagcttagtaaaacagacattattattctgtcagaaggtcttttaacctgttgtgtgtgaaacagagtcagtttgtgtgttgcttctgttactacacgaccttagaagcgtgaatgagttgatttggtcgtgttgttttagcaaattcccaaatcttatagatattttgttaaagtaaaggtcaaaatcaatgtaagtggaattgtattgattttcatggctgaaccattttcaaagttgaactaaattctcaagtacaattgtatgttagcatattaacaagattacgaagcacactcgcaattaagataaaacaaaacaaaacagagtggtctctttttttcttatttgttcttcttccacctacaacacacttcttcttgttctcttcttcttttgcttacgagttacgattgttcttactctcaccatcttctcacatctttctcttccaatctctgttgcatattgttaacaaagatgagattccaacagtctctcttattgagagataaaaaatggaacctatctcatcaacacaaatccggcgtctgccaattaaataaatccggcgtctcagatccacgattacacacatcatcgccgtcgactaattgcaaatcataccaccggatttttgttttgtagagagagagatgaaaccgtcgggttcttttttggcggaggaaacaaagcactagtgctttatttttttggttttgttacaaataaaacccaatcacattcggccacgtcgtcgcctctctcactctcaataatctctcttcgtagagccagctctctcaattttaatgacttctgtagcatactagcatcgctgtctcaacgacaata

SEQ ID NO: 36873 - DNA, 490 bp, Arabidopsis thaliana columbia
ggagcttaggcaagagaacgcaatgacagaatcggaaatataaactagaaaatgttaagattttcttaccagaacagtgtgtgttagatcgaaattcgatcgatcaatcgcaaaaaaaagagagtttgttgttgttgttgcttctctgcttctattcgattattcttcttctatttagtctttgtatggtgtttgttctcttccttcttcttctttcctcagagcacacgataactattttcacatcccaaactacggaatcacaaaaatctgcagataaaggaattgtttttacacagcagagagagagagcattcgttgtcctcattacaccaaaaaagtgcacaagagaagagattgacaaagaaaagtgtcatactttaacaaagcccgagactcttctttgcttcttcttcttctgggccttgttatctattgcttcttcttcctctctgaatctctctcgcgctctagattccccgttattgga

SEQ ID NO: 36874 - DNA, 500 bp, Arabidopsis thaliana columbia
cgtgtcatcatgaaataaaagaaaggaaaatctgagtcagcacaaaacgacaaataagtgagaaaaaaagtaatgatggcgaaagatgtgtttaactatggttcactggtgaggtcacggtgagtcgtgtccacgtggcgtatagagagacatccacgcagacaaagattattgacggtgaataggatgatgactaaaaagcttaggtcttcttagctcttaaacccatccgcttaatgtgaccgtgtccttgcagaccagaagaagaccgtcaacgtgttacagatttttttgttcttttcttacatttctgtttgtattcatattttcttatcactttccagtgttttattgtgttaattactttgcaaatgatctaatgtgaccgtttcgttgcagaccataccgtcaacgtgttacagatttttttggcattatttgtagcatagcttttatcacttgtaaagtttttggctttagtaattctgcacaaatgttat

SEQ ID NO: 36875 - DNA, 1183 bp, Arabidopsis thaliana columbia
tatattatatttacaacatgaaaaatgatcaaaaagctacaacatttaatgtttaggagaacaaaattaataaataaagataaagacgttgtctttggttattgacacgaaacgagcgcaaagcaacctaatttaaaaaagtgcaaacgtaccgtcagatagttgacacttggaaaagagtagcccacgtgttgggagtggcacattttagcctgagacaatgattttgctaacccacgccactcttacttttcaactttattttttaattatttatttatttagttccttttccttcttttggtttcgtttggtcccacgctctaagccaatacgaggattccagacgaaatctttgttgtgaagactaaaacacgtggcattaagttattggagatatctagattgtcttaaaagccttgaccacgtcatcattctgtatctgaccactccaaacttatacagtataaagtacaaactggtcaaatcgtaaaatgtgtttttatctccgtagttcaacctgaatgtttcagtttctattttgagaatctagaaacattataaagaccaacgttattaaaaaataaacagttgaggacctacggtattgattatggatcacctaattagctaatctaacacttaaaatgcattagttaattgaagtttgcagtttcttcattgataaagagaaaaagcagcatttgttgtggtacatatggtgtcaatcatctcttcgagatatctttcgtggtaagagagaatatgttcttcaaagtaacggatttcggagaaatgttctcttatgttccaagttcggtgcagatccaatacttaaggtctagtacatgcaggaatcctacagcaggaggcaaaagaaaaggaggagattactagtaatttcttacattgccttgtttgtttattattcatgttatattgttttgaacaagcctggtcaatggcttctttattacttgacaagatcaaaaacatattttggtgatttgaaaactaaacttgtcatataaactttgatatctgacaagttttatgtctttctctggtgaattatgtagctctagtggtgaagaagacattccatagtacataaacatggaaatgtaaccaatgaatcaattgcacagtggttgattcaaagccaaataaccaaaacttaagt

SEQ ID NO: 36876 - DNA, 295 bp, Arabidopsis thaliana columbia
tctagaggatcccctaatctctcactaaatatatatatatatatatatatatatatatatatatatatatttttttttttttcggtacaacaataaaaaatattttgtagacacactagacacgcatctattacccttcacacattgggatattaattgttaaatatatccatcttcgacacacatttggattgtgaatacctttgccaaatagtattgtgaagttcgtatttgtctatataaaaagcttttttgcttttgtctcctacaatgcttctctttccgtaccacggtg

SEQ ID NO: 36877 - DNA, 552 bp, Arabidopsis thaliana columbia
cgactctagacaaaatctttcgaataaaacgcatgaagaaaaaaaaaaaaggagaataacatgcgaaatcggaatcttagatcagtcgaaatcgaaatcgaaattggtgactggaacaaaggcgatacgcagtttgaatgagacataggcatcaacggtggcgtggagtatctgctttcgcccaagctttggagagccccagttgctcttggtggtgatgttagccggagaaatgtgcctcttttgatgtctttgttaataagagcggttccaaatatctctcatgaatttcctcccgtccacaaactttccgatcttcaaaacatcactacgagcaaagaacttggtggaatctctgtcgttccatattccgggggatgtagtcaagtctgagccaaggaaccgagttggcctcctagaaatacgggaacaatacctaagcttgacgataggccattacatctatgcgcatcgttcaattcaactgagaacaatcccactgaaattatcataattttgggcgttgatttttgtaattttttgcacatttat

SEQ ID NO: 36878 - DNA, 535 bp, Arabidopsis thaliana columbia
ccttaatgacatgtaccagatatctttctctccatcttcctccattgcggtggtgacgatcctttctcatccaaagcgtctcgccttctccactactccgtttacttctcttcgatcatctttctctttctcctcaagccaattcactctctcttaaatcaagttctctttctctgatggtgtttaatctctctatctcatctcttgatgaaatcaacacgtcaacatgacacaacggtgtcacaattagtctcggcttcctgcaccaccacccatgagctctttcccttttctttgatctagtaaataaaactcaccacgacgtcgtttgtttggttactcagaggcggtggctacgatcccactgttaagccttagggtttctcaatgttttctttatttttccttctcgtcaaacaacgatgatatatatatatatatatacatatatattaatcttcggattttttctgcaacataaattttttgtttcctccagaatgctccattatctcaaatgaatccaaacgtgtaa

SEQ ID NO: 36879 - DNA, 575 bp, Arabidopsis thaliana columbia
  unsure (1)..(575): unsure at all n locations
cttatagagttatatctccggatctaatgttatgagtttattcatatctatatatatacatatatatatatatatatatatatatatatatataattctgaatttatttgataaaagctaaacaaccaggatttaatagatgatttacctttggatcttattataccctaccccactttantcacncncnctacgcgtgctctcattacttttctctgtcacaagacgttggtaatatatatttttatggtaatgttttcatgaaaataattcatcacaactctttacatttatttaatgccttaactaaagctgaattcgaaaaagttgaaataaattatctactaagatttgattgactatagtttttaatagttttcttttctcatatatatattatcatagtagtcaaaacatttgattcacacttatatacacagatttcttgaatgacacattactatgctcggtcaataatatgattttaaggcaccatgttatttcattttattacttaaggaaacctttttgtcttttgttgactctaatattatgaatatagatgcacatgtggg

SEQ ID NO: 36880 - DNA, 453 bp, Arabidopsis thaliana columbia
atatgctgagggataaagctctgggctccaatcgtatttggcttaaactgttcagccacagattctgtactgtacaaattatttacttgctggtttcctccgaagcgtgataatgaatcagaagttaccgcaggctcagccttacctacatttactggttgccaagtgtttccagcctgctgattgttggcatagtaagactcgtcccaacttccgtgttggccctgaatagcaaagtcttgcgctttgaatgtctggtttttgttgttaacatcatacacactactctggctattattgtgatacgtagttgtacgagcatgaccgttctgaacttgctgatcatgagcttgaccagttacagttgtttgggaagcctggttgtagctgtccagagagcgccattcttgagcaattgtgtcatagtaccatccaggatactgggcgtcaaat

SEQ ID NO: 36881 - DNA, 327 bp, Arabidopsis thaliana columbia
tcccccagtgcattcttctaggagcttattcaagtctgactcaggtaatgttatttggccgtagactatttggtcaatttgctagttgagttaataaaatctctgacccataaaaaaaagttataaaaagaaaagagaaccggaccatttttatttttgttgacatcaaaccggaccattggtgaaaacccccaaatcgaattccagaatcatcgtctccatcgtaatcgactcaaatcaggcaacggttacctccgcgtcgaatttcagcgaccacccatttgtgggatgggaaaaagctgcgctttttgtggatttctttctcag

SEQ ID NO: 36882 - DNA, 524 bp, Arabidopsis thaliana columbia
ccgatacaatacatgcgcaacgggtaacacaatgtagctagtacttcttttagttcattaagatatgatgctattgttatgttaaataatatctttctataaaaagttgatggcttcactagctaaatatttgcaaggcatgatcgtcaagatcaaagattccaaattcaaaattcgaagtgtacaaagataaagaagagaatggtagtataaaatatttacagattctggtttacttttcctttttcaactttgtcaactttttttcaaaataagaaacacgagaaaatctgatatgcgtggcgtcattttcaaaggtgaaggagaaagtacttgggtcgcttagttcacaccggaaaaagaggcaacgaaagcagagagacaaatctaaataatgtctgacgcgcgtgaataatattgccacaaagagacttgccttattccctatcaactctcgaccaattattatgcatttctgtttctttcttctatctaagcatatctctccaaattatttcacttct

SEQ ID NO: 36883 - DNA, 513 bp, Arabidopsis thaliana columbia
ctccccttagcttttacttttccttctcaaaagcatgtttctctatagttcttaagaaaaaaagacaagtcattttagttgagcaatagcaatatcaatattcaaaggttatgaatataaaatcatacttactttgttgacaacaaaaattgagactaggctttgctttttgttttcggattatcactgtttttgccaagtaaaacaaagcttgaaattgtattgctttgatattttgtgacgcgactctctcaacgagtttgtgacaatggcttgactgtaacaccattcaaaatgggcctgctcgttttcttgttgctggaaacaacgacatcgaccacattttttgtttgtttgttaaatagtcgaaagaaacagtcgctgaaaacaatcgctagagagtgttgttgtgttgttcgtttgttggtcgcagcgacagttacttcaatttttctatttcaaatttttaatgtgtttgtataatttttaatgaaaaatgtcaaattctgaaaa

SEQ ID NO: 36884 - DNA, 482 bp, Arabidopsis thaliana columbia
tcgagtaatgactattataaaaatagcaaaataagaaaagtaaaatgaaaatagtttgatacattaacatgattttttgtattttttcttttaaatgaagatattttgttaagagtgagattaatggatgatttaatgcactgtgaaacttttaaatttttatcactaagtttagttatttttttaatgatattaatttagaatgacatgtggcactcactagtgtgatgatttgtcactcatatagagagagttggccaattttcatatatatgattactgcctttataaagatcctgaattacggtaactatgtgtgcaacattcgcacatggtttcagcgaatatttattgaatttgacaagtttttatgggatttagatattttataagaaatttgaaagaaaataaattctttaaaagaaaaattgagctcagaagtgtggcaattttatctgagtaatcagaataatgcgaaggac

SEQ ID NO: 36885 - DNA, 552 bp, Arabidopsis thaliana columbia
atcccctcgaacatgaaaatcatactattggccagcccagttggtcacatactagcccacaatcttatacgatcgcggttcgattccatttgacccctttttttatttgaaaaactttattattcgtcacaaaacggtcgctctttgcaacttatttgcgaccaatgaaagttacagtcgcactttgcaactgattacctacatattaccaacactcatttttgcatttcgatatttttaagtttttgtctatgtatatgttttcttatacgttgttactttaatttgattgaaattagatataaaatcataaccaaactcttcaattctgaattttacaaactaaacattcaaaacttcctaatctatatgaagagttacatgttctttgattaacatgattgatattttcaaacaagttccaaaataagttatgaaagcaatgatttataaacctaaacatatgtatgtactttatatcacaaaaatggatgcacaaacacttagctggtcagaaatattttatgcaagttcttcaagaaatggtacagt

SEQ ID NO: 36886 - DNA, 424 bp, Arabidopsis thaliana columbia
ttctgctccatccttatccgagatggccatgaagtgtgcacgcacgagacaaatcgtcggaaaatttatcggcaaattttgtcggatcttcgtcagaaaatgacgtcagaagtgcgtcagaaactcgtcgataaagtctgtcgggaaggcgacaggataagtttcgtcgacatcccgacaaaatcttagacataatttcgacgagattccgagaatagataacgtatgctaaatagtgaatccgacgactctccgaccaagtatgtctgaatctgtaggaattccgagacgaatttccgcgaccatgttatatcatatttatttccgacaaatttctgacaaaatatttattacatttagtttcaacggatcaataaacctaattagacagtattacattttgacaaagttccgacaaaatagt

SEQ ID NO: 36887 - DNA, 555 bp, Arabidopsis thaliana columbia
tcgatataattctatcactcattcgatatgaacttgtccccgatataacatattattaaaataaaattatatgcaattgtaaacgtgtaggtgaagacaataatgtttaactaatctgtggaccaaaatagatggcaaaaaatctaaagaaaatttaaaatccttaaaatgagaacaattggtggacaagatgtgggattcataataatagagcaagatgatgaaatcgaggaaaagacgtagacacaacagagaatttctaatcggggataagatctggagacaaaaaaaagtctatcaccaattgtcctttatctgacacatcagtctgtcactatcaagggcaatttcgtccacaaatgtgcatgtgacaatgaaatgtggtagattctgtaaacctgagtgaaatgtggtataaattgtatgacacattgcaaaaagtggtagattttgtaagattcccttatacatattgataataaaaatattttattaaactaaatataaaactggatattattttaacatctaaaaaaaatgccgcttttttatatg

SEQ ID NO: 36888 - DNA, 381 bp, Arabidopsis thaliana columbia
cccaatcatgtcgttgtagtattttagtttgtcaatccaaatgggtgtgatgctaacaatcaagatgtgatcagaagtcactaagtcaagccaagcaataacaggttttgacgtgttctaggagtcctaagtgaacatgcagaaaacagaaattcaagcagaaacaataaaacactctaccaacaaagctctttgcagagaactgggtgaggtcgagtgactggtcgagtaacaggcagtaaatgaaacaaagatactcgactgcacagtctgttgccagacaactgggtggtcgagtatcaggtcgagtaacaggaaagatttgcagaaactaagcaacatgtaacaagacgtagtaaacaaccagtagaggtaacaaaa

SEQ ID NO: 36889 - DNA, 305 bp, Arabidopsis thaliana columbia
agtagccccatcgatctctgcacacaaaagccgaatttctggaaaacacaaaaactcccaacattctatgggttattgccatgatcattctaactaaatccatgtgtagcaagtctaatcaaatcctaaccaacatgtacttctccgcaagcttacacaacaatctagattccatacctaagttccacaactatatccaccaggctttcatcgctcggtctcatcaaacaagctaacattcaaaatccttcttgactccttcatgtactataccatgataaatcgaccattctattatttttttt

SEQ ID NO: 36890 - DNA, 481 bp, Arabidopsis thaliana columbia
gactctagccgagagttacacaaaggaattggtttccttgtttcggtttattggtatagagagtctggtttatgtaaaccgggaatcaagtgagatttcactggttaatccggaacaatctatactataattctggattacaataaaacagactctataactccggattaaaagtaaagaggtgataagagtgaaataggagattcaattgatagaactgtatttgtgttacatcttgattaatgtaatgtacatttacttttaaaaaaacgaatgactaaaacagagatataaaaaatctcaatcagcagagtatagctttcgcaaccgatggaactgtaacagacattaccctcgacggctctctcaaatccttagcaggtcggggttcaggcatacacttaacatgaactatacgaccattcttggttaagtagactgcatctttgtacatccagtcatcagcttcatggctaaagaa

SEQ ID NO: 36891 - DNA, 412 bp, Arabidopsis thaliana columbia
gtgattggtgacaacgtatcttgttggattggataaacatcgaactctccattgggccactttcttgacaactctcccaactggttttttcttttcgtaaaacattattaaataaattaacaaagaaaccaaaaaaaaaacatgcgaccagtctatttatttgctgtgaagaaattaacaatttgatgatccaaaagtcatttctaggattagacagttttcaaaataatttcgccatttgaaaataattgaagtcagattgataagcttttttttttttttttgataagccttcaaattacaatattaatttcctgatctgtcttaataaggtgaattgtaattttcttcttctatggatttgcatggtttttgaaaatttaatatatgaaatcttagcaatcagtgtttt

SEQ ID NO: 36892 - DNA, 524 bp, Arabidopsis thaliana columbia
caatagatatttgagtgtccggcccaaattgaagtagaataaaagataagttaccaatttaccagtagttagcagcaaacacacagagaaagtgaaacatcgaagagaccccagaatgcaaaatctctctccgcctttttctccttccttattcgaaaattctcagcgtctttgttgcaaactcctctgaaattctccgtcttcttcattcgttttcgactctgcgttctactacttctcgtctcctatcagtatcatcgcaattcatattcagtctagtgtgttaaaccggagaatttggagtctcgccggaattttcctctgtctatgtatgattgccggtgatcaaagcgcttcttaacgattctgttctcctttgagagatctgagtatctgatttcatctactacatatgttttctcgagagtgatagaaagtaggtctcatacatatttttcctctggagggaattttgatcctctgcttcgttaattaacttgtgatgaagcggataagagatgatg

SEQ ID NO: 36893 - DNA, 713 bp, Arabidopsis thaliana columbia
gcaggtcgacaggatcccccggtctaaaatggttaacaccacggactaaactatcacgaaaacgaaacaaactaatgccacaacagaaggatagtaggtagatggagccatgtaagatgtataactagacaatggcgggttcaatgtcacgactttgtcctttggccactatatgactaaacaaactcccaaactgggggaaaaaaggttcaaactttcatattctcaagcagaaaaactgaaaaaggtttacagctcaagataattaaaggatttttctgtagtgtaaggagcctacctgagaagtatgactctcatcctctagatcttcaaccacccctgcaaccaataacagttagcataatccaaaatttattttagaacgcccctcaaagagaacttgaatgatagctataagtgtgtactcacggtttgctaacccagataaggcagacaatctagcagccatatccctttcttcagcttcttgaagagctctagcataggcctcatcatctgtataagcaacttcttcaatgtcagagttaccgtcatctttcatgatcatctacattggcgtgcacattgacatcaagcccatcttcctgaggatcatcatctgtttcatattcagcttcatcatcatcctcatcctcgattctcggggtcatcaaactcatcctcagtcgtatacatagcttccagtttcccag

SEQ ID NO: 36894 - DNA, 467 bp, Arabidopsis thaliana columbia
atgctttcgttttttttacttttagatgtgtttaattccatatttgacgaattcatgaactttaaaaccttatttatcccacttgcaaatgttctcaagaagtttttttttttctgtgaatgatgtaaagaatttcaaatatgacgtccctaaacttcattccaaatgtcaactaaaacgttacttttctgatgagaagctaagattttcttatcttcagtctacaatatctataaataaagtttcttacttttttcttgggatcctacaaaaacaatttcttgggatccaaatgcaaaaaggtaaaacgtcacttttgaaaagttgagattcgtttatggtatagttcactctaagaaaaatggttgcggacataattttattcttcttatacttttggaagttttttttttgtagtttttttgtccgaaaaagggtaatagtgtggccctcccaggttaaaaaat

SEQ ID NO: 36895 - DNA, 404 bp, Arabidopsis thaliana columbia
agtgtgctctaaagtggcgcgtttctagcaggcactttcctcacgtatatccctttaagaatgccgagggtccatttgtggtcatgaccagggaggaaggagagatggaggaagacaagagtccaacatttgtgcatacctttgagcggtatctgatggaagtgcctgagtacttgatggagccgttgttcgatgccagtagtaggcttcgcaatcccgtttgtacagctttggacagggaaaaggatatggagagggattgtatgtacactacttatggtgttcgccaaggtgggcagacagctgtgttcttaatacgtcattttgtgatactgaccgccgcagatcatcgttggtgtctgggtacgctctggcaagccctaactcgatccaaacatgggaaa

SEQ ID NO: 36896 - DNA, 481 bp, Arabidopsis thaliana columbia
cttatagcccaaccgttccgtctgttgatagaccatattgacaagaccttgcatgtcaagggtgaacgtgtttgggaaagaggttagccaagcgagacagaactgcttggaaattgtcggttgtgagcagagttggttgactaaatcttttctaattttgtcatttggagacaaagacaataatgatgaagacgcaggggtgattgatagaataacgagaagaggaagaattgaaaatacatttcttatgagacaagaaaaagccattgtcttggacatggaagaataattagacgtgggaagtgtttatatatatcttaaaagagatttttctctccaagtaggatttcaaccttattaagaaaaaaatcaccataattaagttaaatattttatatatagggaatttgaaagtcttataacaaaattaggaaaatagcttagatttttttcaaaattaacaaagcagtctgttgaccca

SEQ ID NO: 36897 - DNA, 538 bp, Arabidopsis thaliana columbia
  unsure (1)..(538): unsure at all n locations
caattttttcgcttgtctataggaggaagatgttgatattgttctgcatcatttggtcggtgtgatggaatccttctgcaaaaggtaattgttttaaggagaatgtaaaaacttagaactcgtgggtatatattttgattggctagagttttaactggtcaaagtagaagtttgatgttttgctcatgaatagtctctatttctctcatattcagaatcaaacagagacgcaaacaagaaacaagaagcgcagagacaacaaatcaagaacaattcaaagcagttgtctcagaagcagcacgtccatttgtaatggcgagaacagaccgatttgtggatgaacttgaactctttctggccgcgggactaaacttggaggcttatgatgcaatctataagcagggtttagaggggaacaaccgaagagagatcggtgcagctagtgaagaaagagaagaagtggaagaacataatgtaagaacacgagtgactccttatttgtttatcttcgaggaagaatcagactgagacnaaacac

SEQ ID NO: 36898 - DNA, 402 bp, Arabidopsis thaliana columbia
ggtcgactctacaccaactatttgagtcggaacaagctagtggacccgcggctgctttaatcggaccaaaacatatttttaacattttctaatttgtttatatgttcatgtctttaagaacgaccaaagagccacttatatagaagttagttgtcatatgcttgagatataaagtttcttctttaacaattttggaattacatagtaacttcatattctcgagtttagtttattatttcgcctaaaatatcccgataatataaagttgcagttcatggtttcccatttagttggatcaatttaggttttttcatagcattcggaaaagggatgcctttatacacgatgactcaatttccacatcactaacatgaatcttaagtagagttttattagctaatg

SEQ ID NO: 36899 - DNA, 452 bp, Arabidopsis thaliana columbia
atatcctaaactatatatattatgagagggagttagaattcaaagatttaattttaataattacctattttttgtcatgacaattattgtattttctaatatttttctatctatattccccaaagagataacatttgaaatcccagtgaatctccatgaataggaggaaagtagtgaggtcaaaacaccatcagatttgtgtctaattagggtctgtgatttcctaccaattaaagataaatctcataaacagaagaatctataatagtgctgtctataatctactacctaattgagatgaatctcctaaaccgggataaaaccggtttataatagtgctgtctataatctactacttaattaagatgaatctcctaaaccgggataaaaccggttcaataaccctgataaaaagagaagggcggctgctaacgtgcgcatcgggtatttat

SEQ ID NO: 36900 - DNA, 595 bp, Arabidopsis thaliana columbia
  unsure (1)..(595): unsure at all n locations
cccgattgcttgtttttccagtttgatccaagaagatgccaacaacggaattagtcctgaggtggtatattggttattgttttgatgtatattgattttggtttctggcatttagtttcaatgatgttcttagctagttttcgtgtgattttaggcggtggttgttgtcccaagcccaaccgaggaaatacaacagaacaaccaacttcaaaatgaaccggtaaagaagccttctctgaatctttgcgtccatagtgttgtttgagattgttttatatatgttttgagcagattgtttatcttggtttctgagtgattctatctgattggcaattactttgcctattcggttttgctctttttgatactttttcaagtaactcctcctatcaaattaatggttgatttctactcactgtaaagtcttatgtttcatgcttttagttttatcaaacacacacacatatgatgttcttacaaagatttggtgaacaacattgatatgcaggaaccgttgaggcgtgaaagcaagacagacagcagttgctttggtaaaagaagatggatgggctcgtgcatgaaagganaggagaga

SEQ ID NO: 36901 - DNA, 515 bp, Arabidopsis thaliana columbia
ctgactatcatttctaaaacatgaactgtggtcatttggaggattattcttaaacctaaactttgatttatgagtatataaatctaaattaaatcacccttatatcaattaatgaatcattaatatatatgatatattcattacccaaagatatttgtatctttcgcttactttaaaatgttgaagctataaaattttacatatttgaaaaatgagttattagtatttcatcaacaaaatgcattctactgtatattggattccaacgcaaacaataacatagctacaaagctatcacaaagcactatcattagtttattacactaaaatttcgaatattttcatgtacgacttcaaatatttttcattttctgccgcattctcatgtcattagtcatcattactccctctctcgcgtacccaactctatataagatttctccttcttcgttttctcttctcatcgaactttcctctttcttctctcatctcctctctttcactcttcacaccag

SEQ ID NO: 36902 - DNA, 310 bp, Arabidopsis thaliana columbia
gtttatcatcaattcttttaaagaaaaacctagtaattaatataataattaaataatataatagtaattagtctaaaaacaagtattttatttataaatagttttggtgatttttttatgaatttttgagctctttaaaaatatatttcggaattacaaaaagaaaaaaagataaaaaagagaaaaaacctaacctagccggcccactaggggccagtcaccaaaccctagtcatgcgcgcgcacgcctgacacccatttccaagccatcgccgctgtgtttcctatctccctcccctatactctctctc

SEQ ID NO: 36903 - DNA, 480 bp, Arabidopsis thaliana columbia
ttgacaaaccaaaatacaattgcaatcccgtaaaatatttattttaattatataattaaattagcggtgtaaccggggtttttttaagggatagatttggcgggacagtttgacaagacgttacataatatcaaatgtgaactataaaataaaaatattatataaatagatttaacaacctgcgaatttaatatatactaattttgaaaataaattgttctcacggtataacgcggggtaaaatataggtggtgtacaaatttgatgctaatataactaatgcctacgatgtggtggtgtgtcagcagcattgacattttactagagcaatttaaattaaattatgagcaatagagaagttatatggatgcccattatacggcaattagtagatcctagaagatttaatctctagcataaactctaatgttgtatttcaatgtatatgtcatatgttgtataattgattggtaacagaat

SEQ ID NO: 36904 - DNA, 219 bp, Arabidopsis thaliana columbia
gactccaaacaaaaaaaaaaaaaaaaaaaaaaaaaaaaaaaaaaaaaaaaaaatgagccggccaggggggcgctaagacaggaaatccacttaaccccaggagccagaggtcccagtgagctaagatcacgccacggcattccaacctggggcccaggccagaactccttctcagaaccaaccaaacacacaaagccagtcaaggggtttaattcgtcg

SEQ ID NO: 36905 - DNA, 846 bp, Arabidopsis thaliana columbia
cgactcatcccctgtttagatgataacaaaagaaaatgcattgacacatatagtatatgtaaaacataacgtgtcataatattttcttgactcactgcttccttaattcctttggtgggctcaactggcatgatcctagaccaatcgactcccatcctaaagacagtaacgccagtatctttggctagcttcacttctttgtcaggatctgaccaaaatttaagcctgtcctccctgaaacaaattgaactttgagctgtcgacactaatgtttactatacatgcatcaacaatcttggtgaaactgatgttagaaatctcacgcgtgaggagcgttatgccacgcggcaacatttttagagggtggcttatcagctgcattcttatcttctttgccatgagtgttcttggccaagcctttggttatagctcccacagcaagcttaaccttcttcctcctagctttcttatcagcagcctctgcttcttctgctgaacatggtgtttctttagcaaactggagccaagcatcatctaaatcatcctccgcatgagcaggtgcagtagctaacccaaagaagaattttccttcctcgtgttctgaaacaaacatgttaaaatcaattccttcacaaataatttaaattctacattaactgaatcaaacgcagaggatattgttttagattggtctgagtccaaaataatgcagaaaagggagaaatcgtttaactaaaagagttccagaacatcaagctcaacaacttaaaccagaaggaagaacacatttcacagtaatactaatcggagtcggagaagatgagagagcttcttaccaatggaatt

SEQ ID NO: 36906 - DNA, 543 bp, Arabidopsis thaliana columbia
atcccccataggaatggtttaatatgtgacttcacatccaaacaataatatgcttgtctatatttgtgagcttgtgtggaggttgtcgtaaacatcattttagcgtttctcctaagtgttgaattgtaatttcatttttgttgtgtctgcagaacactgcactgctggctagacgactgctcaatggcgagttagagcctgcaaagattttgaacaatatcctccttctctgtgcaaataaatctagggatcctaataatcacattttgattctgttcttgcatctagctggagtgtgttgactgtggctattcctggtatgcttcaagggatgaggcatcctaataatcacattttgattctgttcttgcatctagctggagtctgttgactgtggctattcctggtatgcttcaagggatgaggcatcaactctgacaataagcacagaaaacctgcccaaggcacagagaaggaggatattgagaagaatttgaccagatctggtgaaacgagaaactcaagacgaaccttgaagacaat

SEQ ID NO: 36907 - DNA, 557 bp, Arabidopsis thaliana columbia
tccaaccgtctatgtctctccagggaattcacgaatcgatcgatccagaggtggatcgatcgatcccaccgtatatgtctgaaacgttgaagtacggaccgatcggtccaaccgtctatggccgatttgttgtagcctggaccaatcggtttaccccgtcttctctccgcttcagcttttctcgttctttctcgacccgaataaactcaaaactatctaatccattcacaagtacctaaaacctgcaaaagactcaagacttgatcacaaagacgtaaaaacggactacgacatgataaatgactcaaaacgaaggttagacaagagatctaagacaccaaaaacgcaacatatcaatagtcttatcacttatgttaccatgaaataaacatatcatgtagttacaaacttacaatgtcttttagatgattactaatgtaccggaatttgtatatcacaattcttttaagttattcaaggcactagtggagaaagattcaaggcactattggagaatgcttttctctcaaatttggctcattttatattgacaatgg

SEQ ID NO: 36908 - DNA, 553 bp, Arabidopsis thaliana columbia
tctagtaacgcacgccagtgtgctctaaagcgcttccctttcaacaatttcacgtgctgtttaactctcttttcaaagtgcttttcatctttcgatcactctacttgtgcgctatcggtctccggccggtatttagctttagatgaaatttaccacccatttagagctgcattcccaaacaactcgactcgtcgaaggagcttcacacgggcacgggcaccctgcccaagacgggattctcaccctctctgacggcccgttccagggcacttagacaggggccgcacccgaagcatcctctgcaaattacaacgcggaccccgaaggtccagctttcaaatttgagctcttgccgcttcactcgccgttactgaggcaatcccggttggtttcttttcctccgcttattgatatgcttaagttcagcgggtatccctacctgatccgaggtcaacgtgagaaaaataaggttggagacgccggctgcggccggccgtgcctaatcgagcgggtgacaaagcccatacgctcgaggaccggacacggtgccggc

SEQ ID NO: 36909 - DNA, 615 bp, Arabidopsis thaliana columbia
gtttaacagactacatctgacacagaaaccggagataactctcataagaggtctctgattgagacgtggttcgattctatggaaagctaatatctggggcaatccgtgaacatattactagttgcgagattcattgtgactggttgggaaatcggtcccgaggcagactggtctattccgacggatctgtaaagaaacagacaacatcgacttcagaaaaaaggcgataactctgagagaagatatccgattgagctaccgttagactccctagaaagctgatatccggggcaatccgtgaacaggttataagtcacctggttcatagtacgtttgacgggaaatcggtcccgaggcagactggtctattcatacagatctgtgaagaaacagacagcatcgacttcagaaaaacggcgataactctgagcagagatatccgatcgagctacagttagattccctggaactctgatctccggggcaatccgtggacaggttatacgtcacctggttcattgaaccttgacaggtggcctcccacaagtagacggatctgattgtcggggcttgatgagcgtacatcgaatacttggatgaatgatatgcgaagag

SEQ ID NO: 36910 - DNA, 547 bp, Arabidopsis thaliana columbia
aaggatgtgtcccttgccataaattacaaatttttattcaatagaaattcaacaaatatacatcgattgtataacgtcataaactcacaaaagttactttgattttcatcatgtctcaacctctcgtttctttcttcatcttgactttgaattagaagtgattactctcaggaaatcaaatcaatcagaaacaatactctcaaatttatagatctgatgtggaataagattaagaactttctagttttgtagatcagagataccaaagtaattaggagcagagagacaccaaacaaagcgacgaataaggtataaagctccctccgccaccgccaccgccaccaccaataacgccatcatatcttggttagcttttcaaaaacaatcatcgcaaggaatcaaagcaaatatgtcggagattaaaagataaagccctcgtttttgagctttgatttttagtaaaagatttgattttggttttggaaatagagaaataaaaccgatggagaaacgctgagaagatatgaaaaagaaaatgagtttgcag

SEQ ID NO: 36911 - DNA, 530 bp, Arabidopsis thaliana columbia
ccctaattagtactaaaagtgcaaattccaatagttagcacattcttttttatatataacaataaatagcacattcttagataggggatgttatgaatattcatagtccccatttccaacgtttactttgttgtactaatagattattttcacacttaaaatgtattattatattttatatccacttactatttttctttaaaagggaaagtatttaaatctcaacaatgcacaaattaaaatcataaaccatattataagaattttgactctatactatattcgaaaattaaattatttttgtatgttaaaaagaagatataatcctctctatattcaaatttatagattttagaacattaaaaacggtaataccattagtactcctatctttaatgacacatcatactcctaatctagtttgacaatttacatttcacatctaaccattaaattataaccaaaaaaagattaaaattaatattaaaatataaaaacccataataagagtacactgcactcacttcatt

SEQ ID NO: 36912 - DNA, 579 bp, Arabidopsis thaliana columbia
atcagctttaggagatgtgttaatatgaattccctaagaccgacactctttaggttgagtacgagataggctttgcatccaaagcaatcgagagattactatgatgaaaggatgtggggcaaatggtcacacaaaggttgcggaaaagcctttgatttaccgatcttgaactcgtcgttggatattacgcaccaaagagaagaacaagagattgatctaacgtaaaaaggtttttgattaaaagatagttgagtctacaaagagcaaattcaagagtttaaatagataagaagagaaggggaaaagttagtcttggaacaagctccatgataactcggaaaggaaaaatatttaaatgaaagtttgaacaaaaacgacccttggccttccaaattcgtggtcgtcttaatgggcttgggcgggattgataatgggggattttgaagtgttagtcaagcctcattaaaaacctactaaggaaacccattggggcaaaaccttagaagggaaaaagagtcccaagtacacctagccaattaccaattgtcttgagctgctattgagttcgaacgcttagta

SEQ ID NO: 36913 - DNA, 432 bp, Arabidopsis thaliana columbia
gacctattctcaaactttaaataggtaggacgtgattatttgtaaaatagatcttaaaagaaatagaaaaaataataattaatttatcaaaaacaattgtaaaacaaattatgaacttgtagagactttttaattactatggggtgaagaaaaaagaagttttatacagattttttttaacagccgtctatttgagacttcaaaaaagaacggaaaataaagaggaaaaaataaaaaatgaatgtgataaccttttaaaaagttaaaaccaaaaaagtctgattggtgaaaaaaaaactgtggggactttagaatactatcatagtccttaaagtcatgaaccaatcaaagttaatgacaaagccatgttcagcctcatatgaagagaagctagcctagagctcattgtgattaatcgtggcttgcagcaat

SEQ ID NO: 36914 - DNA, 601 bp, Arabidopsis thaliana columbia
tggtcgacgatttattgaattaagaaaaaagatataatatcttgtttatgtgatttactttttgtctttaaatacagttgttgtaattcgttgttcataccgttattttaataaaattggcatcttttctcaatttggttttgcattcttacaattttattatggccgattaaatgaattaagattgtagaagcgcaaaaacaaagttgagaagaaaatacaaattttattaagataacgataacatgaatgaattacaacgactgtatctaaagacataaaataaatcacggaggcaggatctgctatctttttctttaatttattaaatcggctgtaactactttcagacaatcatgatttatgaatcccaagatacaaccgacaaactaatacccgggcacatgagtaatagactcacaatgactggatctaaagacataaaataaatcacggaggtaagatctgatatatttttctttaatttattaaatcggctgtagatactttgagacaatcatgatttatgaacccaagatcaaccgacaaattaataccaagcacatgagtaatagactcaagcaaacttgatctacgatat

SEQ ID NO: 36915 - DNA, 516 bp, Arabidopsis thaliana columbia
taaaagagttatcgaagaaacaaaattattatgggataaaagagattgaattaaaaaaacccatccatctatccaattaatagtagggtccttaacagtatcgttagcatgtaaaacaaagagtttgatagacaataatgatggtaacgttatcatggtaacagagttattttcaatgaaaaattactagttgataacgaaaaaattggagtaaagaaatcaagaaattcgccacttaagacactaacaaagaagttaatgtgtatcaaacatgttatcgtatatgtatcattagcacgtaaacaaaaagtttgatagacaacaataatggtaacattatcatggtaacagagttattttcgaagaaaatttactagttgataactaaaaaattggagtaaagaaatcaagaaattcgccacttaagacactaacaaagaagttaatgtgtacaaacatcttatcgtatatgtattgggagaaacattactcgcaattagaatcgcattttttgca

SEQ ID NO: 36916 - DNA, 644 bp, Arabidopsis thaliana columbia
ccgtcaaagatcgacttgcaggagtttcatgtgagattggttcgtagaacctatcgtatggagtacgcaaacaatggtggtggtgcagtgccttgtttctggtctctgcattccgacaaagttgtgattttgtcttcaggggaagactcggcgataattgcgattcacagtggatgggaaaattagggtttgtgaagagtggaaacgatgacaaatggaaaattttggataattcatggaatgtgatttacgaggacataatgttatacaaagacaatcgttgcatcgttgtagatgataagggcaaaaccgtaatttacgatgtggatttcaaggtttcggatttggctgaaggtttggtcggaggaggaggtcacaagaaacatctagtggaatgttccggcggagaagtgtttgttgtggacaaatacgtgaaaaccgtttggtgcaaatcggatatttcgaaatctgtggttgagtttagagcttataatctgaagagagaagagaagagatgggaagaagtcagagacttaggagatgttgctctgtttattggagatgactgttctttctccgtcagaatctggcaggagatttagcaggagtttctatatctatagtgattataggaatggaggaag

SEQ ID NO: 36917 - DNA, 548 bp, Arabidopsis thaliana columbia
cacttagaggatttgtatctctgacatgtgaaagaacagagaaggaaacagagcaaaaaattgagttgaagaaacaagatcatattcaaaagaagtggcagagatgatataaccatgtaaatatatatattgttgcttttgcaacttcggagactactcgtggaggttcagaattatccgccaccaacatccgtcgtcgctttttctcctcccattcttcccataagatttgaatcagggttataacttaagaaggactgcaaaagcaaatttgtgaacttgtaagagctcagacgagcaacaacgctttcaaagctcaaaaaagatgaaacatggaaactgcgaaacaaacttttaaaagctctttgactcgctgtaagtcgaatgagcaactatcagaatcgaaaatttaagaaacatgagattcgatgaaagctagttatggacttattatgagatgcatgaactttaactataatattgcagatgaaactgatatagctagctgagattctgaaacaaagaggaagttcacggtttttgagaac

SEQ ID NO: 36918 - DNA, 520 bp, Arabidopsis thaliana columbia
  unsure (1)..(520): unsure at all n locations
gtttattccatatatagagcatgtaagaagcttaatagacaaaattaatcatgagtcatgcccccactagattcattaatggtccattttaaaaggacatcaacttcacttgtattttaatgtactctcttaatcaaaacacttgacacaatagattaagaaataatttcgtgtcggatttcttttcctntcttatgtttatacagtaaacaaaaattatatttcaattttgttgtttgaattgtttaattcgtttgattttacttactctggttttctagataccacaaataaataaataaaaactgtatgaaatagtaaaataagagaagcatgtgaacgcaagtcttcgtataaaattattttgctctaaaaccaatttaaacataaaaatataatttaactcattaaatcggtgaaaaacttccgatttgtattagtgattttatctttttttgtttgtaaagaaaaaaatgatacatgactctcgcagttagcccatctttaaattgaataattt

SEQ ID NO: 36919 - DNA, 558 bp, Arabidopsis thaliana columbia
tcaaatatttgtagttctaaatatggatcctatatcatcctgtttaggacatatagtgttttgttttagaatcggcggtatcatgagattttcttttgtttgacatttatgcgtaggaagatcacctaattctttttggtcatcttctgaacatcaatataattcatatgtaatgaaattatacttagattctacagatgaggtttctgttcaatcaaaaccaaaaaaaaagagataaggtttatgtttcttgcaccttaagattcagctctaaacatttagccaaaaacaaagtttcaactgtaaatctctggcatcaactccaaaataccgtatatatgagatttcgattttctaatatttatgtctcctactttcaatttaaatgcaagcctatgtttctcaaaatcttttttttttggttcttgtggttatagaatcgtccacacgtgcccaaattcggagactggaccgaagatgctccattcaccggtcgtgttcgaaaaagcaagcaagagcaagaaaaatatgaacgtggccaaccgaatgaataccaga

SEQ ID NO: 36920 - DNA, 511 bp, Arabidopsis thaliana columbia
ggtttctatgctcgcaataaatttcgatctgaccgtctataaggtcaagttcttaattccttgtcttaatgtgtcacaagtatgatattgtattaatgttatgtatgatatgagttttatgatattaatgtgtttgttatcttatgtgtcacgtcatatttgggcttatatgtcacaagtgtttgttgggttttttgcaggtgcagacaaagaagcgttacttgcaactcatgttcgacttgatgccaaaagagagatgtgattcgtttgctttgttgtcttctttttagctttgttgtcttctttttagctttgtatgtttccacacttgtatgtttttagctttgtaattttgaccacaactttttcttaaaaactttagctttgtattttggaccacaagttgtcttgtttttagctttgtatgtttgtagctttgtattgtcatgtattccgaccacaagttgtttgtcttttttgttttgtccgatcctatatataattgatgttt

SEQ ID NO: 36921 - DNA, 638 bp, Arabidopsis thaliana columbia
gaattagccatgtattggtttggcatatgtgaatagtgtgatgtcccagacccctcagactcactcaggagattaacagccatcagagacgattgtggcggtgccaactgatttacacattttccagctgaattactaaatggaatcctctgaccgtacagctcttgaaagggccttgcctcagaagtcccaggcattttcgaaaacttcatcattttattttgttgatatggctggtcagaaaaaggaaaatgaaacgaaaaaggctcagtggagctgtacaaatgagaatgcataagaatttgacgacatagttcatgctacagatccacattggcagaaactaggtacatactttcattcaatttatcataaacgtgtgagcaataaccagcagtctgctacgcatagtacctggtcctcaactgagggttgacccttatgctcacgatattggtcagccttaagagttacacgtacacttgggacactttgggatgacagaccattggcttttccagtcaatggaaattgctggttctcttgttgctcaaactcagttctaatatccaatcctagatcttgagagtcgacattgatgataatgattttgggctattggatcatctttagaagat

SEQ ID NO: 36922 - DNA, 286 bp, Arabidopsis thaliana columbia
ctcatctacgcagggaataacatatgcgagcgcagcatccatctcttctgttgcatcattaggtccttgaggttgtggttgggtttgggagctaccaaagccaaggcaaagatccaaacatataggtgacgagagtggttaatggataagattggcgtaggaatgggatcccggtaaaggtccaatcctggtacattccttgacttgggtcactatgtagtcctgcgaagctagagcttgaggatcccacatattggatgtagaccatggacatcttgtatgagct

SEQ ID NO: 36923 - DNA, 162 bp, Arabidopsis thaliana columbia
cttctcgttcagtaaattcatgtaaatcttctaacaatttaaccaaaaactaatccaccaacacttcgaaataaccaataagtggcaaaacacttcgttagtgtacagatccatagtacaattcttaaaaggagacactgattcgtagtttctaccacatac

SEQ ID NO: 36924 - DNA, 263 bp, Arabidopsis thaliana columbia
gaaaccctacttgctccacaccgtttgttgaaccaagcatcaactataacccctggttcatagcacacaacaggcgagagttctgaaggaggaacttgtcttatgtccttggcttctaccacatctctcagagggatcgactcaccatcatctctactaaatttcaagtgttcaacaatgtacttatcatcacctaataaacaaagtatacgagcacaataccaagaacccttgtaagctttttcttcacttctgacttcgac

SEQ ID NO: 36925 - DNA, 559 bp, Arabidopsis thaliana columbia
taattcgaggaagcttcgttgaacagagatcactatattcgcttatctctttaatcaagatatatatagaaaaaaacaatgatctttcatgatctatatgtatattattcatccacgtgggtcaaccaatgacgatcttatatcgtttgtgttagacaatctcatctcataaacattaatttatttgggaactaattgccgaaatgtcgcggtaataatcaacttcaagaatatttactagtaaattctattaccatttagcatttttgtgttatgcgtaaattagtatagacgaataattttgcgcaattgcttaactaacttggtctcatgatccaacttttttttccttgtcaaacgattttactctcttattttcttcccatgacccaatatttaattccacaaattcgtacatagttctataaatatgttgactattcaaaagcactagcaacatttaggtccggttccgcggacggttttaatgctatttagagtattcttgaatgtcggcttagaaatatgatggatatttggttcgaatgctaatttagag

SEQ ID NO: 36926 - DNA, 570 bp, Arabidopsis thaliana columbia
caccggactcactaaaaattagtgaatcaaatgatttccgatggtgaggatagagaagaagcaagagaaggtcccatggcagaaggagacatctcgccgcctgctggcatgtcttgaagaacagctagaatcctgcggatactgatggatctcgctgaccggaaactgtaagctctcttcatcgtctttgacgtagagaaaacgctcgaagatttgctgagtatgagatacacaagcccttgaatcagagcaaaaatgctcactttcattaacatgccttcaaagcttccttccattgatgttttaaagattcagacaagaattatcggtacgttgacttttttgttgttgttgttgtcttaagatctatgagttagagattgatgtttctaatcagacagtcgctggtttatatagagatcgaaaagagaagatggccttatttgaccagaggcagagacctcgaagctacgaaacacaagtaaacaatttaatttatcgcatatgtagaagatttccatttaaactttgatttgacctggtcaaagtagacgtgagtcgtttttgtgt

SEQ ID NO: 36927 - DNA, 513 bp, Arabidopsis thaliana columbia
attgtgtgtgactatatatcttttttttttttttgtgactatattattcaacaaattgttttttttttttgataaaaatacaccaacttgacatatcttagacgatctaaacacacatcaactaattaataggcgatctaaatcttacttatattaaatctaattttattatcataaaaaaaaaagatcttacacttattagtccttttttatatattttagacgacaaatgtttactagatgggtaaagattttttttttggtaaaattgggttaagatctttttaacattggttcaccagggatgtgacttttgtttggtcgtaatagtagaaaatttgcatatcacattttttcagatgtgtaggaaacaatgaccattttaatgttgttggataactaaagttttccatcttgaatatctatcagaagaaaaaaagagtaacaaaaaaaagagagtaacaaaatggtactagtgactttttttttgttttttttttttggcacaaaatg

SEQ ID NO: 36928 - DNA, 535 bp, Arabidopsis thaliana columbia
ttattcaatttgacaaaatattagtacattaatttgagttgaaaacttttaatttgaaactatgtacactagatagtcacaatgctagtgtcaagtatttcattttttaaagacttttcattctttttttgcttcatgtattttttttaaaaagtcaaaaccttaataggctaattttttaaaataaaaaacagctttaattgataactaaataagctaattgtttttaattgaatttgtaaataaatagacttatatatataatggcctagctaaagaaaactaactcatatccataagaaacttaccaaattttcttatggttattcgattaacaaaaagtatggttaaactaatacaaactttttgtttgcaaatatctgattgtcctaactcttgagcaatcgtttagttggtatttgggaccaaactaaggtagactaaattgttaatttctaattctattccaacttaatcaccaaaagagatttaaataaaaacacacacactatgatatctatagtcttcattcaag

SEQ ID NO: 36929 - DNA, 610 bp, Arabidopsis thaliana columbia
gataaaacatttaaaagacaagacttaaagtgggtgaggccaagccagtttggccatgatagcatctctactagctataaacagaaaggacaatgggactatgttttggacttacttggtctcgagtggattagaccagtacttataatgtccatacttagggtcatcaagatcatcagcaatgccgtgagagaaatgagcttcggctcgtctcatcatcttaggggctataaatcgaagaagatcaagaacagtggtggctgtataagctgtgttttctgctacttttactatgctttctcggctcatttcattgtactctgaccaaaactctccacatgatgtactgtcatttgaattgccatctactcttgacagttcctgttaagcatagacaataaaaaaagagagtgaagtgctgttagattccaatgacgacccggaaaaggcagaaccatggaaaggtttttaatataaccttgacgtttagcgtagagagttgtgaggaaggcagttctgatgctcgtttccgaaagatacgattcttccgtactttgcgggttctttcaccagtgacaccggtttaaggctgtagttttgtttatggaga

SEQ ID NO: 36930 - DNA, 530 bp, Arabidopsis thaliana columbia
aggatccctgacgtttcctgtattgctgctctcacaccctctatcgatgtccgaatcaaaaacaatgctccttttagacgagcactattcggggtacattttcacatatactttgtttcaatgagaagaagattcaggtttttgttttgtttctcaactgttttaatctttcaacattcaaaagggtgataacgtagtaatggcgactctaacggggcctggcattgtcttcattcaaagcttaccgtttcatcggctctcgcagcgtattgcaaggtaaagcaaccaacaatccaaatctccatttatgttgcaaatatgtttatataaagtgtgaatggtttttctgtgacaggtcggtaacgtcgccaaacatgagagagaatccaaaattgctgatacagatagctataatttgcgttcctagcatacgctgtgattttgtcatcgttgatcttaaccgaagtttgaaagcagagagatagaaagaattatccgaccaacaaactaacgttgtaattgtcaaatta

SEQ ID NO: 36931 - DNA, 517 bp, Arabidopsis thaliana columbia
tactatttttggatattctattaaacaaaaatcgaaatattcagccaatttagctagttcaaccaaattcagtagtttattttagtagaatttttagtaaataaatttgtcttatttttgagatatttttagttggttgatgtggttctaggaaacttgtaaagtagtagaaatatattgaaaagggtcagtttcttgattagtgtatatattaatcgaccaaacataagagaagaccaaaatctttggcttagtgggctcagataaataaaacgaacgaaggaagatttttcttaaatttaaagaaaaaatcataattatcaaaaatatttaaggaaacaaataaaaaacaaaaagattcatcttccaatacccaacgcatattacgcagccaccacacagcggagagagagagagaagaaacagaaacagaaacagagctcgagctcgagacgctcaatattaatggcggccgatcagcacgagctttcttcatgctctctcgtgtaactgacct

SEQ ID NO: 36932 - DNA, 492 bp, Arabidopsis thaliana columbia
gttatgttgtattgttggtttggtttctataatccgggacgttatacccaagatgaaattacttgatgttatggcttctctcatcgttcataaaatgaattttaatttattttccaaagaaatatatcggaaacgaaaccacgatgatctttaacaatggattggctttcaacatataaatactagataaaagtttgtgtcatgcttctgctttgattttatgagtagtttatatatatatatatattgttaaattatatacattcgataaatataaaatatcattgttctaccttaaaataggtgtgcagattcatatagctagatgaaaggtaagaaaatgaggtagaaaaacaatttttataaaattatagtaaaaatgataattgtgttgaatagcacactgatgaatcttctatttgtatgataaaacttgtatgactttttagattatttcttcattatatatatatatatatatatatatatata

SEQ ID NO: 36933 - DNA, 506 bp, Arabidopsis thaliana columbia
aaagcgaactcagaaatacgcctgcctctgaaagagagagacaaaaccttggtagcatctgcgaatgcatatacctggcctggatctgcagactcttgctccataacctgggctttcgcatactggtcatatcggtgagcgggactcccgtgacaccatctgaggaagataatttgtcaaagggtatatcaaagcaactgatgaattctagtcggttgagacaaataaattggtaagaaccagattttttattaaaccaaattgagatttcatatgtaggtcacaactaactagtaccttgtgacatagacaccatgaccttcctcaggaagaaatccaagagcacgaaccgcaggatgaggatcctgaacaacgcatccgcaccaatttatcactcttgtcgttccattcccatctctcttatcagttccaactacgagctccagttcttggccctaacaaaccaacaagagattaaataaacacgtagacctaaaattatttgt

SEQ ID NO: 36934 - DNA, 387 bp, Arabidopsis thaliana columbia
cttccaacgttacgtttatgcagacgattgtaaagttgttaaaaacacttgtaaatcattttagaactccttaaaatccttataaagtctttaaatacatatgtaaacctctttaaaaaccattgtaaaaaggttttaaaataatttacaagagttgttacaagagttatcaaaggatttacaaggattttacaaacttttgtaaatcctttcaaaattattttaaaactctgttaaagtcctgtaaaaacattagtagatcatttttgttataaacagagatagagatcgaggagatgagtgtgttcttgcagtgagataaagagttctttatataggagtacaaggcacgggtacaacctaaacacatctagatatgggcttaga

SEQ ID NO: 36935 - DNA, 179 bp, Arabidopsis thaliana columbia
tttattcaatttatactatctttgcaggttcacgcagcccacacaacggctagacgtgtcatcaaacgtgctcctcaagagaatttaattagtttcctttttagtttatttttctctctaaaaacaatgatttttgtgttttgattttatttgtttccttgttgcgttttttgcattta

SEQ ID NO: 36936 - DNA, 633 bp, Arabidopsis thaliana columbia
tgcaagatatcaccatcaatgtaagtactataaaaatccaaactttaaccaaattcatagataacgaaacagcaaaagctaaattgggaagaaaattattaccagcgagaagagaaccacggtgattaaaggcaacgcatttaatgacaccatgttccagatattcttcaatcacctcaggaaaatctccttgcaatggatctacacaggaaaaaggtaaacaaataccatcgatgaagaaccgaacaatgggaaaggaagcccaagtgcaaaatagagcttacctatgatcggagcgttcatgttgctcttgttggtctctgagggtgttgtgcaaattgagtgagtgagtgagtgcacaggccctcgaaattagggttcctacgacacaacgatccaatataaacttgacgattgaatccgagtaatctaggtaaagtttctaagagccatgaataacaatggaattggagcaaggtttatcaatttctctctgaaggcgatgttactttgagatcgacgtaaccttgaaacgcgtttcgaaacgaaattagaaaaaggaatgcgaaggcgtgagaacgaaatcggagaaggaaagtgaagcaagcaggattggtgttagagagaatgatg

SEQ ID NO: 36937 - DNA, 284 bp, Arabidopsis thaliana columbia
  unsure (1)..(284): unsure at all n locations
tattagacctagtctcgggtccttgagttctcgcaattgccctatcacccacagcacgtcagtgtgcttcgaaatcccgtgnttgctttaagtnaagttctacactttcgattggcagtacacccttcgtgcaaacaaaatcttacataggacacagagtcaancccctcatgatagngactagcacaagttcaatacctgccttgcctacagagcaaacctattccggctgacaatatgatgtctgaaaagaaagnatgggtgagatcgctcatnaaggtgct

SEQ ID NO: 36938 - DNA, 591 bp, Arabidopsis thaliana columbia
tcccgaatgaataatgtgattattatattaaatcaagaattaaaaatcaaatcaaataattaaggaaaaaataattaatgtcaatggcatgccattgtaaataagtgtcaagtagaggatttatttgctaaaatggttgcaaaaatgtatatgtaggttcatataattaattaatactatatatgtagaagtttgaatttttattatatacgtgatattctccctatactataattttacaatcatgaatgttatcaccgcaataattgatgctcaattacaaaaatgacaaaggcaaatgttttttcttttataattgggacccaagaaactgaatttaacgaatcaaatcttatgcccactaaccaatcatatcttcttcaaatactatcgtgattttctatcgtaaaccaatcaatcaacaaatctaacaattttggtttagctttttaattttatatgtgtgttcgagacaaaaacagatgcatagcattggctgtatgtactctgtctaagttcgtgaactcttatgaatcttgtcattcataatcaagtctgatggatctgaatccggacaaagcgaatgataac

SEQ ID NO: 36939 - DNA, 392 bp, Arabidopsis thaliana columbia
attaatattcataatgtggttgaattaagatttctacacttaatactctcatcaaccgtcttcttccactactcacacaaatcatagcctccttaatattatctcctaatgctgtttcaatatgtgtaacacgagtatatatacaggttactagtttactactgtattacttgagaaagtcaacttatactacacataatataatgagacaatggctgggatgtgaaaaaggaattactaatatgaatcatatgattaacaagctatgttaggttttttctcttacgttttcctcaaacacacgcaacactcttgacttttgtttcttgcgtccttttgacagcaaaagattacaaagtaggaccaatgattttcttttgttctggagtttg

SEQ ID NO: 36940 - DNA, 560 bp, Arabidopsis thaliana columbia
attagaagggaaccgaagaaaccgttgggatatgggtgccgaaccgaaccgacccgaaaaccgaaatccatttcaaatattaccgatcggttcacagctcacaaccaaactcaaaccgaaaaccaaaaatatcggtttgttcggttcgttttgttcgattttcaccaaatgcccaagcctactaaaaagactacaaaaataacaaaaagactcaaaaacctatatctaaaacatagtcaaaaacagtaaaaaaaatagggttatataagcttcagagagtatttcagagatggagatagatgatccacttgagcgggctttggtttcgttaatagaagatatcgcgaatttggacagtgaagcttttaagtatgctaagatgcaggatgaaaccgaacatgtgatggaactaatggtccaagaaaatcttcgatctataactccaaaactgacaactaacactgattgggatccagagaaagctccaaaattgagttgaaccacttcctgcaaggctaaggtacgcgtttcttggtgaaaattcttcttaccatgttatt

SEQ ID NO: 36941 - DNA, 532 bp, Arabidopsis thaliana columbia
acatcacattatgttgttcaacatagcaacaaggagagaagtggcattttggtaaccatccattgcaatacaggctatacagctgatgataacaattgcagagcaacgaaaatctctgtagggcatttattccatatgtggcgggcgaggtccaggcgccaacatgatacacacatcaaaaagacggttgagaaactgcaaggttggtcttaccccagatttcaaaatgtgaacttgcagctctataagccccaccagcgatcacgagtcagttgatttctgagccagagaagagtacagctcttcggttccagacggagaaagacaatccagtaacccaagaatgtcggaagtcaagcaacaaggagttcgatcctctggatggcgttaataacggcaggttatgtatgggattcatgacaagaagttgaccatggacccagttccagagtttttatgtgaattactctggagattttaattaaagaacatattgaaccaaacacagccacaagagcttttatatagatga

SEQ ID NO: 36942 - DNA, 223 bp, Arabidopsis thaliana columbia
  unsure (1)..(223): unsure at all n locations
tcaatcaatntttntttacatttaacttacaattttttcntnaactatcaaccactatcaantcannctacaanttcnaantttaanntcaacctatctacaactaanaaaanttctattatcttcttaacaaaccacncnntntcatttccantntaacatatnacaannntctcaanacnnttntcnacctcttncccaatntcaaatancncatttaccc

SEQ ID NO: 36943 - DNA, 375 bp, Arabidopsis thaliana columbia
tagaggagaaaaacatgggagaaagaaatggaggatgatgatactctatggtcaggaagtgaagacgaaagcaatgataagacaaaacaagaaagcggaagaaaccgtcttgaaaaagagattaagaaagctagacaacaagctaaggatagcaccgatcaaattgatggagatgatagtgatgaattgtacagcgtttggtcaggaagtgatgaggaaaaaacgctgtggactggcgatgaaggtgatgatgacgacgatattccaacagagccacgcccgaacgaggcatctgataaatacttagataagttgtttgagtttgaggagaaaccaaagtacaggacaatctcagagttgttgaaatctgaaaat

SEQ ID NO: 36944 - DNA, 579 bp, Arabidopsis thaliana columbia
ccccgtaacaacgtgaagatagcgattgaacgagggagaatctgcgattcgtatgggcgtgaggttagtctagggaacgtcattattatccttaccgcaaattcatcgctcggttcagcgaaaaacgttgcttctatcgatgaaacgagactagagtctctggtgaacaaaggatgggagttaagactctctgtttgcaacagcagcaaaacccgaaaaagaaaaccgaattggctttatagcgacaatgaccaaacaaaacagaggaaagagatatgttttgatttgaacgaagcagctgaatttgattcatcgagtgatgtaacagtcgagcatgatcaagaagataatggcaacctcgttcataagctagtgggtttagtagacgatgctatactctttagaccggttgattttgattcgatcaagagcaaaactgctgaatcgttaaagaaacgtttctcaaatggtctcgcggatggactaacggtggagattgaagatgatgctttggagagaattgcaggtgcgatctggctaagtaagattagcttagaggaatggcttgaggaagcaatg

SEQ ID NO: 36945 - DNA, 496 bp, Arabidopsis thaliana columbia
tgaatagtatgaaaaaagaaaaatagtaaaaaaaaattatgattagcttcgtttggtggaattctcttctttttagtgttttcatgtattttattgtcttcttgtttatcaagaaaaagaagttaatctagactttgataaaatgatggatcatggatgcccataaaaagagtacttctaattttttttctataacttttttaaaaaggatgcattcactataacaaggtttgttgtatgaataaaattttacatacactcagaaaaaagaagaaaaaaagaagaagaagagtacttctaatttggtgacagatgcttccttatatttccttctaattattaaattagtatcgtttaggtctattggaattaatgagtgaaatattaaaccttgcctacaatacactaattaatttattttttgtaataatgtgtcggtccaaaccttgttagttacgcaattaataccataataatcacccacctacgatgagtt

SEQ ID NO: 36946 - DNA, 584 bp, Arabidopsis thaliana columbia
tcttgcttctgcagaaaaccgtacttacttatcacatctctgttccaacaaaacaaactgattgtgtaagaatcagcagataagccattaattctctgcacccttttgttttcactctctagtaaataaaattctagacaagagtatcttacacttacttgtcaggcactaaaatattatgaaacaaaaatggaagtaatttaactaagaaaaatcgaagcttgaccgaaattctgcgttaagctttgctacaacaagaatctcattcttgaattccttttgtttctaataccaagttgtagtaggctagtggttcccaacttttaaggagctcccgtttatacactcattattgggctcaactggtgatatgtggatcactgatcaaataactaaattttgattcaaattcaagttaattttaacgtgggctttcccaaataaaaatatatgttgtttaagagaaatgacaataataagaaaaagaatcatttactttgacttgttgactcttatagtcacacaacccatcttatactacacgctagtgatcagcttataaatgggagctctatgatgtgaac

SEQ ID NO: 36947 - DNA, 515 bp, Arabidopsis thaliana columbia
caaggtgtggatgagttatctaatagcttgtttctttggcaggatccagctactagtacatctagagctgcaagattgcagatttgcacatctttcataagaatagccaaagctgcagaaaaaagtgttctgcctcacatgaaggtagctttgatctctcacaaactacatttaggaactcatatcagtaaacgttggagaattgtttgaagaatttatgtttagttaagcttgtgccgtgtgatatatggatataccaccactcaattttatggctaccttctctctggaagatacctttatcatactctcgagtatcatgatttatgacattatatggctactttctctctggggaagataccattatcattttggtggcagaattcttatttatcattttcttagtggcctctctggataatctatagcacaaaaaagtcatgtcaactgtcatactgtcataattttgtgcagggtattgctgatacaatggcggtcttggcaaaagaagg

SEQ ID NO: 36948 - DNA, 555 bp, Arabidopsis thaliana columbia
aatagtttcatgatgagcaatattatttatgatccacaccagcgacttgaccgctctccatgcatcatccgaagaagttactgagtggattggcaaagatgctatggcaaacgcaaatgatgctgggcgagaaaatgggaacgaaagtcgcttgttacaatccaaagaagccacaagttctagtagtaatgcttctgggcaaaatgcaaagtcagcaactaaatacactttcatttgtgaatgcttctttatgactgctagggtcctcaatttgggtctcctaaaagcactctctgactttaaacatcttgctcaggtaatcatcatcacagttttcccgtcctggaaatattgaagattttttggaaaaaaaaacgacttgtgataaattatcttgcagaaagctcttatttgatttggttccttacatatcgtcttattaacgcgtttgttagttaaaacgagaagggactatagcaaaaacttgaacttagtcacatgtttacattgtgaaagtgtcattgattcctgaatttgcagaagattgttattgta

SEQ ID NO: 36949 - DNA, 588 bp, Arabidopsis thaliana columbia
  unsure (1)..(588): unsure at all n locations
tcgactctccctttcgcatcaaatatattttatatgtgaatctaaattattaaattaatcttgtgagactgaggtttaagatttttgattttagggcatagtttttgataagacgtcatgccataaattagacaaaaacatacaaacataataaaaaaaagtcttgcagataagaatttcgcttctccgtcattgtaaatctgaagtcattattgttgtatcaccaaataatacttaactctaaatcatttttaaggattccgttaacgtggacccaattgtccaaaagttacgagaattgttaaactctaaagtaaaaggcaaacaccttttcttgtaaataaaatctatggaatgcttacagggatattataattactaattattatgtgttctccgcgattaaaaagcgattatcactaatcgtgtttaattgtaattttgatttcggcgaggatcggacctcatgtaaaatcagtaaaagtaatgacgacactgacttctgttaatctctctccgtcggcgaatgttccatctttgtcttgacgacgtggcataacttcagctttataaatgactanatagttg

SEQ ID NO: 36950 - DNA, 621 bp, Arabidopsis thaliana columbia
gtgaacaaaagaaaatatagattggtggttatatttccccttaagaagtttaattgacctctaaatttggtttaatggttaatctcttttcgtcaagctatattcttccttttgatcaaaacacccacacctcttcttcttcttcgcataaaccttaaaaaccatttccacgatcttcttcttcttcttccctcaaatatagcttaggattttcttaatttcctctacccaagctccatggctgctttcaatttcttcctctcttcttaattctctcaggtaaacaccaatcccttactcgatctacgtgctcaattgattggatctcgttttctctttacttctccggagccaaatctagttcaatttcgtaaccttggatttagtttagctatcgcggagatttgattctatgtttgatttagtcctccttgaactttgtactgagttatcattagattgtataaattgtggtttaatttggtgaatacaggtaggggagatttgagtagtagtagattgttagatttgtaattcagctattggtgaagaggaagggagagagagatgtgttgaattggttgagtttggtggaggaaagaaagagagacatgaatgtga

SEQ ID NO: 36951 - DNA, 530 bp, Arabidopsis thaliana columbia
tgtacatcataaccattgagtgctctacttagaacccgcatatgatttcccgctctcttgagatccgaattcaacaatgctcattcatatagtaagtcttgctcagttgtttgaattgctttgttcatcaggtattgcccgctcaccactgcagcagtagaaatgtggcagcttaactcgcccacaactcctgccaggaaacaacagtgtcatgatcataattcataatgctggtggtaccaagaatggaaaaatgatgataacaagttgtttcaaggagcagtctcagtttttgacagagcaacaaatacaaaagctcttccattaaagtctgttcatgttggtaactcacagtttctaccgataatggtagaaagaaacagaacattgaattggaaagacttgtttgactctcaaagcagatcgaatgcaaaacttaaccaatgaaacaaaattaagaaccatcaaaacgtaacagaaaatgatctgcaaatacctgcaacggatgatcacaggagtacgtttaaagg

SEQ ID NO: 36952 - DNA, 554 bp, Arabidopsis thaliana columbia
ggtcgatctagaggagagggtcccgtgaagatcattgcaagtgaatcattcattataatttagtttatggtactaacaatagaagctagtagcatcactaccattcatgctgctttcatcaaaactagctcaacaagacagaatgaaagggaatttatcatgaagctaaaccaaataaaaagagctttcatggatatcagagcaggctacaattacctgcactaccatatttgtcatggaaactgaaaagaatctgccaatattagcaaatagcatcaactttcccttgccaccagagctcgatttccgagtttttggtttgcgcggacctttacttgagtgggagggtctagtaactattttcaggtcacatatagagaatataactttagggtcctggataaaagccgtagcacaaagttcaaccagggattgacttagattggctttaaattctccaatgactatagattcaatagaaccctgcaaataatataaacaacaaacatagacccgagtagttaaaccagagatacagaaacacaaagataaat

SEQ ID NO: 36953 - DNA, 480 bp, Arabidopsis thaliana columbia
gacagatggtacagaagtcgggaactcttggaacatagagcacctcagaaagttttacccctagctgtatttcaaaacagccggggcgaccatgtactctgtaaaagtggaaatatgtcatcaataaagatagatttcaaagatactcggttcgtttatgattgacttgcattcttacttaactcggggtgaccactatgccctacaaacggagcaatcgacttaagtcggcaacggcttaaggcggtgcaacatgctcacgcttacttaactcggggtgaccactatgccctacaaacggagcaatcgacttaagtcggcaacgacttaaggcggtgcaacatgctcacgcttacttaactcggggtgaccactatgccctacaaacggagcaatcgacttaagtcggcaacgacttaaggcggtgcaacatgctcacgcttacttaactcggggtgccactatgcctacaaacggagc

SEQ ID NO: 36954 - DNA, 586 bp, Arabidopsis thaliana columbia
ttctcaaactggttgctcatgtatctctctgataaagaggtaaaaactgtttttcattacttgattcttgtagtttctcgaatgtttagagatgaaagtcttaatctagtcgatggtgatggtaggtggaactaatggcagagagaatgattggatgggtcaagccagggggatacattttcttcagagaatcttgcttccatcaatctggggacagcaagcgaaagtcaaaccccactcactaccgtgaacccagattctacacaaaggttcaatcttttgacttgactttcatatttctgaaatgatctacttgcaaaacatgggttatgcctgaactttcgagtatatatatcgtttgaaggatatctaaaactatgaggatattctcttgttttgtgctatagcatgggagtaatttataagaatttaagaggacttctagaaaagactgctccagttggattaatttcattttgaatgtggtttagaccaagttcgataaggcttaaaaagtgtgtatatcacaatttatagatttgaagtcctttgatccctctaagctaatgtattgggattagttgag

SEQ ID NO: 36955 - DNA, 502 bp, Arabidopsis thaliana columbia
attataatctaaattctaaaggtggaatcttccttttcttctgacacaacaaatggtcgcatgtgcttcaccaagcattagaaaaatacacacgatttggagcaacgttaacgttaatttgctgatggtcgtttttgttactacaaatgtccatttaagacaggccggtttgcgatgtcccacattaatattaccttcattcgtctctttacgtgtaatttcagctgactctttacgtgttatgttcatgaaattttagaaaatgttcttttcagacaaacacaacacacgaactacgtctcaaatcgacatcgagcaaagtttatgtttatgcgtctatatatgtatgagagacataaaattagatcgatactcaaaaaaataaaaagttagattcaagatttctgaaggagaaaatggtcgacgacggcgtggagagaatataagagtaagaggtcatagaggacgagtggacgaaaccggcaattaaagcccagtgatc

SEQ ID NO: 36956 - DNA, 489 bp, Arabidopsis thaliana columbia
  unsure (1)..(489): unsure at all n locations
ctctagagcgagaataaattctacaaagaaaaagatttacttttttcccatgagagggaaaggttatgtatatatatatatatatatatatatatatatctttcttgttttccaaaagcaaatggaaagttatttgaagcaacaaaagcacaattttattttcaatacttttgctctcatgtgatcttcaagagccaacacacacancncnctctctctcncncgcacgcacttgtgttgtgtgtttgacatcggctcagacttcttttatgagtagaagaattcaacaatgttgagcggatcggagtcaaaactgcatccgactcaaaaagataactcacatagtctgaaatatttcaaggtttagggtttgaaaacatgttgtttagtcaatgtttactatcgcgtaaaaccagatagttcaaaatataatatcgacgatcagtgataaacatcttaatcgcgttcttcagcgataattgtgacata

SEQ ID NO: 36957 - DNA, 600 bp, Arabidopsis thaliana columbia
catctaatcttcaatagcagttcagtcaaccgtgctatgacgtcttgctatcaatggacatttttttgtagtgaatctctctctgtctactgtctctcctatattgttcttctctctcttgctctcttttttacatcatgatgtctttatatatttttccaagcggtgcgtgaagcaaaagatatttctcttatatcaataggtgtttttctaatcgtcatagacgtaacaaggggctaatgtaatttacacaagtagaggggtagtttctgaaatacaaatgtttatgtaaatataaatgattaggtaaataaacactaacatgcacaaaaaaaaccattaagacactaaacatgaggagaacaccaataagatttaggaagctacgagtgtgaaatagaaatgtatagaacaccactaaacattcatatccccttcacgcgttggcaattcgtaattgtggatgtccacatggatagtaggtactcaaacgtcaaggtggaagaacaaagctttggtgaagaggtcgcgacttggtcagtagtggaaatatgtttactaaaaatgagtttatcttgaacagtgtcacgcacttgatga

SEQ ID NO: 36958 - DNA, 554 bp, Arabidopsis thaliana columbia
gaccgttgctaatattcttttcttttttatttagggaatcgttttttttatttttgggaatcatttttttaatatatagaaaaacacaaagacgtaagcaaaaagcatctttgaaatgagaaattgggattccaatttgtcagctgaagaaacatgtttccttctcttttcctctaagaaatcacctgttgagttgagatgaattttcctccaagttactaaaaggatagtcattgttgtcaaacacactccaaatggtaaaaggcaaaagcataaatgagaaggaaaaaaatgaataaggtaaagataaaaagttcgaagaatgtattttcatctcattcattctttttttcttgaagttagttcaacatttttagagccgtttagggtattttcatgacgtagacatatactcaacctaattaaacatattcttttcattattcttcatttcttcaattcaattctttagaatcggggaaaaagcttaaaaaatcctcatttatttttaatttggccgtttaatacctgtacttttaaaattggaagaaaaa

SEQ ID NO: 36959 - DNA, 585 bp, Arabidopsis thaliana columbia
cggttccataagcatcgctgcctaaccgttcccagagcaaagggttgtttatgattggtgcttgtgtttggggaaatgtttgaggtgtgattgctgggttcctctgttcaaaatcataggcaatatgagatttaagcggatattatttaagtagaattcagaagaatgatgtaccggagaatagggtctaggacgttctgaatctgagggttgaggacgtttgtaaaaagcagcttcaagcatctggagattgtgcatttgatcatgcattggccctacagctgaagggtcaccaatggctcctaactcagagttacttctccgtccaatgaccccgaggctacttgaagattgacccggttgtataggttgtccaggagagaaatcaggaccgctagatacttgtactggatccaacatgtagctgggcattcccgactgaagataaaacagaaaacacatgaaggatcagaggccacccttagttagttgcttggtttaatagaatacagctgtcattatgtatatccataaaccacattcactattgaattgcatatgagaattttaagcgaaggaatgaca

SEQ ID NO: 36960 - DNA, 849 bp, Arabidopsis thaliana columbia
aatcattgaattttatggtttatgatagttcatctattgttctatacatcgaatatatatataacatttatagacaaataaatcacttaaaatcaattaaactcctacgcgtttagaatactccatgttgaaaaagatagaaaaatcttataattatcacattttcattaatctatgggcttgaatggtttaccgtataccagttcacgtggtcacgtttttaaaacgtgattccgctatttttacctttcaaaattttatcaagttttaacgttttcatgtttaaaaaaatgattccattatatagcactagcgtattaaaaattataactaagaaacgtgattaatctacaataactagttttttttagcaatttataatcattctacataaactttctttagttcatttcattcagctaaccattatttagttattctattgttcagctatccatctcacataccaatcaaacccatcaaaacgagaaaactctaaactaaggggtaaagacttgactggtacattagttgaataactgaacaatacaatagcggaatcaccaggacgacaaaattcaaaacggaataaacttaacacgccaaaaagctacttaataaatgactttgtctaaactagttagttatacatttaacacatgcgaaatagattggaaaatagcttattaattttcacggtttatcactccgtggttattattgtgaatggtatacactcggcaaaatcacgttttgaaacacatgaacatgcaaataagacacataccattcaagccctatattattttgaattagtcataaaattgaaaaatttgacaccaaaaattg

SEQ ID NO: 36961 - DNA, 450 bp, Arabidopsis thaliana columbia
tacaaccgccgccgacatcaagagcttcttctccgctctaaaacccaaaaaaacctcaactttcgcttacgctttcgtcataacctttgtctcattcactctcttctttgcttttagtccttctccaaactcatcttctccttggttctctaacatcttcacttcctcctccacaaccacaacttcagacaacacttccggatctcagttctcttcaattttctcatatattcttcccaatgtcacttcaaccaaacccaccaatagatccagtgacgccacagattctctctctgttaacgccacttctccacctctcaattcgaattccaaaaacggaactttacaaacaccggcgccggaaactcacactccggttgctaaaaacacaacctttgagtctccgatcgtaaacggaaccaacccagatgcaaagaacaacacttcatc

SEQ ID NO: 36962 - DNA, 522 bp, Arabidopsis thaliana columbia
ctctcatatgatcccgatgcgttttattcgtttgatgttaccgtagcctaattgagtcgctctttcgcggaattgctttctaattacgaaccgttttattggttagggccagtgtgaatggaatggacttaacgttttgctttggtgaaatcttctcggttgcgatctgatccgattcactctttcaccagcgtttaaaaacaagctggggtacaggtgttaatatatacagggtttctgaagatagaacgagattctgcgcaaagtttttccggcaggttataactcgaatctacatagtgcgttgtaaccaagtaggtttaaaagatactctgagccgtcgctcatcgtagtatttgaaacaggtacaaactgtgaaaagtagaagttttattcatgccgaagtgaaaactcacaacacaaatgaaagtgggagtatggatatacggacccactccccttttttttaatttgggggtgacggggggggtactgaactcgttcgaagacgagctgcctaag

SEQ ID NO: 36963 - DNA, 502 bp, Arabidopsis thaliana columbia
tttttctctattgagcttttttcttcagcggtgaaatctcccttccttgtctctcagtagtgatttttacatacagctccgctctcaggtttcttcctcttttgattctgtttccgctctttttgggtttacttcggattttaatcttcagattgacgaaaccctagtttgattttggtttcagaaacgacgagtcttcattgatttggtttccccaccagctcttcttcttctttttttgttccgagacctttttgacggaggtaggtacggagggaatctggagttgggtttgaaggatactcttatgcgattcttctggataacttgatgccgcaggatcacgcttcgtgggatcggaaagagctcttgaggcaaaggaaacacgataggcctgaacaatcttttgaatcccgccttttcgatggagggattcgcttcttctaccatgttctcgagagtttcttctcgtttgggactggagacttcgcagacttcttgt

SEQ ID NO: 36964 - DNA, 532 bp, Arabidopsis thaliana columbia
cccttccataattacgaccggagaaaagcttaaaagaagctcgtcttctataaccttaaccatcactctttgaggaagactgaccataaccactcggctcattggttccttaccgggcggtgagggaagcactatgacctgtccacctccagctacaggcccttctacatagcaagatacgtggctcagagccaaatcctcctcgaacatcatcggacgtgaatgagacatgttttctaaattagtacacacgagatccgaaccatttgatatcgcaccgttattgctactcaaccactcaatcaagtccatgaccgtgtcgtagtctagtctcttggttatgctctcaatctcttgaacagcgtggaataagagtttatctttggttttaaccggtttggagtagggaaccttgtgataaaccatgcaattaccaaaataactttggtctaaacgcaacaatttcctaacgtctaagcacaaggacatgtccatgagctcgtttctttttcctttggctcgactcacacag

SEQ ID NO: 36965 - DNA, 493 bp, Arabidopsis thaliana columbia
tcaaaagagtagtggagtaacttcgattgtagtagtgacatattaaacgatttaaggtgatgttttagtaaaataattattcatttaaaattatacacaattacaactatattttaaaagttttaactatacggttaaccgacggttttgatacggttacggttaattaacggttacagttagtatatttttttaaccgtaactaatctattttcacggttaacggttacggtcaggttacggtcagttaattaacggtccggttacgatccgaaatacggttacgattagattttggtcatgcgccttgagctcctctagaaaaatattgggcctactgggaatatggttaaagcccataagattccgtaacataacgtactacggaaaagaagaagtcaacgatttgatctgtgattgtttttctctcaatcaacttcaaaatttgttgattcccatttttttccacagacaatcctcaacaatgcctgta

SEQ ID NO: 36966 - DNA, 578 bp, Arabidopsis thaliana columbia
aaattttctaataaggacaccaacctttttcggaagaaaactacatgaacttttatcttgcctgaataagatgttgtttttaaaatattgtcatttaatatataccccatttaaaaaatattacctaattcaaacatgtgctttaccaaaacaacgaaaatttcttcaaaacccccaaaatccttaccttattttgaaattgaaaaaagaaaaaaaatcatctgtaaagtctcatgtggtctcactcactccctatcagtcctcctatctctgaaatctcacatgaaaaacttcacaattttgcagttgtggaaaaacgtaaataacttcaaatgacattcagtaaaacagcagtgaaacaataaaagcaacgaaatgtataaaagatattgaatattgaatattgaaattctaaattgtttttggaagagaaacaacgcattatgggcttaagaattgtgtatgtgactactgttgtattgatcttatgctcgacaatttcgacattttggttgcttacaaacttcattataatttgttgtgttgtatccacacgcatatgtatgccatttagactt

SEQ ID NO: 36967 - DNA, 529 bp, Arabidopsis thaliana columbia
caaacaagtaatgatatggttatgttctcaatggtgcagcagccgcccggcgatcaaaacctagctgaagcacaacattcgagggtaagcctttcttacattttattttattttattttattataattgttgtaaaaatgttcattcttattatctttagtaatcaagtactattaatattataagcaaattaactaacatgagtttaatttgcagatggggtggtggaatgcgttgagagcaatggaagttgcacttgctgttggacatctcgctgctttttgcaccattatgtgaatgctcactttctagttcacatcacatttacacattttatcatgatactcaattcttatataaacattaaagcttgcttactttttatttatttagttatgaaaacatatatttatgtgtacgaaacaaacaaagccttttgcgttgcaaaagagaggttcggcaattcttcataaatgcatggttcgatagttagttaattttcgtgtataattaagttcatccggattat

SEQ ID NO: 36968 - DNA, 522 bp, Arabidopsis thaliana columbia
gggtaccgagatctcaaattaatactaaaatataaggtatacaatcaaattaatcctaaagtaaaacacttctgcaaaatttatataactagttgtttataatcatatgccaataatcacaatacaataacttcttaaaagcaaatctagatgtaatgtcagaacaatataaatctaggaatctccaatgttacatgaaacagagaagattttttacatattggtacatcaagctctacattcaagatatctttcgaataatgtatatattagcttaacttgcgagagggtaaaacccaaagattcaataaagaaaccctaaattgaagcccaagaaattcaataacgataccctaaattgagacacgagaaccttgaataaagcgaaatcaaaataaaaattgaggcataacaaagctatatatactagtgaataaagaatccctgcttcacattgaccaagaaaccacaaatttgaaacaagaatcatgacgaagaggttagactttgaacttaatcata

SEQ ID NO: 36969 - DNA, 473 bp, Arabidopsis thaliana columbia
tagcatacttattttgaaccgtaatattcctcgtttatgaaaaatccatcgtgaaatacacatccttttgtaatgtgaacacgttaatagtaatatggtattcaatcctcattttgtatccggccttctgaaattgggattattgtataactgagccaaaatcgatactagtgtatgatgatctgctacgattctagtatacttcaagtatacattcatatatatgctcatataattttacattcttctaccgataattttaacactcacactttgaacctaagagtggttgacaaatgaccaacactctagtcgtgatgtaatgtaatatgacgattgacggatatgaagtggtgaagattcacccacttgatctcatggatcattctcatttacactatagatatgctttcaatgacaataaaatccggcattttacaagtaccgtagattatagttatgatcccaattga

SEQ ID NO: 36970 - DNA, 548 bp, Arabidopsis thaliana columbia
ccaaaaaaaaaaaagacgttgagaacaatagaagtctctacgatggtatcaaatcgacctaaaattgtaggggttacgaacacagtcttaatctaccaagaagaagaaattgaagaattgattgaatacgaaagtggaattgtagcaaatttaggatggtacacatctccacttgaaacaaatgctcacatcctcttgaatcctcgtcgtctcacgcgacgtgttctcactcaactccttgatgatcaatttttaggtcaaaaaatcgctcatgatgttaaggattcatttgctaatgataactctcttcgacaacctgttaccgtaaccgtctatgtgacatatatcaaagagaggcgtgtaatttttcctcatggtccgtcgttgttgtcgagaggtgcttccggagaagtgtttcatagattggttgaagaacagagagttgaatctgctgatttggaagaagaagatgagacatgttcgatttgtattgagaagttttcggagagtcatgaagacatcattcgggtgcctgattgttacatttg

SEQ ID NO: 36971 - DNA, 529 bp, Arabidopsis thaliana columbia
tatttcgatggacaacacaattcgctggccctctttgtttttctttttctcaacctggcccactatgtttgttcatgcaagtagcaaattaaaattcatatcttctttattaaaacaatagaaaagaccaaaataaaataaaaaaaatattctcttttgttttaataatgttgacttacttatctcctctccttttcgaaatgtcttcatgagtctctcttcttcttccccattcgtcacataattaaacatcgcttctgacttcactctcaccaaatctctcttctttctcacacacaacaataaaaatcttgaaactaaataagagttctccgacttcagatcttctcaaaccctaaatgttaaaatgtcgttaaatcgacaacttctattcacttactacttcatcgtctctcttatcctcttctccgatttcgtatcctctgcaacattaccaaaagaagaaggtccaacttatacaaaagtttatgtctttgtacgtatatgtttgattcggtgtaatgatttg

SEQ ID NO: 36972 - DNA, 567 bp, Arabidopsis thaliana columbia
gagggaaccgatcatcaagaccgaccttcgccggaaatcgacggcggcggtggcgtcggaggaggagaaggtgttaacgacgatctagaccgaacgctagaatggttagagacgtttttgacgctccttgggtttaatcaatcgtctaaacaaagccttgttctgtcttggatcgtgtttttatcgattggtttggtgcttccggtgacagtgttggagctaggtcattgtttagggtgtgagagatatcagtacaagagtttcgagctcaacatcgttgtttcgcaggcgttgttagctggtgtttctctgctttgcgtttctcataatttgagaaaacatgggattcgaaagtttttgtttgttgatcaacttagtggtcgaatggatcgtctcaaagctcaatacattcaacaaatcttggtgatttattctactttctcttcgtttttgagattgcaatgtgatgatgatacttacttcaaagtttgtatctttcttattgtgttgcagaactctgtaagattgcttgcagtttgggcacttccatgttttgctttgaagggt

SEQ ID NO: 36973 - DNA, 834 bp, Arabidopsis thaliana columbia
cgggttatggggcatgctgaaatggttagtcgttaaataggctaagaaatgcattttagaagcaaattgcaactacacaagcaggaatttctaatcaattatggactatgatttaatgctgaacagctaaacatgccaagaagtgtttagtgatagtgattgtgagagtgaaggatacgacttaggaggagctgcaggagcagtatctccaactggcccgccttttgatatttccatattcctaattctatggatatccaagtctggttgtccctgagcctgtggcctatcctcagtaccgttcacgctcttagtggcagttcctgctaccgagcattgatttcttaaggttttagttaacaggaaatattgtgaatacaaatcataaccattagattagtaactacctgaaagttcagaccatactcgtgtgtgatcagatgggtgctcagaggcattttgcctagaccgttcttgaggccgtgatcctacttgctcggcagcatggccacctgtggagtttgctgcttcaggaggttctgccggaatcccttcctgaagttgagacacaagcattgtcgcaagaacgagtgttgcatcaaaactggagcttgacccatcacccaaaccgaattttggagccatcagtattggtctagcaacgaagtacatattatgacattcagtaacagataagatagtgactacaaaactagttgtcccggccaaaaaagaatttggtgtttaaatgagtggtttagctagctaatttgataagcatgcacctttatagacaagaaccatagtttagaagtattggccagaatgaaattg

SEQ ID NO: 36974 - DNA, 169 bp, Arabidopsis thaliana columbia
cttcatgaaaacagattggtttctctatgtgaggtgttgataacttgtatcttgtttgccaactagtgagtcttcccaaacgaggtggtaatggtttgtcatgtggcattaatttagttattgtgtagtcactgaaccacacgttttttactttatgggcctattgttg

SEQ ID NO: 36975 - DNA, 525 bp, Arabidopsis thaliana columbia
gtcttgtgctctaatattattaatgtattctcagatgaggtagaactatgtttctagttctctttttataaacggaatttgacttcgaggatatcagccgtcgaagttaactactccaacatacctatacaattttatgaagagaaatacacaattaaatttgttttggaaataagaaatcatattgtacaagattgtcatatatttattagtttaaatgaataaatatatgatgggcataaaataatatatattaatatatacataactcactttaaaaattgccgatttattggctgctaagatagtaaaagtaagaattatgatctaaaacacgaaaagggaagcaattagctcaactgctccatgttagattggagagatcagtgatgaatggaccctatgaatagaatgtatgacacacccgttcctctcaattttttttctttttgttatttctttattattgatgttttgtatgactagatagtttcattgaatatatgaacaattattatgtgggga

SEQ ID NO: 36976 - DNA, 313 bp, Arabidopsis thaliana columbia
aagctaaataaaattataagagggagagagagaagagagttaccattggatctattctctctcctagatatccaatggctgagaataaacacgtttaccatagttgggttaaatctcgcgtgctagacaggtgtattggaattgattcttataaatacactacctgagagtgtctactctctccaaatgtgcccttaatacactatggattctagctagtgccccaacttatggaaaccccttattaatatgggtagtatgcatgcaatgataatggacacgaggttcacatactgtgagtatcactttttac

SEQ ID NO: 36977 - DNA, 582 bp, Arabidopsis thaliana columbia
gaagaatatgaatcatatttaacctaaattgtttttctttttttttggctttttccgttttttttttgtatttttttttgtttttttccgtattttttttagttacgtttttatttttttcccacttttccaacaaaaaattagtttttaacaaatattttgttaataatttccaacaacttaataattattgctaatttgcaacaatatcatatttgttggaaaatttcaacaatattcctacgacgtttgtgacaaatttatcataaccaaaatgtattggaaatttgtcaataaaataaaatttttgttgcaattttatagaatatctgttagaaattttcaacaaaatactattattggaagcatctgttggaatatcacatgttttcttgtagtgatcataacaatgtttatcttcttcatcatctcctttctcctttcctttctctgattcttctgttcttattctctatttcttctaaatctcattccctttcttttacttaacttaatagcgcattttgggtcttatcagaacctttgaagcgtgttgaattgttgtctctttatagtagcatg

SEQ ID NO: 36978 - DNA, 649 bp, Arabidopsis thaliana columbia
ttgatgtaccaaatgattttatgacctacacgtttgtctaggtaattaatttatgttggccattctctattgtactactaacataatatctttgattaccattaaaaatcaatcaaaaaaattatctttctttcttctaagattttacggtgataaaaatgtgacaataatctgaattttgatgtctctttgtcatacttatacagacgttttgaaacaatcgaaactttaattcacccaatattttgaatggttttagttttgataagttttaaatgattctgattattgtaggtaaatataggaaagtggttatgacttgatttttgtcctttttaacttagtctacacaatcacaatcataatctattttgaatttttgattaaggaaaagctacaccaagagatcccatttaactctaacataagtgaataattctgtttttgtcccttgaacacatgatttgatagcatttacttgatgatctgagactatataggacaaaaaagttatcatatgtaacagaaacagatcataggatcacatttacataaacccacactaaatgaaaccacatgtggctcatcaaactccggcgttcttcccactcttctgctaatctcttcgcacaaccgacatggcaatgta

SEQ ID NO: 36979 - DNA, 597 bp, Arabidopsis thaliana columbia
catactatcacacaatgaatccatttattttcctaatcttgattgtactaccaaacaacctataagacgatctgctatataaagtgcgttagtttagatgccatcatactcaaatgttacgaacattttttttctgaagtgttttctgatggaaataaattggcaacaacaagcgagaaattaaaagctctcctctcacaattaaagagacgcagatattggcattagaatctggaaaattacggacaacaacaacatcaactttaaatttaataacaacaacaaagaatcagcggcgcatcaaaaagccgagcgagaattcttcagaaacgtggcacaatcacgaggacgcgcggctcaggaacctgcgttttaatgataacgcgtgacgatcacgtaagccgtttcgacaaaagagcgttataacgtttttcttgacggtgacataagctaaaatcagccgcccctaacgctaaaacccaaaatctctacatttttttattctggattctcttatgccacgtggataataaagacacgtgggacaagattaaaggatggagaccgcgtcggttaacgcaaatttacgaaggtggg

SEQ ID NO: 36980 - DNA, 276 bp, Arabidopsis thaliana columbia
atcgacataagcaccctgagagcgcgggaaaaactcgtaccaggacccgtagagggccctgacgtctctccacccgcagcggggccgggagtgtgggcgaggtcaacagccgcggggcatggactcgcatggcctcgcagaacgcgtaggtgttgatgacctgttgtagcgagtcgggggcacggtcaagggttaggttggcatcggtctcgcgcagagccgtgatcgcgtcagtatccccggattgctcggcgtgccggaccgcctcgtttatga

SEQ ID NO: 36981 - DNA, 556 bp, Arabidopsis thaliana columbia
atgcctactatgtacttcaaaattcttaaaattttaggaaacaattattatgtgttctattcggaagcaaatcattgaaacatgttaaaagaaagacagttagatagaaatttcagtgtgaaaaaacaaaacatagaaatttcagttcacataattgagactgggctttggttagatgagtggagtggccatgcaaaatggagcctaaacatggccttggacttattttgggccatgtctcagctttggataactcttatacaatctcataaaacaaacaccaaattgccaccagcttcaaactcaagtaaaaaaactttagaaagattttatttctcttttatagagataatatgatcaaagtcaataaaagaaaaacattattgttaatcttattttcttataattttttgcataatttctaatttagatttttacaaacaaacaaaagaaattgtaatttagaagcgatatttcatattttctgtcaaccaagacaatagaacatagtacccaaagaaaataaggaatatacaaatgaaggtcccagcaaaag

SEQ ID NO: 36982 - DNA, 560 bp, Arabidopsis thaliana columbia
tattgagaaggcaagtcaggacacgtgacatctattgacggcacggcacctctaccatttttgagcaatttgacattgagatgtgcaaatagcgtatagtcctccactaaataaatatacttaaacaataataaaacatgtaataacacacacaactctgcacgactaaacctcgattcacactagattccgtgtgaacttgaagagacaattatttaaaaccataaaagagatcaagaatgagcaaatattgtaagaagatttaaaggaagagatatcaacacagagtgtttcgaaaatgcaaggaaatcgaaagaagtgcaacagaaatcctaaaatctttttgtatgctttaagaaatgatcatgttacataaaaacgacatacatgaaagcacaaataacaaggcttctctatttctaacagtagttaaatagaaaaattctttgttcgaaatgtaaagcaatataaaactccctgatatccacatgatttcccaaaccccccaacaaaatacagataaagaagatagaaaaactctatcggatatatgtgtttat

SEQ ID NO: 36983 - DNA, 590 bp, Arabidopsis thaliana columbia
caatgtcgtcatctaattttagtatcttttgtatcgttcttatttttctagcaagtcttcatgaatgtggtgagttaatgttataagtactttaggtttggttcagatcgtcatttagcatcattaccattataatcataaccatagtctgaaaaaggttcatttaatttgcttttgtagattctttaagaaatcctttcaaagatgacccgttaagaaatcctatcacaaatgaaaaagttaaagaaccaccgtgctatccatatggaaaacagtttaaatgcacaggttttgctggaactgtcgttgttgacaccgccgatcggtgttggtctttctgtgcagccgctaataaacgtccgtagaaccccagcacctcctccgatccaaatgtttgaagagcttttaagtataccaaccaaatgtttttatatgtttactcatattattaatcaaaaatatttatgtgacttcacccaatacaagcatgcctagactaccttagtttgtgtttagtaactttgaaaatcatgtaataatatttatgcacaatgttaaacatttttctcgttattttttatttggtaaga

SEQ ID NO: 36984 - DNA, 462 bp, Arabidopsis thaliana columbia
cactactcgcgcatttatacaattatattatttgttatatatgatatttgacagatataatcacttattatatacgattataattacagttgaatattgacggtgcctaaagtcacaacttattagccgacaaaaaaaaaagtcacaacttattaactatttatacagtgattgacatgattcatcgtgttagttgaaactagggcatccatatttctctacattgtaatgtttgttaataacatgatagcaaagtttgagaattagtctgggattcagtaaaacttatctggttataattataagtattatgatttggaacgttttttaagtgtcggaaaatacattattgactgacgaactcactagtgatggaatataggccccattttgataggtatacattattgactgacaacactacaaaattaagttagtattgatcattgtagcccctctctt

SEQ ID NO: 36985 - DNA, 604 bp, Arabidopsis thaliana columbia
attttctttagccactcaggtgttctgtatataaacaaggaacaagctaagctaatggaaactgaatcgaacatgaatattcgagagtgagaagtaaaggaagaagagtgataataaacctcttggagatgaaaggaatatcgaagtgagtagaaacagccattagaccagtcccagtaaggtcacacatactaaacacctgaccgacgaaagcaggtccaccgcgtttcccatcggagctgagagatgatatcctaaccgttgaattaaggccggaggaggacgcggatgatgtgctcttgaccgtcgattcgaaaggggacgagacatcgtctgataccgagaatctaagtgggaggcatacacgagacggcgccgttttgggagggaagagaggaatgattgaggaagagattgaggttaccgcgctatggagaaattcggcggcgacgtggcggcgatgttgcttatccggcgaacccattaaactgactgttctgttcggtgcgcaaaagccagaagatgactttgtgaatttagcacaacaaaaatgaaaacatttatcggtaagaaaaagaaaagtcaaggttaaataggttttttt

SEQ ID NO: 36986 - DNA, 420 bp, Arabidopsis thaliana columbia
  unsure (1)..(420): unsure at all n locations
atccctttagttatttggtacattatgcattgagatgcagatgcacattattaaaaaataattcaaacgaacacatctgcattcatatgatttatccagatgtactttcaactttagaaatcaacatcatccaaataatgtatctgaatggatcttctagatgatcacccagatgcactacctaattgatcaaacaaacaataccctactattttgattttcccataacatatctgcaataaaattactaatgattaatagatataaaatgaaaaaatgaatgtatacattaatatattatatctcttgaaatagtttatttaattatgatatatttatattattaaaaatccccgtactcaaaatagttgngaactttatgtattttaaatatatatttgaatgtactatgtttataat

SEQ ID NO: 36987 - DNA, 489 bp, Arabidopsis thaliana columbia
gaacaagtatgaaagtggctaagagtaagaagtgaagaagtgttgtgaacctctaattgttctagagggtttcactttccttttattgttgcgttgtcgttttgattaaactcgagtgtatttaatggagcccaacctttagggttttccttatcttatgaaaaatcacattaatcatcttaacctaagtttcttctgcctctcatctcttctcttctcacctaactctatttctgttcgttgttaggcttcgtgcttaacatttggtgctttcattgagaggaaaaagaaacgatggctcctcaaaccagcggcgccgtctgcagaccaaacctcaacctcagaactcgagtcacaaaccccagatctgtagctccaaacgaccgctcttgagattcgaatggagaagatagacaaggacatggaatggtttaaggcagctatgggaaacctcttgcgtggccaggttttcggtgaagaccgtgaacg

SEQ ID NO: 36988 - DNA, 949 bp, Arabidopsis thaliana columbia
caaaattcaactcctaaaccgagagcatcggttccggtgactaatgccgggtttgcatactgtatcatagaaactgacggatacaatcaccacatcagagacagactgcaacaagaagaagttgaagtataccaatcaatttcctaacttgatgttccttaacaagcccagatttgaaaaggacaagctaccaaaaactatcaaattggtttaagaatctatcgctatcgtaccggcaaattcaagcccccatggccggaaaagtaaacggctcggatttgacgacaacatcactacttcgttatcacgtgcacatcacgtgttgattagagtatggactaaagtcaacaaaataaaatttacatattgtgtgtagtgtattggacatgggctcaactcaaagttacactaatcttgatttgttttttctttgtaatacacgcaacttgcatacaaaccaatgcccatacgaaagtctaaatcagaaacaactcttcttccaccatatacacccttaataggggcgttgatctttcttctacgtcttgcatatcatattcaatttaacaaatttagtttagattccattttgatgcttcattttcgtattgtttatccaaaaagttgatctataggtagcttctgaaggatccaatgagtcatacaataatgagatttgatgtcacgttcacacttgtacacccaattttctaaaaagccaaatgacaaaggcattttcgtgcagcccaactccaaatattagtcataacacattatatatctatatatatacgtatgtcaagagaattagtcctagtttcgtacacaattttcttctcaaaattaaagtacacccaaaaccatgaatcttgctccaatccatgatccatcatcatcatcaacaacaacaacatcatcgtcaacaccatacggattaacaaaggacgag

SEQ ID NO: 36989 - DNA, 769 bp, Arabidopsis thaliana
  unsure (1)..(769): unsure at all n locations
taatgatgtggttgaggttcatgagattgaagatagtgagaatgaggaagatggggttgatgatgaagaagatgatgaagaggatgaggaggaagaggaagttgataatgctgatcgtggtcttggtgggtcagggagcacaagcaggttgatgaacgcaggagagattgatgggcatgaacaaggagatgacgatgaagatggtgatggcgagactggggaagatgaccaaggggttgaggatgatggagagtttgcggatgaagatgatgatgttgaagaggaggtgacactttgtacttcaaacattatgttttgagatatgaatgttgtgcttgggtttcactaattttcttgtttttttcactggtttgtagttgcggcagataggtggtgatagacttactacttcattttgataaatttttgtgcctaagttcactgtcttgctgctattcagagatcgatattagaactttggtgattgatggaggacatataagaggggactttagtatcgtctctaattttgctaccggtttagaatactagtctggtcttgcattgttttgtttgctgcataaaatatcaggttagatttacgaagtaccctgtcgtgttaccataaggtatcatgttagacaccaaaccaaacttgactctctttttttttttttgtgatggaatgcttcgatgcgtgaagttatgatntgtcaaattngtgctttgtngttagtgctacctagtatttgatgaattgataggatga

SEQ ID NO: 36990 - DNA, 530 bp, Arabidopsis thaliana columbia
ggcacacacgcggcgataatcttctcttttcaagtagaggtttcttggtattgtttggaatttgagaaaacgagaacgtaacgtttgatgataagactcttgacgaagtgaacactcgacacaacacattcatggccatatatacaacatgctacattgaagtagcaatatatctcaacataggatctgacatgtggcaggttgaggaacatgacatggtcggaggaggatacacgtgttggtaaacgtggccagatttgtggtgatccgtatgacatggacaaacacaatgtctccttcacacactgacaaatttcttcgttaagaagatttattaattaaaatttaattttactatataatcggataactataccttatatgaaaatcaagcagaactataccttatatgtatatatacatatatattgctccctcgaatttgttgttgtgcatgcatgacacgtgaagaggatgtgcattaatacacgtcgtctgttggcaaaacgagacctcctcggtgccaagtg

SEQ ID NO: 36991 - DNA, 570 bp, Arabidopsis thaliana columbia
agcttcatttttaataaatatttttgaataatatgtaggagttgacgacaataataaattgaagtttcattcacaattttttctgcattttttcagagttttatactgtaactagcaaaagtactcatttgcaattttaatgtaattcttaattctaaattttattattttcactcttaaattcacctgatacacaataatttagtaatttatctaatctcatggttactattatttctcaagttgtaaactaataaagaaaatataacagaatttgtatagatacgctgttactttagaggcacgtacaatatataagaaattgagaggaggtttgtacagcagaaatggttgaatagaactacaagtgtattacgtttaaagaagaagacagtaaacacgtgccacgtaagctagcccaaaaggggatattttttttttagcacaggcccaaaataatattgagccggcctgatttagaggcatatatagtgtttaagaaacgagtggttgatcagactctggcatgtcatcaatgttgtcccgccggtaaagaagaggaagatagtg

SEQ ID NO: 36992 - DNA, 492 bp, Arabidopsis thaliana columbia
cctcctcgaataacgatccatgaatgatactttaacctgctaacaagtcactcactatattcagcaaccaacaggagaaaaacatttgaattcttaagaataaaataatcaaaagaagtcacctttatgatcagatctaaatccaaatccaaaagattatgagtctatcttcttctatcttctgtagatttgtgagtgcgaaggaggaaagagagagaagacaaagaagcaagttgaagagaggaagtggagagcgcgtgagtttgaactttagttagtggcttagaattcacaaacgagatttgtggcttagattactcctccatctaaagcaactctttcattggtccacgtgttaaacatatctttttctgtgtgaggtcggcacttgaattaaaattaattaaatcttgcaagacacaactggccaacttgtacgtttttgtagttcttaaaagttgtctgtttacgggtagacgacaaaaggatttt

SEQ ID NO: 36993 - DNA, 681 bp, Arabidopsis thaliana columbia
ctggcatatcttgatcccatgtcttgtgtataaataaacagacgtaagcagagtgagagagcgtgcagacacgacaaaacaaaaggcctccccacgttccggtcggttggtgacaacgacgaatgtcttttttctaatttcaatctcttttaagttttcatcaaatccaaatttcccacagatagcctccctctcttcactcagcttaaatttctcccttcgaaacccttttttttttgtttttgcgaatatgaggaaactttgtccgaattacaacctcgaggacgggttagagaccgtcctagaggttcccatgcctgaggagttatttgctgcgtccaagacaaaacctggatggaaccaaatgaaatcttactggtcaaaacctaccgctactgctaccggaaccgcaacagccacaaacatgacaagactctttggtggtcgtaatgcagagatccagctccttctcggagttgttggggctcctttgatccctctccccgttcagcctgaccaccataacgattatgagaatcccatccacaaagacatcaaagaccacctctcgtaattacatcttccttctttttctatcacctacatctaccagaatttcatcttaaacccgatcaacaatatggatcgagtgcttgatatattttatattatggcatggat

SEQ ID NO: 36994 - DNA, 453 bp, Arabidopsis thaliana columbia
cactaaattaaaaaatctccttcacttccactttaaaatctacatgcaaccattcaaaacctatatgtagtcagtaagtttgtatataaaacctagaattatggttatattgccaaatttactaattataaaaagaaacaataaatatcctaagaattcaaacttttttcacagagatcatatggcataaatataaccacgatggtgatcacatcatccaaatggaatgttatacgtataagaaagtggcacataccgacctgtatttccttccctccctccgggtcgaacttcggactacgtatgtcccttgctccggccgtgacagtgaaagtcatgctgaggctgggccgagacgtcccagccagtcccgctacgtttctggctccggtatgagtccgactcgccccattgtgggttttggtgcgagtgcgaatcgcttcatagtggctt

SEQ ID NO: 36995 - DNA, 589 bp, Arabidopsis thaliana columbia
tttaaagccaaagactctccatggttgttggagcgagtttgtaaattaggaactattatcattgtatccttgttaatcaaataattaaagcagtattatgctttcagctatcaggcttgtgttcattttttatttgtctaaaaactaaatgctgttttcaacatgcaaatatctatacttttttcttaaattaaaaattaaaatttcaaaatttgagtttatactcttatacttgtatacagatttgagaatatgactaaccaaaaagtccacgattatttattttcaattgttaatgtctaatctgatggatttgaggaagaaattaacatcttcattaaatgatcagtaatttcaaagcattaaacaataaaaattatttttcacttaaaacaaaatcttacaagaaatttggtctatagaataatttcattaagatgctattaaatattcaactgggcctttgcttttgtgtaacagtctcaggattggtctttttctcattgtttcacaattagtagtcttttatgttatcagctatattattcaggacccaaaaacaactggacccatccgaatctttttaaaa

SEQ ID NO: 36996 - DNA, 374 bp, Arabidopsis thaliana columbia
tcccaatcctaaggtttacatatatccatcttttgattttcactacgaaatacaattctatcttgaaattgtctcaaaacctttggttaattattctccaggggaaaaactatgctcttgctgtttgttggcttcttggcgttggatgccttttagcatggaacagtatgctcacaattgtggattattacgcttatttgttccccgtaaggccaaaacgtttttgcttttatgaaaatacatatgttgcctttctgcctataatcaacttgtcacttacctcgtcttgattgtctgtttttaacttcctagtggtatcatccatcgagaatcctaccataaattatcagtcattttctattggagcacttagt

SEQ ID NO: 36997 - DNA, 532 bp, Arabidopsis thaliana columbia
atagtttttcttcttcttttcattgtctttttctggtaaccaaaaagttttggaatttacagaaaattcttgttttgatatgattaatattaatatttgaagtgaaaaattctattataatgattaatgcatagttaaaaaatttactaagatatgaaggcttcaaattcaatcatatacatatttggtaatcatatatgaatattactaatattgatttttattactaaccaagcatataatatatgttaacacataacatgaatgagaatggtttaaacgttactaatcaaatcctatgtatgtaataaataataatatatttaaacggctacctccccactatagtctataaactatatagtacacactcatttttttctaaaagtggcattttaagtggacttttcttcttaagaagcatggtgtggatcgtttactaaaacgatcatgtcatcattttcttctctttcatatatagcattagatcagaacgctacaatttttctaataaaattccaaattatattga

SEQ ID NO: 36998 - DNA, 551 bp, Arabidopsis thaliana columbia
ggaatgaaagaaactgaactgcaatacactacctctagagtgacattcaatctcacgtcaacttccaaaaatggctctggatgttccatgttccaagtcatgcagtttgtcattattgctgtgaaccagaaatgggaaaacacttgtattacttttgaaacattagataccaagtgcttttcttcacaagaggaaagttacctgaaaacctttcactttggttctccaataactctgatccttccaactgcaagacagtggttcaaaacatttgtcggtaaaaggaaaacaatagaatatatatctgctaaatcagaacgggaatcttcatcattcaaccttgcaggaaagcagctcaactgtacaatcttcctgtgtgggagtgacccttaaaaccagtactggataaacttcaaaactcattaactgaacttttggcaatgtacatctgcactgtaagacaaagatttactatctccctttccagatagaaggcatatttccaaataatgatgctaacatattagaaaacatctgacaagcttgtgact

SEQ ID NO: 36999 - DNA, 541 bp, Arabidopsis thaliana columbia
cattgttacaataacacatatatattgtggagagaaacaaaactataatttgttattaccaattcattcggatgccatacttcttcagtcggctacgatgtaagtttgattttatcgaaaatgttgagatcaatgatcacgggtcaagacggcttgcagggagctcgaagacaagttgaacgttgccttcggagatagtgaagccgatcaaaaaccgtttttcaatagttacaatatcattgaactgatctccacattctcacttttctatgtttcctggtttgtaagatttttgaacgatcattttaatttgcttccattgtatatttaaagaccaaagtcttgatggatgatgaagtagacttgaaaattgatgaaacccgttattgtgttgttgtgttacaaatcccatctatgatcgttgatctcatagatgatcattgatcatttttctcatttttctatgatgaagtagactttttccggaaggcttatgagaaacaaatactattcttgttttgtaacatatgtgttcaataag

SEQ ID NO: 37000 - DNA, 627 bp, Arabidopsis thaliana columbia
  unsure (1)..(627): unsure at all n locations
tatttgacaggtatccatattttgttctaccctaagaaggattcataatctggaaatcatactattagtaaatcattttggagagatgctcccacgagttaggagatttcaatagattagattagatccctccaaaggtcttgatgttaaactcctgagacttgggcttaagatcccattgcattctgtatctatctacttacacctgtacttgagactcagcctaatactaccaagtccattgcattttctgttatccccctgttttatatatagatttgaagagatgagatttttaaattgctaaaaaagagagtctctacaatttcacaaacttgtaccaatttcagaaaagcaaaatgattggacaaacttgtaccaatatatttcacatgtttagaatatattcaactcacttagtgcgattctttgaatcaagttttcagttataagctccaacctgtaaaaatggttgcagaacaaatgatgaggaaattttttagtacacaaagtccagattcaagtttttttcaattgtatctnaacacacacgactttcagattgaataaaacctgaatttctatctcagtaggggctaatataaacatgccaaaagagaggaggag

SEQ ID NO: 37001 - DNA, 546 bp, Arabidopsis thaliana columbia
ctccttctctaggttagtcaagtgaacggtttttcaaagtatcagagaatcataaagaagacaaaggctctagtaccaatttttctgttatccacctgttttatatatagatttgaagagatgagatttttaaattgctacaaaagagagagtctacaatttcacaagcttgtaccaatttcagcaaaatgattggacaaacttgtaccaatatatttaacatgtttagaaaatattcaactcacttagtttgatttcttcagctgcgattctttgaatcaagttttcagttataagcttcaacctgtaaaaatggctgcagaacaaaatgatgaggaaattttttagtatcacaaagtccagattcaagttttttttcaattgtatctaaagacacacacaactttcagattgaataaaatgtgaatttcattctcagcaggggctaatataaaaatgacaaaaggagaggaggaggataggagctatatgtctactatttttagttttttagccaatgagagagcccacttcatccccactttt

SEQ ID NO: 37002 - DNA, 555 bp, Arabidopsis thaliana columbia
ttcaaaatgttgtatatttttttatttacttttctttagtcggtctcatacatagggtttatggctgtcattttcttttacgtatttatcacgcttttgctttattatttgctttctcttgttttcttcggaaaagttttcattccattatctttttgtatagtgtatgtatacaacgaaaatgtaactccgttcctaaagactttttccaaccaattacgaacccttttatacgtaatttgaaatgtctttaaattaacttttagtaagaaagctaacgaatttttttctagtttacctaccaacttaccaactacagtgtatgcatatgtttatttttcttctttccaaacgtatatgtttagctttgtatcaacatagtgcaatgatcaataccaacttattttgttttgtattattcttgacttttggggcgtggctgacttcatcagaaaagcccattactcgtgggcccagtcttcaactttcccttgtcgtgtgcccatcactgctccattccgtacgttaatacaaagattatttatgagttatagg

SEQ ID NO: 37003 - DNA, 843 bp, Arabidopsis thaliana columbia
taaacaattacaaacatattcatatgctttggttagaagttagatttatccaaaccttgtttttcttttcttttctttctgagacgtacattattacacttgaacaaatatccaaactttgaaacattaatgaaattacaatttatcataatcatagttcaaacttcaacaaggcgtagtattttaaaatagtttggttggggaagcgcgattgtctggtgtattaactaaccggttcgatacggtttttgaaattcgatttttttttaaggtaaactagattttgagagggagggaaaactaatttcgaacacctgagaaagagatattttaggtcttactttgttcgccggagaagattatcggagaatggagagaatccatgtctcagtcagagcgcgaccgctttcgtcggaggacgcgaagacaagtccctggaagatctcttccgactcaattttcatgcccaatcactcttctctcgcttttgaatttggtactctttttctcaattcccttctcacttctctatccattttcttctcctgcttgcaattttcatacccaagctctctctattttcctacaataacagatcgaatttttagagaagattgtaaaactgtccaagtgtatgaggcgcggacgaaggagattgtttctgccgctgttcgtggattcaacggtaaaatgcagcaattctactaatgggtttagctgatttacttagcccttttcgaattgttgcttcaattttgataatttggggttcttttgatttgaacgcccttgctcctttttttgggtttcaagggtactgagtttttcgtttttggctaatga

SEQ ID NO: 37004 - DNA, 477 bp, Arabidopsis thaliana columbia
caatatagatacaatacaataagaagagtagagttaattaattatatccgttttgtctgcaaaaatgggggttcttggttgttggggtgaagatgaagagcagcgtctgtgtataatttactggcaacggcttgtgggaaaccttgttgcgtgggaactcagattagtagtaattacactgtgcaattacagctatcattgtcacatcatgggtcttttgagatgtgtataaagttttatactactatatattatgaagttaactatttattaattactcagcctccagtttatctgttatatatgtgtttgttcttttcgattatgatttaaacaaatcttgtaaaacctttggagactttggaaagccaacaaattattactatttttttaccccatttctgctagaagcataaaacaactgagtttgggaaatttctcagaaattgcatgctactattttggaaatgcatgtgc

SEQ ID NO: 37005 - DNA, 475 bp, Arabidopsis thaliana columbia
cgacactatcccctgttgcttataggatctccgtcagaactttcttccaccaccatcgatgtcatcctcctctcttcaaccaccgtcatcgtcaactctcgcaccatcgtcatcatcctctcttcaaccacccgcaccgttgatagacttctttcggtcatcagtgtcatactctcatcaaccaccgtcatcttcaactctcgcaacatcatcgtcaccgtctcttcaaccaccgtcgatgtcatcctcctctcttcaaccacccgcatctttgagggaattctttacgtcgtcagtgtcatactctcatcagccatcttcatcttcaactctcgcaacatcttcgttctttccgtcgtcaatgccatactctgttcgacctcccgattcgtctgatcgaccatctttgagggaattctttccgtcgtcaccatcatcctctattcagccacccgaatcatcatcatctaagcga

SEQ ID NO: 37006 - DNA, 520 bp, Arabidopsis thaliana columbia
gatgcccaaatacatacttgttttagatatgacaatcgtctacctttaaaccgttcatcagatggctttttgaccaaatcagctcctttgattatggaaattgcggtctatttctggggagatcttcttttccattttaaaaagcggtatcttttattaaaagcaagttttataacactcgaatatttaatagaagagcccacaaggccacaagcactcttttttctataaccaaatatgtaaaacattacgatttttgttctacgtgatgtcctcacatgcagtactaaaaacgaatgggtcacttatttgttcacgttaaatcttaaaacaacgagtatacacgatcgcagttttttcttatttgacagcactaagatagatgtataatgggctgaattttagggaatcacactgaaacctaaccttggaaaaagatgaacagagttttgagaaacaataacaaaataaagagaacatatagaaacggaagagagcacatgggtggtgtgtgcagaag

SEQ ID NO: 37007 - DNA, 614 bp, Arabidopsis thaliana columbia
gtgagaatctcatcggtttgtgagaagacgacgaagaagaagaacgatgagagacttaggaaagagagagataccattgtgaaagctaaaccgggattgattctggttaaaccggttttaggatttggtgaaccgaatggtttaggtggttttcttctctgtttctcttctttctctccggcttctagatcttgctcgccttcgacgattgaagataagctttgatatgacgaacggagattcgacgatgaccggagtaacgacgactgtgtcctcgttagcttcgcctgtttttccatttcttcgtaacgataaaaaaacgaaaacagtttcttcgatcacggaggtgagattccggtcataaccaatttctccggcgagagtacactaaccgctgcttcaccaccgtaactagcatcacgcacgacttcgacaaagagagagagagagacagagagagatttgtgatattagtgtaacagtgacttttcgctttcttcgttaatttcccggtaccggagaaagtttacggcgacgtcacttaaagagagagagaagagagaaataggagaagagaaattagactgggtttgggtttatttaaagagagaaga

SEQ ID NO: 37008 - DNA, 591 bp, Arabidopsis thaliana columbia
tgcaaatcgatatatcatcagtgggcattcactggagcatttgtgttctgccgtggctacgcttttacttaccattatgcttttgtatagaagcattcggtttaataggtaacgttttttcactgactctttctctttgatctttgagttccttgaaacctgagaggatttttcacttttcttttgtatgatggaaactaaaacagattaggtgatctcaaaggccgtccttgacattcattactgactcctcaagttttttttctcttgtatttagatgcttctggattcttgtattacaaattttgtttggttgctagatagattttgacccatgatcccactaaaacatcgttagcttggtgtaatcttggtttctggttctgaaacagctttggctttaaggttacttattcaagtcttatatatgtgtttggacaatggacaattttacatgtagtaactaaaaagaaaccaaaagaataatcataactcacaaatacaccttttattttcggtcttgacttgtgacctgtttcttattcatatgatcactttattgaggactttaatcatagcacagaatgtgga

SEQ ID NO: 37009 - DNA, 194 bp, Arabidopsis thaliana columbia
agccctccgacgaaagaagcattctgaggtatctgataagcatatttcaccatgacctccacgcatcacccgagtcaccatcctccggctctgcgattgaggatcattagccaaaggaagcatcctgagccataagttatgtcgtcttacataacgattcgtatgcgtgatagttcaatgtttatgtgacagat

SEQ ID NO: 37010 - DNA, 1365 bp, Arabidopsis thaliana columbia
taaaacatgaaccgaaaccggttcaagtccatcaggaatctcaacattccaaatcttcgccggctccgccgcaacatccaccacaacaattttcccatcaccagtaacaacacaaagtttaccggaatccgccgttacttgcgtactcctttaagcatctcttctccaccttcaaccacaaccacttctctccactctctcttctcatcatcgtactttctcactgtccctctcctctcatccaccgaataaagaatctcctcctccatcgccgcaaccgggcctctccatccaaccaacatctcctccggcataggttcccaatcatctttaacgacgtcgtatatagctccttctttaaccgcgtctcctttaacatttaccattaaaagctttcttctatatccaacagcgtctatagcttctcgactaaaccgtaaatctctcatatctctcaatttctcccaattaaaccggtggttattccggttttgttcggttagatctaatttctcgacagatttcgcgacggttgatgagaactgagaactaattccgcttgcgatgtagatagctccgtcgcaagctccggtggcgcaccaccgtcttggagatccgattcgaggaccggagctccaggatgacgaaattggatcgaaaattaacgggtgagagatcgccggagagagttgttggttacttccggcgatgagaatgagttttccggcggcggagacgcattgaatcggtaaattaaaggagataaacgacggatgacggtaaagaatccggtgaagaggcgggtcaggtggtggaggaggaagcggataccattttgaagaaaccgggttgaaacacataaaccggactgacgggttgacccgacccgtatccgatgttgaatcgacgaaaagagcgtagagtgacggaaacgaaggaaattccggcgagtaaagaagacggcgccaccgtgtacacacggcggagagtaacgacggacggtgaacgagagacagacagatctctgagatgtgatcgggaagtccttcgattaaagcggagttttcatttccggtgactgttcttcttcgtttcgccggcggtgattctgcggcggtggttgacattgattcacgccgtttcagttttttttccatctctctctttttttgtttttgtttttttttggagttattaaagagagataaaggaggcgtgaagtgtaatgaatgagagggaaaagtaagtaaaggcgtaggagccatacatatatcaaaatcgaaaaggccaaagttggaaagtgttaccatctctatcataaatacgtaaagctaacttataaaattaaaattatacatttatagc

SEQ ID NO: 37011 - DNA, 502 bp, Arabidopsis thaliana columbia
tgtatgtcatggcgtgagtcaattaataatataaccaaagagaagttaagtttttgagatatgaaattacattattactaaaagttaaaacgtcctatttcaagaaaaagtttgtgtttatattgttgtacttcccactttattagagctaactaatctagtgatcttatggtgatttaatgatcaaatttttagtcttcaccctgctaatacagcgaaaacctgtaaaaagtaaaaaccttttgatataacaacagtcacacacgcgcccaatagatcaacggaccagatctcgattacagttacagactgtcttgtcacaagccgtcactttaacacatacaccaatttcttctcagcgttatttcaaatctcagtttacaccttcacactgctgcgtctctctctctctctctctttctttctcagattaatcgctgagaagaagcaaccacctggagacggcggagatggcagggtacagagtggaagatgactacga

SEQ ID NO: 37012 - DNA, 215 bp, Arabidopsis thaliana columbia
gcacaagatgagataattatatatttgacacacacacaaagaaaaaaaaaaaaaaacgaggggatgcgcgcgtttgatttggaacctgaaaatgtgaattccctttgaaaatggaaataggcgtttccttttccttttttcccgcggaaacaggcgtttttttaagggcgggttcccgggggattccctagtgcaggggcctgaggggttaaacg

SEQ ID NO: 37013 - DNA, 569 bp, Arabidopsis thaliana columbia
ctgtttagttgaggggacaagggtttatctttaaattttgttattgatgtttttgtatgcttataaacttgtaatggttttggttctcgataatgtgcttgaacagtattgctctctgtgtttctgtccatggtgaatcgcacatgcttcttcaagtcatgtgatgatgtctctgttgtagccatcctcttgaaacttgaacctttttggtttgttttttgccaaatctatctttactgagttattattccaattatcaggtcggtttggactctcaatggagagtgtggaagcttccaagcaaatatggtggtatctggtgtcaaatagtgtttctttattatcttctgcccatagatcttaaacgtaaaagcatccaaagatgcattaattaacgataacatggggatgaggtcatgtgcctctgcaacacctcttatgcaatcacattctcttgcttcctaagttactgcctgcaacattgaaagaaacacaaagtgcagtgattttaataacaaatattatgttaagccgtagaacaagctgattgatggctataaatagcaatg

SEQ ID NO: 37014 - DNA, 183 bp, Arabidopsis thaliana columbia
ataataataatatatggtttagttaaggaaatataataggagtgggaaagggaattatacagtctcttgtctgactgcataatatgaaactgacgagacattgtgtaacgtatcttcgaaaatcgattgtctgacatgaacaaaacagatacttgattctctctaatgtccttgtcgtaacca

SEQ ID NO: 37015 - DNA, 513 bp, Arabidopsis thaliana columbia
ctacgcacagacattttaagggctaatcattgaaaatagagaactttgcaacactcgagttttatataccatcaagagaaccttattgaatctaaacgctaagcacagacactttaaggaatcactgaatatagatagagaacctcctcctaaacattctatagatgcgaaccaacaacaaccggaataacaaatgcatctttaagtaacgatagacagtagaaactaacgcgaaatcacaagaaatacctgtcgtttaggaaagctaagcttaaagctgtaagagcagcaccaagaattgccagaggtcgagtgataagtgcaagacctgagtccaccacaacggaggaaaaagagttagaaaaaacccctactaagtattaaacacagctctagaggatctacaattataaatccagatttctcaatcacagcttgaaacacaagaaggtcaacatacccagaacgatcacgatgaggatgaagtaattcgtcctatagctgcaacaagag

SEQ ID NO: 37016 - DNA, 523 bp, Arabidopsis thaliana columbia
ggtcttgagttttttttttgcaatttcatgtcaacagtgtaacactggaaaacaattttatctttcaaggcacacaataatgaaaactaggacctgccctgatcactgtaaagctttatagtagtattgcaatcggttcttgtttattaatgtgttagattcaagatgttgccttactaccttctttgctttcctctgagaacttttagatacaaagttaagctaagagttctctatctttcagaacaccaattattcaaaagcttgatcacttgcatatagtaccacaaatgttccatgtttacttaacactgtatgttaccaagagtatatgttaccactcttgccgcataagtcttgattgttttctatcctctccagtttccacagagaaatcatggggttctggacactaatggaaggattgctactatttgcaaacgcactggctatcttaaacgaggaccgttttctagctcccaaaggatggacgctcgcagaactccaccaaacgggcaaaaga

SEQ ID NO: 37017 - DNA, 600 bp, Arabidopsis thaliana columbia
gctatctatctagtttccttatttgttcattttcacttatataagtagccttttagggttttccctagggcagccagtattcatacaacttttatctttcacaactttcatagccgcagtgtttctcctacgactttgtattcactttcaagtatttgatattatgtttttgtttaagtctttcatcatttctgttatcatgttttcaatcgttgctttgttattgtctttgattatgtgagagtagtgaaccgtatttctgaggatgggatagagtagttgtggtttacttggtcgttaggtgattaagtttagcatactagaatcccttctgaattagttgtgcttattgcttgtttcatttgctaatgaggaatatgaatccagacgttccagcgctcagaaggcgtttaatggaacgttggatctattaattccagagatattcgcctctaccccaagggattggcttgtagagagggtgttggctttaacaagttgattcgatattgcctgcttagttagagatcgctaatgggaattaggttagtgtctagctttgctagaggatttctacacgggaggaattaactgttgttg

SEQ ID NO: 37018 - DNA, 545 bp, Arabidopsis thaliana columbia
tcgactctagatcttgaggatccccatatgattatttcacaattaagaccctaaatgtttgattatttagaaagtaatctcacctaagtatctcacggttcagattgcgccgtggttgttttgggtcgttgtataatgggccaaattaggcccaattcgacccatttaaaaaatgatattctctccttcttttttgttggtgggtcactcaacaatgacattctctactgttttgcacacgctttcctgctaaaacaaattaaaattggtacggaccgacacaaatcggagattgatgacgaatttttataaaacataatttaatatttgatagattgtctttttctagccttattaatttccatttcaggtatgtttaagctagtaatttactaacaccaccattttttttttgcttttactaataccaagtattgttttattttctcttttatttcgacattagcaagcaagggaatttaaagatcacaccacatggcacgtgagaaaagaaaagcatacacgtgagccagctgtcaacgatg

SEQ ID NO: 37019 - DNA, 553 bp, Arabidopsis thaliana columbia
ccaatctaacaatacacaaattcacatcaatacatacccacaaacggctaaaccacaaattagatacaaaatgaagaacacgaacctggcttgtacactttctggcaatcctgttgaaacaaagaaaaataaatcccatcaataaatgaagcaacttccagaaatacaaagaaaatagaagatgctaaactctccaatggcagagaaatattcaattcaatccgatcaaaatccgattcaattcccaacagtttctcgcaactttccgatttcgaggatccaatcagaaacaaattcacagaaaataaagcagcattggaatcatatacacaaagaaaaccaaaaagtcgaatagatctacctagctttggaagcaacgttggagacaagccgatacatggtgattgattctctcacacaaccgagaagattgcaattaattcagatcagaccgaactaaagaagctaaattgacaaattctctcactcgtagatgaggagaaatgaagcagatcgtcgaagattctataagcagtagggtttagggttttac

SEQ ID NO: 37020 - DNA, 636 bp, Arabidopsis thaliana columbia
ccttaatgtccggagtcaaaagttccgacttcttttttctttcttgtttgattttagtgtccactcttctttttacaaaacttttgttctttccttttttggataggtttacacgatggataatgttaaatggtcgttataaatgaatatatgcatatattatgcgtgataccttatcagaacgacgtcgttgaccaatctccggcaaaatttgacggagcttagatacgaggtcaatcatttgattatcggagatccttggagcacttgaagattgccttgatcttctgttcgacatgttcaacaatgtggcaagaaaagaccctaactaagttgtggattcttctctctttctttacttctctcacactagctcaaacaagttctattgagaaatagaaatagagatataatgagatcggctatgtctatgtggcaagtaggtgtaagcttttatgattttataaggtttttatgctgaaaggaaacgaccaagaagaaagaaaaactagagagcaagaagaaaatagagaagagaatgagaaaagtgttttggggttttgaatcacttcaaatataaagaaattgagaatgtgataagagagatttaataggccaatggacacaagagagaga

SEQ ID NO: 37021 - DNA, 518 bp, Arabidopsis thaliana columbia
tattctcattcaagaaggaaatacatttgttatttcacaaattacaaaacctggcttggtgaatggtgtttttctccatacatggtggcagtcacgatatacctgacaggaagtgcaattaaattggtcttgtttatagttcctgccatcagcaaataacattgagacctccaatcatggcatctttaaaactttgtcttggtggggacaggtacttaaatctcagaaactccacatttttgagcaaatttctcacggttgagcatgaaagcacattaatgtttcgaacaatgttttcagttagtctgtattacttttggtgcatttcaaactcactttacaagttaccatccgattactttctaagctgctagccgatttgtttgcagcctaggttatatgttgggcgaggaatgcaagaaactcaggtgtcacaattcaagtatgccccgagccaaatttcctctatatttgtatagttagtctagtcatttctattttactgtggttttaatttt

SEQ ID NO: 37022 - DNA, 379 bp, Arabidopsis thaliana columbia
  unsure (1)..(379): unsure at all n locations
cataacatacatagaagaaaagaagacggtttttttggcagcttgagcagtatcctgccaaatgccaatataccaagagcttaggaagaagaacaacagggaccattttcctaacaagtttttcagtttcaacgcccaaaacagcttctgcaaattttcttaccacatttggacgtctggtcagcctgacagatagattatcaaacaactcattttgaatatgagcagctcttgaaagtagagttgcaaatccccctttcacatgaccggtttgttaaccttgacgcatttatttggatgatcaagctgatcaatcagcaggcanagaaaactagaaaaactcactggtaacgtcaacagctaaccataacttcagctg

SEQ ID NO: 37023 - DNA, 419 bp, Arabidopsis thaliana columbia
tttgtatctcatctatcgttctcaataaaaaaacctttttagttagatcaatctcttattcttctctttggtgtgtaatatccaacgacgagtttaagatcggtaaatcaaaggcctttccacaacttttgtgtgaccatttgtgagattcgaaactcacacaatagaatttgaattttgagggttcttccaaagaaaccgtctttgcgagaatctcaaagaaaaacatagtttttggataaccacgaatggtgttcttgatattattaataacaaacgatgatttgatcgtataattgtttagaaaagtaatgagaaaagtgtttagccttcaaaatcagagctttctggttgtccgaagttgagagcgttttttttgtgtccctttatgcgaagtcgttgaggcgctttatatagga

SEQ ID NO: 37024 - DNA, 329 bp, Arabidopsis thaliana columbia
agaggatgagtaagtttcagatggcgaatttgacaatggagaagcttaagcagatgggtgctttagccgttgggccaagaagaaagcttatacatgcaataggttgtgtctatcacccacattgtctacgtgcttcctttaactgagaactatctgttagagtttagttgaggccaataaaacttagcttacgctttattgatgttcaactagtattgttttggttattgatactctttggaccatatatgtaaaacagagcaacaatcctctgtttgatgtgatcattgcatcgtgctattttgtatttgactatttggggatcagtc

SEQ ID NO: 37025 - DNA, 535 bp, Arabidopsis thaliana columbia
caaaagttcgacatgtctttaaactctttagagaaacacaccgaagcttctctccctacctcatggtccctttgaaccatatcacgacttatcggtttttataattttaccggcgaccaccagcaggctttctggccggaccagtgtcctcatcatcggactcaatgtcaccgtactgccagattccaattctcgacttgcgagcttcctcttggaacttctctaaagcatcaagagcagcttgtttgcctttgtgcccccatttctgacgtttctccattctcgctattccttcctgttcatcatcatcctcatcaataccaataccaattcttggaaatgttttttagacaaggtgagagaaaaccgacctgaagcattgcagcatttacagagatctcatcatcaacagcaatgagagtgacaacgaattcagttccagtgccttgccctttgactttgcctccagatgtgtctctttcttctatcactgctttgaactctttaccactacccagagttacagtatgcaaat

SEQ ID NO: 37026 - DNA, 330 bp, Arabidopsis thaliana columbia
  unsure (1)..(330): unsure at all n locations
tgagagagagagagatagtacctttccgaaaggtgaaaccaattgttggagcgcagatntctgtcccccattttctctttcctctaattcagcaaaattttatcaaaacaaatccttgttataaaaaaaatactatgaagtaaaaaaactaaagagatctagtataagcaattatgcaagaattgtgggaagaatgtttgttttcttgatataaaataaaacaacttcgcaataaaagaatgtttcataatatcctatcatgcatatactttggtggtaaatgataaacctaattttattgttcaaattagggtttcggttttgtttaat

SEQ ID NO: 37027 - DNA, 506 bp, Arabidopsis thaliana columbia
agaattaccaaaagaatggtaggaccatgacaaactttacctccagcacaagcatcatgtagaggaattgcttcgtcttcatctttcacttccatatcagctcctctttctaagagcagctgcagtgaaaatcaatacaaaaattaatttacagatacattagctatcagagtcgatggaaatgacaaagaaaaagcaacctgaacacaaggtaggtgaccatatagacatgccaagtgaagtgccgagtcattatcctcgagtggctcatcgactctcccattcaaattgtctatcaaaatcagaaaaggaatatgattgcctttaaacatttcatcttctcaaaaacagcagaaagtgcacaaattaagacatatccacacaatgcaaaatctgataccattacttctaccagtagatagatgatctagactagactaattttcatcagttcaaaagagtatgcaaatcttacgtcagatcaatcacagccccaagcaacaaac

SEQ ID NO: 37028 - DNA, 630 bp, Arabidopsis thaliana columbia
atttgtgtttgtaccaaccggttcaattcgtaattctaatttaaccggaaggagtccgatatcgttatctctctctgtgccactcaaagaaaacgtaatccaagccaatggaggagacgacatggggacagagaatacaagcggtgacacatatcctcacaaacccaacaacgaaaccatcactttactctcaattcttcatcggagccataattccaaactacgtatcgtgggattaccctccggtctattcgccgacgcatctccgtcaatggtgggtttctcagttcttcaaaagggtatcgagatttgggctgcctgatacatcgtggaggtcgaatagcccgtattatcagccaccggcggcggttatggctgtcggagttgaggaagggaaatgggggaaagaggagaggagagagtatgcgaggaagaggctgaggaggaagagattggtgaatgaagtgaatccatatattcctcttttagttccgaatttgcttttgtttctctcttgttatgggatcctctcctgagtaaatttatggtggtgaatctgtacagattatctgtaagttattgaatttgttgtaacaagatctgtgtgttttgtaatgaagaagacgaaga

SEQ ID NO: 37029 - DNA, 594 bp, Arabidopsis thaliana columbia
gtgaaagccaaagaaagagtcacgttataatacatgtgaaaccaattaaaaccaattacgtaccaaccgtcaaatatatcttttgacacatgaaacaattaatcaagaatacaagaggtaattaataaatcaaaaaacaacgtaaaacaaatcattattacggttttgtttagagaaaaatatatgaaattgaatggctaatgcaaccggaagccattaggtgattatttcacatgataattttttaggtgattatttcataaaaacgcagcactaaaaaccaatattcttaacataacataccaaatgaagttaatcataaaaataacgtaagatacaagactcaatctcacaacataaatggaaggcgtgaagggaagagatgcatgcttgacccctcttgtgccattatagattagagatcgatcgatgttgtgttccaaggcaggtgtgttattattacactcactcacataactctgtttgtaatatattaaagaaaatatatattgttgctgatccttcaagggaagaagaacttgaatttaattatagattgccaaagtgtaatgattgttcgtcttcctacttgtg

SEQ ID NO: 37030 - DNA, 646 bp, Arabidopsis thaliana columbia
  unsure (1)..(646): unsure at all n locations
tgattgttaaaatgattatgcggaaacttgatgaattcagttctgaagaagaagttggacctttatctccggtagccattagccttgctgctgggatatctggtgccgttgcagctgcagcatcacatagctttgacacagcaagaacacgtgcacagtgtgtaatattgccaaaggtttaaagaaactctactcatggctttccactttatcttacaaagagatatgaaactcattttctctgttgggtttctattgttttacttacagtatacagcaaaggagaggaagtttctaaaatggaataaaccagggaagagattagagagatggacaggaatccatcctacagacagaaatctcttgttccgaggtattgggatgaggatggctcgaagctctgttgcatcgactgtgatcgtaggaagctattacttagctgtcgatttattggtcccaagtgagaaaacaaacaatcacataagcctacaaatctgtctttagatcagattaacgataccgcaatagtgattgttttttagtagcatgcgttttgttatacagttaccagaganatcatatgtgagtgttctcaatactctgaaataaataattaccatcattggctgtatctgtaagttgatga

SEQ ID NO: 37031 - DNA, 243 bp, Arabidopsis thaliana columbia
  unsure (1)..(243): unsure at all n locations
ccgaggaggaagcaaataaagcgatagaactagggagggtctaagaagaagcaataaagcgaagggaaacaaacggacggagagttgtcgtagacaatgaccctctaagatacgagcagcagagagtcagaactaagctgagcaccaaacgagatggagagaaccacagnggtagaatccgagatgagagccaaatcccctagggagtagcataaggagacggctggatacgcgataggaaag

SEQ ID NO: 37032 - DNA, 510 bp, Arabidopsis thaliana columbia
caagaaattaggaaaagctttgaaatttcaatccaccggagccgatcaccggagcaactgaaaaaccacaggagattcaatctcaatcagaagcagaggaacacaccatgaagtacacgatacacagctcgttgaaagagaaagtacacaaagttgtagtcttgagcaaacagaatcactgtagaaatcgatcgaaagaagttcttctggtctcacttagttcataacttcatgtgcagagatggtcttgagcaaagtgaaaaatacttgttttttcgtatttttatttttggacacaaatggccgaccaaacaaaaataaataataaatgttgacaagaaaaaatggaaagaaggaagattcgacagataccgaaaacaaacttctccacatgatcatctgatactctctcactttcgttaatttgtttgtatctaatgttattctattattttctttcttgaaagtatcgtataaaaaagttgattagcaaaataatgacgattaaat

SEQ ID NO: 37033 - DNA, 524 bp, Arabidopsis thaliana columbia
tctgcaaaagtcggcttagataaaaattatttgatgtcagtccattagcattcaaagctaatcatagcccaaagactcattagcttcgccaagatggactgataatcaataacacgtcttcacgttccaagagaaaagcactctagagttgcatgcaatatatgttttcatctaaaccagactgcagttagatatattattaactatctgcacaaatcggttaagagaaaatagacgatgtcagtccattagcattcaaagctaatcatagccaaaagactcattagctttgccaagatggacttataaaaatatttccttcatgtttcaagagaggcacacactaagactcaaaatttgcaatgacaatggcactagcaaagatttcatttggagaaataaagcaaacatataggttaaacttgaatagtaggcagaacaattacctccataatctttgttttcaggatcacataggaatctggaacacaaacagaacacctggtaaacatgttgtaacaaag

SEQ ID NO: 37034 - DNA, 630 bp, Arabidopsis thaliana columbia
aattcaaacacacataatatatgtttttcaaaagaattagaccgccatagttttgttttgttttttaaagcagatatagaaatatttggcgtttggaaatgcatataaatactattttcatatttgtccttagcatgcgtgcacagctattttcatcaacgctttaatatataacgcgttatcgggactttaatgtgttgttcatgtcaatttaaatttcataactatattatgaaagacatgaaaataaagtagttcccatattcttttaatagtatgaattttgaaaatgtatagttgcatacgtttatggcaccagatcatgaattttttaacactagacttatggatatatggatttacaagtttatattgcaatccattatgattcgtatttccctaaatccacttaatgtagatggatacaaaaagacaaagatccgaatttagtatttttttccgtttatatatatgttacaagatttgttttgttttgttttcctattatttgcatgagattttttatatgaaaggaaaatgcattcgtattcaccgcattttattcatatataacaatattctgtgctggacatttgagttaactaataaagatgtcgcaaaaataaaaat

SEQ ID NO: 37035 - DNA, 1358 bp, Arabidopsis thaliana columbia
ttgggaggatccagcgatacccgaaagaacagcatccggagtgagcggtgttcacagtccaaacggaggagctcgacgacgggagagttgagaacgaagcaaccatcagagctgaattactagccaaagactactcgcaggcgacaacgggttccgacgaacgacgaggatctgacccgagaaggaagagcagagcggcttcagaaggaagaggataattgagcggcggacgagcggcggcggaggtccatcttgtcttggagcatggaggggcggcttcctcggagatcgtgcccgggagagaagacctagggcgaactctctttggttaatatttaagatcgcctcgttcttattgttttgcgactttgtcaatgactagagaagcgcaacaactttgtatatttgctgctcagagctctgaggtatggatagcgaataagatggagagtacgaagccatttcatagagcaagttcctgacagtgtcgaaatttgatgaccgctatcatttagggttatgttttgggttgagtttcttagtcgacatagagaacaaagttgtagtgtcttgtaatcaccccgggttctccaacaacgttttacaaattgtgggaaaggataaatacctacctgaggatcaacatggtgccgaatctcctacccctccacgtctcctcatttatgttctaggtttggttcaaatccagcaaggtagctagttcttggaggtggtggtttgtgcatttttttatttaaaatgtcaaaataatatctaagttaggatgcctctctcttgataaacaagcatagctataggccacagccactacacacgacacaagtcaactcgagccaagaacaactctacccatgaacagctctccctcaaacctaagacttggcgttaaagcaacatattagtcgcaagaacgccatgccgaacagggccgaagtcatacaagtgatgataataatttagaccgggagaagtaagaaagaatcaaagaagacacacattagcttctatgaattctgaatgttcatcataactatattcttccaaatctcataacgcaaaagactaaaattaacaacaacttggaacttgtaagataatttacaccgaatccaaaactaccagtaagtttggtgttgctcagatttcagaaaccatcagtttttctttcaccagacacaattagctccaagtatttgcaagatatgaaagacacaaaccaatctttatatcctctcatcaaatacatatgagacttaaaactcctaaaatcctaatcatcacaacaaagtaaccttttttttttggtaacacaacaaagtaccttaagatcagaatat

SEQ ID NO: 37036 - DNA, 534 bp, Arabidopsis thaliana columbia
accagtttttggataaatcttcatctcaattgttaatattagtcactgattagcatatatgtactttaaaagaaaaattatcatactgtctcgctaaaaattgcaagtccatacaccggttatggaaagtgatggatttaaataatctttatttctatgcacaagtgatggattctcttttgaacatgaactactgaatgtcggtaccaactgattaataatcctagctacgcaggaactcatgcgcacatacttaataagtaattatgtattctacaactaggtaggggctgaagcaaaacgaaagcatgttcaaacattcgacggacagaaaaagcctcagtcaacccaacgacgtgctcttctagtaccatgctagtaactccatcgcgccattgcggcaatcgctgtcgcaatggcacacgctaggatgacactctgcgcatttccaagccttgaagcagcagacggccttggtggaggcggcggtggagtggtaggtgtctcggtgggactctggcggaacatgtggtg

SEQ ID NO: 37037 - DNA, 605 bp, Arabidopsis thaliana columbia
tgttagaatctgtttatgattattgttctgatttaggaatgaataaagactgagccgatgcttatatgcaaagtgtggctaactatggtgcttataaatggcagattataatggctaaaccagcaggtgggccgaggagagatgcagctgcagcagccggtgcaggcatggacgaagactaagctgttataacaatcacctcttagcctaacaactcttcttctatattcattagtttcttttttcatctttcttagaaaagtttttcttataaaagtttaatctttcttctgcctgtcattggttcctctcaacatttgacactgaatagttgtaatgacaaagttttagttgggttttagacaaaaatgatcaacattctaacaaaacaatataagaactagttagattctggctctagttctcattctggttacacagtaaaattaaagatggagataacctcccttaagtaaaatgtactagaattttgagaagccaaaatcttaaaccccgaacggcgtcgcttagcaacactaacgccgtcgtttagcaacactaacgccgacttgttcagttcacagtcaaacccaaaacagagtaca

SEQ ID NO: 37038 - DNA, 920 bp, Arabidopsis thaliana columbia
tcatccttcaagatctgaacataaagaaatgattacataatgcagatcagaataacaaacatattctaataccaaaatattagtagacctacctgaatttctgaacggagggaacaacttcctcctttttcccatcttttttctcgttagcagccttaagagcagcctgccagccagtcagtcttaatcgttaggctttacaaaaatgtttatctataacttaatgtggcatcataaaagtacaaaatgggagctcaaccaaagaagcgattaaaattttatatatctctacacactaacctcacgttggcgcaatgccgcttcctttctgaaggaaatcacagttcatcatgagctttatagttaccgacgtatattctaaagaagagaaagataaagaaaaagaggtcacaggctccttacctacttaacaatttagcctccagagacactccttctccaagagaagcaacctttttgggacaagaaaagaaaagggacagatgaatctttgaaaatatgctagcacctacacgcatgtcattctaagtaaaaataaaatcttgaaatgtatgcagattccatgaaatttactttttaaaaaatatagagtacaagttcattgcattttcatgcatatatgaccacaaaatattgatatgagagcataacttcattgcatttggtcaatcaaacacactaaaatgtttctaacggcttaaataaactaacataatggtacgtagctacattataagatacatacctaaaaatacagaatataaaatacaagacaagagaggctaatgaaagattaatttcaattactattgttaagataatgtaagcaagttcagaatagttttctctcaaaactcaagaaacaaattcagcaaagataaactagtgataacaactgg

SEQ ID NO: 37039 - DNA, 649 bp, Arabidopsis thaliana columbia
catgctcgatatgtttggggtctacaattcgtaagagaaattgatcactatgcaaagacagataaatcttgaatgaaatgctaatatcgttatacagaaacgtgtaaacatatacgtttgaaacaaatcatttgctaatttcttttcttgaactaattttaaatttatgaatcaagttcgttatgagagggctagctaggttcctcgtaacttcattgtttttgttgaattatgaaacaaatttactccattaattatgtggtataattctttaaattttgaaatatgatacaaactattgaagtgttgaaaccgaagtttccacaattacctgaaaatttaaaacgtgagaagaagtgattatgatttaaatttgcttgatgatcaatgtatacaagcatacacaaatgtatacttgcacacaatcaaaacataaaccacatatttttcaactttagaaattaaaaacccacagtgttattatcataaacataagctacacacaaactctactaaagaaaaattatcaactaattagtttttgttgtgattattgttcaagtatgtgaatatagcaatggctgcatatgcgagagtggaagttgaaattaagcaaacaaagttggcattgtttcatgcgagctagaag

SEQ ID NO: 37040 - DNA, 145 bp, Arabidopsis thaliana columbia
gctcggtgcgcgagcagggcgagggcatcgtcgcgacggccgagggtgtcgacgaccgcaatgccgccgaggtactgcgcggctatgaaatccacgtcccccgaagcgacttcccgcgcacgccgatggtgagtactactgggtc

SEQ ID NO: 37041 - DNA, 590 bp, Arabidopsis thaliana columbia
caaatgtagagttttcttaagattagttaagggaagaaagtcaagagagaacacaagtctagtaagaataaaatatcttatagctttcaggaaaccattcaatattatatcaaatcaaatacatcaatgaggtaacaaacaattgtaaaaaataataataagtcacacctcataatctatgtttctactagtaacaaaaaaatttaaaaatatttgtgaagaggtcctttcagggacccatcaagctcatagagtctttccctccaaaatctgatgagctttattctttgctataacgtcagaatcaacaacccttgtggtagactctgaaaactaaacttcaataaatttaagtattctaagccagtaacttatgctggtattgtaagattgagctgtagaagctctccatgagttaggttttggggttaagggcccaaagaaagtcactctggtatgttcccaagcattcatctccacatcattagcaaactccatagggtcgtatgttgaatgcatcattgtagtaggagatccaaagttgactcgttgatcgcttgaattccctgggcgagagctgaccattgttg

SEQ ID NO: 37042 - DNA, 621 bp, Arabidopsis thaliana columbia
ctataatcccattggcacactaaaaagagacaatgacgatgaagtgaagaatgcaggtctcattatattatacacattttttacattcatatatatataattatatatatatgtgtatgtgcaagacgatgtgacatcacaaaatctatatatatcttataagttaaaaacgacaataaagtgtgatgaaaaggaacacctgagaatgtgcaattattaatagcatagtagtgtacaccaaagcaaatcattttgggtatttttgagtctttaattattctaagataattgtcactaagtttctgttttccataacatatgtatttataaactgtgtgtgatatttctttcctctcttagttatttttttttgtgtgcaaagcatactttcattcaaactcaacccataggtagtacaaagtttacacaaacatcaacctcattgttggaaacatcaaataacaatactagctctctcacaagagaatggaaaaggaaaaggataggataaatcgaccgtagatccatacatcggagacaagaacaagatagtaacttgccacaagcgagagaatggtgagtcgaagacaatccacgaatacttcgggagattgttgaatg

SEQ ID NO: 37043 - DNA, 512 bp, Arabidopsis thaliana columbia
gccatttcattgttacatcaggtaatatgtaatggatctaagtcttttctttctgtagaactctaagttcctgggatcagtcatatttggtacatccaacctgtcacttggacatatagctgatgtgtttgaggctgtcctgcagtgtggctgatttatcttctttacattgtagccttagggtatactttatgcgttccaatccctcattttagttccgattgatggaatatcaactaagtagagagttttgcatacctttgagagtttttttgtcctgagctttctcgtgtgaaccctgtcttctttaggttggtgctgttgaaggggatgaagagttgacaccacttgggcatcatttagccaaacttcctgttgatgtgttaattggaaaggtctgcgtcagtaacattactgttgcactaaaatttccgagttggaggccttggtcactgactctcatatatatgtataaaacctctcctcacaacatcttgcctcatctcatcatg

SEQ ID NO: 37044 - DNA, 516 bp, Arabidopsis thaliana columbia
cacactactactatggagaatcctggaggaaggagaagaagagacatagccataaccgatggagaaagaacgaccggttcttcggttgtggctgcaaccgtagcagctgttgcagtggtaggaccgctttttggtctgatgagtttcagctttgtggcgacggtgactctgtttctgatcgcttctccattgctgctgatatttgctccagcttttatggtaacggtagcggttcttgtgtcggctatggttggtgttggggtagctgcagccatgtggatgatgggaatagccgctttggtatgttgtggccgagagattggtattgaaaccggactggctgggaggatggttgagtctgtggtgagagaattaggttacggtcggagtcgttacttgcgagacaaatcagaggatagttattcaactgcttctccttcttctcgggattactcttcttcttagttcaaacttggaaaaagtctcatgattcatgggaatttcaagaagatggtg

SEQ ID NO: 37045 - DNA, 521 bp, Arabidopsis thaliana columbia
gccagattgccgctctctcttgttttagtccaatttttaaatatatatacaatgaacacttttttttatgtatcgtttttacttttaggaaggagagtggaagttaatgagaaaggagaagaagttactgagaattaagggaagagagaagaaacaaacaaaaaaattaatggcattgaaaaaagtcctcatccgctgatagccgactgcgcgtttagcccactcgcgtttaagttcatcgtgtctccatgacatcttttacttagatgacaagtgtgatttgttactctttttgattgaacattctgttggaccaaaaatatatatatacggtcggacacaatgtggagtttttagtattaacttttataaacaagactaaactgatgatagtcatatttttgttattatagtatatctacttgaatagccccttaaccagtatctaaataattgacaacatagagatatgtataccatttgaacattcaatggttgtcgtcaaatcggataaataatga

SEQ ID NO: 37046 - DNA, 539 bp, Arabidopsis thaliana columbia
cgaagaaaaagatgatgaagaaataattttacggggaatttggtcaatccatctcacagaaaatgccttatcccataagcccattgtaaaagtgctcaatttttaatttttgggccaaaaagtaccaatttctgtaaaagctccaaaaaaaaagatacatttcaccaactatacaataaatctaatttgttatattttcttggaacatatcaatttttatagaacaataagatgtaagaaaactcctaaatactcatgtgaaattagcaaattagttcccggttttcggtaattaaccttgattgctgatcctcaggctccacgactcatgcggctactgagatgtctgtagaacaatatatagattcataagccccaatttgcagtagatgtaaacttaagacaactcaaaacaaattaattcttagatagttaaaataatatatgagtccctccaaaagagactcatcacggcatcaaagacatggtagatcattgaaaatccgaagtttgagagatgatgctttcgtatcagacat

SEQ ID NO: 37047 - DNA, 582 bp, Arabidopsis thaliana columbia
aaaggaggttaattttatgtatgttggcttgcttcactgaaattaggaatggattagcatattaataaaactgaaaattccatgtacagtatcaaacaaaaaaaacggtctagctatttcaaattttcattaagggcttgaatgttatactgttttatcatgtcaaaagtttgtgctgaattacaaaatgtaaaaaaaacaatgtgatttttaaaaatttatcctgaacgttttaaaatataaataaattttgaaaaaaaaaaaatcatctatcacaaagtagtttcgttattttataattcagttggtaatcttaacataccagtcaagccctaagatgttaaaaaataaatgaaaattttacatatccaaaagtaatatacatatgaattttgtcttctattacaatacataaattttaaacatatatgtttaactactcttggcgaaagtaatatgaaaatctgaggacaagctaaaattattttacttcttcaaaatttcttaatcttttttctaaaaaacctataaacctcttatgaaaaatctacaaaattcttaaaattttctaagatcaactta

SEQ ID NO: 37048 - DNA, 589 bp, Arabidopsis thaliana columbia
gagtaaggaaactggtctctagtgtatgccaaatacttatgctcgttaatgggaagacctaaagcaataacaagtttacaaatgacgggaataaactcgatttcactaatggctaatgtccagaatcagtaatcattaagctttaccgatcaaatgcataactaatttttaatacattacagatatactcaagcgaaaaagtatccctaatcataagtatcctacgacctaagttgcatgttttgtacttcttcgtctacccttaaacttcccaaactaaatccaacaaccaaggatgttttcatctacatttacagagcttaacagcttcaggctcatattctccatctccatctgttatttaagagagagtaccttatgaagatgattaaggagctaagaaagtgccaaaaactggtttggtcttcatgagactccatgagaattcatcttcttcactttaagaccaagctcccgaagccaactcctaaaaccagtatgtttactggttttgatgtttcatcttgaaagaacttgaaccttctgcttgatagtttccactccattccatcggtgtggtgattgttgt

SEQ ID NO: 37049 - DNA, 267 bp, Arabidopsis thaliana columbia
ttttaattgggctctctagcagatgagagaaagacgaagaaaggtgcatagatgttttaaacttcgattacaagtaaaggtgtttgacaatttctgtgtgactctgccgacacgtttcgtataacgtgccgctatcctcagcaacgttttcatgtgtaatccagattggtatgaatttctatttaaaatgttggtaacttaaaccgattggggccaaatcaaaccaatctataactcgaatcggtactcttttcttacaaatgattc

SEQ ID NO: 37050 - DNA, 484 bp, Arabidopsis thaliana columbia
agaatattcaaaataatcgtgttatactactagttaatgctgaaaaacatttatctctcattttttgcacgtgtattgaaagatttatttcggtaaatctttagcttcatggtagtgaagaaaagaaatataagttttcatctgagttgttcattacatattttgtaagcggcttcctcattttttaataagaactaccacatttggtagcagtagaaacgaaactcatgatatccatatgaatgataaatacatgttttttgtttatgttttttgggctcttcaaatcaagtagatagttttttggggactaccgcgtagacattgtttaaatacgtgaaatcaacatcacatatagcttataagtgccttctaacacaagtacattaccattcacatccatggttatctttccccccctcccctggtattagaacccgcatgctgagaacaaaccttgtaatagtctatcaggcagagaatt

SEQ ID NO: 37051 - DNA, 695 bp, Arabidopsis thaliana columbia
ggatccccctgaataattgctcacaatgcataagatgtagcttcttcgagacaatgtaaccatgaacgaagtgaagataataatttggcatgcgaaataatttattgataatccgtactgaattaatatacatatataaaaattgttcaaaaaccctaatcaagtattagaaaactctcacactcaatagtaatgaggaaaacatttcacaagacaactacttcaagcaaaaatctctagaataataaaaccaaagccttgcatgcaaaaaccacaaactaaaacatatcgattatcaggttcttaattacttactcaatacattaatcagaaaaataaacaagatgaaatccgtagaatattagaatttagaaataaataaaaatatatgaaaaagaagcaatgcaaaaaaaacacgcttgttaagaacaaacaaacaaacgaaaggacaaaaaaagaaaaataaatctcacagaatatatttgtttgtgtatgtttgcctaggaatgatgactggtgcttccatcttcttgatggttgtgatgatgatctccgtcacggttttgctggttgttgatatggtccccgtctccgccaacggtcggtaagcagcattcaacgccgctaaaactccataatggctatgttctccacggcacctcctctcctccataccagaagcaaagcgtgtcaga

SEQ ID NO: 37052 - DNA, 679 bp, Arabidopsis thaliana columbia
cacatcaaaattcactctttagcttaacattaatttaaactgtacaatgaaaagcaaacatctcatgagatctagaaagctaaatggttggagcaattagatatctccgtatcaaaacagagtatataaccgaattaaaaactcaaactttatagatgactgggaaaacgggtgatgaactcgataaacccaatcagacccattaatttgaaaggtcgaattctgattttgtctatgttcccaagactgattcaaagctagataagcaaaatctctgtaaatctgaacaaagcaaaattagctaaccagagagagagaaagagaggaactaaccagataagagctagggaagaagcgaagatgagactcggagagtgtgaagaaagtgaatcagatctcttagtagttagatcatgaagaattgagggagcatgagaccgccattaatggagtcacaaacgtggtcgtattataaaaatggcgacgcgtttaccacgtgagagagacgctacgattgcataaaaagaagtcggcattggtatacatgtgtctctctgattcgtcacacggttttgtcgcatttgttggagaaaagataagtcttttaaacagaggtcggtatggtatgtatttggtttcaaggattcatgaaattgatatatgattgtgatgtaagtta

SEQ ID NO: 37053 - DNA, 816 bp, Arabidopsis thaliana columbia
acattgtgcaacttccgacttctctgttgtgttgacatagaaaaaattaatgaataagaaaaacacaatacatgaaaattggtcagatttgaccttattttatatttagcgaaaggtacagttttgcaactctctcgaagaccaacttttggttccattctcaaaacccaaatgaagtaaagaatcatctatacaaactgcaattatatattgttgcctgccactataactcaagaagaatacgtaaatccaagctccatggattggtttctgtgtcgaaaactttcctacctgtaacaataaccaaaaactttgtgaaattttcagttcctggtcacttagagttccacttcctgaagctcctctcctaagctgctgctgctactgttgagtaggactggtttgaaggttgatggactggtaggaggcgtaaacgaggtgttaaagtttccactccatgaagctgttcttctggaagtaggaggctgatgattatccccattgacgcttatccccaatccatttctttggatgttatccatacttggatatctctgcatcatcattggtggtggagcccctgaagaggctactacttcatctgctgaaatctcctcctgtctggtttcagcagcagccggttccattgcctggtcgtttgaaaacgatgcaggtgctgcgggaacaaagaactttgcttttgcggggattggtggttttgcagtttgtacggaaggtgacggaatcatggtatgagagtttcccggcctggaggattataggtgtcacgtatctgccaaaaggagagtaagtgat

SEQ ID NO: 37054 - DNA, 548 bp, Arabidopsis thaliana columbia
ttgagcaggaataggtgaagcaggaacaggtgaagactgggttgtagatggagctgcaggctggttttccaagacgtgtttgtattaaaacaaccagtataacaagctgctcatcgcatatttcaacaaataaaatatatgcaagaaagttaccttagtcgaagatgtggtagcggaaacaggctgtgaaacagaagaagtctgacacactaagaatcatcagaataagccaatgatgtgaaaatatgagaaataaataaattacctgaaccgaagcctgaccagctgaacctccagatttgctctacaattcatcaataaccaaaggaaaagacaatgtcagtgccattacaagataaatgatgtttcataggtaggaaacaatcatgaaagagacatctaggaacatatgcctaaagacacttattcatcagcttttatccttgtttaaggtaaataagaagactgatttgttgaagataaaagaagtatgatctttgcagtagccagatttgaactgttaccttgctaagcataacgacgagaaa

SEQ ID NO: 37055 - DNA, 839 bp, Arabidopsis thaliana columbia
tgagaattttttggaatcccacgtccaagttgatgacttttttgtgatttccacaaaatatgcatataaatatcaattagattacaaagacattaaaatagaaaaattacagaacacaagaatttttttttgcaattactatacaaaatgtaatctttactgttgacaaaagaaaatacaattcttactattatagtaacaccatagatagagaatgtcataaagcaaaaaaattaaatagtaaatacaaatcattcttttttcaaatatttttaacaaatcattcttgtatatatgtacacacacaccccacaacatcccttcaacatatacgcgtcctatttccacgttctctctatattacatttttccttgaaaacatctcgaggttcaaaatctttaacccctacaaatcaagaaaaggagacagaggagaagagagaaaagaaaaacgcagaaacaatgtctttttcttccctcaaattgccaatctttctcattctctcaagtcttctccatgcggctataggtacgtacaaacatattcatattttacattcatcaaaacgtcttggattgaaaatcttcatcagtctttagatcagcataggaagaaccctagattttcatagtttgaccaattacacgaaagatataagatcaaccataggaaaaaagaaagcgttaattctcatacgaatctttgatttttaagattcttattgtatttttttctttctcttctataaattgtaggggaaacattgtttgcgagaatctgccaacaaatatgtgctcgttctcaatatccgcttccgggaaaagatgtatattggaga

SEQ ID NO: 37056 - DNA, 636 bp, Arabidopsis thaliana columbia
tgagtaatttatatgatttattattatttttgtcacttttacaagttttaatttgatatttttgaaaagaacgtcacttgaaccaaaataaaagttctactaattaaaaacatttttatagaacaagaaaaaaacagtttttgataatttgcataagctaaaaacatttgtaatctagacattacccgaaaaatatttattcaaaattttaaaatacaaagttagtgccccatatctttgtaaagtactccaattttgtgatttgcagtttaattactacttcaatccggtaattttaatctgatttagtttcataccggcatttgggataaaccgggttcccggttaaacaaattccaaaacattatccaaaacaaacagagaattttatcaacggaattttcccaaaagaaaaacagagaatgatgaagctgcaagggggacttctccagtggagtcgtagcagcttaatcccgtcgatttatacgccaatcaacaagacccaattctctatcgccgcctgtgtcatcgagcggaaccaccagcttacggcgaaggagagacggcagctccggaacgagcggcgcgagagtagattggggtatagctggcgagaagaagttgaagaaaagttga

SEQ ID NO: 37057 - DNA, 570 bp, Arabidopsis thaliana columbia
cataacctaagaaatttgtgaagaagattcaaaattacctgaactttgataatgttagagaaagtgtcgattgttttgtagtaatcagcaatcaattcaaccagagatgtctgtattctctcaaatgctctgattctatcggcttcaacattgtcatgcacccattgtagctcaagagatttttgtaaaaaaatcattggaagttgaacagagatttgtaatgtgggcaatcgctggtgacttacatttttggaagacacgaatgctggtatacgccaaaccaattgcaaaaatcggtggtggaagatcaatctgacgataatggattgaatgatttagctaaagtgagcattgctcttccgtcgtcagctacggatgtggtgaagaaggtggtgtttgtgaggaggaagagaaggaggagaggcgttggagctccattgattagagaacacgacagtcacgtagagaggaggaggatgaagaaggaaagaggaggaggaggaagaaggagattagtggtgaaaagaatctgttctcactctttttttggtttattcgtttgtgtgtaaa

SEQ ID NO: 37058 - DNA, 1346 bp, Arabidopsis thaliana columbia
gtaactgaagacaccttacatagacatggatgtcccatttttttcatttgtttgcaatttaagttaaaattggtatatatgaagaactatagatgcaaactttggatcaaaatgatatcgaaatgattggacatgaacaatcagatcaaaaggattgatttgatctttgtgattacagattaagtaaagcaatgggaggagcagagaaagtggagatagagcatgggaatcattctctctccaatagagttcatgaagctgttcaagccatcattggttttgtcaaaagagaaggacccagtggttgggatgatccttggagctaaatctgctttttccatttatgtggatgaaaaacttatccaaatctgaatctcatgaattaattcacttcttggctgattcgtaaccatttatccttaaaaagtaaaaaagtaaattgttgtccttttgttctgatatatacttggatcattaagaaaagtgtcttccttattatatccttcttttgttgcttggttttgtcttgctgagtccataagttaagcttgaacagagatgctttgggaaactatgaaaaaactaaatcagtaagcaatcaaaggtaaacggtaaagatgatataacagagtgtttggtaagatgatagtaccaaataccaaacactgacaccaataaataggcattgagttgtccaaaggttaggtaaataacagaaatttccattagtgtatacataactgtttcctcctaaaacaatcaacaattcaacatcatactaatctttttttttttttttttttgccaaacaacatcatactaatctatatcttcttttctcttctgttcaaaatttataccagtatattcaaatttagaataaattatgtaagtatttagttcttgcaataaaagaagataaggaaagaagaattatttgaaggatcattgtaagcaaaaaggttttcagttataaaaggatttcaattggtggcagcctaacaatttttctttctaaattatgaagttccagtctcaaacctaatctttaaataattagttgggtagctactaaatctcaatatctgtttttttacaccagtttaaaatttttatcccggcaaagaatatgtaagcgggggtgcgacaatgaccaaacaaacaagacacgtgaccgcgaacattgtcctaaaatcccaccgtacactgaaacgtcacgccgacgcgactcctgaacacgcttccttcgcaacaacacatgtcagtgctcattagttggcgcgatcaccggttcgagccaatgctaatatctgctgattcacaagggtataatcgtctgtacatca

SEQ ID NO: 37059 - DNA, 1225 bp, Arabidopsis thaliana columbia
cctcgtatggttgaatcccaattaatctaatggaaagttattgacttcttttgtagagtatacattattttgcctcgatctaatcatataagaagctgtcattaaattgaagagcacgaggtaatgattatacaaaaaaaacagtgttttgaaaatgaggcttcttctaggattactgtagtcttgtatccgttttatctttttttgcttactgtggtcaaattttttactattgaattcatgttttataaagtacgaaggttattcaacgtaaaaaagcataacaaagagatcgttgaagatccttattagagcctaatccttatactatatacaatgcattggtctctctcaccaaataatcaaataagattgggatatcactttgtcagatagatctatttaatttaatatatcaatagcctgttattggttattagattcaaatgattgtgttttttaattcgagtaaataataatacacatcttaataattcaggaaactatatacttatattatatcaatatcatcgcatgaccaagcgacgttgtcatttaaaaataatttatcgcgtagattttgattcgccatgatttgggaacaagaaattaaagacatatatgacaagagaggcaaatgactctttaattacggataattaaatctaattacgcgtcattatatttttataaacatctttctacagttggaatgatcaagctgatctggcacatatgtggacccacttttgaacattgggctgtcacggcccacctaataccgtcgtctacgaagaatccaacgacatagacggtgccacgtggtgaaaacttgagcggtcaagattgaaaccacgtcatcaaaatctaaagcgaaccacctgtttcggggcggcctggcgtcaagatcctaacgaagattatgttttctctgactagtcacgtgcaatggccttgttgcacacgtgcgacggtcaaaaacataatttgaacttgttaaattttgctgaaatttactgactgtttatatttctccgacagaaaaacatgggttttaagacaacttacaaatatcctgatttacaagtaaaaatatgaatcataagacattctagaatgatatgttatattgttatgttacaatcagaagataatgttatattgttacactaaaaatttgacatgacaatctttaaatgataattctttgttgttaaccgaatat

SEQ ID NO: 37060 - DNA, 592 bp, Arabidopsis thaliana columbia
tataaaaataagaattagttcaaaatatacataagtgaaatctgtaacaatttgttgaacaaataattttctttattttatgccaaacaaaaaaaaataactattctatttattccaataactatgttttttattccatatatttgctgtttgtttcaaacttctgatatattctatggcttccatgagaactaaacttaatacagaattcttctttgatatttcttgatttgaaaaacaatacttgattttctatcatttcttaaatgatgatagatttgttcaaaactctgatgttgatatctatgccaagttgccaacctattgtttcacccaaagaaaagtaacagttgaatggaattaactgtagttatgtattcacatgcaaaatttcttagaaaaaaatcaaaaaatctgtgtgaccatccattaagaatagttcataaccatatatttgttcttcgttgataaaaaaagactataggtctatagatcctaactattatcttcaggtttatgatcaatagttgctatctttaaaaggatagtatattgaatgaaaggtcgaagtagcatatggctctcatgcggg

SEQ ID NO: 37061 - DNA, 1015 bp, Arabidopsis thaliana columbia
gatcaaaacttcaaatgattaagcattttataatttaatttggataacggatacatttttccaggcaaaggtaacgattatgtttggaaaatctgaatcaagatgacatcatcgtgaacataattacattttaagacggagcagaacaacgagacaaactacgaatacattgaaaaaacatatgcagatcctgctgatttatgacaagaaattaactagtttttataatcacacatggaagtactatgactactacttctacatcatttttatagtaaaagtaggagatcaaattacatgagatggtaatggatcaaagcttaccaagttaacatgcatgaagtgatttatacgtgctattgagtatcagccatactcccgtttaaagtccagtaagctacctagcgttttatgcctcaattttgtgaaagttttatggcgtgatacttctacataatacgatgcaaaagagaattaacaatgtttgtgataaagtgtagctctagccatgaagaaaaactcatgaatggaagcaaagtaaagaagtcctgctaagtaatcgtttttttaggacaagagattcattaccatctcatgtcgccacccacactttgtaattgtagtggatcggatggtataacaactaagaatacgaacctatatataaaacgtatgttttcattagtgtattgttataaaacttatacatagatttgagtattcaattaccacacgaatatgtattgtttagttgcgaacaacgttgcacctttcgtggccacacaagactttccccgatcgcagcttcttctctgcttggcgccaaatactatcacgtatcttaacaaaccaacaaaaaaaaactgcgggatgtagaaagaaacaacaaaaagttttgggtcgatttgctacagaattacatttattgtggtctttttgaagataaagttcttttagttcttgtggttggtagtcaatttatttcattttcggaaattaatatttattttagttt

SEQ ID NO: 37062 - DNA, 733 bp, Arabidopsis thaliana columbia
ccaatctatcgtatatacaaacagataatgagtaatccttaaattttagttatcatttatctagacacagagaaaagttcacatcacgtctccttcacttaatatgtcaagcaagttttagtcttttagatcgaagatctatacctgtagagaacgatgtcggttccaggtacagacgctgaatctttgttctgtccctgagagtcccgatcagtttgaagctgctcaagctgctgttcaacagctgcaggcacaagatgaggatggctcaccaaaatctgagacagaaactgaccagcaggcgattgcagctggagcggacgctccggtttgggggaagaaccagatgaagcatcattagacgctgaagaagctctaaccacaaaacttctccgagttttagcagtcgttgttaagctctgtaatgatcttgaggatctagcagacgcgttttgctgcaagtacataattttttttttagtttttgctgattacgaggaacttcctggtaaaatctgattgaacataaccggagcagaatatttggagaatgattcgattttgaattttgatcataaaagtaggttaattgaatcaagtacaagagatttgggacatacccttaaacgaagttgaagtcttgaagaaccagaacgcgtgaatccagggccactggcggtaaggaacatagatccagaaccgttgtcggaagttctcgatggtacgatgggag

SEQ ID NO: 37063 - DNA, 653 bp, Arabidopsis thaliana columbia
agtacacgaacatggctaatcaagaactgatgatggctaatacgatgaatcaacttcaacaacactcaaaccaggtttccatgtatctgtggaaccatggaaacggtgctttctcacaaatcccagtctcagcattggcttcaaaccaaacgcaatctctagctccgattccgcctgaactgatgatttacccgaattcggatgcgggaaattactcggggtctctcggggtacaaggaactgggatcaatgggcttcagaacatgaacatgttaacctataacaacatcaacagcgttaatgatttctcaaaacagtttgaccagaattccagagcggaaagttactctagcttacttggggtacacgaagacggaaacaatgagtttgagaaccctaacatgtccagccgcaacaacttcaatgttcaagactgtgcagggttacttgggatgcaaggagctggaactaacgggttgcagagcatgaacatgcatgactacagtaacaacaacagcattaactctaatggtctttcgcatcagtatgttcaatttccaacgtacaacagccaacatcaggaccgggttttcaatttggatcaaaacggaaacaatactaggtctctctaagatctatcacaatctctctta

SEQ ID NO: 37064 - DNA, 603 bp, Arabidopsis thaliana columbia
gcatgagagaatatactaatctacacttactagatagtagatacgtgcatataaaataataggttcgtggccaataactaaagctaattcaagaatttagagacgccatatactaatttacacgtcctgtcaccatccactaaatatcaatgaactcaagaccaacacaaaaccacttgctaaagataggcaaacgtgtaacgcctttcttcgtataattgtatttacaagttcactgtgtattcttttttggcagcgttcaatatttatattcaatcgcagaacaaaagaaaaaataaacaacacaaaactggcagtgagtgagagcaattcaagacaggcaaacaaatgtgatttagtacaaaaatagacggtatatagaacacaacacaaccggataagacttacaagatcataaagaagtatacatttctaatactaggaaagaatccatatgtaaccgcttctggagagtagtctgaggctcagattcgtcggtggtcaggagcttcgatcatcgataagttatcgtctgattaccatttctatgtcttgttgtcttcacaagatcgctacattttaggtcattaggaatctatggtg

SEQ ID NO: 37065 - DNA, 1358 bp, Arabidopsis thaliana columbia
ttatatttgctttctggtttcttgttttatctcaggtccctgttcccgcattgaaggagcaagttgcctccgttactggtgtcgttacggaacaacaacgcttgatatgtcgtggaaaagttatgaaggatgatcaactcctatcagcctatcgtatcctttttgttctttccagcatattgccccagttctttcttagagttttccttttcagttgtgatttgtgaaccctagtttgctgatgtagcccttggttttgaattccttgtttacaattccagtgtcgtatggtagacttttccttttaccggtaaaattccttaatggttccatcttagatgttgaagatggccacactctgcatttggtagtcagacaacctgtatcagagagttcaactagtaatgcaggtagtttcaagttcccgtacaaatttgtggccccaaatactgttactgaacatctttgaatttctataatcatgatagtttagcatttaccaatgctttttgtgagactctatttcaacatgctgagtggaaatattgtttttatagcggctgatcctgctttgagtgctggtgacagccagggcagtcaacgatcacgagttgtagtaggatccttcaacattgcttgaacaaagctgaatggaggtctaattccagatctcttggacacggtataccctcttttatctgtctgatctgtttttatttttgtgtgttggattagatgtgatccttttccttttttttgacaatcaaaaatatgtgcgatccttttcatgagctttgttttatgtctggtagatagtttcagctgttctgggttcacttgggatctctaatccagaaggtggtattgaagggatcgatgatatggtaattgtcatataattcgctgcatatttgtataaatcgtttttggatgtaagagagtccctttatttgtcagggtcctcttcatgagaggctgtctcggagttctggcctggcactgcaagagattcttccggagggcgatctgccacaccaaatgctgtggaccagacgtctactcccttggcatcttcacaaccagcagtacgagctcccttgtttccatgattactcattttacataattcttataaggtacatcatacgctaactttttactactgcaggcgattccagattcgttgacaaccttatctgaatatctgaatcatctcagacaagagtttgctgctaatggttagactaatttttaaatgtttggttgtgtgtccaaaaacaagtctcgagagtctgactgtgggactgtaatttttgcacgtagcaatcgttggatagtagacagggacagtgggaatc

SEQ ID NO: 37066 - DNA, 487 bp, Arabidopsis thaliana columbia
tccatagaagcttgtaaagcattagctgaagcctgtcaaatatagttaattcaaggacattaacacaaaactcccacgtattaaaccaaaaccaaaaatgaccaacgttttccttaactctatcaaacacttaccttccattcctcctctgtggctcagctggaagtgtatcacggagtcgagtctttgtatctatcaatattggtccgctatcagaagactcttctgcatacgcctttctaagctcgtcaataattcccacaatccattgacctccaacaaatcctaagctttacaaggtaaaatgcgacatatttgaagtctcatttgatgtatgctacaaaacattatcttgctaggaaaaggtaaaagccacgagaatgttacaagagaagatcgaaactagaggggtagaaggagctcacagtagcaattcacgagttcgtccttcaaacaagaactgattacaccagcaatggaattcaac

SEQ ID NO: 37067 - DNA, 289 bp, Arabidopsis thaliana columbia
gttaaaactagtaagtggagatcgagacagggccaaggcgaagtgagtaatccccgctgcagaaacacataaactttggttaagtgctagatagactgtacagagtcaaagatgcgtatacctgagctatgatacctggattcgcaatgtgatcactgacatctctcgggataagacataaatgcgattcaaagcaaagtagtcgctaaaagggcccgttggaaacccttctctcacaatagtgtcccatagaagcttgtaaagcattagctgaagcctgtcaaatata

SEQ ID NO: 37068 - DNA, 1679 bp, Arabidopsis thaliana columbia
tgaaagactgtttccaattgcatctcaacacgaagaacctttaggcaatcagtcgcaagttttctgtactcatctgcaaatgatgccagattcctaggagaagctgcttgatttctgctattaccttcagcttgactcgccacacgaggaactgcttgtccaagcctaaagattttggaaatcaaaacttcagaaagaattttcatttgcttgctgttagggaaggaagaactggctatctttctcgacatgatgaaggagcacaacagaaagggtaaaaacaacattcatggaagaccccttaagttatgcaagcttttgttttacacttgatgaaaaagttttgtgagtttttttaagtttgagctggaaaagacagtgatcagtctaatttagtctcttagctatcctatttttactatgcatgtcctttttctcttttataacatcatggaacttcgcaattttctgtgtccttaaaacatctaagatgtaataagagatgaggaacgagcaaatgcataaagaatctgaaccaatgaatcacctctcaatagagtctgccacgtattcaagcgagtcactgagagaagctaacaaaatcagtttgttgtcatcacgaattagattatcctgtaagaaaacaacttaattatcttcaccgaatgaaaaattcttactagaataagtatcagagaacacatatttttacctgcttgataggtcgcaaactcaagaataggtcactgagttctacttcagtgccaacagcctcagagtgagaaacggcatggccaagcgtagatggtaaacaagcactcgccgcatcaagccgcatcaatttctcaatatcatgcctcccaatgagcatgtaactgagcttctctagaacagcctgaaatactaacaatgaaacctaaggtcagaaaagtgtgtacgaaggaagaaatacaacgctttacatttagggaaactaaagaggtattaaatgggtaagaaaatgcagattttttatcaaagatgcgaaaaggtgcatttaagactggctccatattcttccacatcactctttgaatcaatactctctgaggattattgcttctaagcatttaatgccaagttcacatagcccaaactgaactctagctggtaatccacagtcatatcatctaattcatttacctccagttgaatttttaacatcacattacgctgacaaaactacttttagtataaacttttgtgctataggcgcaaacccctaaaccagatgcccaacatatatagattagaagagtcaaaaggaagaggaatccaactcagaccataggaatatccatgcctccatgtatgatgttcgacatctctcaaatgtcctctcaagaaatgtctgaacatacttcacaagatcagtagcaaatttaggcatggcttgagcccagccaagaacctataaaatttgaagagcaagtagtttcatcaaaacacaaatatcttgaaacttgagaaaacaaaaatggattaaatgatgaactggaagtaaccactcaactaatccattcttttaggaagatgaaaattatgaaaaataaaaacttttatcttgcagttttaaagcatagacgacttgcctcttttgcaaggagatctattgctagaagaccttgtaagataggtcg

SEQ ID NO: 37069 - DNA, 510 bp, Arabidopsis thaliana columbia
cacaataatgcttctttaattgctatttgaagtatattatttgggatctttcgaataattatgtaaattatatgtaacgtgggagatgcgactagatacagattacactaatcgacgatagcaactagggacggtccagcgtcacgtatttggaactttatgtaaatatcgggaaagtacaaactcaaatttatgacaacttcttgggtgacgaacgtgatcgtaattgcaatttgttttcgcaggagttgtttgatttgtatgtattactgaagtattttgacgcagaagggctggtccaatgatactttacttggggtcttatgcgtttaatacaacaattactaggggtttttttttttctaaaaaacgctcccaagcacttttgtcgagattgtgtttaaggagtatgatgcacccttttaaccagatctaatttcaaatttcccacccaaaaggagtaatattcagcggtccgacacctgcaatggcaaactttgtttcaaaatt

SEQ ID NO: 37070 - DNA, 635 bp, Arabidopsis thaliana columbia
gatcagtcaatccgccgtcacggtaatacctcctccgccttcgagtttagaagatcgacgattgatcaaccggaaacaacagagattagtagaatcataagcaagtaaccgaggacggagaagaattatgagagacatggctgcgacaccgccggacggagaagagacatttgatatttccatggcgatcgctacgaaaagaagaagtagaggcctgttctcagttttgtctaacatgtttcactcctcattgatgggcccttaataaattcatatttgggttaataacattacatgggctaacctaaaagcccagtaaagataacgttctatttggcaaaaaaagaagaagatagatagatcatagatgctgcatttaatgtacaacaaaaataaaaatcgtcaatcaaccactagatacacaaatagtacttcgtatagtatatgattccaaccaaaacggtgggaacaagagaaaaatattaaaataagaatcaataatgcaaagtttttccataatatccaatagattgaacagtgggaagttgtagattggaacgtatattccgagaggtcgttgtcgtgaaggagattggaaacctatgtagtggctgtggttttgcttcgtcgctcgc

SEQ ID NO: 37071 - DNA, 720 bp, Arabidopsis thaliana columbia
atcccgagctggagttgaagagaaagagaaattaccaaagcttgtattagaatctcgctcaggacaagacaggacatgacaagaggagcttacttaagttaactcaaccaaatatcaacaattactcaaaagatggacacgtcatatgttttttagtggaaaaacttgtcataatgaatgtacatttacttcgactttgttgagttaattgtttttggataaaaggtagcttagttgagtaattcgttgaaatgtcatatcaaattatatgcagactgaagaaacattactctatatatgagtttgaaattcatttacatttggaaaatgataagttgcatacacatacagatttgcgatgtactcaaaagagagtttgtgcaaaaatcaaaatgattgtgtgatcctcaattaacttgatcaagagaaaaaaaaagcagagaagcaaaacacatatatcattttttaaacaatcatttaagttaaatgggcgagacaacatcacagaataaaactatagtgggactgaaaagcccaacttaaaagcccataaacaatgatagaaactgcttgacccccaagtctcgagtgatcaaactccaacaacgtcaatgtctttttttttttggcaagccaggttataacctttaaaatgaaagggggaattccaaggggcaaaaccctattttgggttaacctgggcaaaaaaacttaaaccag

SEQ ID NO: 37072 - DNA, 567 bp, Arabidopsis thaliana columbia
ctcaaagcatataatatacaaaaacaagtctgaaataacctgaataggcagacaaatacattacacttgccttgttctatggtgatctcactggtttctttctttttaattttgtatctctctcagcaaaagcattgaactagcacagctccacatttcacctggaccataatatcgaacaatgcatgtcttttgtgtcccaaactcgttattcatgcctcattcttcccagagtttggatactcacaatcccaccaagaatccaacaagtaaatcatttgaatgtttgttaatcttttttttttcttttctcttttagaactttttttttttcctttttaagcttttagttttcatatttaggtgaacttaccaatagtttcgagttctgaagctgtcggtcgtccaaagcaaacacactagggttgctctgattcttgttatttatgttttattttcctttttcttgacttcctgttctcatttcaattgcggagacctcgctcacgctacggacttcaagctcaacctcctgctgctataaaaatgtacaagaaaaccaacaag

SEQ ID NO: 37073 - DNA, 569 bp, Arabidopsis thaliana columbia
tgaagcatcgaaacaaacatagtgacgcccaacagatagggatttccttccaaaaacaccctctgcaagtaaattattaacaaaacacatgatcacctcagctccaattaataggaaaaaataataatcacatctctctacctacttttagaattcatagttaagagtcgttagatgcacatcctagtatattattgaaaaatgaagccaactggaaggaccagaattacctttagttcgtcagattcaccatcaagcatgcttccatagctacggtgaatctggaaagactgatcaatctgctgaaacagctgccactttgtcatgcttatggggcttacttccagattaagtggcagctctgagaccgtctcattgattaaaatcaacttgtcccttagcaaccaaaactcattgaagaaaactgtagggtagtagtttattgtactaggttccaccagtaagtctgccaatatttaagtaaaggaaagagcagcgcgagaccatcacacctttagcatggcaaagtgaaatcctcataaattccattccaaagattaacagaaaag

SEQ ID NO: 37074 - DNA, 771 bp, Arabidopsis thaliana columbia
tatgtcaacgggcacacaccaagaagatatcaagagaaggaagttttttatgaatacttttgggatctctgcagtcaccatgggtgtcttgaataggccaatcgctcatccagttgagctcacgaacatttaccacagtgtgggggtgaaacaaggatgaattcaattccaggttcttaccacagttgccaaggatctcgtctccatgatctatggaaaacagaaaagcctggtgagaacaccagctacagctagaacaataaaaggaaggaagtggaaggtgcaccagtaaggaaaatagccttggcgacccgtgcaagcaaaataccgagtagccctgggaaaaaaggagaagaaaagaaagcaagataagactgaacacaagatgggatgggatgggatggaatggaagagtatccaatcctctcatgtatgagagatgatgaagggaccacctgttccagcaccgagttccagacacacaatgccatggaaatcagatgaggtgcaaatcttatgcagcacaaattctgataagaccagttgagctttccacacctgaaggaagagacagtggtcgtcagtcatggaaaaggcaagagatatatagatgaggcatacatacatacatacctgcagaccaacatgacggagatttgatgtgatagaatgctgaatagtgacagtaaacgatgggcctgctcgccaaaagtattaagtaacaaacatgattagtgtggtttgactcatgcatgagagatggaaaatcaa

SEQ ID NO: 37075 - DNA, 513 bp, Arabidopsis thaliana columbia
gtagtgtctttggaaccttactaaatttttatttaatttcatagcattttctatttagtatattgctgtattttttcgattccttgaagacatctttatttttattttcctgataaagagttctagaaaatgtttctgtgacttttataaagacaatttcgagggaaaaatattcaacggattacgtaaaaacacggaaaccacctactactacttgcaaagaaaatcaatcaaacataaaagtaaaatttcttcctctttcacaagttttcaactaagtagatgaccttagaccaagtatttcacatgcttttttacattatgaagacataaattaagcaacaataaaacttcaacatctgttttattttcttaatacactaattaacttatataacacatgacactccatttatatatttgcgttgcatcttctggaccttcttcacctttttaaaacataaaaataactttctcttccttacggaaaaaaatagttttttaaatcatttt

SEQ ID NO: 37076 - DNA, 560 bp, Arabidopsis thaliana columbia
ggtttaacacgataaatatgcatttaacacataatatataaaattttatcgcaatgaattagttaacacgttaattaaatagttatccagacaaatcacaaaatgttttatgcaatccggtgataaatagtatcatatctcatattttaccggagatcatgcagcttgaaaggacaattttctctgtatcttatcaaagaaatttgatcttaaaaataaatttctgaaagtgctctattatttagccatttatgagggtttacgtgactacaaggctataaattattgagttttaattgtaggttttggcaaaatggggaatggcaaatggatcttgtaacaacgtatagtgcggacgaacgacttagttagaagcaaatggatgtatagtgttcagttagttgattaaaaattaaaattaatatttttcattctcgattagtttttactgtttttatatgtttttatgttataaatatttattattttagtatttatttttcttctcacattatattttgtatttattcgaaagtcaattcaaattaaaatataatgat

SEQ ID NO: 37077 - DNA, 786 bp, Arabidopsis thaliana columbia
caagacaaatttttagttactgtattttagataataattttcagtttatttggttttttaatttccagttatttaattttgagtctaattaaaataaaaaaatgatcatttattgttttctcaatacatttgatattatttactttctgaaaaaatgaggatacttacaaaagtttcaattatttattatgtacttatgatattactgttatcatcaccaaaatgagctaagccaaaagctttagtattactgtaaggaatcttccaccggtacggttgagtaagttgagtaaaccgggattactcaaaaagaaaaaaattgttgtcattggaacataagccccgttcagttagtccgatgaggaccaagtgaataactgtcgtgaatcgaacggccatgatgtcatcgacggagagacaacagaagctccacacacgcgtctcagcttatagaatctctccaccgcatgattctctcgttaccgaggccgcatctctgcgaaaagtggcccggggactttcctgggtcggaacttagacaagcccatgtgacccattcactttgtccaatgactattgttacttgttttcgttttcgactaaatatatacacaactgatattttgaaactaccgatgtgggacaaaccccccaaaaatataaacattcttctaaatctgaccaaaatatagtaatttagtaaaattcgactaaacagtctactcaaaactcattgctctgtgtatttattagtccacatgattattctctcatataagttaaatt

SEQ ID NO: 37078 - DNA, 1055 bp, Arabidopsis thaliana columbia
atgaattcctacagagatggaaactggttattagagccttaattttcaaacacagccacaaagagaacatcatagaaagttcagcttttatgaaaatagtgtgaaggtcagcttacttcgtccgccttcggtttgactgtcttgctcagttcttgtaggaaggatgtcacaacctttggggattttgctaggtttggctcgaccataatgtcagcataagaattacaccccatcatctgagagcaacaatagaaagctattacaataagtaagagaaatcttttaagacaggcaatatactacagagtatcataaatgaatatgtacaaacctgggaaagctgatggcgtgcagcaataagcttctcaagaactccgtgatttgcatgaggaacagagttcccttggatgtataccatttttctaacctgaaaatagagatattcaattacattagtcagcagaaaatggatttaggtgtacaatctatgcaacttcaaagcacatttccctgtttttgaacaccaccactctagggtacttgtttataaaacgcttgtaagttaccaatgaaaaactgtttattctcccacctctatccctgaggttcgggtgtcagaaaaacgaaatagaaaaataggtcaagtaggcacctcttcgtctgatgtccattgcaaaatggaagaaacggttcgtggatcagtatttattcgaaaccctttctgtttcgacttatgcgctgatcttgtagaccctcttgagccccctgaagtggatcggtaggtagggttgagaagatgatgcagatgtcgagggatgcgtgatcctggaaatatatcaacatgtcctggatcatcagcaatattttcgctgaacctgaatatagatcataaggaagttagcactcacaacacaaagccccgttataatatcagacttttaatagaatcaatcgtgtgtattcatgggtactcactccctgcataactgaaatatgttggttgttaagttattcactttatctagcttctctgcaaagaataaaagaaactaata

SEQ ID NO: 37079 - DNA, 451 bp, Arabidopsis thaliana columbia
tggtaaattaaaatggtgccatattattaaattatgggtgctgctgtatcgtttcttcgccgcttctattgcagcttttgccggcaaataaggtgtaactattattacagtcatcatgattgtcattattatttttagcaatccttaaaatagtagtactaataaaataagctctttttaaatataaaatagaataaccattattattcctatccctataaagaataacaaacactattgctaccaaagcactactactactagtaggaatagtacgcttttgcgaaatgtcaaatacaccctttttatgcgtcaatgattgttgtgaatccaatcttttacatagttaaagttttggatgaaattatgaatattaacagtaatttctaatttgcagtgagattatgcatgctatgtggaaccacagaagtttaagtacatttacttgatg

SEQ ID NO: 37080 - DNA, 597 bp, Arabidopsis thaliana columbia
tgtagtttaagctattccattggagaacttcttggtttctttatgagtggtatcttagttcatcttgttggctccaaggttagcgaatcgtttgctgtgatctctctgtcattcatgattttttctctaatgagtttcacttttcggacattagggcgtgttcggcttgttaacattcacattcgcattagtatcggtagtcggggtcttgtttagtgagcctcgtgttcatggtttctctttcaaacaggtaattctattctctcttgaattcttttaccaacatgagattatttactcattgttgtatcatttctgttaaaccagaactttaccaatgcaatgaaagcgatgtggaggacaatcaagtgctcagatgtgtggcagccaagtctatatatgttcattacccgtgctcttggtttagacattaaagaaggtcttttctattggttcactgattcaaaagatggtcctttgtttgctcaggtaacccaaaacaagtagcttctatatttcaaaacccacaatatgttaaaacttttctggtttgtttcaggaacggttggttcatcgctcaattggtctatagggcga

SEQ ID NO: 37081 - DNA, 1638 bp, Arabidopsis thaliana columbia
ctctagcatcaatttcacagttgacaacagcacttcgaattttagcgctgatttcagataattcagtatgttatctttccccataatttttccagaaattacttttttttcctttagatgctatagtcttcttatttaagtgttctgaaatgttgttctttgtacagactgttgctgctgctttatatgacgagggtgcggttacagttgtgtatgctatcttggtcaactgcagctttatgtttgagaggtcgtcaaatatttatggtaaactactgtctattctgtgatttgattcaactcctctattgctgctaccatttgaatcttaactttagacgtgatgataagagatacttggaagagtttaaataacccagttgctggataaccgttttttatatttacccttttaataacctttttcttataggttcacgatgttttcagctacttttcctcaatcgtttgatgattataggtgacactcaactaattcttttgttttggacttagcagattatctggtggatgacgatcatggatgcagttctatttctgactttttgtctgaacgtaatcgtgagcaaagcttggtggacctgttaattccttcccttgtcctcttgatatcagtcctacaaagactacaggtctggtgctttatacattattagtttcttcatcatgtatcagcaacaaatgaaatgattatataaatttgattaaaatcttctctcaaaagccatagcttctgaaattctacctttatttactttgttgagactctataattgcgggcttatgcgtcttcattatcccctctggtcattgacattttctttgctgtctaaagggaactaaggagcagtacagaaacaccaaattgatgaaggcactcctaaggctacatcgggaagtcaggtgagttacttttgttttgttcttagtagtattaatgacatgtatgttaaatgaaaagttaagctttgagccatgatggcttgttttctttccagcccgaagctagctgcttgtgcagctgacttgtcctcccattatccagactctgctcttggctttggagcagtgtgccacctcattgtgtccgcccttgtctgctggccagtttatggatggattcctgggctattccacactcttctttcgggtgtccagacgtcctctgttcctgccttgggtccaaaggagacctgtagcttcctctgcattctagtatggaaatcttacacttccgctaattattttttacttggtgtttgtgatggcatgcactctttatatcattgtgagaaatttaacatatatttccagccgaatagatatgtctcatctgaacatttgtgatggaattttgttcatgtgtattgtagtcagttaatgtaaatggtatcaacgggaagatctccatttattgtcttaatactttattcttcatgtatttctcattgcaagagcgatattctccccgaagaaggagtctggttttggaagagtggcatgcccttattaagtggtctaagaaagttggcggttgggacattgatgggtccacaggaaggagaaacagatcaactggtatctggagcctggtccacttgaagttttatatgagtc

SEQ ID NO: 37082 - DNA, 508 bp, Arabidopsis thaliana columbia
tgcccatttttggaagggcttggctactgagatcgatggaagtaccggtttgttatttcccagtgagtgagatggtggtttggggagatttgcagtttcccctccaaaagaatagggaacagcttttgcagcgtcctgagaagaagtacccaactgcaattcaatttgccacaagatcaaaattcaaacggtcaacaaagatatatatagctccacaaatgttaccattctccagtttccggagagatctgggttgttttaaagtcacaaacgaatgaaaaactcattaagcttgtttacttcctatgttacggggtatatcaaggttcctcgcactcagaagccaaaacatgatgcaagatgcattaagaaaaaaaagacgagtactcaaagtacctcatcatgcatgcttctggaaagagaacccttaggcttcccaaactcatattggagtgcgttaccacgctacttgctgcttgtgttccacggatattccatttgcgctgag

SEQ ID NO: 37083 - DNA, 816 bp, Arabidopsis thaliana columbia
tatcactttttgaatattatttgaatcacgtatgttcattttcataaagtggtataactccaatattctagataaccgataggcttttaaatcaaatgttgaaggcttatataatatgctttaaaatcaatgtctgaaaagtcgtgtggcgtgtgtaacaagcacaatcacgagttcacgacccttttctttgacaatgaaatgaacttgctattttttcttatcacatttttttatatttttcgaatatcacatttttcattttataaagtgggtattctctagtaatttagatcactgtatgttcggatgaaaactcaacgataactaaaaattatattcagatgcatcggttcatcttttcgtagcgtgattagttctaatagggtcagatcactgaaccggatcaacccacttaaattgaaccagatagaaccactaacaaaagaacttattccagttatatccgaactagaaccgattcggaaaccgagccattactgatttggtgatttcaaaacgtaattagggtttataatttggtttactgagactaaataaatagaaagtgtcactgatgtgagaatagtttattcgcatttcgcctctctccaggagaatatacagaaaaaggtttaaaagaaacactgacagttagggctatggcggcggcgaatatacacgacgccgttgtttccgatgacctgaactatgaaatctgggctccaatcgcgaaaactacactaacggagaaaggactttgggatgttgtcgagaacggagtcccacggatcgatcgaaggttccagagttagc

SEQ ID NO: 37084 - DNA, 804 bp, Arabidopsis thaliana columbia
ctatcatctcaagatggtattataagactatttctatggttacaaaattgaaaagaaaacatagtaaaatactctgaacaacattaacacagatgtcaccaacaaatgaacgttcttcatagttttgagagtgtacccaaatgtcaatgtagttaagattcttctgactataagctacaagttccctcacatccttcccttccgtaacatcacacttagttccctactaagagaaaatggtttcatgatatcaatgcacataaagcaaaaaccttggaagaccacacgaatggaaaagaacagtaaaagaaggcggtacccacacatgctccccaaattcttccttaagactctgaacagcagtctcaactcgttcagctgcaagacaggaacagccataacagcaaaattctactgaagattggttctattacttgcttgcatgtttccttacagacacacaaactctagaaaaggagttcaagacaacaatggggacaggttctaacctgatctagagcaaatcacaacattgtcgcctgctttcagaaactctctagctaatgcatatcctatacctgaacaatcaataaatcaaaaaccactctttagagacacaatgagataaaaaaatatgttttttcccttctgaagattaaaaactcgagtcaattgacaaagacagagtgaatgaaacctttggttgagccagtgatcaatatgttatacggaggcgtcataggttctcttttccctgagatacgagcttccacgccgcagacgacggagtaaccgtgaggtttt

SEQ ID NO: 37085 - DNA, 513 bp, Arabidopsis thaliana columbia
  unsure (1)..(513): unsure at all n locations
cagctgacgtgggcgctggaaaagcctgtaaaaaatattctatagcaccgcttcagaattgtcccatccataatataacctgcagtgtataagattagtttgaacaaaatactccccccaaaaatatcagaggagaatatgctcagctttctatttaataacagttaatgctaaaccttttgcgcagagatctctaactgtaaacagaacagtatggatggtggtgaaaatagcagttaataaggagaatccaacggaaaaggtataaaaccatcgctttccagtttctgtttttactttttgcagattccttttaatattcaaccctttcaaagtcaaacaacgtactttcccttttcgaatcaaatactttccgtgatcttagatctgataaacaagttggtaatattttcttagaatcaaacatgagtaaccatttctgaatatttgacaattattacttaccatagttaaagactanacttactgctatatgaacgatcagaatatttg

SEQ ID NO: 37086 - DNA, 403 bp, Arabidopsis thaliana columbia
ggaacattagatctaaacatcagaaccattatagtccatatactattttgataaaaacaactcatatatttgcgaaaaaggagataataaagttttaaactgttaaaaaaaaaagtgatttttgatatcagaaataagtgacggagattggcttgatataaaaccaagaaaaaacgtattagtaccaaacaacaaaaatagattttaagggctacacgtttgatccaccaaaatcttttgtaaaaatgaaaagactagcttaattttttttgtaaattggtttacaatttaaatctgttagctaatcataataattttataatgattttttagtctaaatgtatgaagttgctttatgaaaaaagtttaactgtatgaaatttgtctttaaaagttaaagaga

SEQ ID NO: 37087 - DNA, 856 bp, Arabidopsis thaliana columbia
cgactctagatggcttcgggagatgagctaattagtacggtgatataatacaaacacacaaaattaattccaaaacattttccacgtcacactctttaacgacggatacgtgacgtgagagagcttctgagtaagtgccacgtaattaataaactttagtcatccaaacatctcaacggttcagaaactgtcacgtaatctgagaaatttaagcgcctctttacagccgtcgatttgggagaatcattaagctatcgtggcgagactttaataggccttggcgcattaatttaaagcccaatgaaacgtgcacgtcacagacaacagaaaatcaaagcgttgacagtgaatcggtgaagaagaagagtcttgagtcttgagtcttgagagaaaggaagaagaagcaatttcaatggagaagagaggggtgatcgacacatggattgataagcaccgttcgatctatacggcggctacacgtcatgcttttgtcgtctcgatccgtgacggatccgttgatctctcgtccttcagaacttggctggtactgtaattagtaattactgatgaaaacaaggcaaaatatgaaatctcactcgatgacttttaaacgacgttgtttccttgtaggggcaagattatctgttcgtgaggaggtttgtgccgtttgtagcgagtgtgttgatcagagcttgcaaagattccggcgagagttccgatatggaagtggtgcttggtggtatagcatcgttgaatgatgaaatagaatggtttaaaagagaaggatcgaaatgggatgttgatttctcgaccgttgtgcctcaaagagctaatcaagaatatggcaggttattga

SEQ ID NO: 37088 - DNA, 582 bp, Arabidopsis thaliana columbia
taattctatacgagaaatcacctggagagaatgtgcagaagctgttgtggaaacattcttggggattcctggctgtttatactggccagtagtggtagactttggagcatcttttgggagtccggcaattgctgaaccatttctctgcatggatcctcttccatcagattgaccaccattcgctaccaaagagtctgttgaactattcgagaccatatcaggctgaataacatatggaacataagtaggcgaagacgcagcactttcatacggagggtctgagtaatattgttggaatccaacaaaagaagaatcaacgcctattgaagctcctggtatgtaaggattgtagggattgtagggagactgtgcatatccataacttggtgtatagcagatatagggagcattttcattttgcccaccctgaagacccacagatgaatcataacctgaaaaaaggttccagaattttaggcaatttgcaaccacaaaagcaagagtgataagtaaatttcatgaaccagcctatcaacctgaagagtaataagcgggataatacatgctctggtcaatgacaaa

SEQ ID NO: 37089 - DNA, 883 bp, Arabidopsis thaliana columbia
  unsure (1)..(883): unsure at all n locations
ttaatctttaaattctgaaatgatatcatgattcatgtatctccacatttacaaaaataataactatatttattttgattttaaaaatatttaaacccccatctaatatattcattaatcaactgaagattgattacatagtggagagagatagaacactaatctgaattttacaaagaacacaatacataataaattgaaaaatgagttttaaacgatagttttacaccacaaccctcattcattaacaagtatgcataaatgctatacatttactatagaatctcacaagctttaatttgtttttcctcactttagttctttttattttgtttttttttgtttttaattgaggaactctatcgagagtacgatagttcctctgaaattaaatgagaatcgaactggagaactaagtaacataaccttacaaaatttaggtaacactactagctagcccaaaggtattggctctctgtatatctaagtttccatgtcttatgtgtaatctaaataatattttacatacaatctctagtgagagtaacaatatcaatagtttcattaacccatagttcatgaaatctccatcctcgtcccttgttaacaaaacggacctatggttacatacttacatatgagaaccatcagaagtcttgcgtattttctgcttgtcaacaacgatttgagttttactanaatggaatgaatccaaacaaaaaccaaaccanactacaacaatttgtttaatatctttctataaaaccataaaaaaaaaatcgaaccgaaaccagaccatatattttaagttcgtaattttcaacatcaccaacttctcctccaaatcaattaaatgcttttcggagactataaaacccttagt

SEQ ID NO: 37090 - DNA, 598 bp, Arabidopsis thaliana columbia
gatcccctcaatgatctagtatcataaatgttaccttctatagttaatagttcatgtactaagtactaaaacatgtgtagtatgaaaaaatacaacatccatgttgtaattaatttatagatagattcaagtatacgtacaacaataaattcttttgcagccgtaacgatttttttaattttgaatttttattgaataccagtaaattctgggccgaacccgtaatcccctcaggttcgaaaccacagcatgtaatattagtttcgtcccaagcgtcattcgaactggcgacctctaagattcgcctaaggtctttactaattgagctacaatggataataaaagaatctaaccttccaacaaaaagaaatagtattactaaagtcaataagaacaatctatagccaaagaaaaggtctatgggtgttgtggttataagaactaaacaaaagtcggtcaaataacattattgtcttctctattcgttcacggtcccgtaactgaactttgacgttggcagcctagttacttgattgatttctcatcatctaataaaaataataaaatgttgatacaaccttacataaatgtatcaaca

SEQ ID NO: 37091 - DNA, 531 bp, Arabidopsis thaliana columbia
tctttcttataaaaacatcattaattacaactaatacaaccaataaaaaaatatgatgtaaaatataattggttaaaaactattaaatacatttaatgtttgcatagaaaaatgaaaataacacttatattgaaaaaaatgaaaaacctttaaactacacttaattaggaacagaggaagtatgaatgttgacaacaaaagggaaaaactgaattgttacaacaattatgaagtattttaccttgttcatgatttcttatatattcatatcaatatttgttttcagtcacattcacggtaaaaaataacagaaagatttttatttatcttgtattggtttctcataaaaattttaatgtattgattatacttcaaaaggttaactaacaattgttttgtgtggacaaattttttaatctgcatttttctttggttgatataaaatattagatgtggaagctcgcaaccggatctgtagacctcggagaaatactatcgcgaattttgcggccatgcaggaaacgacgattg

SEQ ID NO: 37092 - DNA, 507 bp, Arabidopsis thaliana columbia
aagtagacgaaaatatgagttagtaacttgataaatgtaaaagaacttgatcgtaaaagtttctgatatcttgaatgtaacaatgcaacaatgaattggcaacatcgccaaattgataaacaggttttttaggcctacttatatgctgaagggtgtgaggttcagttcaattctcctacaaatagtaacatgtcgatgcagctatatggggtgtcaatccagtccactgttatcgctagcaatcaagacgtgtacagaaactattaagtcaagccagattataatgatggtgggtttctagtaacaatcctaggccaggattcaaacaaagaaaaataagaacgtaagagccctactcgatcattgggtcgagtagaaccaacaggtgacaaaattaagaaacctaaatgcaatcaacaggggatacaaataacaagtaaataaaagtgcaattaacagggggtacaaataaatctagtagaagttctaaggatggattcattgata

SEQ ID NO: 37093 - DNA, 475 bp, Arabidopsis thaliana columbia
caagttcatgtttgtttttttttgtgaacctccgtcggttgattacgtattaaccatatcggattcccaatcttgaaattaggttttagatcgactaaattataagccatctgcaagctttgagctcggctttcgggcggactgattttcacctgacgtcacagccgatttcttctgtctaagttcgggttagatgttaagtgcgagactgagctcggctttataaataaaagtattcggcgtgtactgggcgcgagacagtctctcggcttatgcccagtaggcctatgtataatttaaagagggagttctgggctctgtatcaaaaataagtgtggcggactcagcatattagttggtgagcgagatgctgggctcggcttactctccgtagagcatctgttcggcagatcgcgaaatacagggttcggcttatatttctggccgaaccagagcttaagtgcgagaaaactgg

SEQ ID NO: 37094 - DNA, 717 bp, Arabidopsis thaliana columbia
caaggtcaatatcatcatatcttatggaaagcatatagaggagcttctaagcggcgatgtcgtcaaaaacgaacatggattgcaaaaattgatgggatttacttagaaaaaaatagtggaccgcaaacacgtatgcatgattggtttaaaaattattttgtgttttttttttgtaaaaaattaatatgcatgtgttattaaatggatttaagccgttttaagtgatcttaagaaagtgtatttttagtgtattttctaatatctaactatacagacataaatctataacttttaactcaataatatacatatttataaccgtttatatgttgtttgatgtgatttaagtgagtgttgttgtctaatttttgtttagaatttatcatttttaacacacaattttttatttattttttgtcggccattttgattgataaagcccaaattgggcagattacagaaggtccaaagaggattacatatggaaattaataggccaggcccaaaactaaatcaaacagagaaataaaatacaattaaagtatagttgatttagggttggacacgtatatgatacgtggtcttcacattgccacgcgtcagatgcaagctccgccgttagttcgccggaaaccgctaaaaactccgatgagccacaccgatcagctctgaagcggtgaacgtcctctttccttctgtggatccaattccaaactg

SEQ ID NO: 37095 - DNA, 779 bp, Arabidopsis thaliana columbia
gataacatatgttagtcaattgtaatggatgatgactcaactcacatgtgtatgacgattaggctcgaccgaattgggtaggacttaaatgttggacctaagactcatcaacatttttgaaaaaagggaaattggcaaaactaaccaacaaaaacgttatatttgcaaaactaacacctgaaactatatgtggtgtaatttctgtaataattccaaacataaattctgttctttcagagaatttacaatacccaaatataaagcatggtatacataaagcgagcaacccgggaaagtttcgaagagtgatatagaccgacacggttagagtggcgaggcaagggtatccgatttttcgatttgggggtttcgcataatggcgacagggctggtgacggtgaagtcgagtaagcaacttccggttgtgcaatttgggggacggggactatataagcgtcgaatttgagtcgcggctagggaaaagcgagtacagttggttctatttgtggcggctcctatacgaacagcgaatttcaggaaacattggtggattagaagtgctccatcgacaaacgtggttgctcttatcaaattttagcaagtcggaggtatgagttgaaatattttgtctttgtcacaaatcattggttttagttctatgcatgcatctcagaaactcggatttgatgaactgtagtattgaaatttagtgattcccgaattgatttgtgtgtttaattctgtgattttttggttttagcagacatcaatcatttgtg

SEQ ID NO: 37096 - DNA, 400 bp, Arabidopsis thaliana columbia
ctcagtgtagatctttgagggattttctctttattgctaatatccttaaagatttaaaaatatcatttccaggtttttcggacatggtatcttgaccatgcgtcgggtctaagtctttcccttaggtttgagatgttttggccttagtgtgaagtttcttccgagctcggtacctcttatcggtttatagttgaacggctcatttcgcgcgagttagatcgtttacccgtagcgtttccgaggttcgcctcggggcggatatcctgaaagcactcgaggcgttgctaaggtcgggtcggaagattacttgtagggtcctcgaggtgttttcaaggctggctcgggatgattccttgatgcgattccaaggtacttgtcatcggcctggagtatgcgtcct

SEQ ID NO: 37097 - DNA, 510 bp, Arabidopsis thaliana columbia
  unsure (1)..(510): unsure at all n locations
ttaaactacaaaaaaatcaaaaactgtttcgtcgaagacgcagaacaattccgacgaaacataaactcagatcgaaagtgaaattttgattgaggctctatgcgagttcgagtcgttgcttaagtggaggaaattttgatcgagttcgtgttaaagggtaacaataagaggattttcgggtttctcgagttactgtttctagaaaaactcaaatggcggagatgaagaagagtagtcggcggtgaggagtttcggaagttaatgtatcatcgtcggcgacgacaattatgggtaagggtaagtttggtttaacttcgtttggggaatgagttgatacaaaatctaggtaaattttggagatttcaaatcagaaaatttcaattgacaatgggttttttgtgttttccgccaaaaaacagtagatttgagtataaaatttttggtgtacgtgtatatgaatatcaaggacatgtntagtttgtatttggatatagtgtacgtgttaagaac

SEQ ID NO: 37098 - DNA, 549 bp, Arabidopsis thaliana columbia
tgagcaatgcatctctgctctcgtaaattaattttcatatgctcgtttttatcatgaaaacctcttcttttcctatcaaaaacatacaattatagattcatatcattctgtgtaaatgtatagcatgtggcttagtttttttaatatgtgttaatttactatttattatttatatcatgatttctgtataaattgcatggttttaaatatgatcacagtttctttaaaataatcataacctgttacctcagtaagagccattgctatagattcatatcgtgatgtgtaaatgtgtagaatatggtttagttttttttaatatgtgttgatttactatttattatttatatcatgatttatgcaaaaattgcatggttttacatatgatcacagttctttatctgacaatccgtaacttgaagtcacgtatggcggtatgcattacaacatctggttatatgatgaaataagatgttgtttttaaggagcagatgggtacataatctatatttcactgttagtaacagtataaatacttttaatacatgt

SEQ ID NO: 37099 - DNA, 404 bp, Arabidopsis thaliana columbia
ataccctaaacctagcattttattatcttgatttacaaccaaccaacctgctatttgcttactttgcttcctttttatttttcttatactcttctaccttaatcttgatacttagctcactatgtgaacaaaagaattttgtggaattcgacccttaaatactatcgacggtctcttacatgagagagtggttttaaggcaatttgacctatattaaatttggcgccattgacaaagttcttaagagtcaccattaagcttagcttagatatttcgactagattcgcatatttcttttgatacatatgcgttccctgttgttcctctagtctgtgtatcaggtgtatgcctaggctcgcaagaagcactatatagatggaccacatctacttatatgtgcttga

SEQ ID NO: 37100 - DNA, 566 bp, Arabidopsis thaliana columbia
gaggatcgcatcgcctgatgataagtttatgttacttgtctcggggacctgttggaacaaggtcacacaagggacctgccatgttttggaacctaggcttgtggtatcgccagatcgcgaatgaaaccttcatttcttccttgtttaatatgtcatctttgatggtgaaggaaggagttagatatggttgtcgtaggtgagctctgatgaagtcgaagtgacgtgcttttaaggataagtttcactctcgactttttggaagcgtgatcacaaaaatggatttgccaacattcaggtgttgggctttaggtatcgtaagattacgaatgagttttaaattgcactggtagcgattggtttgcaaagagtgataataagtatcgaatggttggaaagagtaatattaagtatcgaactttcttttattctgatctcaaaatggttaagtacaaacgaggtacaaaacatgacgattctcaatgtagttggtacgagaggactgcttggtgttgattgatggttgaatggcaggtgagcagctaacgttctctgatggaggcatgatg

SEQ ID NO: 37101 - DNA, 564 bp, Arabidopsis thaliana columbia
agccttggcaagtgagtcaccaccgtaaaggtcatcgtaaatccctgtttttggaccccgtttcaacatattcatagcttcctggagtcgatctgttacacctcctcttgttcctcctgtaaaggctttctcttccttcactttgcctttgggtatgagtgtcactcgcaccagtgattcatatttcccaacgaggcttccttctttgacatttataggaccaggctctgtttccacgtctgctccatcagacatgccaacaatctcagccagctctcctcctagttgatccctgaagctcactctcactttcttcatcctcttagccactcccgcttctgatccggtcttctctttccttttccctaacataccaccagattctccattgcttaaaccatatcgattcagcaaggtattgtaagcaacaacagcttcctcatcagaagcatcaggaggtggaggaagcttaatctcagctggaggtggagggcgagaaaagagagcctcactgttctttctcagaaggtagattcttgtggaggcacaaatcgtaaggattga

SEQ ID NO: 37102 - DNA, 827 bp, Arabidopsis thaliana columbia
ggtaacacaacatttgaaatctgatttcacagtgggaattggtccaagaccagtccacttgtgactttttatttatttaccccacacattttcacatttatctacaatcataagggactttaaaaacatacacattacacacacacacacacaaaaacaaaaaatttaccatcaaaatcttggagtgtgtgacgtatgaacaaaacaagattgatactgtatgtagaaaagtctcgttatcaaacgatgtggaagcgtttatcaaacgctcaaggataagtctcgttgtttccatacctaaaaacggcaaccactgtatatagaaaagatgtaaacgtcaaaactgaagaagttagaaagacgagggtaaattagtaaaatagtcgagatcatattaaagtcctaacggtatatcacacaccgttgaattccagatccgaccagataagatcacgtcgaatcgaacggtcataaaatatccgagtagttgctgaagtatccagcggtttcgccacgtgtcccgaccatgtcgctcacacgttcgtatttctctattacaaaaaaaaggaaacgaatcaaaatgttttttgatcgtaaccgggaaaaaaaaaacgatttttcgcaacgaaactttccacaatcaacggatatagagagagatctctgcgaatcgtttaaatcgtcttctaatttcgtttcggtctcttcgtaaaggattcacctttgagtggttttgcgttccattttattaggtacgtcaagctcgaaactttcgattcattggctttcgtaaatgtgattaatctgggaattgagttgaatttaga

SEQ ID NO: 37103 - DNA, 106 bp, Arabidopsis thaliana columbia
aaaaaacccaaaaaaaaaaaaaaaaaaaaaaaaaaaaaaaaaaaaaaaaacattaaaaacaaaaaaataaacaaaaaaaaacaataacaattaccgagaaaaacca

SEQ ID NO: 37104 - DNA, 531 bp, Arabidopsis thaliana columbia
cggcataccggaaccagtatcagctggcgagaggccagccagcagcggcggctaggttaagaagacagagcaatcggcttttttgtcgcactttaagagagagaaaatgatgtttttaccaaattcaaaataatgttatgacagacttgttttatgttatcacagatttttgtaattttacaaaatatctgccgtttgatggcaagtttattttctaaaatataatgttttgtgttatgacagagttgttttatgttgtgacagataaatttatattatcataaatctattgtttgatagcaggtttaataaaaaagaaaataaattgctgaaatgaccttaccgatattttatgttatgacagatttatgatttgaaattcttatggtgaccgatgtacagctttttcatgattttatgtaattgaataatactaactgttatgacagtgttttgttaccttttagcttgctatgacagatttgctaaaattagttaccacagttatctcgcagagcaattaattttggg

SEQ ID NO: 37105 - DNA, 178 bp, Arabidopsis thaliana
aataaacacaaaagaaagaataaaaaaaaaaacaaaaaaaacaataaaaaaaaaaaaaaaaaaaaaaaaaaaaaaaaaaaacataaaaaaaacactgaaaaaattacatgtaaatacaaaacattaaaaaaaatcgcatcaatatacaaatgtatgccttgagtagtcccctaaacaa

SEQ ID NO: 37106 - DNA, 469 bp, Arabidopsis thaliana columbia
gaggatccccgtgattgcatcagttatgcgataatcaaccctacatgacggctgagttaaggaattttgtctaagttataggaatttcgagcataacccagacaacgtgatggttgagatattagaaaacggctgacttatttcctcgagacgactgagttatctttttctggctggctgggttatgaaggatggcttagttatgggatgatgttacggctgagttatgatcgagtgtcataagtcagccgttaagatttagattaccggataactcagtctaattacagctaacttagttgtaaaagattaattactataatagcacggagttacgaccgatttattaaacgttacggctgagttagttgagttacgacattacacggttgaatttctttggcgtttttttttgtttgtactactgtaatagtattcatattgcgactgacttatagatttgtacagt

SEQ ID NO: 37107 - DNA, 535 bp, Arabidopsis thaliana columbia
ccccatctgactttaatttgataaaatgatttatatttgataaaatgaaaagaaattgagtggtgggctagcacttaaaaaacatctaaattaatcacttctcataaatatttaatcataagattcttatgaatatattaacaatgttaagtaagatagttattatatgatacaaagtctttaagcaatgaaaactttgtttatttgtccccttgacacaaagcagtttttaattgtcactaaggccctgttcgtttgatcagtcagatggatcatctggatgaaaatgagttttgatgttcgtttggtgccaaaaacggttcattcaaatgatccatccaaatgaatcatctggatgaatttgaaaattaaggctaaattttcaaactcattcggctgaactaaattggatcatttggatggagatgattctgtcaaaaataacaaatgacataaatatcctaattatttcaattgattatttagatgtatttttagatacaaaataaatagactaaaccttattttacaatta

SEQ ID NO: 37108 - DNA, 119 bp, Arabidopsis thaliana columbia
gaaaagaaaaaggaaaaatatatgtgggaccatgtgaaactgttcagactccgaaattaccaatttgcctacattatgtttaattaagaaaatcgctaagagaaataaagcacgcacga

SEQ ID NO: 37109 - DNA, 439 bp, Arabidopsis thaliana columbia
atccaaaatatcacaagatgaatgcgacaaagtctcttagcgcgtctcgttcaatgacgagttgtgtgcgctaatcaccgctagcacccgcaaacagcagcgtttgcaggtggcagagggagaaccaatcaaaacattagtcactggtttaaattgcgttctaactctgtaagcctcacttcaattttggttttaggccccagtaaaagggatatactgttatgggtttgattcggtgagatatctgcgtcatcaaaatatgtatgataagttcaagaagggacacaattggacattattagcgttgacattaaagaaatacgcgtggaagattagcgatacaatcatacaagcagaagaagccattttctaatttaaaaacgattacacacctcatcagtcatcatcatcaacattcctaaacccattttttgtgata

SEQ ID NO: 37110 - DNA, 525 bp, Arabidopsis thaliana columbia
caactcgaactacaatccacaaatctcaatcgatggcgtcaacaatctcgttgccacaatggacggacgagcaacttgaagaactctttgcttttgactgaaatagacagtttggctttcttttgatataggaaggaatccacttttctagatagagagcaatgaaatagaatgtaaagccgtgacagagatgctgaaactactgacagaaattttcaaccaccaagggaatcaaatacccatcacgaccatacgtggaagtatggaagcgactctcctatttgaagttatttgttaggtagaccttaagctaccaaccatttgtttagtttactagtgtgagagacataagctatgcatacaaccattaattaacagcattagtcagaacaatggttactagttattgagatgatgatgacatttcaccttcgggttcccactgttctctcttcaactactgaaccatgtttcttgggacatgattttgggctcggacttttgaggcttttcagaatcgtgact

SEQ ID NO: 37111 - DNA, 549 bp, Arabidopsis thaliana columbia
agaagaaattgaggaagaagatgattgttgatttttaattgatctttcgattgattgtttacagagaaacaagcaacttaaatacaaggaaatagaaagaaaaatgggcttaacaataaccctaagacaaggcccacaaagccccgataaatctgatatgagtcctaacagatagaactaaaatatataaatacataaaacttgtaacactccgaccgcccccattagtcgactccatgtcctctctcgggcctatgggccacctgtccgacggtcagtacgctacgtcagggagattttaaagacttgttaccgatcctacaaatcaccacattatctttctccatgttttgtcctcaatcacatggtccgacaatcactttccggaaggtcacacatcctgagacattttgagctcaagcacgcttaactgtgtagttctctcaggacatttgaccaaaaagataagtgcacttaggtgacataggtgtcaaatcaattattttaaatctctctacatgcatcaccatattcttgaaaccatggtgt

SEQ ID NO: 37112 - DNA, 562 bp, Arabidopsis thaliana columbia
tgcgaggaaccgccaaacaaccaattaaaacaaggcaactattgcaagggaattgcgaggctccctagtaaatccctcgcaaagtcttcattagggtttttaaaaaactcaacaaacattcttaagtattattaatcatgtcttattcattttcaaattcattttctcctatttctagtaagactcttagcaaaagaaaaaacatgacaaaatattttaaataatttaggatttagggtaaatatgtgcaagggaagtgctacatacgacttgtaaatccctcacaaaaccctcgcaaaagagaaccaatttgaacaaatacaacaaaacactactcaaaatcattcggattcatttttttgaatcattaggaagttagttatctacattagaatctactttatcatcatatacttcgaatttgcattttcccaaatacatcaattatggtcttatgtttttctataacttgaataatgaatgtgtataatattttcaaaatgagatgttaatattgaacctatacaacatttttttgtgcatcccatataataaatttgta

SEQ ID NO: 37113 - DNA, 991 bp, Arabidopsis thaliana
caatatggtcttttctagctatatattactctagttggttaccaatggtgaaatgattgaattcgcttggattcaatttgatttcgatagtgttagtcagaagcttatgtggggtaaaaataataatattgaatcttcttagtagaacatctgacgaataagtttgagttttccaaatcatttaaatgaagtctagagtagtttatgatatctgtgagttggttgattttgttgtctaggttgatggaagtgggaagaagaagaaaggtggattttctgttggcaagaagaaattaaagacaaaactgacttccaactgcttaaagttaaaccgcttcagcaaatggagctagacaattgacaaggaacttcgttttttttcacttgtatgtaaaattgttcttcattgatcttcgtctttactttggagaaatcatgttgaagctagcttcttcttataggttaaactcttatgtatcactctctcttttgaatgcaagattttgctatctaaccggatcgggatcattgtggaatgtagctattgatgaagtgaaatgtgtatggttcctaattgcttctaaagttcaaattcagcatagattctgatttctctgagaaaaagtcaacttttaggtaaacaaaacaaagacacaagtatgtttataattggcataagactttcatggtgcattagtcagacccaagatcttttctagtttattagtacattccagtattccactaaacatattttgaagaaaaaaactgtcttttagaaagtcaaattatgtttgtcataatcaaaagtcttatacaaacagtgtcacacattacatggtacatttaaagttgaatcctaataggaaaaaatctcaaaggctttgagaggttatatcatcccatcaatgggtccttgcgagatattttatagatttcttctgatcagcctctctctctcgtcaaaatagtctcaaagtggaagccagtg

SEQ ID NO: 37114 - DNA, 313 bp, Arabidopsis thaliana columbia
tagagtcaaactttgtaatcaacgcctttgcctcgactttcgggtttgccaagagagcacttggattcaaccatgtgaaaggcgtacttggaaacgctgctatatttgccataagcgtggtcgctatgctacatcttcaccaagtggctactagtgaacatcatctgcagaagaaagaagacagattctacagaagccaacaaaggaaaacatacggaagagatcagtcttcagctgacagaagtttggatcacttggacgtaatgatggctcgtggttaagaccagagatcgagcttgtctacacgtgagaa

SEQ ID NO: 37115 - DNA, 295 bp, Arabidopsis thaliana columbia
aaaacgtttgaatcgtacattggtgtcaagtttatgatggggtacaatgattttggagagtgaatgcaaaaaacaaaccagatagttattatatacaagtgcctactagtatgaaatttttaaatccccaatcttacatattggtccgcaattgcgaatcatgaattaagtgtggattgatctagctttaatccgatccgcaatacactaggtaaccattcaaagtttaatagtggtatatgaattccatatcttttgatgggttaaaaaataaatcaatctcatactatagttc

SEQ ID NO: 37116 - DNA, 523 bp, Arabidopsis thaliana columbia
aagccagtttttaagaaataagtagaaaaatatcaaaccagacctagctgaaccaaaaattatacaaaatctagaccggattaaaccggctacccgacgaatatgcctagtaaaagtgtcgtcatcggaaaagaatcttttacatggctgaaaccgcaaatacgatcttcaagagagcaacataaaaatacttgtcaaataagtaaagaaaataagacactcaatatccacactcccaaaccatgaaaatatgaatagaaatctcaatgagccaatcagaggccagcaaagtccatctcattgtcccaagcggatatacatccgacaaaactcaacctcacaagtagactctcccttcttccgtaactattcgtccacgtgtccttccctctcaccacttaccttcaaaaccaacgcttcttttttagttccttggtccgaagcgtttacggatgagagaatcataaactcccacttggagctcaaaaagtgtaagagacaaccaacaaaaaacgattcatct

SEQ ID NO: 37117 - DNA, 392 bp, Arabidopsis thaliana columbia
tcaattacccgaaccagccacatggctgggaaataaagcacaactttgtctccagtggttaaatttgtcatgaccatttccccaggtgtgtcaacccaggttcgtccaaatattagattgtgaatcttagtgagaggcggcaccaaatccagaaccacaccatctttcttgagggttacacgcgttctgcaagccaatagaccggctgcatgagcttagatgaaagtataagacagaaaagctactaacatagtggttacatcacaatctttcgtatctctttcgttataacataagagtataagacagaacacagaatttagagaactatggaaaggaaagagtacatgaagcaaaaatttcttcctagagcctataccaaagtgagagag

SEQ ID NO: 37118 - DNA, 314 bp, Arabidopsis thaliana columbia
ttgtttgttatatgatataactttattaatccattgttttcattgtgaccaagaagaagaggtttgctagaatttcctcgttctcgctgcaatagtacttagtgattagttaattgataatcataaatcatatcaacattcacttctctcagactgctatcatttagtgaatcataatcactgctaatatagaaaaaatgggagacgagagaaagatgaaagttgtagctagcataagtcaaagtggtcctcttctaaaaagactataccaacgttaccattctatcgaacattgaaacatttatgctgcggtg

SEQ ID NO: 37119 - DNA, 557 bp, Arabidopsis thaliana columbia
tcgtagtggtaatacctccgccgatcatcttgctcctagcctccgctccatgccaagacccatcgcataagttagaacagatttagaacatatttcaaagctttcagagacaaaagcgagatcagatttagaacagatttctctggcgcataagttaaagtgggaaatcaagttgggttgaaattaccattccattacggaaccgcacataaacgtgcttcccattcaagcccttaatccttcaactatttgacgatcaccactttgtcactcttttatgttttttgatgtttagggttctgtgaaaaggatttattttgttttgatattttttgttttaagtcatatcataaccatatatacctctcaatagtttttggcgactatggattcccgaaattttttggcaaagattccgaacatagggaccctatgataagggtgatagagctaaaaacaaatataatgaaagtgggtaaaaatgcagcggtaacaaaaattactataatgattactctctatcctatattgagtctccgccttgcaaatagatttag

SEQ ID NO: 37120 - DNA, 393 bp, Arabidopsis thaliana columbia
cgccagtgtgctctaaagatcttttgatgaaccttcccatccgctgtcgctttcacgccgcggccgaacgtcgcacacttcgactcaattaacccaggtacctgcgctcgtttctgaaatatatgctagttcaaagccttatcctacttggtggtcagacctagaagactctcgtgttcttcgaaggcgaaagagctcaggcgaagtcgtccttgagcgccattattgcttcgtcgatgtccaagggcaccgattgagccaagctggacaaattgacaccgttattaaatatatcagtcaacagctctctcgtgctgtgtcagccctcgaatcaacaaatgccgatttccagaacatgttagctggtaatggagggtcacaggtggacgctgt

SEQ ID NO: 37121 - DNA, 514 bp, Arabidopsis thaliana columbia
gttgaagatctaaaaaggattataaagatattgtaaaattaaaaaaacatctgtaagttaaaaaaacatatacagttgtaaagtgccctaacaactaacaactctttcacgttatttacttttcgtggaacgtgactatatgacacgaatcttgtagactcaatttttctaacgttaatgactaattaaaacacgcactacataaaaatctagaagcgccatcttttctcactttttgacttggtaaaacaacacgcaccttgactagtaattattagcttaagttaaaatctgttacattcctgatcaggtaagatttattcagcttttatcctctatataatgactaattagattaatcataagttcagaatcaatcagtaaaacgaaaagctaatccaaaactctttaattatttgcaacaactgatcaatggctgtaacaagctcttcttctacttgtgatggtttcttcatcatcagccttattgttatcgtttcttcattgtttggga

SEQ ID NO: 37122 - DNA, 565 bp, Arabidopsis thaliana columbia
tttttttatctattaatatgggtcgacaaataaaacatacattacatggtcaattataatgacaaaaaaaaataccaaatcagaacaaaagcaatatgaatctttatattagttctttattaatgtatattgtgtaaatttcattttatatatgtaacaaaatgtgttattacttagaaagagatagctaaataatttgagagaaaaaaaaaaaggagagttaaatacacagtcaaacgtggacgcttatttatctcgttaaaaatccatagtttgcgcgaaaaaacaaggcttcaaaagttttcccatgttttaatattattgggagagtgagaaataaccgagaagaacaaatcaaatcaatagaaaaaaagtataaacaaaattcaaaactattcagtattgatatttgtttacattgaaaaaaaaattaacttaaaaaatatagtttacacaaaaaagaaaaaccaaaaaaagaattgttagagattttttcagagtagtgagaggaaaatggcgcagatgcagcgagaagaagtagagtccgcacgacggagaagaaaag

SEQ ID NO: 37123 - DNA, 508 bp, Arabidopsis thaliana columbia
  unsure (1)..(508): unsure at all n locations
tagtaacggccagccagtgtgccngaatccagacaatagatatgcccaccataggtatctgtagttggatcttttatttgatgagcctggtttataggtgtgtaataagaatcggcctatctactaaggtgaacaattgaactcgtttagaatgcatgtttaggttaaaaatctctcggcttctccggttattcttagctataagcatagggagtttctcggaacaccaccgattgttccataattagagtttgagtttaagaattgttcgataacaacatagctttcattagatctactaaccaataggttcctgagaataccatgttcctagctctttatttaatcatttacaaccaatcaatctgctgtctttttactttgttctcctttattttcaatcattccctactagcttaatctcggtatttaattcattgtgggacaaaagaactttgtagaaatcgatccttaaatactgcaattgatctcttatttgagagagtag

SEQ ID NO: 37124 - DNA, 186 bp, Arabidopsis thaliana columbia
ctctacccatcgaccagaagggctttcccggctttgagctcttctgtcctctgcctgacgatagcggaaagctccgtgcagaataaactacgaagcctgtgcaggcgcgaaggacagcgtgtgacctggaacgtctctacaacgaagaaaaggtccaatagctgccgaacaaaccacgcggtgtca

SEQ ID NO: 37125 - DNA, 539 bp, Arabidopsis thaliana columbia
tctgcgcatcttcgatgtggccttcaagccatctttttatgaaggccagtcgagagttctgatccaacctttgaaacctgtgcataaatccaaaaagttcagtggttgttgatttgtaaaccctaataacattttttatttatagaatcgatgttagagtttttagctctgacatatatacgattaggatagatgaaaataagtagttttacatactgatatggataaaaaaaaaaaaaaaccaattgctacttttgcaaaagaaaatctaggaagataaatcccaaatgatagcatgggtggattataaaagcaaaataaatgtttttcctaggctgaggtgttcaacaaggaacaaaaaaagagcaagaaaaatatttctgaaagattgtttgtcctaaatgaatgtacattataaaacttagtgtgaatatgtcagattatcattatatatagatgggcattgtgtcataccataagtcacttccacagtgcatcgatgcgaaatcaatggcatcgatattgtgattagctatgaa

SEQ ID NO: 37126 - DNA, 570 bp, Arabidopsis thaliana columbia
cagttcttgatgtagctttcgacgaagatgattcaccatcccctgtgcggaagatatccattgtctttaaaggtgagtcactgggaaggtccaaaaaattcagactggcattcaacttttcttcgagccaaaaaaagaaatgttaaactacaagttcataaatattaaactcgttacatttgtccaagatatattcaaaacagattgcaagttttgatttgtttaaagtttctcacctttactatctctcttgtcacagaggacgacaatctaagttctgaagagtcccattggatgaacaagaacaacaacttatgtagatcgattgtgtggcctgagagtaacacgagtctaaagcaacctgatgctgaacttacggagggtttcatggaagacgatgccgaattcaaaaatggtgaccacaagtacatctcagagataatgttggcatcagggcttctacgagatatcgactacagcatgataagcatccagctgcaccaagcacacctacctgatcaaccctgagccttttctttgtactggaacagaacaagacaagcaatgtga

SEQ ID NO: 37127 - DNA, 477 bp, Arabidopsis thaliana columbia
gtctgtaactaaattgaagttacgccttgacgtcttgatgggccttagtagtttgggcttagctacatctttttgcttttgtttaggatccatcgaataaagtctcagtaccgattctatttaattgttcggcaggatttagcggctaaatcggcggaatatctaaccatttaccttctctcttttttttttttcttttttttttttttttaactttatggtgacttaaaagaacaacatttcaaaaacaaaatcagtaaaataaaataccaattgtcggattaacatcaatagacaatttgatttaagtaaaagacaatgaaaatggctcggtgtaacatcaatataagccatatttaatcccgatttagatcaaggacacgtgaaaccagatgtccgaaaaaagaagaaatttgtctaacagagaagagttgtttaggtgtttcgacttctcccatgaactccaccgtactacta

SEQ ID NO: 37128 - DNA, 530 bp, Arabidopsis thaliana columbia
actcgctagtcttctctaatgtctttacatgtcaaggtacataacctattgcttactttgataccaaatttcacttagggctgctttaaatcttggtttaaaactggaaaaatctgatctttttcattttcagggacctgtttgtcaaacttgtggcgacataggttttgaagaagcacttgtcttttgtgactcttgtatgtttgagtctattcaccggtgagttcaattctcgatttcccctgtgcgtcgatcaaattgtgcctattaggtttctcctgtggtttgattgaattatgcatatacctatttctcttgttcttcagctattgcttagggataacaccgattccttttacggaatacataacttggatttgtgaggattgtgataacagtgagagtgattctgattgcaatgaagttgatcagactgttaagaagaagaagaagagtagaaatcaaccccttgtggttttagctgaggacaatgtgctccaggaacctttggaggggtctaagagagaaga

SEQ ID NO: 37129 - DNA, 574 bp, Arabidopsis thaliana columbia
ctctcaaataagagatcgtcgatagtatttaagggttgaattcctcaaagttcttttgttcacacaataaacttaagtgtgaagattaagctagataggtaataagtaaattaaaagaaagcaaattaagcaaatagcatattggttggttgtaacataagataataaaacgtcaggtttaggttattctcaggaaacatatgattagtagatctagaattagataggttgttatcgaaccgttctcgaactccaaccgtaattattgcataatcggtgatgtgtcgtgctactcacctaagtgaatagagcgatctaaacaaatttgataagttcacctaagtgaatagaccgatcttattcgagacgcctataaactttggcccatcaaatagtggttttggtaacaggtacctatggtgggtatacctattatctaatatcaagttccagttaattattctagaactagcattaagaataaccaaagatgaagaatcttactaataacctaggaaggggcaatctactaaatcatataaaccctagtgagaaccctaacctaacaagtaga

SEQ ID NO: 37130 - DNA, 286 bp, Arabidopsis thaliana columbia
ttaatttgtataatcattaggtttatttaagaataatagatagttgattgataataaatatttgatacatataattatgtagtataaatattatttgatatatcattatttatttatttattttattatcccccttaaaaaatttaatagtttgtctcatatgttaactatatcatatttgttatatatagcactcaactataactgtatttagatgtagcggtatttaatcgtaatcgttttaatcgtatatataacggttaaggttaagattaataataattta

SEQ ID NO: 37131 - DNA, 761 bp, Arabidopsis thaliana columbia
  unsure (1)..(761): unsure at all n locations
gtcttccttttgcttcttcctcgattgtgtagacgaagctcgatgacgatgcaagtgttttgacacgtgtatatgttttattggttaaaacacataagtgtgaacagcttcagattacaaaccgatcctgaattatttggttctgcttaataaaccggtttggtttagcattatgtgatccttgcgtcttaaggaaccggtatggtttacctttgtgtaaatttcctttttttagggtacaaaaaaatgcagaactttccttttctcggttaaaaaaaaaaggaaagtaaacaacgaacaccattacttaactttggagtgagtttctaatactgagttacttgagccgtaaccgtaagagatcattcatgcttgagagaatgtcaaaaaagattaacgagcttcttcgttactgtgaagagaactatattgagagaggaagtctcgaacttgcattacgatgtgctgtttcaatctgcaaagcgaatcctgacgctcctcaagcttatgcacacgtcgccgcttacagaatccttttgacggcagccaattatcgtacggtcacaggagagcctgactggtacgctgtgttgggaacaacaaacgcggatcctcaaagtctgtggtgaacgctattgataggcggtgcgaggagatcatagaggtgttggatggcgaaactggggtctcaaagctgtttcgagggtttatgatntggtcagacttggcgtatcggagttgatggacgaagataggagaag

SEQ ID NO: 37132 - DNA, 540 bp, Arabidopsis thaliana columbia
attattgcaagaagaacaaaaaacgaacagacgaaaaacgagcagataaataaaagttgttgataattgtaaaaaagacaaagaacgatcagaaagattaaagtagacctcattcccaaaacagagatcacatgagatattttcgggtttccattttcgaaggtcaaattccttctataagaagcttctctagctctacacagttcattcacatgcagctcacagagatatttggggaagcttacataatatagaaaagatatcagcataaaccttctaagataatcaagtttagtgtgtcgactatatttagctatttttataagtaatgcatttttctcatcgtttataacaataactccactttaatctactttaataaccatctttaataaatcagttttgatcaaatctataaatttttatgctaacaaattctgtgtgtaaattaaaactttactacaaaactttgtacacagttggatcattggacacttgatcatagtatatacataatacataatcacagtatatacgtat

SEQ ID NO: 37133 - DNA, 929 bp, Arabidopsis thaliana columbia
ttgcacggatctgtagcaaaattcgaaaatctaaatcctcctatataactcaactagaagaaattgaaaccctttttagtttgaatatatacagaactgaataaatgtccaaacttcaaattctgcttcagcaaacttcccagtttttgtgtcaaagtgacataataacgtttcactatgtaaataaaactctgttggagaccaaattactagcttattcattaaacgagttggaaaacctagctttgaagaaatagttaagaaacaaaaagatagatgcacgagcaatgcataccttctttcaaaagaatcgaccaaataaggtaactttggctggatacccgtggcttttcgaaaccatctactacctaaaagtactctgtcaacggcatataggagctgaatctctgcagcctttgccacaacactcaaaggaattccggaagtgccaatctcctccatggcttcttgaacctgcagtttgattaacacaagaagaaaaaccgtaaagtttttagaaactctataaccaccaccaataaacaaagcaaaaacattatcaatatctttttctgctaccctggttaaaatttattatctctacgtggaggcacccagcaagatgataggaatagcaactgacaaactctaccccggtagctcttgttgttgactataacaattacatgctcatgtttgttttgtcataacaagaatcaatatgtgtacctctggcggctctagcatgctatctcccatctcttccataacctctgaagctaaactatcgtcaacaacatcccgtcgtcgttgcacatgccgggtttggattaaagtatggaaatgttgatctacagactcttccagaatgttatcaagtacagctttatcaaagaagtatggggtataccgtgatgaccgttactaga

SEQ ID NO: 37134 - DNA, 573 bp, Arabidopsis thaliana columbia
agttattgtacatcaaatttgtgatttctatcaaacagaatgtcaaaaattgtctactcactatcactttatctattatgttccacataattttggtcttaagttgtaattataaatttaatccctctctttacagtttaatcgacctaatttacactgcccatgcatatgttaagtggaaattctatatttacttattttgaccaacaaaattaatgatctaaagaaatagatggaatcatactttgttgaaagaaatagcttaatggagtgtataatagagtgatgacaaaataatttgatcaagacatatgaatagtacttgtttgtattattcttctctcaaaattaattttgatttgtttatgtaagttgtagatgataaaaagaaaatatagttaaaacgaccagttagtaatataattttcttagtaataataaggatcattggattttttgggtaatataatgacaagaaaaggatttttgtttttgttgatagcactaagacaaattgtaaccagcatctccccacatcgttgtctcttgcataccccccaactttttgttttg

SEQ ID NO: 37135 - DNA, 680 bp, Arabidopsis thaliana columbia
catacaaagtatcattcccaaaaaaaaacgataaaaagataaaatatcggataatagctgttcgtttgtcctcgtcagcatagttccactaaaccagttatcgaaaactaaatttagattttagatacattttataattatccaaaaacaaagagaaaaaaaatgagaagtaaacaaaacaaaacctgggaaggataaggaggatgggcccgtctcaatcgcggagactatgcgcggctctcttgtcaatgtatatattgatgtgaacactttttaaatatttttacaaaacacttataaaaaaaacgaaaatgttgttttgtaaaaatattacaaaacaaaatccaaataaaatttaattatatactagtcagcaagcagaatcgtacagctgagattgaaagctctctgctaaaatgggccactaaaagtttattttttggctattggtgggtctcacttgttacactgacgttacggtgacactgaaggacaaccactgacgccagacaggcaacacctggcatatatgtggatttatacgctgacctggcagtgttgactccttgttttaaatgacacgtcatctgagtgtgagagagacagacgtcgcgtgaattttgcgggacttattttaactccctagaccgcgtgtgaagtgtacgcccggtgaatggtga

SEQ ID NO: 37136 - DNA, 120 bp, Arabidopsis thaliana columbia
gctctagagtaccaggatcccccttccaaaactacgagcctccgggacacaacccgtacttcggcgactatggtgacaagactgagcgcgtccgatcccaggaagcctctacggtgtagt

SEQ ID NO: 37137 - DNA, 609 bp, Arabidopsis thaliana columbia
ttggttttaaccagactgaattttcacatacaaataaacctgaacctgtttgtttcctaagtctagttctctaactttcaggtcttcttaaagtgggcatgaataaatcctaaggagatgcttcatgttaaatcctaagtttcttcttacttactgatacagaaaaactaggatctgtttcttcaatcacaaacaatcgatcaatcaaccaaaataacacttccgattaatattcaaggataacaatgagctccaatgttcataaaacaggggagactctagattcaccttgcaagaacattgttcttcacagaggatgaatcataatattcgaaacccagaaacctcaaagagaagaacaacaaacttcaacaactttcacgattatgataaaatgttcctgatccagcttcttttaaacgcaggcaatccactcgtttccatcttggccgttacttcatcttttaatcacagccctccacgtgtctctgctcccttattatttccatatcacttactaacttactccactcctcatcctcggtcttgtcttcttatgaactgagctcattttggatcatcgctttatagatgactttcttggggtga

SEQ ID NO: 37138 - DNA, 273 bp, Arabidopsis thaliana columbia
cgatgctatcagtgagtttttattaattattagtctccggtgtcatattttttctgtatgaaatgaaactattagtgttggtgttatgttatggcaggccacgattggtttgatttagatagcgtaacatgctggccattaacaattaaatattttcactcatatatacactaattgacaaaatagtaattttaagagataatattacacgtagttctaacaataagattagttgtggacgtcaatgtttgtaatacatttcagacgaaattt

SEQ ID NO: 37139 - DNA, 708 bp, Arabidopsis thaliana columbia
  unsure (1)..(708): unsure at all n locations
atatatatttttaaaaatcaacataaatgttctatttttcactaggattatatttgtcgatcaacttgggaaatgaggaagataatactttttgcaaacaagttttctgactttccatttaaaggtcagattcaatgtgaaaagcaactagctataataccatttaaccaatgatgtgtcaccacgtgtcaatattggcgtggcatagccagtcccatgtgccacgtcacgtggcagatcccatcgacgttggaatctattttgcttctccgaaagcaaatattcgcacatttaatgtacatctacacttaataaaagcttatttaaattaaaaatcaccccaaaaatttaatatatttacagtttcagtcccttaagtaatagacatcaaaacgtgcgattttacaaaacggaaaaatgataaggacttactttagagaaagagagacagataaggacttaaatgcaatatcttatcagatcgtgttgccgtcactttcctggaaagatacaagccattatactctaaaagaatataaacaaaaacaaatatattattcaacattggaatatatatactgtatgtaaaggcttccttagagaagtagaagaagagaagtatctggagagagagaggcgtgcgatttccgcatcgaagaaacagtacggagttttatccgntccgattctggtgagtntttttttttg

SEQ ID NO: 37140 - DNA, 840 bp, Arabidopsis thaliana columbia
taattatggactggcaaaaaagaaagcagtaagaaaaaaagaaaaaaaaaaaaaaaagtcaacgagagaggtttgacttacattaccgttcagaaagcaaagcaaagcgtggaggagacaaagaaaatagtagtcgttccaaatccctttaactttttacgttacccaataatacccaccaatatatatagaatcacaagtaggtttcatttacacacgtattcacatttagtaaaatatgatattcataataatattagttaaatttacatactataccacaagattaattacaatttatcttcattaggtttgaagtttcaggtccttgcccactttcagaagacaatcactgatcacctctggattattcagtttagtaatgagttgctattaacaaaaacagaaagaaaaaaaaaaaacttgcatctttctaattggtttctcttcaattagttgattttagagctatcaatatattccactacttggacgtaaacattcttctcatctccataaataaatactctcaaaatagcattttccgctattggaaggtatcaattcgatttatgtagattactattagtatccaattccttttcaatcaataattggatgaaaatagttttgtacccgtacgttaggtaattccattggtcatactaggataaaaaagaaagttatatgtaagattagtgaagcaacgaaacaaatagttatatgttctaccaatagcttttaaaacaaaaagacaacaagtaatgatatatactaaggttttaaaaagaaacaagaaccacccaaccaacattaaatttttattctttttacagattg

SEQ ID NO: 37141 - DNA, 562 bp, Arabidopsis thaliana
  unsure (1)..(562): unsure at all n locations
gttttgggctgttccggcgaggccgantatttggacaagtttggagttttgctggagctccacaagagatgtttttacaacaacaacatcatcatcagcaaccattgtttgttcatcagcaacagcaacaacaagctgcaatgggtgaagcttctgctgctagagttgggaattatcttccgggtcatcttaatttgcttgcttctttatccggtggatctcccgggtcggatcgaagagaggaagatccacgttaatggtttaagcccttttaggtttgagggcaaaatttggtatatatatttattatcttctcttctctattgttgtcattgtttctctatgtgtgtgttttagtgttgttagagattgatttggtttcagaatctctgcaagtgatttgagagttttcgttagctttaagtaagttaaagacggttgtttttgattagggttaaattagggtttaagaatctgttgtttttttggagggagatcgatttcttatcggatccaagattacttttaggaaaaaagggaaaatttcagaaaccacggtggt

SEQ ID NO: 37142 - DNA, 535 bp, Arabidopsis thaliana columbia
catgaaaagtaaaatatccaacaaaatcacacgcataaacattacttacgaatacgatagttattgtgtttatgcgtgtgattttcactttggtggagataacttctatagaagaggggagaatattatacagtattttggaaatatgttatagttttggagaaatcacaaatcaaagtttataattacattcagggagattttacaagattatagaaaaactttataagattttggaaaaactaatcatagaaattatacaaaattctctagtaatcatttaaaatctttgacatatctactttctatattttttaaaagtcattaaaattctttcaaaatcacaaaccaataacacccccttaatctttttttacaacaaatcctcctctgtttttatccaaatcctctctgtttttatccaaatcctcctctgtttttctctttcacttgattgaattctttttttagcagacattgcttcaatcgttagaaaatctatttttggcacacattttctttagaaatcttttgc

SEQ ID NO: 37143 - DNA, 367 bp, Arabidopsis thaliana columbia
ccccaataaaaaacaaaaaaaaaaaaaaaaaaaaaaaaaaaaaaaaaaaaaaatataagtataaatatatagaaaaaatataaatatatctatactggaatcatatgtgagcattggtattatatttaaaagaattgtataaaaagaacatactgacttttgattttctccttcatgattaaaatattttttgctagctttgttaatatcattagcatgtacaatgtgatttaacagggcaataccaaacctaagcaatcttggcaaaccagtaagtcaagattccaatagagttacgtaagatttgggtggattagcggatccacagaagcattaacgaccgccaacgcgcccggtgccttctcga

SEQ ID NO: 37144 - DNA, 605 bp, Arabidopsis thaliana columbia
cgtcaatttcactatccctctcttggccatcgtccttctccgtcgtgtaatcatatccttcgccgccgttgaaagaatccttgggtgaaagcgtttcggtggcgagatctttgatcgtgtgaaattagggagtcacgaactaaaaagtgaactcgattgattgaagattgttgtcacgagagaaggaaagcacatcagtgatcagtctcgcagggaaattgcaggtaaaaaaagaaagaagaagaagaagaagaagaagaagaagaagatcaaagatggtattttggtttttgatttctcaacgaagaagaagaaacgagagttggagtatttatcagcaaacgctccattgaaaaaaaaggaaattgtctcctttattatgttttgcgaagaaaaggaaattgatcaaggtaacaaaaagtcaaattaagttaccgttacaagaataaatatgtttcttctgtaatttatatgatgtttaaaatttagagcgattgttgaaagagatggaaacatcaacaaaacaagccttgtaaagtacacaaatctataaaagtcaacctagtcatctattagcataatgctcggaacagaatgaaaaatat

SEQ ID NO: 37145 - DNA, 439 bp, Arabidopsis thaliana columbia
acaagtcaacacaatgacaaaatcgatctacataaaattcacatccactggaggaagaagaaccatttagtgctccaaattaagcatgacaagcgagcttagcattactagatttagtaaaattactcggcaactcagtaaaaacagagtacgaccaccaacaaatttatagcagggcaaagtagcgattagcaatgattaaggtttatacatattttagcactcgccagtccatatctaatagcgtgaatctaggttttgcgtaaaattagagaagaagacgacaagcgaatgataacatagctagcaacaactatactattgcacttatggtttagtctttgagccaatcagaaggctctatttcgtactcactcgcagaaagagcagcgttgacgatgtgtgggcgattctgtgggtaaacccctttccaattcat

SEQ ID NO: 37146 - DNA, 479 bp, Arabidopsis thaliana columbia
caaatttgtaatgctcatactaaattcctccaagtcttataaacattagatattttatattttaggttttcaaaatatgtcatataaagaaaaatttgatatacatattgatcgtgcttcaaaaagacaccaaaagagcttctctctctcttaacctctcgtttcgccattatctcttacactgttactctctctctctcttcttcttcttcttcttcttctgcatctcatcgacatcatcctttcccatggctgatgcatacgagccttatcatgttcttcaacaaagccggcgagacaaacttcgtattccatctctcgattcccacttccactttcaccctcctcctcctccttcctccggcggcggaggtggcgtctttcctctcgctgattccgatttcctcgcagccggtgcgtttcactccaacaacaacaacaaccacatatctaagcctagctacagtaatttcatggga

SEQ ID NO: 37147 - DNA, 559 bp, Arabidopsis thaliana
tgttgacatggccattttgttgattcttttcgtcagtcatcgagtggttgttggggcaaaaggttgactatgtttctcctttctctgagttcgcgagctatgcggtcgatgttatcgttgaaaaggaggttctgattgcctgttgatcgagtttgcatacagcagaggtgtacctagatcaaaaagacaacaagaaaaacacacagttagcaaccgatttgaaaattgaaaaagaacttgatctaagcaagtttgaaatctcaaatgtaacacacaaacacccaattggcaacggcgccaaattgataataggtttttagtcaattatcctaaaccaccaatcatgtcgttgtagtattttaggtgtcaatccaaatgggtgtgatgctaacaatcaagttgtgatcagaagtcactaaatcaagccaagcaataacagattttggtgtgtctagcagtcctaagtgagcatgcagaaaacagaaaatcaagtagaaacaagaaaacactcgaccaacacagctcgatgcagctcaacacagggtgtggtcgagtgaca

SEQ ID NO: 37148 - DNA, 509 bp, Arabidopsis thaliana columbia
cgccagtgtatcatgtctgagtagtctgcttgttagggtaaatgtttctcactaggaattcatatggtttagtagattgcccccttgttaggttatttgtaagattcttcctctttagttgttcttaatgctagttctagagtaattaactagaacttgattacagataatagatatccccaccataggtatatgttactagaactactatttgatgagcctgttttataggggtgtaataaatcggcctatctactaaggtgaacttatcgaactcgtttagcatgcatgtttaggtataggatttcacggtacatcaagaggaatcttagctctaggcataatgagtatcacggaatatcactagctattgtgtaattagagtttgagtttaaggacggtttgataacaacctagctatccctagatctactaatcatttgttttctgagaattttctgagaataccctaaacctagcattttattatcttgatttacaaccaacca

SEQ ID NO: 37149 - DNA, 601 bp, Arabidopsis thaliana columbia
tgcggccttagcacataatctcttcggaccgagtaccaaaacatgttatattagtctctttcccatgaccggtactagaacttgtgatcttgaagatattacaagtgcttgttcttggagtgtaagatgtcgggctgctactatcactgcttcggctgctccaactatcgctccggaaagtgttttcgctggtagtacgtgacactgaacgtgtcgttatcgtgctcgttggaaaagagtgtggtaatagacggccgttgaggaaaagatgatcagcgggagaattttccgagaaggggtcttgtgatggagatgtgggagtcaatgatccaaactcgaagtctgatgatagtgacgtctccagggacgtctctggtttggtctcgccggagtttggggtagttttccggttatcctccatcttcaaaacgtttcttacttgtgtgtgaatgtgtttaactgtttattagttgtgtttttataggaacaaagttaaagctgtacacgtggcggaatgagtacggcagtcaaagacttgccagatcagtgtttgacttgtctgtgggggcataggaagaatgagatccaagttgaagtaatg

SEQ ID NO: 37150 - DNA, 544 bp, Arabidopsis thaliana columbia
caagcactggaacaagtgaacttgtctccgagaagtgcttctgtttcaagactctgtttctcttcttcatcgcaaacgcaaacgcctcaaatgtcaccgttatggcgaggaatgtcactacctacagatatcacactcacgaattcataacagattcacattcataagttctttttttcgatctgatctattctttttgcgtgaatagagaagatgatgacttagaaattcttttgtattcttttttccccttttctttttactgtaacagagcagcatttcgtttttttatttggtttcttgtttaacaagaaataacaaaagtaaaagtgttagattctttaggctttttggttttgacaaaagcctgtactagtagtagtaatacacacaagttattcaagattctctgattctcctccgtacattacattctttaggctttacttttgtggggctcacgtgggttatttgatcaatgggcttttaagatgcccattttacctagatgaagaaaaaggcccgttatattgctggccaacat

SEQ ID NO: 37151 - DNA, 479 bp, Arabidopsis thaliana columbia
tgctgagacaatagaataatgactaaaagataagaatgcacaaaggacacaataaaaagttctctaaacccaaactaaaattgtacacaagatgagttctgaaaaaaaattcattgacttcaataactaacttaaaccccacatgaatatctctaaaataccaaaaatccagaccaaaatccaaaaaagaacaaaacttttcacaactaatttcacaatgagcaggtataaactcgtttagatatcaatgaacaattaacaaaaccaataagcatgagaattctgtaagaagtccacataaaaactcaatcagataatcggataaactaaaattcaacacaattaactccaattgcgacctaaacgcatcaagatgagcttaacaacgatataacaaaagcgtagaggagatataattcgatgatcgacgaacaaccacttgagcgattcgagaaacttccaaaaatacttcaatcaaa

SEQ ID NO: 37152 - DNA, 557 bp, Arabidopsis thaliana columbia
aaaagagttatctaaaaaagcctgcgtgtcactagacgaataaacttactactattcacattgattccgattggatttggaacctaaaacactaaagagattaaaattttgaattcttcatcatgacgacgacgacgacgattcagtctcctctctctacacgttgaatttcaatcggcttcacgaaccttcaacctcgtgcggatcgaaattcgatcagtttgtagtaaccgacaagttccgaagatttttcatctgctggatttcgtcgatcagattgaaaccgagcttttcaatcaggtgacttggatatttctctacgttatgctcgatctgaagaattgggattcaaatctagtctcatagatcgattctgattaaactcgtggagatccaatctctatcactagttcgattggattgttgtttgttatcttcaaggcctctctgtgtttgtgagtgagatggtatatttgcatagctcaatctcggtctgcaattccgtcgacccaatgatcatgtctcactcctcacctaaatccagaaacacctgtaat

SEQ ID NO: 37153 - DNA, 599 bp, Arabidopsis thaliana columbia
ctaaattatcaagctgagagagagagagagagagctcacagatttggaaggctcgaggattgaagccatcctgatcggctcctcgagaagaagatgactggaatgcatcttcggtgacggaagtggagagagatctcagatgttcgataaacggagagtgaaaatccgacggaagaggtttggtggtgaccgtcgaatatgcttcttcagttcttcttcttcttcttctccgaataacaaacaccgttcaataatatctcacgcaacggaagacaaataaataaataaaagttgctcacaacaacaacaacgacaaaaaagaaaacaagtcgacgcttttttattttctctttaacctaaacattctcaatttaattcaaattataccctatgttgtttttcttattttcttaaaccctagtaattttctcttttgatttttgttaccatcactaatgtagaaagtaaaagcaatttgttattttatataggttatgaatttgtttgaacattttcaatttaaattaatttttctctttatttatatcaattttaatttattgccatatttatatccctttattattaaaagggaaata

SEQ ID NO: 37154 - DNA, 382 bp, Arabidopsis thaliana columbia
tagtattttatatatgacatcatatatatatatatattatatgtaaaagctttagtgtagtatgacttaatattgtttgtttttcttaagttaatattaattctggtagagtctcatttcaaatatgcttactacatgtaaaaaagtttatgttgtttttttattctaaacttattattgtttttctacttgtaactgttttagaaatatattgattgtaaagaaaaaattgttttttagatattatttttttaattacaaaattagtaaacctcactataaattaataattattaaaattatcgataaattaatatatttatgaatatatagagggtggaccttctaatattattaatttgtagaggttttatcgtaattg

SEQ ID NO: 37155 - DNA, 380 bp, Arabidopsis thaliana columbia
gtttgatgcgctctgatatgacttccatatgcaaaccatattgatgtcttacgttttgggaatgttcgttttcttaatctagtttttaacctccttagcagctgctacatgtatttagttttgatggacttctataagtgtttgaatagtgagttgcactttttactctatttgttgccagatacgtcaggtgttgcatgccatgagaagaggagaaaatctacgggttgaggtatgattttgaccctagtgattttcgacaatcctacctgttaatatcagttaatggatagaacacattccatttcctggtgaatctgttggcctgatgtgtgatcttcgttttttcaatttgaaaaggattacatggtgttcgatcc

SEQ ID NO: 37156 - DNA, 528 bp, Arabidopsis thaliana columbia
atattctctgaaagtctgttaatatttctctagaaagtctattaatttttaataaagaaaatatggggcttttacagggcaaggtacttaatggcccaaaaattaagaattgagcattttttaaaagggtttacaaagaaaggcattttatgtgaaagaaattgactaattacccctctaattcaactccatcaaaacttcttcttctccttctacccacacaatgcctttgaccaacgattttgatccgatgaacctaataagcgttctttggtaacatgtttcaaactctttcagcaagcaaattaatgtctttattcattgttttgtttacaatgtataatggattatcaactcctacaaacttggaagcacaaagcaaaagaaaggaaacatggttttgtcctcaaagagaggaacacaaatccaaaatgttatttgcaaagctttcttaaaaagaaaaaggagatacttcgtcaaatgtgacttagtcttgatgctactttgggttgggccgtcttatgcatt

SEQ ID NO: 37157 - DNA, 550 bp, Arabidopsis thaliana columbia
cccaacaagtttataatctgaaacatccacacaagcgtaatgagtcgatggtataatagagacatcaattgtttgcaaagccagaggtcgaaacgtataacctgggcatataagggcatacaaaacaatttcaaattgtcatttatcacaggaaagcctgagattcagagctaaagagaaggggaaaaaaaaaaaaaaaccacctaataaaagagagatgacaagcacacaacatgagacattcctcaaaaaaagttatgatcccacaatagtctatactccacatcatgtcctgtatttaacaatcacaaaacctcaaactaatctagaacttgaattctcaattgcaactaggcctgggcaaaatacccgaacctgaagaatcaaaccaaacccgacccaaaaaatccgattcgaatccgaacccaaaattttaaaatacccgaatggatcctaaacttcaaaacccaaaaaccagatccgaacctgaacccgatcaagtacccgaacatatccaaaatatatatataacaaataatttatcaataat

SEQ ID NO: 37158 - DNA, 585 bp, Arabidopsis thaliana columbia
  unsure (1)..(585): unsure at all n locations
gggatttagatgaattagtagatcgaaaacctcttaggattattcttagatttcttcatcttgattattcttatagctagttttagattgatcacctagaacttgatatgagataatcggtatgcccaccataggtacttgttgtttgaactattacagatgagcctaggcatttaagaaagaataggtaagcccatagaagggctctggtttagatactaggtgaaataatcaagcttgataataatgcatgctttagtataggatttctcggcttctccggttatcttagctctaagtatagagagtctcgcggaacaccaccggttactctaaaatcatagtttgggtttgagagcggtgcantaacaatcctaatattagctagatctacaatttatctatctctcgagacaattccttagacccgacgctttaatctacaccttgtttacttgcttatttgtcttttacattcatttactttgtctagcttatttaaaaacatcataagtctattgtgtgaacatagagaactcagtgaaattcgaccttaagtgctacgacgatctcttatttgaggga

SEQ ID NO: 37159 - DNA, 509 bp, Arabidopsis thaliana columbia
actcatttcctctatctctttctctgtttataacaaaatttactattttttaaattatgttttaaaatgtgattactttccaaactcactcttttgttaattattatgatttatcttcaaaaatttggctacttagtcaatattctcatgaatcaatacaaaatatccggttcaactatccccggtttggtgtaatcataaccgatgcaatcatatatttaatgaattaaaaaatagaagaagcgcaacgtttcagaaatcaaaaagccccaacgttccgattaatttcaaaaaactgaaataaatctcagccgttcattaacacgctcctttcaccctccgatcacatctcgtcttcttcacaacgtttcctttactctctctctccatctcttcccccgttgagacccaaatttcaaatttctctcttctctctctcactgactcagtgaattctcatcttctctcatcacccaaccaaatcaagcatgccgtttatctccgagact

SEQ ID NO: 37160 - DNA, 594 bp, Arabidopsis thaliana columbia
tactagttaggtcgtgaagcttctcggagaagccgtggtcgtcgggagcattggtcgggtagtcgagagtcgagttagtcgggtaataggtaagtagttccgcccttagtcttttattctttttagaatagtttcctaagttttattttcggtccgcggcttagatccatcgttagtacgcgttggagaaagcttaagtcggatcgagatgtaggcgatcaagggtagagtttgctcgttcatccaggccaaggtgagtttgggttaagtgtgttgcatgtggttacatgtagttcgtagaactcgtgtaaaccagattgattgttgtttgtttactttccgttcatagatctagaattgttgattgattgggttgtgtagtttagctcttagattggttctattagctaagtgtagaacataagaatagatctatgaaggattgcttatagtttttaactacttacttaagtagttatacaaagttgtgagaaatgcctaggaggttgcattgtgtctgtgtggggcaagtgctaaactattttggtaacggttatgattgcaaggttatcgggggatgcatgcaagttataa

SEQ ID NO: 37161 - DNA, 523 bp, Arabidopsis thaliana columbia
ttagaaagcaacatgactagtatctcctgtacgcttcaataattaaaaacaaaggagaaaacaaatggccggcgatacataccctcaacaccttcccgtaccatcccatccggcacgattcattttgcccaactggaactcgatttccctcaccagaacatctaacccatggttttcttcctgaacttgattctcgagtcaaccccttagccactgacctcccgtccaccagagttgctcgagccaccgcaaaacccttcagcctctccgtacggcagctgctctgagaaccgtaatctgccaaccaaagggaaattaggttttcttcaggtgggcactgcatttttcgtcacattacagtatccaaagcccaacttcaaatgttgtgatccaagccttatctagcaaatattcaggtctgttttaaactcctttttcccaatcttagtcaatctttctgttgtctgatgtattcaattgagctaggacatcaattcggacataacgcacatttgttactagt

SEQ ID NO: 37162 - DNA, 522 bp, Arabidopsis thaliana columbia
actcacaatcacggcaaagtctaacaagaaccttagcacctctatttataccatcgaggtctttggtcttctaggttagccttcgagatcttggatcactccaaatcttcgcgtaaatatctcctctccaaactgaactcatcctgttgtgatctccacgtcattcgtttatttggcggcatatccacgtcagcatcaattacttgatcttcactttagtcttctgaaacagcttccagcttgttccagcaaacagcactccttctggtttgtcctgacagagggtgcactaacaatctccccctgttttgatacaatttgtcaattcaagcaatcctgcaagaaacccctcaaagaaaactcacaagcacacatcaagtcatagagataataagcaccagaaataaccaatagagggtctcatcatagattgcataaataagtttttaagattcaaaacacattatccagtacttagaaacaaaaacctactaaaccaaaaggacatgattaacaaacaca

SEQ ID NO: 37163 - DNA, 308 bp, Arabidopsis thaliana columbia
taacggccgccagtgtgctctaaagtattgcagcttcaaattcaattgagtggctgcgtaccaggaactgcaccagtttccgatcgcctgtggcataatgatcttcttatacctcttcaccgccttgatcccgaacgtcatacgagagcaccgcaagcaatgacttcagatgtgctatgactctttagcaatctatagatatcctaatatctcgttatggagctaactttaactgataccctagcgacatccggagtagcgggttaacgatctatctaatcatattgcatgtgggatccatcctgtac

SEQ ID NO: 37164 - DNA, 391 bp, Arabidopsis thaliana columbia
gaactttagtgggagttatgtacatagaaaaataaacagctagaaaagccaagaagcattaaaaaaatcttagaaaagaaagtagagattagatggccaactattaacaaatgagccctcaacatacatagcagacacatagtcatttctctttacataatcacataatcatacagtctaaactaatttctctttacaaaatgataaaagatagattgaaagccatttcacctctgagtcattttgatatcaacaccaacatacacgctttctggacaagtgaaaaataagcacaacatataacaaaagctagcatgatcataagcaataactcatggagattcgaatatcacccggtagaaccttaaccagtgttattattatatctata

SEQ ID NO: 37165 - DNA, 507 bp, Arabidopsis thaliana columbia
tttatcttttaataaactttcaatatatctaaatgtttaataaactctaaataactataaatttatcttttaataaagtataatattaataatgttttaaaatttttaaagtaattagaattaatggaaatatattagataaagaaatgctagtaattaagaatattaattaattgataataattaataccaatgacattacttataaataagttttaagctgaatattggttgacaaaaaaaaagagttctaatctgaagattcattttattaaagtgttgcaaaaatgtatatgtagatttttaaaccaaaccaaaaaaatttaaaattattcatgagatcacggtggttttcaacatggctacgctttaacccaaaaacataggcttttacactaaaccaaaattttaaaattctaaaattcgtggttagctcaagctttaggctttcacgcaaattacacaagggaattatgacacacacgtgtacaaagctggaattgaggt

SEQ ID NO: 37166 - DNA, 545 bp, Arabidopsis thaliana columbia
ctacttaaaaatgtaaatatatatatggtttactattggtcatggtgtgaagagacatcttctcacatttattataagaaaaaataattgaaaacaaaaaaacatatcttgttaaagttggagtgttagaaatgattttgaggctctaggtaagtaactaatgctctctcgttaaagttggattgttagattcattagtaatcggttcttttcgctaaagatatattatcaaaatgttttacttttaattttctaacacaacaaaatttattactaaaattctctgtcaattaagttttatgaaaaaatttaaacaattaaataaatactatattaattaattattaaatcaaaatagcttaaaaatcctagattcttccctaattctcttgttctcccaaatctctcgagaagatgagttccatatactattttattatcttcttggttgttggtctaatctgctatgtggtttatcagatttagatctctagaattccaaatcctgagtttgaacttaaaacaaaaaaaaaatcctgagtttg

SEQ ID NO: 37167 - DNA, 519 bp, Arabidopsis thaliana columbia
aactcgacgtggtacggttaagattaccgttcggaattgatgacatttctgatattgacagatactgttaagattacctgagagatatggtatcccatatcttggtctgtggatttgcaatggactatatataagatcgtttttgtcactcagtacatttctgttcctaacggatcctgtgttactcatcatggtaaggccaaagcaaaaacaaaaaaagagtaacggtacaccattcatcgataacgttgtgttggactttgcagtgaattttctaatatgctttgacaacaaatattctttagatatgtaaaactttttttgaccaaacataaatatttagtgaaaatatatatatgtaaatttttgatttttatatgtatatctcagctaaaaaaatttgtggataaattgaaatgacagatgctctaaattgatattctgttaattaagctcacgtacggatcaagcaaccggatcccacagaaacgcaacacattcgtgattcgtcgcattaat

SEQ ID NO: 37168 - DNA, 595 bp, Arabidopsis thaliana columbia
aagttgatcaccttcttcaccaccggggaggtttgcatagaactccatgacaacctcttgcacataagagttgatctctgtaacagtagggagcagaccaacagtggagaggagttgtagagtactcgcaatgttgtttccatcaagaggaagaaaacgcatgtcgttgaatcatcgacccccgatgaccttgtagcgcccaagtccttctccagtaagaaagcagttactgtaaggagtctctgacggaaatttcagctcagggtacttacggtcacgagcagagagaagccgatggttctcttgataccgggatagaaagggaggcggaacaatctcggtaacatcaccatcttgcagatctgaagtctcaaggaaattttcttcggtctgtccagcagcagatgcagatcggttggacttcctgctagacaaccgttagagagcaggagcaggcgctttagatctggtctttgaagtagcatcagtatattgtgtctttcgctgaaacgctgtagagacctggacttggttttcttggcatcagatgcatggttcagcttgggaatgacatcagacagatggagcgatcagg

SEQ ID NO: 37169 - DNA, 567 bp, Arabidopsis thaliana columbia
  unsure (1)..(567): unsure at all n locations
gatgactggtttttgtgagtttcaacgccaaagtttacgcccaacttcattcgaccaaaaggatttcgacgagtgtgatctagctgtgaagatatttgaagaaatggattttccatccaacataatcttattggtcattcattaaggaatttaaagaagacaaattttggcgtaagtattttattgctagagctgacaaaccttacgaagataaaatacagtttttaccaactctattaagatatacacgcgatgatgaacttgtcagaaagaattcaacacaggtcatcattttgagagtccaagttctggttgttttccttatggtagtccaatgtctggcggttttccttacatgaatccttatgttgatggtaattcgtgggatacatccccaaatgctccataatggggtacttcccaagtgctgcagaatgggtactctttcaaatgggccacaatggagttcacaccaagtgttcacaattgagcatatcccaaatgcttagaaatgggattcatcacaaataatgcaaattggagttcacatcanatggtcgcagtggg

SEQ ID NO: 37170 - DNA, 455 bp, Arabidopsis thaliana columbia
ggtccctactttgcttaattcgagtaagcggtagtgttattgatttcatacaactaaggtccttttgtttgttgttttaaaattgaaattttgtttttatattatccgagttagccgctataacgagaaacaagcagacagatcaacggccaatttcttaagttaatattttttttagctaggtggcaccataacatatgacatactaataattttttgattacgacaacatgaagaatgaaggaaagattaatacaacgcacacaaatatttgaaaatttcataattttgtgcgatgcacttattttgcactataggattcacacttcatcgttatgtcttcttattggcgcctattctggtgtttgcttcagcctcatacctgaatttcttcatcttcctcgcagacctacttctaagacaactctctgaatagttcaaggcttcttgagaca

SEQ ID NO: 37171 - DNA, 380 bp, Arabidopsis thaliana columbia
gaggacccctatatcagaagacacaacatatattaactcagccataccgtatgattaactcagccacaacattataataactcagccgtaacctatatttcagaagacacaacagatattaactcagccatagcgtatgattaactcagccacgacattaccagtataactcagtcaacgatattggattagcttggccgaagacaaagttccatttcattgcaagctactacttgagccaaaaaaacgaattaaccctatacgctgagatagacatcagacacataatggattccagtagcaaacaattcatacaaacatgaagcaaactagtatcccagaagaagcctctgttcgttgatttttggggacattaagat

SEQ ID NO: 37172 - DNA, 565 bp, Arabidopsis thaliana columbia
gatcccctgagtatgtttatgaaaatgcctatacataggatagagagatggtgaaccactgcaagtaatgattgttttgttcaccaaattttttaagatattggagcaaagcaaaactatgaagttctgcttagagaaggtgaggttgaaagtctgaaagagataaagaaaggggttggtaagttttttattctttaaaaagtgtttcataacattaaaatcacgacaccgttgacctgaacttgtataaaactcggtccttatttatagtttttttttttttttggtctaaacaaatgaaatgtgtgtatctaaaagtgaagtaagtgaaacaaagccattaaatcatttgttagctccttttaacctcacactttgtaatcatttgcagtagctcaaacaaaacatgtaaccaaaaatggttgaaaaacctattataacacccgtcccgctatacaggccaaaatagcatgttattcatgcggtcttgccaaaacttttctttatttaaaattcaccaattgagacttactaacctagggaaaaaggggtgagtaaacaagtt

SEQ ID NO: 37173 - DNA, 536 bp, Arabidopsis thaliana columbia
cccatctctagtgtaacgttctacattgactcgagatatttctttcttaggaaaagagaattatgctaagcagggagaagtcttggagtataaaggggcaacgatgaaagaatacaattgccaacgtcttccaaggcatgaagagaagctcgacaatcacaccttgttatatcgagggcctaaagcctcacgtcaagcaaaaccgagacacaagttctttcacacaaatccccgagtagtacaggaagtgcttcaagaagtgacgcagagaacatcaatgtggggtaaaccatatccccgtgatagacgtgattacctagctgagagagattcaaggatcagtaatctaaggggaggcgagctgagtaaaaattttgatccacatggaacgaaatgacactgcagttgaagcgtgactatagatactaaaaactttattttaatttatgataactgtttgtacttaaaacatggtttgacaagacatgtcaatggaaattaatctcgggtaaacctttagcatggagtttgtgaca

SEQ ID NO: 37174 - DNA, 391 bp, Arabidopsis thaliana columbia
tccgagatttcctttgtttgtccttgtgatgatcaaacacattgagttttaggaaagagtttttttttttttttttttttcctccttttaggaaaaaattaggttgcaacaaatggcaatgtttaattgggccattactaaaaattaaccattaagtatgggggagggatttgattcccatgcaatttcattcattcaagacaacttaccccttaacttggtcattaataaaaggagtaaagcatccatgcccaaattggggggctttaattaggaaattttggaaacaaaagttttttttttttttccccgaaagggtctttccttaaaacttccaaaatgccggtcttacattgggattgcaccaggggacttccccttacattggaaa

SEQ ID NO: 37175 - DNA, 547 bp, Arabidopsis thaliana columbia
ttttgaaagtgaagagtcaagttataaaacttggcgattttgttgcacaaaaccttgaactgaaatagagttgttactatcgaaaatgtataggatgattttaagtaaagtaaaataaatcataaccaaagcttttcatgcaaattgttttttatattttgcaaacacatgtataattggaagatggggttggtgacctatctactctccatttccgaggcccaagcattaatatatgagaaatggtctctaatatattaatttttggactttatctaaaacgtttttttaaacggatgaagtacgaaaattaaaactataattaactagagtatgcttaattatacactgctgatatgattatgattgttgaacatatattttaacgaaatgttgcgacaaaaaaaacacaacaaaaaagataaagatacaaacgaaaagtaacgataaaaagatactaacggaaaaataaccatcatgttagtggaaagttatgatgaatagacatgaacaaaaaaagtaaccgtcaacattttaaccaaatgtt

SEQ ID NO: 37176 - DNA, 565 bp, Arabidopsis thaliana columbia
tgttttctatttatctcatctctttcggccaaaatccttcgatagtgtcgaattttaagtcgagtaaagtcacatccctatcaagtcgcatttgaacttgttccggtaagtgtctaaactaactttaattagattttttcgacatctaagttcaacagcaagtgattcccgtgactgaaaccgttttacgaaaactgtgatattgagggtttttatcgacaattattacggttgattttcgccgtcactgatttacatacgatggctgatttgttagatctattcgatttgatggccgagttactgtttgtttcacgactgatttatgtttatcaatgcatctgtgtctgaatttgttatatggtgtgtttgagttatggtttaccaatgcgtatgtggcaaagtttgttttatgttacgattgagttatggtttaacttacatctgtggctgagtttctgtgatattgtggctgagtttatcttatgtttggctgagttatggcttaaccttcatctgtgattgagttctgtgatgttgttgctgagtttttttttatgttttg

SEQ ID NO: 37177 - DNA, 453 bp, Arabidopsis thaliana columbia
tatatatatatatatatatatatatatatatatatatatatatatatattatttttacaaatatatgacagacacacacgcgcatataagaacgagactagagaaacccccacactcacgacacaatacataatacactatgagagcaagagtgaaactcaacacgcagatcaaatccagaaaaaataccaattccaaaccgcagagttctgacatttgcgtggtttcttcaggtccaaagatctcaatttcgcatcattgttgccacaagtatctcaaacctcagtccatcctcaaaatgcatacaacttctccgaagactaaaacttaaacaagatatctatgacggactaaaaatacacatctggcggcacaagagcatctacaagcagccatagaaggcgcctctagccaccaaactcatcgcgagcgacaagaaccatctcccacaag

SEQ ID NO: 37178 - DNA, 653 bp, Arabidopsis thaliana columbia
tgtctttgaaattgaatcttgttcagaaacgagtactttgggtagatcactttgaactaaaaaatgtatggtatattggttcgaaaataagcttactatacacaaattaaaagttcatgtgattctatgtttcttaagttagttccagataaatgtttcttaagttatggactgaaacttttttaaagaaaagaatcataatttagtatgggaaaaattgtatatgctacatttaataatgtgttacacttgattagtattgctacaaaaaataaaaattaccataaataataagaaagtatcagtggtaaatggtccacccttcttccccaccttgacattttttgcaaacgagactttttctcttactcattaatggagattcattctttttttttgggacaaaaatgacatattttctgcattttgtaaaaacagtaaaaaagtttgtgtcacattttagaagagaagcaattcacaaattaatattcgtaaggtgacatttataattaagcacaaagtgattttagatcgtaagattactacattgaaattatacaaaaacggtacatgaccaaagaagaaataaacataattagaatatatatatattgcacgactgagataaaagtacatgactggagaagaacata

SEQ ID NO: 37179 - DNA, 561 bp, Arabidopsis thaliana columbia
agtgatgggatctacaagtaattccactcaattgtccagatgcagagcctgcgcagatagaccctgagcttgaaagcgcctttatctgccacttgcatgaccattggttttgtataaggaaagtgaatggcgaatggtataactttgatagtctccttgctgccccgcaacatttatcgaagttctacctttctgcgttcttagactctctcaaaggcgcaggatggagtatcttcatagtgaaaggaaacttccctcaggaatgtcccatgtcgtcttcttctgaagcttccaatagtttcgggcagtggctttctcctgaagacgcagagagaataagaaagaacacgagctcaggttcttctgccagaaacaagagaagtaatgacaatgttaatcaacaaagacggaatcaggcattgtcacgtgaggaagtgcaggctttttcagagatggaagatgatgacttgaaggcagcaattgcagcaagtttgcttgatgcttctgctgctgaggccaatctcggagctgtgggcacttctgaaaaggaaactgagaaac

SEQ ID NO: 37180 - DNA, 524 bp, Arabidopsis thaliana columbia
gaaacttaatgtctcaaagtcaaataaaccttaatgtgtcatatgaactaccattatagatctatgttctctattagtatgtgagtctcattctcgttcgatagtcggcatgctatcctaggagattaaaaaaaaaacttatttaccgatcctataaattatcatgagatctttttatgtgttttatcctctgtttcattgtactggaaatcagtttccaatagatcaccaataattcaagcatgataaactctagagtttagtcggtaagtgttacgaaaacgataagtacaccaggcttggcccaaataggtagagaaagaggcagcggtctagaggcctagtcacattttttcctaaaaaatcttatgtttcaaagcccattttaataaaaatatttagactatagcccagtcttttaatatttagatccgcttttaaaaaatattagcaaaggtccaacatttttttgtgtataaatttgctcaaaaatatgaaaattttagtttaaatatatagtaaga

SEQ ID NO: 37181 - DNA, 407 bp, Arabidopsis thaliana columbia
gctaatttggtactgttaccaaattaaatctagtgtaagcttattttgttctatgcttagttccaattatttgttattttttttcactgttaatatgagcaaatgagtctaccaaatacagcaaaactacaaagagataaagttatagaaactgagccccaacaaacattacagaggtaatgctacattcagatacaaaaagctcatttaaccaacttggggaacctgacgaaatatatgattgccaaagatcctctctagtcgcacttcgagctatataagaaaagctctccaaacatggccaagcagcaaaacttatgattttattcaagttcaggctcttcatactttccattgcccatttccactctccacaggaataggattgacacaaaggaacttctgct

SEQ ID NO: 37182 - DNA, 322 bp, Arabidopsis thaliana columbia
cgttctcgccgacgcgtccggtcagatcgacgcgcgcgcctgggatggatttgacggctggctggaggcgtgcgagccgggctgcgtcgtcggaatcgagggcgaggtggtcgcttaccaggggcgccttcagctgcggatcgctcggctcgaaccgttggaggtcccgccagacgaatgggatcggttcgtgccctgctccccgtgggacgccgccgctctcgaagaggccctcgaggcggagatccgcgccattcgggaccgggcgctgcgagcggtcgtgcgccgtctgttggacggatcaacacgggtcggtcgggcg

SEQ ID NO: 37183 - DNA, 580 bp, Arabidopsis thaliana columbia
accagtagcaataacagtgtcggttcttcttctatgtatggtggtggtagggaagtccctatgttccattgtcatgacatgtctttcaaggtaagggatttgtctactttacatggtgttaatttagagattcatgattaaatcttaagaacgaccctttttgtttctggtttgaaggaggaagctccatttacaatctcggatctgtctgaagagaacatgttagattcaaactatggggatgaactgtcttctgaagaattcgtgttgcaggatctacaaagggcttcacaaaaggtcagttaccgatgatttagcttgtaaacttgcttcgcatcctagattttgtctgatagaatcttgtctttgctttctagttgactgatgagacacgcaaatgtttccgggatactttttaccgacttgcaaggagctcacaagataaatctgattcagtcagccccaactcggaagagctgcttatgcaaacgtctagatatgattatggtgatggaacaggtacatatcatatctttatgtctgatctacacttgaaaggaaatcacttggtgctcatagg

SEQ ID NO: 37184 - DNA, 559 bp, Arabidopsis thaliana columbia
gttacattatttagagaaaccaatcaattttgaataggaaactgcagagcgaaagagagagagacgaagcggtagggttttgtgtgcttttggagagaggaagaagtgtttttttagtggagcgggaaaaaacattttgtggcgctaatgttgaaatcataggcaaatagacgcaatgacttaaatacccttatcttattcgatccgagttttttgaaatttgccaaacaaaacaacttgggccactaaacccaatggccaacttttcggattaatgggcctaaggggtacatttggaaattcgcgtatatgagagtctagggttttcttcatatttaggtttctctatttctttcagacgctgggttcttgcttttgctgtttgttctcttgagtggaagaaagttgcagccactaaatcagatccgacaatggtaaagttttcttcgcctctcagttttattattctcaggaggattattgaagctaaatattatttgtctgattatctgtctcacgactaggattttagtaaagtttgcatgattgagctgaaagt

SEQ ID NO: 37185 - DNA, 418 bp, Arabidopsis thaliana columbia
ggaagacaaacgaggagatttcagaatgtgaacttatagttggccaaaactttggtccttattcaagacttcaagtccatgcaaattcactagcacgaatcctaaacaaattgggcaaacaacaataaaagcatccacattaatcagaaatgcctaaaaaaagcacatgatctcgataccatttcagtgccactttataaattgggccaacaactgttttctcgtatttttttctttctccttatgactattccatgaagcttgcaatgtgaagttacaattttcttcttaacatttttcactttgaaatgaaaatgaaaatgtccctactaatagaatgatgtcaaaagtttccacggtaagtctcgaaatccactgtttttgttttgttgtaaaaatacaagcccgttaatatgcg

SEQ ID NO: 37186 - DNA, 553 bp, Arabidopsis thaliana columbia
taactaatatttattaaaatacaaaatttttttttttttgagaaaccgtatctcactatggagatgccctaagcatctaagcctgaaattagtcgatgtttgttggcgattttgcattaatcgatgcacttttttgaaataatctggtcttaaagacgaaaatgctttttcccattgggacatgtgttcaaaactcatgcagtgtttgggaagcgcaaaggttttggtgggcatatcacagctggaacttgattctgtaggatttgtattccaagttcaagcatagggaaggttaaaagattatgactcttgtggtttcattattctcatttactgtctgataaagaaaactcttgagattcgtaaccgctggttcttcaatatatagaggcgcatcttcttattcacatcttcataccgagatacctataacctcagttactgctcttccttgcttttctcttactcgtttccttaacttaaaatggctaagagtgagaagattagcttgaaacttctcgttgatgagacaaaatacaaggttgttttggct

SEQ ID NO: 37187 - DNA, 325 bp, Arabidopsis thaliana columbia
ctctagatgatccctttatgtgaacttatttagaatgtcattagactaacattaattatgtaggaggtagagatttagaatcgtctaaatgcttgttttagagtgaggtatatcattacctaaaaagctcaaaatataaaataaataaatattgttagggatctatttgaactttataggacgttattaagatttaaacttataagatgtttaatatcataattgtttaggatcattatatgatatgtggactttgagacaatctgtattcttcagtggagttgtggtgggcaaaattttaaaattcaagatatggggagcaatt

SEQ ID NO: 37188 - DNA, 588 bp, Arabidopsis thaliana columbia
ttccaataaagcatctaaaattgcatttgaatatttaatcatagtcgtccctatcaataattgtcaccaacaaagataaagggtaaataagaaacatataatgaaaattgaatggtcgtagttttatatgttagttggaaccaaagattcttcaatctatcatccactcagagctacgtggacagtcgatattttgggttatataaaaaaaaacaaaattgtactataagacaaaagaaaacagtattaaaaaaaaaaaaatcaataacaagattatatcttatcccaatgaacaaaatgaaaatttagttattttgaataatgttacaggttttaattaaattatactatatcacaaacagcaagagtcagatacatcgaacggtccagctttcctcctttatttttttctggctatcgttttgatgcaaagttgtttcgttaatcgtgaaaattaaaaagctacagcaatcttctccgaaacttcatacactcgccgacaagagaaacttcatccactcggatttctcgtaacttgcagcactaaacatttcatgaaactattcgcgaaagtccacgaaccttgca

SEQ ID NO: 37189 - DNA, 585 bp, Arabidopsis thaliana columbia
tagaggataggatccccaatgatgaacattaaaactaaaacataacaaagatcaactcagaaacatatacatcaaaggcgatagaacaaaggacatcttaccaaaattcttcttcacacgaccttttgagttttatgctcaactatatcagtatcgcaatcaagggtggcagagagtcgagggtaagctatagcgtagactctttaacaagcctacgaataaaggaatttcacctccaaaaaacgtttcagtcaagctctgttcattgagttggactcggacatcaaaatgcagagttcctttaggagattatgttaaagaccaagtgtccaggttttgcagatttcccaatttttgtaaataactttctttgttttgccttttaaaattcaaaaccttaaaccatctcattcgaccttaatttgacacccttacatgtaactcctattaggaggaagcagatgattcaaatgaaaactacacgactcatgactaatggaaacacgtttctctgaaccgtgaatcatcttagatagatttaaagcaaaagacagagatgcaaagtcccgactgaatgttccagtg

SEQ ID NO: 37190 - DNA, 453 bp, Arabidopsis thaliana columbia
agctgatctgaaaataatttgctcactataattattttttcaacatatattgatttatgtaactaatagggtatctttcaatattgaagcatgaaaattgaattaattttacaaatagatctaaataagtcaaactattggatatgatcttatggtagactatatgtggatagtaaacataaatagtcgattttcatctacttttacctattcagcgtcattcttgtgagtccctggtgtaacatatgcagtataaatgataaacctaattagcatccaatacgcaataaatatttagattttctacacctacgcattacattacaatagagtaacaattaatatactaaatagcaatctcgaagtcatctacctgtaacaacttgttcaaattggatttgtacaacttgctctgttatgacccgtgtctttgccctcgagcaccggttctga

SEQ ID NO: 37191 - DNA, 512 bp, Arabidopsis thaliana columbia
ttcataactatacgtattcatgtacgtaaaatatttacctttcaatactataccggatacatagttagtagtgtgcttatattattccaaaaatcatgtcttatctcccgtttaggactcacaaatgattgaatgacttaattcttttctaaataattgatgctttttcaatcaagaacatgttcattagtgacactcaaatgtagaaaaggatacttaggttaaagatgactggaaaattacagttatacctttcatcggatttcttcatgtatatatatttaatttataatgtacgtacacaaaattatttaatggaacgtatatgtacgaatcctaataaatatctaaccacccacaacaacaaatttgatatatatgttagtttcatgtacttttttcatgtgttgttcatacatgatttgaatgttttgattttatggtcaaaaaaaatttgaaacgtaaatatacaaattatttagatatttacgtacatatatacacacattaca

SEQ ID NO: 37192 - DNA, 552 bp, Arabidopsis thaliana columbia
gacaaggtaaaaaattgaagcaaacaaagaacaaaatcatctttgcgaacaactgaacaagaagataacagcaaaaaggcagaaatatccatgaaagggattttgtacagaagcaaacctgcatcagagcttgaagctccctcctcaaccaggcttcaaggcaccggttcggctggagaaacttttgcagcttccaaaaccgtgcaacatcgaatacatcggcgaggaaacctggttaagaccacaaagagaccgagaaagagaagggaattcttgtaaaactttcattcttgattgataaacacatttgaatctactttctatcagtttattattccaaactaaatcgagtaacggattcccaactattgtaatggtattgaatattatgcgcaagtgtgttttgatctcaaagtaagtgcagagaagggaaaaacctgattcggtgtagtacactgcaacctgtatctctgttcttttgttaatacaaacctgaaaacaagaagatgaaagtagagtaagatatcacgaaattctcagaacacatatata

SEQ ID NO: 37193 - DNA, 501 bp, Arabidopsis thaliana columbia
acgactacttaacgactaacaaaaacggtcgctaaaaaacggtcgcaaaatagtcgcatattagcgaccgtttaatgacgacgtttgtatagtcgtaatacaacgactggtttgtgaccacggctagaagttgtaaatttcggactaaaatgcaacgaggcacaagtagtgacattttagggacgaatgtgacagtcttacattgcaaagattttagtcacaatttggtcacatgttttgtatcggtttggtcacaaattggtcttatcgtttgatatgtctataatttgcatgatttaggcattcattcttcaccactttgtcattgtttcatccacatttcattcattaggagtcgtattagtgtgatttacatacttaggacgattttgcattaggattgcatgtgcatggcatattaggttgtgttcaggtactatggatgcttttgaagttcagatagaggaaaaacagaacatgaagtcagaatgcccaatgacg

SEQ ID NO: 37194 - DNA, 350 bp, Arabidopsis thaliana columbia
ctctagagctggaagtcatctgtttcctgagcagatagtaaacctaacgctgttagtgtcttaagtaacttccagctaatcgattgctatgacttacttaggtatcatttcagcgtctttagtattgtccttagcgtaattcgatagccatcagtctactgtgtgatccgagagcttagtgaatttgatccctaagtgctgcaattgagctcattatttgagagagtggtcactaggattaacttgacgaatatcaaatttggcgacgttgccgaagtgtctcattgattcggcattagactaggtgtagaatatacacgaagtgtgagctttctggtgttactcacgcg

SEQ ID NO: 37195 - DNA, 575 bp, Arabidopsis thaliana columbia
ggataagtttcaaatctagactcctttctttaacgatatttgttcatggaaaaacatgtttttcaataatcgtgaaatcttcaattggctctaataccatttcaattttcaataatcgtgaaatcttcattaaagtgaaatgtgatacatgattaagcttaaatacaaagaaaacttaaccaaagatactaaccaaactaaaccataactaaaattatatatatacactctaataatgttaaaagattatagcatccacaattcaacaaaaatgttttacccccacccactatatcattgaattatggaccgtcgcactcttctccggtcgtggtgaaccggctttcaacagattaatgtgttttcgactataaggtatgcaaaaatttgctccatatgatcaaagtgaccaagcagattttgaatcagtattggtcctcggactagatatgtataccacacaactttaagccaggacttgaagactttctttaagagtttccaccctcgttatgccatattacccacatagcttcaatttatcttggagagaaaatactagtgtagcggttatg

SEQ ID NO: 37196 - DNA, 495 bp, Arabidopsis thaliana columbia
tgaacattataaaaagatcttaatagagaggaaagatgtatcaccactacattgaaacaacgagacgactatattaaaagattcgacacaaccaaattcacgatcatcgttaagaataagatctggagtggttttaattagtgttggcttttcagtgagaaatgtcacaaaatattatagttcgtctatgtggaatttgtaaaacaagaccgaattcaagttgtgaagtagaaaagctgtccgaattcaagttctgaagtagataaccgttgagaaaatgttatatttagacattttcagaccaaagtcaagttctgatgtagatttagagaacacaatgtcttaaatttgagataagataaaagagctaactagggaacacatgtctaaaaataacaagtggaaatccaacggttgattacagaagaaacagaaagggaactagagtttcaacacacaaagacctaacacaagccaacggttcaaatgaaaaag

SEQ ID NO: 37197 - DNA, 367 bp, Arabidopsis thaliana columbia
cagaacgcagatctgagtcgagtgaccaaagtctatactcaaatgctagagacagtccacaagattcggtctttctctaacggattctcaccattagcgtccgaaacccataccggaaccgctagacacagagggagcaaggatttatttttcctgagaaaatcttactcggaaaagactaaagtcgatcgacttctcagttaccaagaaaggagctcggagcgatgatagagactacgcgactaagatggaatcgtatcgatggaaccctagattacagagagcgggaaaaggcgagacgagtgtctagtaacgaagaagatgatactttatttcattttcctgtgtcaaaaatgatatttaagtt

SEQ ID NO: 37198 - DNA, 540 bp, Arabidopsis thaliana columbia
aattgttcaatttaaataaaaattagtttaatcttaataaattttagctatactttgcaaaattttgtataattttaatgaatatatctaaatattttttgatatctagtttatttacgatattcttgttattttttataaaactatagctaaactacgtttagtaacatttagctataattttaaaataaaaaaagaaaataaaatgacttagatatccagaaaatatgaaacattttttttcttgcgaaaaccgttccgaaaccgatcaaaatccgacacctatccaaaccgaaaccaaacggaatagtaaaaatccaaattcaaataaatccaaaccgaatccgaaccaaaatccgcatgtttaggcttatatagcggcgatgtctttttagcatggtcaatgcattatcatatttcaaactggtagttaacgtttagttcatgtataaaatggtcaaatgtgaagttgatgtataaaatggccacaatttgaaagttggagtattaaatgacaattttcctgtttcgattatagta

SEQ ID NO: 37199 - DNA, 437 bp, Arabidopsis thaliana columbia
tgcatgagtgaatgattagataaataaaaattatatttaaattaaacaatacaaaagaatccgaaaaaactgcgacgtatcgagagtgatcacctaatatatattatagttaatagaaaaacttccagaaaatataatagaaatacagttgaaccaaaccgaaccgggttaggtccgtacgatgaaatcggccagcaaaatcaaacaaaattatggaaatatataacaataataatatagaaaaatgtaaactaggaaaaaatgaaaatagcagaaataatggaaaggaatagctaacgggaaattttgactcttttcatcacactatatatattgacacacactcctttttgttattgcttcaaaaagaaaaaaaaagaataattgtaagctatgggcttcacaagtttgtactctctctatggaaaatccaaggt

SEQ ID NO: 37200 - DNA, 564 bp, Arabidopsis thaliana columbia
cccataagggaggtttatgagaggaagaggcttgctaccgaggagaagcgtgcggccgaggagaagcatctcgcggtagagaaaatcgctgctgagagtgcgaatgttggtcccaacgcgaccagggattgggaaggtgcccccaaggctgctgtgcctgccgcatctgagcacgctgaagctggtgacaccggcttgattttgacagatccgccggttgaagcagctaggcaagcaatcatcgtgcttctgaccaacgacaaggcctcacgaacgcgtccgcaggttgacgactccgaggagaagaagaggaagtagaagaagaagaaagcagcgaagagggaggagaagcctcctattttcgaggataaggctgcttcggcgaatctccgcgggaaatgtgcgggtcgctacttccgtctccaaacactctactggaatctagaaagtacgtcgagacggcgtacgattttctaagggtaagcgtgttactcattttggttctttggcgtgtttccgagctgttatttaatgtcgatgcttgctctatgttttaggacgttg

SEQ ID NO: 37201 - DNA, 945 bp, Arabidopsis thaliana columbia
taatatatataacacctattaagtagttaagtactggttaaagaaacctaaaataaaatcattaaacgaactaaataacatcagacaaatattctttacaaatatatgagatacgttaacgcttatatcttttcttttctttcttacatgttaacgtttatagtctgaaaagaggaagaaacaaaatgactaacgtgcgttaaggatgatctaatctaattgtatgtagagacatttaataaaattgggaataatcaatcaatgacttttaattataccttaaattgaatattaaattggaaattgaggaggcagtttttccaaaaaaaaacggtcaaaaaagaaacattgaccaagcctcttttagtattttgtttttcgctttcacttttattcttctttgtctttttactgagcgcaaaatatcccgttacggagctgtgaccttacactcatgtgacagccaaagcacggttgtggcgtggtgtaccttttttttttttcttttttttcttcttacagatatttttattttacatcgtggggcctcaaaacgaactttgaaaggacggtggatcgacggctctgatgtcttgtcagttttaagtattcaattatccatgtaaaccgatcccatccgaaccaaaaatcgaactgttatctaggggctactaggctcccatttccactgtgtaaacttggtttaatttctacatcacttggcccattaggcccattatagcttaataaaaataaaatatttggaatggacccagcagacttgttttgactgtccgatgatcgaaccaatagtcaatagagaaacatgtcaacgatccgacccgagaaaagcgggtcggattgaaaatacccgcaccgtcgggtttacgataggagagaccaagtggctctcatggcacaagcttctatgaggatttttcagta

SEQ ID NO: 37202 - DNA, 528 bp, Arabidopsis thaliana columbia
tccatgttaaactaatccttaataacagcaattctttcaacttatccatcacgttgctcgttggattaaattaaaattataacagtctgttgctacttatatttctggataaatcctttacaaaattagagaatatacaatcctgtcagcagatcccatccttaaaaaattagcaaaagaaatataaaatcagcgattaccttagataaaaaaaacatacgatttttgaattcatcctttaattttatctttaaggtaacaaaaaaaggaaaacataatcttaaaatcaccaaattggaaagaaatatggtgacataattgagaaaatatttacaacaaatattctgatgattcgatttgaccaaataatacagcacttttagtagatttatttaaatgtctcaattagtatttgtttatgaaaaaaaaacgaagaacgtgatggattaacaaaaattatctcctcacaaaggaatctttatttggtaggcagaatataaattatatcgtgggcataaagaaatggat

SEQ ID NO: 37203 - DNA, 568 bp, Arabidopsis thaliana columbia
gatgatggttctcgggttttttgacttgttatccctcattttgttcgtgtttgcagccggacgtttctgtctatcatagctggtgtcttagcaggaataattggattcaatggcttgattggttttgtattttactttgtggtgatgttgatcacatctgttgggctcatggctaaggcaggattctcagctgacttgtactttgattcgtggaatcgggttctttttgacggttttcttggtggccttatggtatatcttcatttccttttcttattacattgtttgttgcttcaagatacatgttgttgatccaacctgttaatctcatactaatcgcggtgttgttttctttttcgcagtcgtttgtgctgttctggacgtatccttaaactcaatttggtggtcatactcattttatgataatgtgcaaaactaaatcaaaggttgattagctttatggaaaaacatctatggtatggtgtaggtaaaaatgattagcttcttaagaacctgtgattaacatagaaatggcctttttgtttacttcgtgtagaatcaagtatat

SEQ ID NO: 37204 - DNA, 611 bp, Arabidopsis thaliana columbia
agcatgttggctgtgttattctcccagataagcctatggatgggaatccaccacttccggaatcattttattgtgaaatctgccgacttactcgagctgacccgtatgtgtttcaaggattttacttttcctgtctgagtttaagtttgatatgtgattgagtttccatctgagttcctccctcactgctttacgattctttcctgccataactgacaagatagacatatttatacatttgacatgctttgcattctagtttctttgcgtttgattgttcttcttcgtctagtactgttttcatagttgtcaattttctgtgatatagaaaaaactgccccgacactagcgacgttggatatcctatagcatgattattcacggttttcctacatggtttccttgttcagattttgggttacagtggcacatccactctctccagtgaggctgactgcaacgactatcccaaatgatgggtaagaattttatattcttgatattgctattgctttgaacgagtgtactttcagtgccattattgtgtgaattggtactttataagtcactttgactttaaattttctacttggaactggtataagacattc

SEQ ID NO: 37205 - DNA, 544 bp, Arabidopsis thaliana columbia
cgagatgggtgttcggaatctccacactccaccttgaaggggggtattgggccatatgggcgtcggtttaatcttacttagcccacaagctgttgttgtatcatagatattaggttaaacgaacatatgtgtatataagctgtttcagccgtatgaatacaagcaagaaaaccttttaccactttataggtttcttaacagtttttccgataatttttttataagtatgtaaatatcattgaggaattaaatgttgagtctttacaaaactagacctataaccacatgagttacatcaagtttgtgaatcttcatcgagttcttctatctctaatcgagttgcgaacaatatgatccacctttgaaggagttatcacatgttggttgggtatcatattatttatttgcttccagattccgtagacaactcacaacctcatgcataaccagcttcctgatgagagttggagatctttgtgatatgatgtccttttgccaagtgatcaagtcccccaaaagccaaatttcctcggcatcataccaa

SEQ ID NO: 37206 - DNA, 531 bp, Arabidopsis thaliana columbia
gcaggtcagactcatcccccgataaaaggcaaaaaataaaaaagaaaagaaagcaaaagcaaaatcaaaatcgatatatcagacaacgcctcgacctttctttctttttttccttctcatcgtctccgttgaacaacaccacacaaacaccagaagaacaccagataattcccatggtgaaccgagctcagatttgaaaattgaaggtcgtagagaatcataaggaaagagagaagtggtttgagatttcttttttgacggacgaaaacggagataagctttgggggaaatggcgacgcgttaccagattttgagacggcgagaggcggcggacgagtggcgtcttcttcaaccacggttcttccgagttctgtgtcttcttcttcttcttcatctcgtccgttgcctgtgcgaattcgttctcggatgacgcggaagagatttctccgatcctgattttcttgttctttcataaggcagtatgtagtgagcttgaagctcttcatagattggctcttgagtttgctactg

SEQ ID NO: 37207 - DNA, 396 bp, Arabidopsis thaliana columbia
atttatttcatatgtagaattattttaatttcaaaggtaaaaggtgactcttatgcgactaatgcgcgacaaaagtaagatttgttgacaaaaatgcgactacttattgacaccaatttgatttgttgagcttttatatttcgaagcccaaacccattaatataggtgacaaaaatgcgactacttagcgacacgaatatgatttgttgggcttttaaattttgaagcccaaacccattaagaaaggtgacaaaaatgcgactacttaccgacgccgatttgatttgttgggcttttaaatttcaaatcccaaacccatgtattataggtgacaaaaatgtgactacttagcgacatcaatttgaattgttgggcttttatatttcgaagcccaaa

SEQ ID NO: 37208 - DNA, 750 bp, Arabidopsis thaliana columbia
catgtctagacagttgctgcacccacatgcgacaggtgtctcggcgaatggcgtagcgacaggtgtctacgggtgtcatcagattgccccatcagcttcggctccaagactcagccaacttcggctccaaaactaagccgactttggctccaagattggtgacttgagccgcaaggcaccgcaagtgaggtgtccacacatgtcggttctgcaccctgcaggggaaatttctcccgcggcatgcccaacttttcccatctttgcccattcgtgcccattcttgcccatctttgccttttgccggtttggtactttctgggcacatgcggtcaattggccatgcattaaggcaactttttctcattcggtcctttggtcgtacccgatgcccttatgcgggtgactacattctcccctccttaatagaattcgtcctcgaattctaactcagtcatttctgacccccacgaattcttctgacatttttacaaaggtttttgaatctccttcatgtctacgttcatggcttgtttctcccttactcttagttccttcgttttttttatcacaaactaaaatcttcggccttactcttttaaggaagtctctcgccccttttccttctgtttctcttttatcttcttgtctgattatataattgtccgtactttagaccgaacttcccttcttttgcctgtttccctgaagtatgcttgttttagacttgtctcgatcccaactcaatttgat

SEQ ID NO: 37209 - DNA, 596 bp, Arabidopsis thaliana columbia
cctcgaaccggcgacctctaagctttgcgtaggatctttacgaattgagctaacgacacttggttctatccaaaaacattaacataactaaacttgattagaagacaaatatatgtaaatgaacttagaaaatcaagacgacttccaaaaaaaaaaaattaatgattttttggtcaagtttatagcaatacgacacattactggtgtgtttttatttatttacatacagtatatttccaggtttctgtcaaatatatttttcaaaactattgatacaaacagaaaaaaataaagagtttttgcatttactatttttttttaaatggttggcacacaaattgtcaatataaacatatatattgaaaaatgttttgtgtttttaacatcaattaaaatttgaagtagtagacaaatagatttccctttgaaacagttgaatctgccatacagtctaagcattatgaacgatgatatttgcttctgtgggttgtggttcaagtctagaaaatatttggcaaagggaatgtttttatttataggagtcaagcctctataatcgtgtctatcgtacaaatacccacaaagagaagattcat

SEQ ID NO: 37210 - DNA, 630 bp, Arabidopsis thaliana columbia
cgactggtttaaacgcggcggctgcggttgcggttgcgggagtttgcggaaacggacggttgcggtttcaaacgatatcaagcgttttcaacgactggttgagcgtttgataatgggtgcgtttgcgagagttttatgaccggtaaaccagcgggtacaatagtaattaaataaaaataaccaaaataaatataatatattactataaaaatgaattaaaattacaatatattatcatcgctcattgataatattagaaaagttgaacatgcttaataattaaaaccataaataaaactctaaattcaaaaataaataaattttgtaagaaaaaaacttaatcctttatgtatttggtacatcaccaaaaattgtatcaagtagtgtgatacaaatcgaaacatgcattcaatcaaaaaactcaaaagaatacaaaataaaaaaacaacgatacaatgaaatacttaaaaaattatactagctaacgaatggataagaagatagatgatacttaagtttgattattgattttgattttcatcagtttgggtgaatgtcataattgagagaataaggttacaatatattataatagtgattagggtggaagcaaaattattttaattaatt

SEQ ID NO: 37211 - DNA, 541 bp, Arabidopsis thaliana columbia
ttgtaaatgcataaatgtacgttgagaaaagtaatataatcatatatgttcatcttacaattgatgtaaaacaacatatgacatatcacattatttccgtgatcctgagatttagtaaaatgaaaacgacgtgatcagggaaatgttttatgattttaaatcgatagataattgttatgctcgtatgaccatctacataatttttatctttaatattttaatttaagagattggtgtgaagtaaaagaagaatattaagtgataacacctcgaggctctatataaacgagtccagccttacaaaattatatccgtgcacaaataagtgcacttacactgactaatctatcgtatttgctctaatcatgagtagcttcattttagcaacaacactccttatggctctgatatgcttcgtctctctcccgatttcaaccgttggattacaaaagaaaccgtggcctaagccgtcagaattagtggcaggccgccaccacggcaaaggctatagctgccttggagactccaagattggttgggg

SEQ ID NO: 37212 - DNA, 469 bp, Arabidopsis thaliana columbia
tcaagaacaacaacaattctctcctatttgggaaacctctaaagatacatatattcaccagagcacccttctcaacttcatttcagttggcactcttcagacgcgcaatgagctcatcctgcaaaaccagtcaagttccataatcaatcagtggaacaagagccacgataaacaaagaactggaagcaaccccatacgacagattctttaagatactattgagagtacaagactgagaagctgtaaacaattttaacagagttttcaaaaagaacagtagcatatattgtgacttgcctttcttccttttgttggaaggcacttctccttgagcatggcgcggacgttctcaacggtcaaagactgaaagtctgtttcacctgtgcgactgcttgatccttcatgtgcagaagaacttcattgtttacagtacaagtgacatacgatctggacaattatacaaatagaa

SEQ ID NO: 37213 - DNA, 505 bp, Arabidopsis thaliana columbia
tactctataagatacaaaactgcacactgtatcaagtaaccaaataccagttatcaattcgagctaaagcagaaacacaaaagattagctcaaaagtgaaattagggtttttttattcaaagagacaactaagtaataaactgaaaaaatataaaggtaagcaccgtcaattggaagagatcgtgagggcagagaccagacaagtaaagacgacacacatcacggtcgtagtatttgcgattcacctcctgaacgtcgccgtttcggttagctcccatgagcacatcaagctgcttccttatagcgtccatagtcgttctctctctctctctctctctctcgctctctcgctctctctctctctctctttcctcgtcctctctgcaaacagagatttggggttttttgatcgagagacaacacaatgataggaacaatggcattcggatgtaataagattttggtatatgagattaattgcatacaggtccctatatattaataa

SEQ ID NO: 37214 - DNA, 958 bp, Arabidopsis thaliana columbia
actctagaagatgcgttcatactagcactaatgcaccagatcccataagaactccgtagttaagcgtgcttaggcgagagtagtaataggatgggtgacctcccggaaagtcctcgtgttgcatccctccttttttcagtttttttttttttgttaaaaatgtatgactctaaaacttttagaccatgaggccaaacttggtatgtgatacctttttagaaaacccaaagagagctctccaatgaatgaggaaggaaactggaattcttctattgtttttttctactcctaatttcgaccttaatgtactatttttgggccttttcgtgatcttcacaatattacggggcgaaaattatatgttcggacattgttttcgaatattttgcatttatcaaagctcttataaacaagacagggtattcctacatagatggtggaaccacggcaaatggatcataaagtcgtcaaaaaagaatagatatgattgcattgcatgtagtaacagatgcgatcataccagcactaatgcaccagataccatcaaaactccgtagttaagcgtgcttggacgagagtagtactaggatggtgacctccaggaaagtcctcgtgttgcatccctctttttttttggtttttctctttttttttgttaaaaatgtataactctagaacttttagaccgtgaggccaaacttggcatgtgataccttttcggaaaacccaaagagatctccgatgaatgaggaaggaaaatggaattcttctattgtttttttttctactccaaattttgatcttaatgtactttttcatgcatttcgtgatctttgctatattacagggcaaaaatcatatgttcggacattgttttcgaatattttgcatgtatcaaacctcttataaataagatagggtattcctacatagctggtgggatccacggcaaatcgat

SEQ ID NO: 37215 - DNA, 378 bp, Arabidopsis thaliana columbia
atcagtctcctgggaccaggtaactagagtggctcccatcagggccagtggcattctgtgtgtgtacgtgtgtgtgtgcatgcatgctccatagactcatacccctgactggtccccggggctcctaaacaggtattgccccagatgtgtggcccctgcgataacagagtgtagcctgggtaacaacttagggatgatgacctccctgtaccccacacttccacagagagagccaagctgtgtgagaggaggccactctgcagttgctgtgtgttgataggtggtttatgtgagacccaccccaagaacccccatgtgatacacttagcctctggggcctagaactgtcagaaagtgggggaaaacaggaatggaatg

SEQ ID NO: 37216 - DNA, 380 bp, Arabidopsis thaliana columbia
  unsure (1)..(380): unsure at all n locations
gtatcaatagggattgattattgaactttttaaagatagtttgaataaactatagaaagatattttgaataaaaccattgaacttttttattaaggccagaatattaaaaccattgaaccttttacagatagtttgcctaaactatatatccctcgcccccataattaaacaaaggnanataaagatattttacattaatgttaattattttttcaggcaaaaatgttaaaacattaatgtgtattctaagatacattgaataacatagaccaccatctaggatttttaaatgactcacaatttagaaatcaatctaacattctccttttcttgtttgtcaaccatggtacctcattctaattacctttaaatagaggat

SEQ ID NO: 37217 - DNA, 594 bp, Arabidopsis thaliana columbia
tgaatgttaggtgtaaccggccgtttggaaataataagtccaaaaagtatccggccaaggagacttgaacccgggcagctccgagaagctcaccactgaccactaggtcacgcccaagtccttctcgctttgcgccaccgtcattaggctccttccctaaagtccactactcggcccgatcacttacttatccggcggaataacattcttacccctaaacctaatttttggcactcaagtataaatacttgttctaagccctaaccctaggtgtgccttcatcacaagcaaaccctagacgtcgccgagagctgcccactcgccgtcacacctattgaagcttgaagaacaccatctctctctttctctttctcgtttttgtgtaagactctttaaggtgaagctttgcctcttgtatctacattcaaggaagtaatctctaaaccctttttaagtttactcatctatttgttatggtttcacccaacttttgattagctccttttgccatgagcgagtagatctctagttgggtttgaggaggttcaaagggaaattcattgggactaatagatcgaaagtctaggttggcgg

SEQ ID NO: 37218 - DNA, 647 bp, Arabidopsis thaliana columbia
tcgactcatccccctcgatgggataactctgtatatatgtgaagcatcggcatcggacacggccaaaggaccggatgaaaattttttgcccgaatacaaaggcaatcgaccgcgtgtatccaaaaggtgccaaaacattaaagggcaagaacgggcaagaatgggctcgaatgggcaaagatggaaaaagttgggcgtgccgcggcgaagtttataccccgtcggctgcggaaccgacatgagtaggacacatcacacgcagttccttgcggctcaagtcaccaaccttggagccaaagtcaactgagtcttggagccgaagttgatggggcggtggagtgacacccgtcgccacctgtcaccacgccgtcgtccgagacacctgtcgcctgtgggcgcagcagctgtctggacatttggcagcgggcggtgctgcatgggcgaccttgggcggattataaacagagctctctccgcccagtttcatttttgaaggcaagagagagagactgaaaggctatacgattataaactcgaacgaaactaagaaaaactcgcctgaatcgattaaatcttgcccgtggtcgaggaaacattgtctgagactagaaaaaattgcatgtggttaagaaaacctcaccgtgagt

SEQ ID NO: 37219 - DNA, 471 bp, Arabidopsis thaliana columbia
cttccagtttatcagttttaattagataatgatattttaggaaattcgaaattaatgttattgaagattttctatcaaatgaatttttagatactttttatctaaacattttgtatcctttaacttaatgccatctgatttatgctttttccaatatattgattttaattaggtagagatattttcgtattttttaaataggtgtaattgtaaatttctatatcaaatttattggttataatttttaaattagtgttattgtagattatatatcacatttattgttcagagtctttaaattagagctatgacaggtaatatcagtcgagatcacttaggttggtagataactcacctcacttagacttgctttgacgtagtacatgcagattgcatgttgattgatatgaaactcaccgaattggattaacacccgaaatactacaatgacatgatagtgttagggaatga

SEQ ID NO: 37220 - DNA, 523 bp, Arabidopsis thaliana columbia
ctatttgttgccttacatataggaagtttgatagaagatttcgtttaaaaatattaataaagacaaataataattaaatctattattatcaattttctttttaaaataaatctgatgatgttttattttctaaaaacataatattttgacaaaaaataatatgttttttgtatattttcttttcataataagtttttagtacatttagaacatctaaggtatacaacaatatatatatatatatatatatatatatatatataatacacccttccaacacatacatatttcttaattaaaaactcgcttcgatattttcaaacgctaccgtttccacatactcgtttctgcatacccgttttcaattccatacagtttaggtggtaatccggtgagtcatagccacgttattttcagttattgtgatatgttattccattattccggttttttccatctattttaaaatatttcaagatcatgatgtctaatgttttatactttgtaataattattaagttgt

SEQ ID NO: 37221 - DNA, 749 bp, Arabidopsis thaliana columbia
tggcctttacgcaactttcatttgggcattataagaaagtattaagtactattacaattggtgtctttgagagaatagtcacatatcacctgaagaggtaaaaatgatctaaaaagagtaataaagagatgacgtagtacacaagcaagctctgtcttcttcttacattatcacttcgagagacacaccccacactctgccacactcgttcccccaaaaaattacttactactaccaaacaaaatttaacaacttgaaaagacaaaaaattaataaataattgatggttgtgtggcacagaagctataatctctgaaattaaatgcaacagagagaataagatttcatgcagttttctttaataagttcctttgcctaattagatatcacatgaaacattgtttttcttttgttcactaaattttctttggaacttgaatttgtcatatttttttgtttggccaaataatgtcatggacttttaaacaaatccacagcttgactttgtaaacacccaaattcgaatctcctttttgtaagatttgatcgtctttttgttaaaggattatatggtagattcttttagcaagagcttctcgatattgatgattggtcactcacttgcatgaccaaattaaaacaacgattaccaaaagcaaatcagattagagttttaattggatgatcatggaaatgcttattgtgtgtattttcatacaaactagtttattggtaaatccctataatta

SEQ ID NO: 37222 - DNA, 516 bp, Arabidopsis thaliana columbia
gggctcgtaagtcgtatctacaaagacatttaacaatttgatgagaaacaccttctacttgagccttaaacattatatattgtggtcatgctatgggatacagagaacactcgtcgatgagtggttaatagccttgaagacatcaaattcatcctttctagttgtatggtccctaaaaaatctccagatcagattaaaaataataataataataattgcatgccttagacttgatcggaatgagattgatgaaaaatttggagttctatacttcgaaggataatcacgcatttcataaaattagttgattatatgttcttcaattcaatcagagactccaactagatcgccattcgattaaggaccataatcaaatagtctctgatagagtctatgctggaattgaagtacatataatcaaccatagagatgagttggagatatacttacggagccttaggaagattgccactctaaaaatagatataagttcctagagtgggcatgtagtatgag

SEQ ID NO: 37223 - DNA, 350 bp, Arabidopsis thaliana columbia
tagtaacggtccgccagtgtgctctaaagtggtaggcggccccaggagggctttcgtctgacatctagcttgtaagaaagaaaggatatagcactggaacaggttgaggtgcttgaagtaatttgacctcacggtttgttcatatagacggaggaatcatgatcagacagtcaagaagggacctactgtctgccggttctcctggagccaactagactcctgtgctactccagcacctactggagtcgaatatctgccatgttgatgttacttgtagtccctaatttccggaagctgcgttcgaccgtagaaaagtaaaaatatcccatctcctgaaccaaaaactgggg

SEQ ID NO: 37224 - DNA, 664 bp, Arabidopsis thaliana columbia
  unsure (1)..(664): unsure at all n locations
tcccctttcaaaagcatagtgtgatagcatgatcaacaagcaaaacaaaagattgaatctatgaaagaggtttgaaaaacatacaaaactcccaatctctctagcttatttccttgattatacaaaccaaacacatgcactaaacagttctaatcagatcctgaccaccatgtaattctttgctagcccacacaacatcctagattccataccaaagcactcaactatatccactaggctatcatcgctgggtctcatcaatcaagttaatgtttaagaaccttctagactcattcctgtattataccatgacaaatcgaccattcattttcttcttctttttttggtattctttctctcccctacacttattcttttaagagaggaaacaaagggtaactcgcatactggattgacaccctcggcatttttccaacctttgtaattgatcattccaaataatgtataataatggggtcataaaaaacattcctaaccttatacactattcgaaaattctatcaatctctcatatttttattatatatttttttataaggggagaggaatactttcttttatcacattagctgacttatcaggtatgacaangcagtcagtctatgacactacccgtttgatgagggtaaaggagacagtgaga

SEQ ID NO: 37225 - DNA, 522 bp, Arabidopsis thaliana columbia
tatatatagatacactttctaataccaaacaaaatgtaaatataatacacctacaaattaggcttggaatgaagacaaacagttaaactacggattaagtgcggtgcggttcaaatactaactgaaatatatacatacaaaattatatgtaaatattttggttaatattcaataaccattacatgttagtgttatttaaacaatactaatcaataaccattacatgttatacatcattacaatttaatatttagtatatcaaggatgggaacccaacattcaccacactcaaagctcaacagaccaataaaaattaacaaacaatatatagttcttaataaataatataaagttctcatccttcataatacaatctgacttatcaaaacagtttaaattcgagggtcacatgtatagtttgatgatgaatgatatagctcaaattaatcctaagacaactctctcaaataagagatcaattgtagtactttagaccatgtacataggtgatacatttagagt

SEQ ID NO: 37226 - DNA, 172 bp, Arabidopsis thaliana columbia
ctctatcccggtaccgtaatataatactagttggctacgacacgtacatgtgcgtttattgcttgaagccaataaggacaaggtggacgtaataaagtgtgcttgttgttggatggatctgaatatgatgactcaactgtccaactctaatgttgttgctaaagacccaaat

SEQ ID NO: 37227 - DNA, 509 bp, Arabidopsis thaliana columbia
catatttatatttaagactttcatcataaaggttttcacttttcacttgttttggaccaaaacttttggtaattcacaacagtcaagtcaacatgtccgattcaatctataaccacaagaatatgatgtcttatttaggagaggtcaacattataatcaatctttaactttgccctacgcaaattcaactagaggaccagtagagacaggtatacacaattgccatttttcttagagcttttcctagttgaatattgtagcgaattattgacctttcaacgctatgtaactatatcgttacgatcccctaaaccgaacagtttaaactggcagtagttaaccgattaagcccctacagctgaaccgttgtacttgttgtagcatattataccatattgggaacagaacctacggataccgagtttaagagaaatgtgatatagttacgtctacctagaatccgaatttgtacggttcctagatcttggtttggtaattatattattaat

SEQ ID NO: 37228 - DNA, 556 bp, Arabidopsis thaliana columbia
tcacagaagaactactagcattcatttctcttcttttcttctttgttttaatgttaagattatattagcgaaacatattacaacctaaagctacccatatccataaaaaacgaatcgaatcgagaaagtttttcggcatacaacggataagtagtacaacaacggccctaagagctgccggcgttaaaggtgactattatataacaagattacaataagtgtataaatattaaaccgtctaactaataaggaaagaaataaatttaactgtgtttaacatttttgtctttcttggtaagcatcttcaagttagtatattttcccttttggcaaactaaatattcccaatttaattcttctttcctaaactttcatgatcatttaaatgttcatatctcgtgatctttgacaaccttccataaacacaaacctaatcaagctcaatatataaaatctcgcatatattagcttgattcaccttattccgacagaagctccaaaaaatcggttttggtataaaatctcattgaaacttttgctttgatattcaagtaag

SEQ ID NO: 37229 - DNA, 562 bp, Arabidopsis thaliana columbia
tctctttgacacacctgctcacaactggtgaatcatggtctccacgacttaaatctctaacttgttgatcccttggtgagtttctaccaacataatcatcgacacgtctagtacgtagaacctgtggtacacaaagattcccatcataatcatgtcttcttctctcatcggaatcattcacacaaccgaaagatctagaatctgaacttacaagcctagagctttcatcttggacatcagcaacactagacccaacttgtgacagaggggatgattcatatctatgagtctctctctctctaccatcttcactatgacgagatgcatcactacactcacgagagatcgattccaatcgtttagttttatcgttccttagcaacacattaatcttcccatgagatggagaatactcatcatcatgcgatgtgatgcatctagagggcttaggttcgtcgctcaatctcgatggatgatcatgcgatgtgatgcatctcgatgattccggatgacgtttgccggaatcattctgaagatgataatgtttcgtataacgttcatc

SEQ ID NO: 37230 - DNA, 699 bp, Arabidopsis thaliana columbia
gggtggtttaactgctaaacttaccaatcgcctgttagaggatgtctgctcatcgaaggaacataatgcgtcggggccaagtcatgacctttatagtttttaagagcttcatctgtgcaactgagaagccgagtgatatttccaggttggccgctctggcggaaactgtgcatgaagcccactgtttgccaatcgaaataagtcgtgcactcagtagaaaacagtgtgtgaatctttggataagttcctttgaattcatcaatgggtggcggctcgtgttggtctggcaggatatgtacacttcctggtgcaagcagtttaggccttgttaactccatgaaagttttgctcttcagaaagctcaagtatttggtccactttggttttggacacccattttctgcgtgacgcagtatgagtccctcgttcaatgtattcatgcattccaaactcaaaattagacctcttcgtttagacggatcaggttccattattttaacctaatcaacgaaaagtgtttcgtcagtaattgcacccattagagatatatgaaattgagtttagaacttgttaagctaacctctcttggatatggaggctcggggaagaggcgattgcagtcgtagactatattgtcttcgtggtggtccagtttagtgaaagaccagttcccaatggaaaaaggtaaaccataatgca

SEQ ID NO: 37231 - DNA, 469 bp, Arabidopsis thaliana columbia
atctaaaattcgttttctctttatcaattacaaggtgatacaattatgggggaatcttgcaccatattaacaaaaatggtagggtagatgaagccacactagatttttttttttttttttttttttgagcaaaccacacaagatgtaaaatagcacaaactttaagaatactgatttatgtccaccccttggtttcccctacaaatcatatccatacataatgtatgctacattggttacataattgagtgaaaagttaaaaacccattcatccgaatacatttactttccccatgtaactttttgaatgcaaactatcaaattagaaattgatcaccaatcaaattagaaaactcacaaatttgtgaagtattgattcattattttcttacgcctaagctaacggtaatttggaattaaaaaggtggacaaaggcacaaaactataccactcctaattatcaatataa

SEQ ID NO: 37232 - DNA, 343 bp, Arabidopsis thaliana columbia
atcatcgagggcttgatttaattgctcttctcatatttaaaggtagctaaaataaccttaacataaaacactgtaagtacttatagaaaccaaaaaaactctatgggtaacagtactagaagctgtttagcatgatcaccgtaagctccttcagaatattcagtgttttaagttcgcacttgtccttgtggtccctgactgcatgatctgttacaaagtttccggtttagctgcgtttttctgtgtcagtgctggagttgatctcctcgctggcgatggtggttaatccgggtgcgaggggacttggcgccttgcttgtgtgctttctttccgtcgccctgtt

SEQ ID NO: 37233 - DNA, 440 bp, Arabidopsis thaliana columbia
gggttaaatcttcactttgctaataattgtcctgtggattcgtagtttattgttaattaataataattataaactataaaatataaatataaaaaaaaaggaaacttttatatatattgatttaaaaaaataaattattccgtggtgaatagtgggttaaaatatagttaagagatatcaaaacagagagctatgaatcataccttttatagtctcatacgtttttggatttcccccttgagatttgtgatcatcgtcatgcttggacgcttccttgatacggattcatagtcaccattgtcttgttggtgatcatcgtggtcgtcttcggccatatcttcatagttgtctttggacgcctctcccgattcagatttgtctccctctttattgcctctgttggaagtttcgccgacttcaggtctcgctgtcagtgagat

SEQ ID NO: 37234 - DNA, 375 bp, Arabidopsis thaliana columbia
ccgtggtgtttatacatttatatccatactttaaaatcccatttgtaaacaaggatatgtattaaattttgaaagaaagttgttagataaaaaaaataaaaaaatatatacataacgagtatccaagaaataatatttacaacagtttcaattttaaaaaatcatagtatcgagcaatggatttaatcctatttatatggttgttaaaaagatctttgatatgtttgtaaccagcctgcgaaaagtcgttaaatccttctatgtatcaagaacgtgtttgtccatttctttgtatacgctcacgaatcttcccttttagaatgagagcctccatcgtgcttgtagcggcacgttttctttgtcttgtggcttttc

SEQ ID NO: 37235 - DNA, 427 bp, Arabidopsis thaliana columbia
  unsure (1)..(427): unsure at all n locations
acgaaaatagtggtgtactgggtcatcgatcgttcgtgactaaccaatatgtgagaaagtgaatctggtatcaggcctttgccactgctcaacgaggagaaagctattggcccngacgtgggcaattagaacctaaagggtttccataagctaaaggatcttgtctctgattgggctctttggatcaaactatgcacattaacttcctgcaactgaactgccagagactcctgccaaagcaagcaaatctgataacctctatctgangaaaactccatgtagatcccagtagctgtgtaaagtgttgaggagaacaaagnacgtcaacatagagattagccaagtacctaacggggtatatgtggaacagtacagatctcatgtgatgaaagttcttgagactcggaagataatgtttcagaaagaa

SEQ ID NO: 37236 - DNA, 527 bp, Arabidopsis thaliana columbia
tttaattttaatttttaacaaacaaaaaagatcttgacactgtgaataaaagacctagtgcttattgaatttgttatggtttcagattctatattgaacaacgggttagaaaattcacaacgatcttttgttcttcaaaatcccaaataaacaaatcatgtttttttgttactttttttctttcgtgtttaattattagagcactgtgatcaaataaaattgtttctattgtgtattcaagattctggttatttttcttacacattaatagatacatccatttgaatatctccatctcctctgtatcaatctcaaatctctggccactttattggctaaactctgtatatatacaatatgatgctgataagacccgatttggcttttctgctttctcattcctgttataaaccaaagccataaatttgtgttggatcaattttcttgtgaatcaaatgcgaaaggtaataaagtaccttagagggatcaatggttgtagtagaactcgaagaggtctcaatgacaga

SEQ ID NO: 37237 - DNA, 330 bp, Arabidopsis thaliana columbia
gatcttaacttagaatcttgtcctcactgccacggactgaaattagaacatcaatttaacatagatcttatccacatgagaacagtacatagttttggttttaacttcataataaataaaatatttgaaattttctcaccgggcatgttaaataaaaatccgattccggatccaaaaaaaaaaaaaaaaaaaaaaaaaaaaaaaaaaaagattttaggaaaatagagccatatttaccaaggggtgaaaaaaagaggaggctatattttatttaggatccccagtgtggcaacaagggtcagccccccacgtggacactgagaccgacgg

SEQ ID NO: 37238 - DNA, 496 bp, Arabidopsis thaliana columbia
gtttcgtaataccaagtttgttttgtttgatatttcaagtctttctcttagtagtaatagcatgttgtatttccagtatatcttttagtcgtagtaacacgaggtatttcttcgatttctcttaatgtagtattactaagtattttcagtatttcagtaaaaatcaatatcaatcatagaacatcctaatacattaataaatccaatcatagtatacaagtacttggaaaatctgaaaacaaagtcaaagtacaagaaatcaaaatacaaatccggagaagttacatgaatagctttcacattaaactagaacttgcacgggttaaatgggtcacttgcttggtaaaaacaggagcagcaggcttgtccttggatgttgcatcatcctcctctggtgggtttggtgggtccggagacatctgcaaaaaaaaaatttagttatacctagtattacgcggtattccaattatggtacagtatatccggtataactata

SEQ ID NO: 37239 - DNA, 515 bp, Arabidopsis thaliana columbia
gggtatataaacaaagatttaattactgaatgttagttagtgtataagaaatcacataattatcattctttttttttgtatggttaatcaacaaacgtacggcgccaattacgatacttactcatgatgtaacgactaactgatgttactattattgacgaggttcctttttagtttttaccgactagaaaatcaacacgagtgaatgtaaaataattttgttgaccgtttaaccatgcatataaattaaattttagttaactggttttttgaaacagaaacaaaaaaagtcttctaaatggataatgaaagtactaatgcattagagggaggaattaattaatatgtgcgttgttgtaattagaaacgtgtgattaaccttatatatataagtgtaatatagtatatataataaaaaacttgatatcataaaaatactgataggaggttatcatgcgtgtatttatatgtatgtacacagatatatatatatatatatatatatatatatatac

SEQ ID NO: 37240 - DNA, 519 bp, Arabidopsis thaliana columbia
tgatttaaatcaaaatttaactctaaagtgacaactaatttgaaacggagggaataatatatttcttttttcaccagaaaaaatgagtttatttggataactaagaaatttgaaatgttagatctatgatggtataaaagtttgcgacatatatgcatccatgttttagaaaattcattaatttattttttcaggttcatggtacaagatgttaaaaaataaaaataaataagttgataataataaactccaaaacaattcttatgtaatatatttatttatagtgataaattaaaattagaactttctaaaaaatatttccattcaaaatgttgaatgacattctcattgtcaatattagaggtgtcaaaatgggtcgttttattggtcatcccaattcaactcaactcatgaattttaatgaattgaaaattttgactcaaatgagttgatggttcacatgagttattgaatcacatgattagatggatcaaataagttgggttgcaatgggttaat

SEQ ID NO: 37241 - DNA, 963 bp, Arabidopsis thaliana columbia
gaggatcatcacaattgagtagaacagaaatcgacggtcgagtatatctgttgaggtcgagttcagctggtgaaatcaagtggacgagtaaactgttagttgacgctgaacaagatttacagggacggaaccacgaatcgatggtcgagtagatggtgcacttggttacggttgtgaggtggtcgagtcctgttgatgtactcgagtagttcttgaggctttgacggtgaacgagatggggaactcgaattgggaactcgactacagaattcgattgtggcactcgactgcagcggcgtagaggtggtcgagtacggcgagttgtgctcaggtgtctttgctcttcccggtcgagtgttgtggcgagaacgaagtactggtgaacggtagagtgaattggtcgagtatggcgacgaaatcgagtgaaatggtctgaatcgagtaactctttgggcaagtgagagatggcgatttgtgttgaagtagagaaataggagtgtcggtggagagatgaagagagatgggtcgagtagattttacttttggggagagtgagggcgaattcaaaaggtgtggtagagaatgattctgtgattctctctccatcttatcttcaggaacaaaacgcgtgtggtccatgccctgttgttttgtctttaagcttagttcctgttgactgggaaaacctcaggagaacttggaatcttctgtaagtctctgttagtcgagtatatggttgaatataaaggatctgaatcatcaatttcactcgactacagattctcatcagcacgtggccaattagattaagtgacaaatgaaaccttgtttttactcgatttcacagagacactcgatctccaaagcatgtggtcgagttaattactgagattggatccattgcacttaaacattggcagctatctcctgaaaacactagtaaaacgcatcagaaatcacaaa

SEQ ID NO: 37242 - DNA, 587 bp, Arabidopsis thaliana columbia
tcgacattatatatatatatatatatatatatatatattttatctcttaatggaaagaattatgaggttggggaaagctctcaacatcgcacacatacgagagcaaaagaccaaacacgtgggttacaaaattagacaaagaaaccgaagaagattagcttcgggaaatgacaaatgccgtgacttgcccatataaaggcttccttttgtcattttctaatcatgtctatctcattctcatcctttccttttttcttttagctttctttctatttttagttaatactaatattgttttctttttttaacatagatttccatatccaaataaaatagaaaccactacttgatcaaacaagtccgatttcatttgcatagcctcacaggcctcaacaagcttcaaattatgtacttaatttaatataagtccaggacccagcgtcaggcttgtaacaatccaaacagaaaccaaactggccttattggaatcagtttagctgcttggtgacacttgacctcgaggcgcatgtgaccgattcatcttttttttcaaatctaagtcggttttgatgatcacaccagaatga

SEQ ID NO: 37243 - DNA, 243 bp, Arabidopsis thaliana columbia
gaacaatgccagtatttatccttgtcgtaggtgagtctataatgttgaatcagaacgcttacgtaaagtataaacataataaaacgcaattgtgaaaatagaatgacatattattctctggatgacatgttaaatcaaatcatatagcataataaaatagaagaattttcctctatctcacatcaatgtacatgaagctttcgtttctgtatatacacgtacatagaacatcggaaaaagatg

SEQ ID NO: 37244 - DNA, 578 bp, Arabidopsis thaliana columbia
gacagcgacttcgagattcttggcggagtcaacaatggaaggaggatcaaagcgagtaaagagcttataagaggagattagagagagaacgatgtagaaacaaaccacaaagaatgtgattataacagaagcagtggctctatgacagaaaccgccataggagctacatgcatcgctccaagtaatggctgagtctccattgtaagccaagtatagaacctcagctgatacagctccagcagcaagaaccaggtaggtcagaagctgagacaataaaacattatgaaattaatttttgtacttcagtggatcatttataaccgaattttttgaatagtagacctggtcgagacaaaagaaggtccaaacacgaggcattgtcgaagaagaacgaggcatcaatgcaatggctgctgatagaagagagtagcctgcacatattccatttgcgtgcaccaagtacctaagtttgtaattacattattaccattaccgataatcaatatttttttacgaaaacagtttacttcgactatactttatcaaccctatctatgctacttcggtaacgacaaatg

SEQ ID NO: 37245 - DNA, 464 bp, Arabidopsis thaliana columbia
atggatataggttcaggggactttcctattagcaaaaagatggggctagattttaacttttaaaagtcaaggtcaattttctcaactactcaccaattgtttttttttatgtggtatctaagtaaaatagaaaaacacaaatttagaataagataatgacaccaaggagcaacaaataaaaaattaaaaaagcattgctgattgctcatagatttgtttgtatagaagatcttaaatagcatacgtacgattactaacttgttattaagttcttctagaactccatatacatatttggtttataaacttattaatgagttaggaattgtgtatttttgttgatcgtaaaattcatttagtaatttcgtattcgaagtgttataacttaaaaaaaaacattaaggttccatatggcaaaaataaaataatgtaaaagtccgattcacaaacacctttaattgacc

SEQ ID NO: 37246 - DNA, 632 bp, Arabidopsis thaliana columbia
ggttaggctctttagcttgggtttcctttttttgcagtacaaataaagaagttactataatctctctgatctataaacgttggggtttctatgaatttaaagtaaaagtttgtgtagtaagtaaaagttaaagactgcctaaacaaaggtgatagtgctgaatcttgttatttaataatcttatagactcttgttgtatcttcctccttttttttttgctgtttatcataatcctggattaacaactttggtttgcttgaaattaatttacaagacaatgtgtgttttgaaccgttgtatacttgtgttcaggataatttggctccggtaattttgtatgattcgacttgtgttttttttccgtatgattctcctgtttataccttcaattagttagacgagtcgtaataggaagaaaagccatgaaagaagagcaaacacataagcattctttctcttgaccaaagttaaaaacacacaacatttgaaacatgacaaactagatgtacttgaagagcaaatggaggatctaacttccgaagacagcgacttcgagattcttggcggagcaacaatggaaggaggacaaagcgagtaagagcttatagaggagatagagagagacgatgtga

SEQ ID NO: 37247 - DNA, 373 bp, Arabidopsis thaliana columbia
acaatctaaaatcttaacctgtctgatgatttcatattcagaaaagaatgaaaaaaaaagatcgtgattattagagattcaagatagttttcatcgatttatattatcgggttcagcctatcagcataatctcatttaattgggaatgaatccacattacgtgaggatagacagattgaatttgactaacaggaaacggaaagagtgactcgaattgacgtccaatattacatcatattgagaaggaaactagaaaggaggaagatcttggattcgagaatgtggaagacaatcatattcgaagacttaatagaagaaaataaatagagcagtcacaaagcaaaggacattcgacttacaaggggaaaaccct

SEQ ID NO: 37248 - DNA, 472 bp, Arabidopsis thaliana columbia
  unsure (1)..(472): unsure at all n locations
nnnnnnnnnnnnnnnnnnnnnnnnatctaaagagtcaacctcaagtgacattcctcaggtgtcaatcacatccgtttgtttgtttattagtttgtgtgattgattgattgtttgtagtatgagagaaggtctctcatgggtctgaaagattgtcaggaagtctaaatgggaatcgtcagagagaggtaagaagtagctgacgtgagcttgtacccgtggtagtgggagtataagtgagtaggatagaatacagatcgctgatataacagttgggagcatccgttaggtgcacagggttgcaactgcagcaagtatcttacctgctctcatctcgagtcatctcgaacaaggatcctgaagcagtctgtgctttggcttaatgaactagtgagttgagagaactgagaagcatagatatgtcagtgttatgactgcagtagcccacgaaaattgctgagtttcgtacattcaa

SEQ ID NO: 37249 - DNA, 490 bp, Arabidopsis thaliana columbia
ctaaatatatagacaaagtgagaatagtagtttggatgaaaaacagagatgttctttctccgtaaatgacggtatagacttgagacgtggaaattaacgacaagtattgtactatgttatttcgacagtgaaacttaatgtaaggatagtcacgagtcgtccttattaattagatatttgtatacgtgcaaataaatccaaaattctgttgttcagaaattatactaaacattaaattgacgtgaaatatggttccaaaaaccgaacccattctaaagcgacgactttgtctttttagaggttctatgattgggtttgagattcttagaggtaattttgagaaggccgacatacaatttgatctcctagatgatcatgactttatgagctgcctgcaatgaccctagtgccctgacccgctcgcctcgttggggaagaacatgttatgcatttttattcgggttataggagctccggtttccagaccttt

SEQ ID NO: 37250 - DNA, 286 bp, Arabidopsis thaliana columbia
agtaaacaggtaggactattgtgtcatcttctctatctttctgtttcccatctctgaatttacaactgatggaaaatatttgttctcaattcatattactttagttgcgtgataaggtgttttgtagactaaacctaacaacttctaatttcagatttcactgacatgggagtctgatccacaaactgtacttagcatcactaagcctaattcaacttccgtgcgagttctctctgtagatatggtcaggtcagtgtttatattttgcaggtcatttctacaatga

SEQ ID NO: 37251 - DNA, 537 bp, Arabidopsis thaliana columbia
gtgaattatctcattatgatttggttatagagactaatgtgaagtcgtgttggtgaaaggtttgaaacttgttgtgtttcatatattcaatagtttagcgactatttttgcttgtagcctatatattttcagggttatccctcgttactggtaaagatcgtatcggataacactcgaaatgcacagctgagctatcatcgtgccaaggctagggtggaccggtggtaccacttcgcgtagttatccggcaccagaaaaaaaaaaaaagattcgaactcatctttcatatggataaatttatgtgggccacaacagaaaatatagctatcatcatactttgttgttacataagctactcatgattcgtccgccaatattccatcaccaaataagaaccacaaaagcggcgactgatggatcataagattttagattatggtaagttgtagaatgtttgtaatgccttcacaccattatgcctcttgccatgttgggggtatggcaacaacttagcccacaaattgatgcctattttgt

SEQ ID NO: 37252 - DNA, 568 bp, Arabidopsis thaliana columbia
  unsure (1)..(568): unsure at all n locations
nnnnnnnnnnnnnnnnnnnnctaaagtaatgaatcctttttcgatttatgagaataaatactcatttaagggtgaaaacattttgcctgcaaatgattatcaggaaatataacattatcgaagtattcaaattaacaactattaaataatattaaacatttttaacgtaaacattaagaatattcatcttgttatctgtctgtattttaaccagaattaaatcagtattagatgccgtatgaatatctcgaaatgttgctgtgtatcacatacaaatcatcaccgcaggaccatagtatttacataagatttgtcccccggaggtagtcatcgcagcaatcgagtaaattagcttcaccacggtatattgtttccgtagaatacccataattataagagaggttgttatgattgaacgtgaactggggaactggaaagactttatcgaagttatgcttcgtaagtaattcctgagacaaagtacaaacagcaagaacccgctgagcaggttcttaatcggaaagttgaaaaaggcgacacattggcatgtcgcgttttttattgctta

SEQ ID NO: 37253 - DNA, 644 bp, Arabidopsis thaliana columbia
  unsure (1)..(644): unsure at all n locations
tcttcgttgaaagtctctcgtctcttttccccagaaaaaaaaagcaattgatacttctttttttaaacaaaatgcgaagaagatttctagaatgttgacgagagcgcttcggattttgaaacccaggttatttctgggaagtttgctacagcgtcgatcggtttgtttctcagctccgtcgccggcgttttctaccggagctatttcccgtacgacggctgagattgacgccgatgaagttactgcgtgcttggatccagctgaatcggtgactaagagtccggtgataatgcctggtaaccttcagcctacgtgctcgtctgtgtacgacggagtctgtcatctttgccatggaggtacaatgcgtttctatttctcgctttagcttagaacaactccgttttcaaaaggatcctttagtggttcattgatcgattctgtctattgatctggctatgtatgatgaaatgacttggttctagtcgattcttagtcttgttcagcgaaatttggggatgtntgcgatgcaattgaaatgattgttatttctagtgctggaagaagaagaagattatgcagtctttgtaattcgttgttcttgcacattgatttgattgaagtcagaacagagatgtggagagaaa

SEQ ID NO: 37254 - DNA, 642 bp, Arabidopsis thaliana columbia
  unsure (1)..(642): unsure at all n locations
atcataaatttatcaattttaattcttattcattggctgctatctcctctgattttgttgtgctcgatgtcattgtaactgaagatgcggtgtagaagcagtttttcgtattatctggataaatgtaaatttgtatgcatttgctttttcattgttttcctaatggagtaatcatgttgattctggattatgtcttcaagtgaaagtaggttctctagcatgaaggttttaagagagaactaggagctcaacaagttgcgttgtttttgcttctcttgatgaacaataaaagggacaagctcgagctcgaagcagcgaatcagaaacgagaaacttacatagagcccttccctccagcattaaaaaggatgagcacttgagtttttggactgtacattgctcaactgtgtatcaaactgttaaatccacaattttgcaaattaaatgcctattttttggaggtattctcattggttatactttggtcctttttcactagtacaatacaaagagaaagaatgatactatattactgtgacatgaaacaattctggtggtttgcgagtgcncgccttaatatacaatttaccgatttaactgagagaaaagaggacctatggggatggtgcagagatggtgttg

SEQ ID NO: 37255 - DNA, 546 bp, Arabidopsis thaliana columbia
taacaataaattataagaataggatagtatagcttttggcctaacaactgataatggaccatcgatgagacatgactgaatgaaattaattcttgggcatgtttatataataataaagttagttgaatgtcaaattccaaatgtacaagtggaatatgcgtataggcaagatctttcaagtttggtacaatgcacaacccacttatagatatggttttaggacaggcaaagaaacaaagccgagacatctactttactcgtgtttgcatttaatttaggaacaaatcaacggacgtagaattatttaatttttataaggagaacttttttaaatgcttcggataatatgtagacaaagaaaaaaccactactataaaaaaacatatccataaagtaattattttatggaagattttattcttgaggaattgatttgtatatgacagaataaattaaatgaaatgtcaaaattcaattcacacaccaatgccatcatctttttaattcataaaccatcatcatttgtataatagattacatggaatg

SEQ ID NO: 37256 - DNA, 451 bp, Arabidopsis thaliana columbia
gaataataatgattaggatactaagattacgtgctatattataatgaaacttattaaaaaattggatccaaatcagtaatcacacaaaacaaaatttaatgtggatatgtaataatacgatagtagtaaccttggggttttaagcttacagtactgtcaacgcttaggatttttaagtttatggcttaatttggtaaatgacaatagatcagaattttgtattactagaaatgattcccattatatatctcatgatttctatgttgaaactgaaaatttcataagttacttttccaagataacagaagaaggccaaaaattgggatgaatacaagcctcatattttagtgaatcattacaaacatactaatattttagtggatcatagaaaataacatgttacagaaagaaccacatatcagtaaaaccgtacaagattattccattttgt

SEQ ID NO: 37257 - DNA, 600 bp, Arabidopsis thaliana columbia
cagtgagatgattgatggttgccgcgcattgttatctattgggactgttactactcctgttgtctttgaccaactcttgcgatcattaaggtctttggcatataacctttttagcagttaaaagccatttggtgtttctttattcataataaagttgttctttctgtttcttcaggccctttggcacccttacactcttatctatgttaatgggtgaagttgtcaaagtactaatggcgaatagtactgatgaagagacttggagctatgaggcacgcgatatcttgctagatacctggaccacactccttactgtgagtatagttaagatttattttactactgctgcatctatccataatatcatgaatcactgtgtttatgaaactgtgccatatctggctctctgggggtactttgggcattttctttgtgattgtcagggtatttataaagaccgatcattgtctttgccaacaaattttttatagtctagaagaatgattcatttaaagtaaattgtgtcctatgagatactagtgggcactatgtgaccaaaggttgtgatgatcctgccagtcaatggatggttctgggggt

SEQ ID NO: 37258 - DNA, 637 bp, Arabidopsis thaliana columbia
tgttatgtcagattgtgtatgaagctgcaaattgttattcagaaaaactgatttgctaactaactccaacttttacgaatgttttttagtggattgcaagagaacttgtagtgttacaaaggcttattaatcaggccaatgaaaagggatggcgaagagaatatcctttaataaagcattatcaatattaatatattgttttactttgaagagtaactagtgaatatgagagactctttctgttatatttttcttgacttcttagctaatacactatcccagtatctggagaagagggagcttcttcagaatccggatgaacagaagaggctagtggatgaagttccagaaattgttgcagaagaacttgaacctgaatgtgaagatgatgatgatgataggacaatagaagatagcctcattgtaccaaaccctgaggctcatcaaagtgacaaagagcaacgacaaagagatttcccagtttcttctagtgtcaagaaaagtcaagaaaattccttgcttcttaagaatccggaagagcagttgaggctgctgtgtgatgttccgatgttgttgcagaaacttgaactgagtttgtgatgatgatggaaactagtaatgacgtcgtacaacctga

SEQ ID NO: 37259 - DNA, 102 bp, Arabidopsis thaliana columbia
taacaacttgaaaagacaaaaaattaataaataattgatggttgtgtggcaagttggtttaattgagtagactctctctacgctagtctgtcgactagctat

SEQ ID NO: 37260 - DNA, 471 bp, Arabidopsis thaliana columbia
gttttgtagtttttttttttttttttttttttttttttaaaataaacttatagatttatctagtgagtttcagtagaaatgtaccaaagtattttagagtggacttctctctaaaagcccaccacaccgtcggttccgattttgaaatgctttctgactaatgtcagaggtagccaaatcgcatgttactgaataataggtaaattacttgaacttttagctcaaactcaaactttcgaaacatatgggatttttgtttgtaaggtggattgaacttaggttagttccttccaacattttcccaattctcctttaacactagaccacagttgtgtgggcggtttttgtttttcaaaatcgcattttcataccaaattgttaataatactcaagaacaccttataagctagataggttacaatctaaagtggcatgataaaattggagaagaatcggctgttaaaagtggag

SEQ ID NO: 37261 - DNA, 555 bp, Arabidopsis thaliana columbia
aactatcgatctctgttttaacaccgcatagagaccctagcaaactttactttgagattcttagatattgatttggagaagtagaagatgagaatcaatcccaatctttctctcatttgtttctcttgtattgttcttgtctattgtctctctcagtctcttctctcttaatcgtcatcgtctcttatatattaatgaatcgatgtttaatccaagagatgcttctcttatctcaaccggtgtatcggtaaaaacgtaaccaagagagttaatctaatttgcacaagtagaacggtatttacataaatacaaatgtttatgtaaaaaaatatgtttatataaaataaacaccaacaatatcccatattttcttattcaaacatataaatatcccacatttgaattagaaaataagctccacaatatctgagaaaatagaatcattatgcatcggtaaaggtgtcttttagacttgaacctttcctagtaaacacatattggatttactctgtaggtagtgactcttgtcttgaactaccacgtttgagagaaatc

SEQ ID NO: 37262 - DNA, 427 bp, Arabidopsis thaliana columbia
tcaacgaaattattaccatatttattgtaggagaacgttgcatttcttgtagtttaactaatactctgcaaaagttatttattccagaaaaaccatggaactcagtccttgaagatcatgtcaacaaaagagagagaaacagtggctcaaaaaagaggccacattatatgtagttagaacaggcttatagggtacgtcgtcagtcaactagcctgatgtcagcgaaactgctataccgcgttgtatgagtttctaacgactgagttaagttattattcgtcggagcacaagtgaccaataatttatgtttttgtgaccacaagtgaacaaagtgattatgacttgacattgtcaaacaaatgtattaattgtgtaaccacaactgaacgtgcatactgacttgattgccaaatgaagattggaatgg

SEQ ID NO: 37263 - DNA, 396 bp, Arabidopsis thaliana columbia
ctagtaacggccgccagtgggatgattaggatgaaattcgaaagccgacagtatagtcaggatgacagaagacgagagtatgatagagccaacagagagctcgaaggtcagtagaagcgaatacggcgcgtagaggaagatcgcacaaaggtattagcgaaagcgagtagaagcatcctaaccgaggtaggtatcatggagacatggagatgtgcgaagcttccgaggagtaagaagctatacaacagggacaaggaggggctggtaacgacaaccccagtcctatagtcggcgcagttagtgaaaaagatcatcacagcaacggacgacgtgaccgtgagtgcgacggaggcccacatgctgagagaaatgccctcagaaacatggagagaaccc

SEQ ID NO: 37264 - DNA, 557 bp, Arabidopsis thaliana columbia
ctaaataattgtgacaaaaaataataaaaagaacaaaaaattacttgagattgtcaatgacgtgaaccatgactagttgatcaacaagaagacggccacgttgaaagctttgaattacagctatacatttaacaaatacatacactatcatgtttccgtaactgtacttacgtgaacacttatttatagtacaaagacgtgttttgttttcgcccaaaccaactcgctttttttctattttctcctaattcgtcttcgcttctttccctaccaaaacacaattcttatctctacaagaataagagaagatctgtagattttaaacaccatttctgatttctacggctgcaaaatttcaaaatcgtcaggttagtgttttattccatttctccatttttttgtttttggattcgtagttaacaaagttcattacatcacaaacaacatttttgtgaatcctttcttgagaacatgcataggctacatgcgattcttgattttcttttatatgaccttagggttcttattacgaactaataaatttattaattgatttt

SEQ ID NO: 37265 - DNA, 660 bp, Arabidopsis thaliana columbia
taacagtttcttatagttgaaagtatctgaaattgatagccccagcactcagtacagaaccattccaggatctttctcatatgatatcaggtttggacattagattaactttcacacaaaataaagaatttgcaataacatagcaaacccttcctatacgatcaaatgcgcaggatctaattatcattacaaacatgtgacagaggatattttcaatttagcagaaaaggcaacaatgtactaacggttacaacacacctctgacaatgcattcacaaccgataaacctacgccatgcaatccaccagacacgctgtacccactactcttgccaccaaacttaccacctgcatgtaagacctgcacaaataaaaagcactgattaattgcaggaccaaatgttaggataacaaaaacaaaaatacgtgtgaatcaacattgagacaaacatagatagctttctacacaatatataagtataaggtgtactaatagatgtttgtcaagtggcagtaccgtaaggacagttccaaagacgattttccgttgcaggatcaaatctgtgggtatctcagcagaaactatgtatgaataaagtgacaaatgcatttgatattgcacaaattttcatctgggatgaagaaagctattcaaataata

SEQ ID NO: 37266 - DNA, 444 bp, Arabidopsis thaliana columbia
ttaaaacatttaaactaaaattcattaataaacgtaactctaggttaacagtttccgtctatagactatagtaattacatattatttttaatgaaacaaaacaacgcgatagtttatttttaattaagtggggaatacattcaaatgaatcatcttgataatttatcttctgtttctgtttttttaatatatatatatatatatatatatatatatatatatattaatttaaataaatgatgaattttgtgaccaatttttcaaaatttcacttatgtgcgtattgatatagaacggattttttataaatatgctattattttgtttgatttaaatgtatagtacaatgcgatacaacattttataactaatacactgaaatttgagttgtatttgtttctgatatagttcagattgcctaaacctactctctcaaataaaaga

SEQ ID NO: 37267 - DNA, 558 bp, Arabidopsis thaliana columbia
ttcgctctactaatcatcaactactagagattttattcggacaaagaatctatctaataaatcccaagcagaaaaaaagaaagatatgatatgagtaacttctagacaaaaaaagagttaatattctaatttcatttatgtctccgatgtaccagaaaatagatgacaaatttatatggattccatgaaaaaccagtacttttccaattctcaactctttttttctgaataacaatttctttccataataaaattaagttaaaaagatatgaaaaattgagatattggtattagcatataccaatgatcattttcctcctctataggaaacaaccatcattgctccaaacaatcactttcatccttacataatctctgcttcttctcttcttcttattattctctttctctctcactctccttttcatctatacatacacatccaaatctctatataaccttttaattctctccttcccaaatctctctccctataatctcaccaataatcaaccaaacaaaccaacaaacaccaaatattttttaagggcaataatg

SEQ ID NO: 37268 - DNA, 642 bp, Arabidopsis thaliana columbia
  unsure (1)..(642): unsure at all n locations
tttctatttacacaacgatcctttattgtttgtttctatatacacaacttctttgttgtttgtttgtagttgtggttttctgtgaaggtttagttcaaacttacaaatatgcatatgataatcacacaaagcaacaccatgaggtttgtcaaaataaattgttctctgtactaataagaaaacgcttatatacttgttttacatgcatttagcttagtttcatgacacttttcatgcattcatagttttttttcttcacttttcatgctttgcattgcattgcatagcatatttgcatattgagtgatttgcaggtaaaacaggtgcttttggatctgtttttaaagtatctagcccaaggagaggacttgctcgagttttcacatcaagagaagcacaaggaatgatgctcgggatttcatgtctgcgttaaggtgaacccgaattacaaggtatgtattgggatcgacatggtagaaatcatgtccgtgatcaagagaacctattcgtggatgagatatccttgtccgcgaccgagaaatctgtggcgatcatatgagaatccttttgagtgatacaagaatcctgcaagagatttgnattgctgatttgtgtaaaagtcagaatgaaggaggttactag

SEQ ID NO: 37269 - DNA, 575 bp, Arabidopsis thaliana columbia
tcccttatccactttttttccaacctttttcccctcacgctcctttaccctcgcgtgtatctcacctcatcatttggatatccactgttaaaattcccttttatattcgaaatcaaccaaatttaaccttactcctataaattaattaggctcttatctacaattgttgcaaatcaacaaaacgtgcttctaatgctaacacaataattgatttttgagtatattcctctacgtagtgaacacgacgcgctaagatctgacgcgtgggatataacttgtcggtcaacgaaagcgccacgtcatcgccactatgcttgtccttatcatttcctttcacccgccaacgtcgtttcaagcacagcaaataatatcagaacacatttttttctttttatgatttaatcaattaaatcaccaaactcaattaaataaaaagaaaaaaattattattatcccttcttcttcttcttcgtcttcgtctttgattctcctgattcatgtcgcttaaatttttagcgatcttcgaatcccattttccttcgggaatctgacattttttctcgggaaattttttt

SEQ ID NO: 37270 - DNA, 632 bp, Arabidopsis thaliana columbia
tgacaatcaaacacttgtaagatacagaattaagcaaattaagagtggagattaagatcaacaaggagaatacctgaagaagaagaagattgacgtccgctataccaccgctcaggagacctgcgacggtggtgtctggatcgatgattccactttcccataaagaatctcaaacgacgatgatggatattgtagaacttaggggtcagcgggagaatttgggagctgatgaagcaaacgaattggaaattggaaattggagaagagagcagtgaattcggtcggtggtgtcgtctattcaacttccggttctgtaacggcccgatttcatttcgtgtgggctataaatgggcctaatataataggtccacatataattaggctataaaatgtttttttattatattgtgaatacatttataaacatttttgaattagtaaaagccattttaaaatgaataattacttccatgaaattagcttattagtcattattcgttacaaattaaacatctctcgttagatattacacgaaaatcttactaaaaggaatgattgcattacctttgactacataacactttaagggtggaaatggatgcctacaatttaaaaaattgaaagagttgaat

SEQ ID NO: 37271 - DNA, 517 bp, Arabidopsis thaliana columbia
ttttacatatattaaactttaacctttaaaaacaaaaatattatgtgtatttaaaaagttaaaacattttttctaaaatattacataaaaagtaaaataaaattcttaaattttaaatagtggtgtaaaaatcaaaattaaaatattttttatattaaaatgttagaatttaatatgtgtaagatatattgaacctaggacaccgctaaaggacctcatactatggacgagatgttgtgtccaatcattttacacatattaaaaattaacattttttcttaaaaatattatatatatttaacacaccagagtgtctaggaatattaaagattaactttaaacaaaaacttgaataacaattgcacaagaactttaaatatccgtaggaaaaaactccattaattaaaattatagaatatatgaatttaagtcaacaagagaatgggctgagaattaaccttaagccttgagccgttctctgccccgttagtcgacgaagagactcgatgagtattgg

SEQ ID NO: 37272 - DNA, 688 bp, Arabidopsis thaliana columbia
ctgcctagctaaactaaggcagcatcaacgtcactactttccgattctaagaaatctaaattcagaaacacttcaaatttctaagcagctcagactttgtttacctgatgaaacccaggttcatgagtcaatgtaacaccaagctcatgtataatagagtataaactggagcttaatgtggaataactgatgaaacccaggttcatgagcttaatgtggaacatgtagaataatagagtatagttacactcttactttgatattttcagatgaaggctccacgtcgccaatgctgtgacatctctccatcatatgaggaaacaaaaggctaacttttcatggttcagaaacttgtggaagtctgtatccgaagatctctcgacattctgacaatatttgtcgatgggtttggtcgtttttgtgtaataatatgcaacattgtttaaccagtacggcttctcttctcttgttattaagttttcctagttaaactattaaatgtataaaatgctaattgtagatgaaactgaaaagttgaaaaagaagaagatgaaactgaaagtttaaatcttatatttgacccaaaataaaatctaaacagagaagcttgtaattatagataataataattcctgcatttcaggttgtcaccataacaatggtgtgactgcaagagtctgaactcagt

SEQ ID NO: 37273 - DNA, 573 bp, Arabidopsis thaliana columbia
tcagaatattgagctagctgaatgaatgagataacctaagaatccaaaagttgatagtgttccctttccgaattccaatagtagcttgataacatttatttaacggcgataaattcaaccgttagtttgattaccaatcaaataattgcttgcaatagacggatgaaacgagtggtaagaataggtgattgaaacaaacggttaaaagcttaaacaaaataggtgagtttgcaacctctcttgttcaccattggaatattttagttatttaacgtttcttagatttttaaaactgtaatgtatttgaattatttactaaagagttttgtttttctttgttttttaaatatttttagttatttattaaatattttaattcagttttcacccctcactgtttaaccgtttgttactaatcataactattatttaacggttcattttaaattatttatcattttcccttttaatatatttcctaaccgtttttctttatcagtcttttttgtaagtgttaaataaaataaccgccttatttaaacgatattaccaattggtttaattttaggttgt

SEQ ID NO: 37274 - DNA, 487 bp, Arabidopsis thaliana columbia
gccagtgtgctctaaagctgcctgctagtactatcaattcaaatgtgtaaacaacaaaaaaaaaaaatgtgtaagtaacgtctgtaattgatttgataagataaaaaaatcttgattaatttttctataaattgaagcctttcctctttacatttcgttaacacctaggttcttgtttcctaacaaaggctctactttttctttagttaactactatggctcatttcctcgagacacaggagcccctcgtattctccgggaagaaacgaaacgatcgcgatgacgaagacggtgacgccttggttgcgaagaaatcagcactggcggtgtgtgatgccgaccctgcagcggccatagcgaatatccgacatgagtttggggagcacgggggagtaaacatgtccatcgaagcctccgccaccttcaccgtcatggaaccggataccatgaggcggatgttcacggagaactgggaccggacaacgac

SEQ ID NO: 37275 - DNA, 159 bp, Arabidopsis thaliana columbia
catctcctctatcgacgaacaaataagtaacacgaatcgtaattgcaattttctcatgcttttaactgcaacactaatctctcattttcaaattctctcgtagctttaaataatgactatgcacgcatgtataccacgtatataaacagaaatataaaa

SEQ ID NO: 37276 - DNA, 549 bp, Arabidopsis thaliana
ccataaactatgtcaaatcaaaatacagaaccaaacctgaagcccggtttgtgagtctctaaaccggttttatttcattacaggttgtgtacattggagtgactgagtttcttgggaagagggagagagagaagtttgagaaagacgaggcagcaaagaagtctaagaaaggtgggaagaagaaggcaatgagagccagagctggaccaagaggttttggtcagaagattgaagatgatgacatcgacattgatcttgagtgattttgtgtgtagtagagagacaaagattgattttgtttgtaatgttgctcagtgattgtcacatctatgatatgtttcttgtgtaccaagcaacttgatggtcgatataacaaaaatattgcaatattacagaaacgaaagaattactagtgaaataggaaacaagagtttgatgaaacaaattacatagatggagaaaaaactctaaacactaggattgtcctaaaagcatgaacatattctcacttctacacatttggcaatgaaaaagccgttctctttcgtg

SEQ ID NO: 37277 - DNA, 598 bp, Arabidopsis thaliana columbia
atcaaccttgaattgcaaacgtcttgtatatcactaatttactatacatattgtcataatgttgaactccaggacagaaaacataagacaaacgcatcattttcaattaaaaatagtggcaacaggcttataaagatacaaagatggtgttttgataagagaaagaaaaattatgaggttcgtatcatttctaattttcaattttcaagagctgccgagattattgatcagattagctaatgtctaaatttgacggtagagagtttaccacgtcaactacacaagaggacctttggatccggaaagaggtttcgttagtctgggtctcaagtttctcaaccatagacttatatgctaatccagtgaacccatgattatgaaaacctattaaaattcacctttttagaatttagagccaaagatgcgtctgacagttacactcaaagagaaagattttgtgaggacgtagttccctgcgttttcttaaggctgaggttaagtactgggatttttaagagattgtgaagtctacatcatcagtcgagagcactgcaatctcatcgtcatcattgcacaacaggtggcccagtggatgtgt

SEQ ID NO: 37278 - DNA, 508 bp, Arabidopsis thaliana columbia
taaagcaaaatatgtaaagagacacgtcatgttccaaatatggaaggacgaatatagtttcaagaaaagcctcatgatcaaaggggggatgcactatttaattagagaatcacaacaaaacaaaacaaaaggtccaaatctcatgtgaacccccttcccacttggccctctattctatccccatttgtgctattacacatcgcccattactcatttttctatctctcaacgagtcaactctattcaataattttacatatctttctactactattcttgtatggaccattcgatttttggaaacttcttttctcttaaaaaaacatcaataatatcgggcgaaatgtcaaatgtggtttttcttagccctatttaccattcttaaccacatcaagaatctcattgctagtgttgtaattattctttgtcctttagtgaaaacattaagacaaattcatctattgatgttcacgttctctgtaaatctcttatagacgcatgttacacg

SEQ ID NO: 37279 - DNA, 519 bp, Arabidopsis thaliana columbia
agtccccgaacaacgactcttccattttttggtgaatgatcgaaaggtacttcttcgagcagaatttaccaaaatggcaagttggtaagatccctagcaactccataggatccattgctttcatatctttgaactgcgcaaagcagtcacgacggtactgatccgggttgataagagaagataagcttccatccatgtaaaacgtttcgtgatcaaatccttggaagattttcctacagatgtaagactcaagagcaaacttcgcgtgctggttcgggacagatgactgaaccgaggatgcaaacgaagaagcagacattccgtcggatgaagctgaagcggcttcaatggatcgaacagccgctgcaatgtcccaatgtgcagctcgcattagtgacaatagaatccctgtgaaagactttgatgcttctttcacctgaatcattgtcatctcaaataactccggcaccggagacacagcaatctgtgtggtacagttaactttccggcttgaaagca

SEQ ID NO: 37280 - DNA, 534 bp, Arabidopsis thaliana columbia
ccatctcttaggctcctccggccatttcccctctccaccaggtaaaccagatcctgcaactccagaagaaccaaaagactcatcggaagagaaaggtccagacttatcatcgtttactccagtgaaactccacggaacatcattccgattacgaccattcccgtcaccatttcctccgccgccgctactgttagtcgaaagcggacgaataaacgaagagaagatctgagaatttaatttcgatgaaactagggttacgaaacggagattcgaatgtctaaggaataaacgagagagcatgatggtgaagacgaacacttgagattcacagatttgggagaaacaaagttgcagaagttcgaagaagaacggttagggtttttctttttagaaatcttaacactaaggaaccggttcggttttagtcggtttattccggtttgatcatcactcaaattcctcttctttcttctgaaaacacaaatcaaacgccgtctttttgcttctatgtttctccgtcgagtctcccggaga

SEQ ID NO: 37281 - DNA, 580 bp, Arabidopsis thaliana columbia
gcaaaagaaaatgaatggctcttcctctccaattccattacaccacatttctccgtggatttatgtcaatatctttgaaaattttgtgtgttttgagtatagatgtgatataacaaaagaaaatgtcagaattgtaatgaacagaaaaataaatggtacccgaaaaaccaagaaaaaaaattaataagaaaaatgttgacaggaaggtagatgtgcggttgtattatttgcaatgtccctctcttgctctataattacacaaacttgtccaattcatcacacttccccaaccaaacttgtttgcttcatataaattattttataaaaagtatataatgtatgcaggcagagacatgtgtgtgtctgtgtaggctactagctacctctctttttcataaattatatcgattgattccgtgggattatgacctatgtgagactgtgacatttgaggtttttttggccctctgtgttatgtactcatcatagaatgcgacatttttttatttatatatatatgactcccgatcaatgccaatttgggaactctagtaagtatgcttttagtggtccaccccat

SEQ ID NO: 37282 - DNA, 493 bp, Arabidopsis thaliana columbia
ttaatactatcaggtgttcattattaaagtttgtatatataatgataaaaataacagagtagtaatttgcttccttggaaacatggataagcaactgttttccagctgcgaactttaggcacttaattttaaagtcacaggtatacactacgcaaccaaagcaagatttcgctaataataattaaaattgcatcgaatctaactaaagaatctaaaaatacaagtatacccagtccccaacgttgtgtaggacgatatatgattataaagttttagtttagatattacataactatagatttctcataaataaagaaatcttccgttcatttcactaaaatatcgttcgaacaaataatacacagattaatatctaaacgtaaatcatataaacaaatagtgtaggatttaattatagtagcattttggcaaacacaaacagacaaacaaaggaagaggcagcgtgttttccggtagagagaagacggagaga

SEQ ID NO: 37283 - DNA, 498 bp, Arabidopsis thaliana
  unsure (1)..(498): unsure at all n locations
gaaaggtaaatatatatatatatatatatatatatatatatgtatactcccatgaaataattatgatgaaacaagaaggacacaattgacaatagaaactanctatatataggtccttttgggagtacaaatttgacagcggttcgaccgtaataaattttgtaatgtataaaaatgttgtagttgttgatagtttgtccttattttgaccccactacactttagattcaacacatattatcatagtagctactttttaattaaaaatttgatattatgaatttttggatccaccactaactctaatcttttttttggggtcttgtaaacaatatggaacatgaagcatgaatattttgggatggactgctatgattgctattgggatgaacacagccgtaaggtaaacacgtgcaaaagtcaatactctttttttgtccaaaacctctctttagtgttatattataacataatctcaaaatggtgcagtgtgagagt

SEQ ID NO: 37284 - DNA, 543 bp, Arabidopsis thaliana columbia
gtgtgaccgttattacttatttgtctcattcttaaattagtgaatgattaaaaaaagattgtgtgtgtggatgggtcatcaactcatcatgggtttaggtaaatgttactcacaagtcacaattaacaactttttttttataaaagaaaaacaaatatgttcgttgccacggtagtttggctcactccaaatttaataacgtattgtattcgcaaaagaagatatactaggagaaagcaaaatgtgttttgtagtattaaaaaagagtctataaagagagagagagagaatgtgcatgaaaataagaaagacagagagaggggaggaaaacaaagaagcaggtgcatagggagaagtgccatgagtcacgtgccctcttactcgaccacgtgccgtcgaagcaatcccaatccaactccgattcgtgttccaatttttcattggggtctaacttgattagtgtctactatgtaattaattagtgtggtactaattagacacgccacagacgcaattcaaattccatttagattaggagccagg

SEQ ID NO: 37285 - DNA, 542 bp, Arabidopsis thaliana columbia
tgtaaattgctgggtcatatctgtcttcggataataggggttatgacataatagaaggattaaataacctgttgtaggtggtaaggggtttaatttgggttgagaatgaaaggagtttagagaattgaaaaccttttaattaggcaatcttgtgtgtcaaaaggcaaacgttcagcctcccatctatgccaccagaaaagtgctcaatcatttacatttgcaggtttcagttccttgctttacttgactcttctcatcaaaattgcaggctgttgtaacaaaccatctggtggtcagaggtagctatcgaagtttgagcttgatcgtctatgggaacatcgtcaaagatttggggcagtacaatatcattcttgaaggtcgttctgtaactgatattgtgagttcactgagggtaatcttgaggacttgccattggtattgcactcagttaacagaacaatagaggaatgtctatcctctctagacatagtatctctcccctggctgctgtagatttgctggtggaagtaagcgattgttgc

SEQ ID NO: 37286 - DNA, 418 bp, Arabidopsis thaliana columbia
tatcttcagtttaattctttgggctgtcgattccgagaaattgctctgtaaatcaaaaaagcagtgtgagtttattatgccaaattccaacaaatcttcaaattcaaattgcttgacatacagtatatatagtataattaagtcttttttctaaatttacaattttttttttttttttttttttttttttttttgggtttaactaaatttacatttaattggccaaatctttcaatgtaccttaaccccaaaaacattaaattcccaatttttctaaaaaccctagttccaattcaaacgcggggaaatgttttaccttttggggaagagaaggaccccccccaccatttagcctttcaggaggaggccccaaattgaccggttcaacctctttttctggacgatttcccctttaaac

SEQ ID NO: 37287 - DNA, 696 bp, Arabidopsis thaliana columbia
  unsure (1)..(696): unsure at all n locations
ataaggcgttgattgtttcgcaaagttttgtctttgtgttaacatgtgaattacttttcgatttttcactaaatacatctaaacgcaaacaccattttattccgcttgcgtttatacaactaataaagattttttttggtaaaaacaattaaggatctagattgtttattaatatgtaaaacaaaagtgtgtatgcatgtttacgtattcatatttatcatcttttgaaaattgtgagagcaaacgtaaaagaacaatagaaatgtttctaaaattttgtatatttgcctaaagttttaaaataatttttatatcataagtttatatacatataagcgcaaaacaaagtgtacgtaaacaaacttctaaaaacagaaaagaagaagaacctctttgatgtcacggaaccaagatttgcgttttgaggaatcaatgccaagtgaagtacgagaaggattgtgcttgaaggtgtccatagaaagacatggtatccacagctatcaacaaactcaatggcactacaatgctgtctgtgtcgatcttcattctcattttctcctctctctctctctctctctctctcttttcctcaatttggactaatactgattctaattcgtattgacataggaatatatatanagatgnaaagttagtggacaaatgggatcatagtcagatacaaatgaaagtagt

SEQ ID NO: 37288 - DNA, 565 bp, Arabidopsis thaliana columbia
caaaactggcattctcttcccttctttgctgatgaatctctttcaaactttgtagggatggagaattttcaccgagttcatgtaagactatttgtcagatcggttattccatttttgtcctcattatcttcttcttatgttctggaattcgggtttatcgatctattaattctaatgttgtggtacagatcacgatcttttgggacagcaaggttactatactgaaccagcagcgccaaccgcaggtcatccatgtccatatgtaacctattttggcccggttcactcgccttcctcaagcagtggtggtgctgcaggcgtttcagacagttcaagtttcagtagtcactggaacactggctcttcggtttctggtgaagtcccaactccttatggtttccctgtggatccgcactatcacggctgggattatcatccgcctccacccccaccgccacagcatttctctgcttctggcgctcatgtgggcagtcaactcagccacgcctccaacagccgctgcgaggacttctcgagccaacgcgtcagatatgatcagaccaga

SEQ ID NO: 37289 - DNA, 332 bp, Arabidopsis thaliana
ggaaggaagacagacagacagacagacagacagacagacagacagacaggcagacaggaaggaaggaagacaggaagacaggaagacagacagatagacagatagacagatagacagacagacagacagacaggtaggcagacagacaggtagacagacagagagacagacaggaagacgggaaggtaggaagacaggcagacaggcaggcagacagacagacagacagacagacaggaagacaggcagacaggacaacggaagacaggaaggtagacagacagacagacagacagacaggcaggccggcaggcaggaagacaggcagacag

SEQ ID NO: 37290 - DNA, 444 bp, Arabidopsis thaliana columbia
ccctgcttatgatagttgataaaaggtctaattggtaaacctgtggtatcacgaaataacgggcttttgttagtcacgtttatttgcagatttgttcattaatttattccgcaagatgtctaaaatgcaaactaaatatgccattacacaagttttcacgaaaattgactttttcctacttatttcaattccaccattccattccgcaaaactaatttatttccacaaatcaagagtgtagttaccaatataacaattcagtgcttcaattttgagaaatctttgcacaaaatcaaatttgaattctgtgagcactttagtttctttatgtgaagaaattctcacacatttgtatttaaggtcatattttatgtccattagtgatatacctctaccaagacagaaaatgttacctgtgaccatgaattgaacccgtgaaatgtg

SEQ ID NO: 37291 - DNA, 503 bp, Arabidopsis thaliana columbia
gactctaaaaatatacaatagatatgatttatcagttgtcaaaaactaaaaataaaaagtagttaaaatttaaaagtagttataaaaaataaccatacaaaacaggcaacaattgattattattttttatttttttgtttttcacttttgtgattagtaaccattaaaacaacgcacatctaatcattgcggtatatgtctatttttatcaataatattttttttatcatatagtaattatgatttatgaatgtataaataaaataattctgattttattcagagtatataaataaacaaaaaatcttcatttctcgggtcgggtctaaatcgcgagttttccgtaggtttgagcaaaaaaaaaaagagagagagtgcacagtgcgcttttggtagagagaaagggttgttattatttaggattgatgtcttcttcttcctcttcgtgattctctcacacaattttccccattttcatgtctcttcctaccaaacgctctact

SEQ ID NO: 37292 - DNA, 460 bp, Arabidopsis thaliana columbia
atgtctcaacatctctgtctttgtttcatgggtttttctcatccgttacttttgaggttaaatgattgtcttcagattcatttatgtaactaatgatgttctcttacttctgatgttgcagattgatcttaaggtaaggtccacgctgatgtatggactctagcacaagagctactttagtatagttaactttacatcagtgaccgttatgatgacaatatcaattacgccatgcgtcaatttactgcttcctacgcgcttgtgtttgtgtatcttttccttacgtgatcaatttttagaaattagtactgtttaggtcccaaattactgtacagtaatcatattcagagagaaggctgtttgccagaagaactagagtaaaacgtagtatatcatagttataaagaagatgtaaaaaagttttaaccgaaaaaagcctaatcggctggacaagaaaagt

SEQ ID NO: 37293 - DNA, 501 bp, Arabidopsis thaliana columbia
gatccccttttacatttcataaactttaggttagtttatgtttccatatcactcatgactcaacacatatgctaatattcgggtaatttatagtaaaaatgaaatttttaaaggtaaaacctgtatttttgtttttttctgtaaaagaataaggctttattgaccacaattagaggatacttttctttttcggttttggcatttggtgatactcttatttattttcttaatgttgacattactaacttttttggagcgtagaaaaaaaattgacggacaccaaccaatgacagaacatacagaaaatatctaaggtaacacgtggtctgtcttgcatttcatgattacttacgagggacagcactaagtttcctcctttctaattaccataactaaccattttcttaattgcccaataatggtccctctttaccaattctgatatacacccaaaattaacatcaacccaatatttaaagtcgacacgtgagaacgactgac

SEQ ID NO: 37294 - DNA, 578 bp, Arabidopsis thaliana columbia
tgaatatgtgaatccgatatctacatttaggcaccatctatggggacacttaattctcaagttttcagaaattttaagtctcaagctccaaagaggtagatatgactaagagagtgctaccaaccaggccattactgatgcattgaggaagttcgaagaaaccttcaccggtgtaactcacaagtcctcgaacacaaaaaaaatcatagctgaccttcaagcttctcacgtaacacttaatcgaaacgttgatacaattaactcttgtgtggaaactgttagtgcagggaccacaagagaggctcgctgaagcatggtgtactctcatgtttcattggcacgtaacggttcaatggtagtatgtgctatgtctataatttgcatgatttaagcattcattcatcactactttaacattgtttcattaacgccgcatcacatttgtagtcattttagtgcgttatgcatacttaggatgattttgcattagagttgcatatacattgcatactaggattgtttccaggtgttttggatgttgttggtgttcaacagaagagaaacagagcagagagtca

SEQ ID NO: 37295 - DNA, 245 bp, Arabidopsis thaliana columbia
tctaaactttttgttattagtatctgtcattatcaattttttccattattttaagatcttttctataaaatttgatatgtacagtttaaagatggtcagattaaccattaatagaaaatccagttaattattaccctttaaaaaaaaaaaaaaatcagccagcttataagttaaaatattaccaacaaaaaagcatagtatatacatatttccaatatattaattctctttcaatcaaattactc

SEQ ID NO: 37296 - DNA, 535 bp, Arabidopsis thaliana columbia
atattgttcttttagttactaaagtgattacccgtaaattaagggtttaattggttctaattaaaacaatggaatattaatttatttaggaaggaaagtgaataaaaaatataaaaaaaattaggttagagaaatggattgagcggctttattattccgcgtggaccccgccacgggaaatatgttcgatggcaatgtcaaaagccaaagaataaatgtcaaacttattgacattgtatctagtttttgtgtttttaaataaatgaattgatgagacaatatgtaaaagctgagttatttatttctcacaacatcttttaagtccaacctccatatatttttcctgtaaaatattttgtgattttttgggaggtttaatatgaacatgatactctgaattatgctgtttgtttggttgctaaaatttcatattaaagattcttatgcaaatctgtagagaaatcttttttttgttagagacattttgcatatgtaataggaagtaaataaacttgactatgtaggagtagatggg

SEQ ID NO: 37297 - DNA, 584 bp, Arabidopsis thaliana columbia
tttttttgttttaatttgttttttaatccattaattaattttatctataaactatgcttgcgtcacgttttccccacctgggctttttttattcttgcactacgcaaatagtataataatttaattggatttcagatgtcaaaaaaagttaactatatggttttattatacgagtttgggtaaaataattttaaaataaaatttccactgaatacaatcgagatttggaataatacatatgtaatgtaaccccaaaaatgacaaaaaaacaaatacagcaaagtttgctcagaactagaggagcaaacaccatagcgttttttggggtggaaaacgacaagcagttatagtccaacactcaaaaggatggatccatgttggaggagggtatatatataggctaaaaacatagcagtcccttctttttactagctgaaatcaaatatgaagacaaaacaaaaggtataataatataccacaaagacaagtttacaatcatcgcaccacaaatcttagccagccattttgtctctctgtgttatgttggggccaagtcaggtgcaaagatggctatgagaagaggg

SEQ ID NO: 37298 - DNA, 576 bp, Arabidopsis thaliana columbia
cagatatttttttgtgtttttttttatatgtttaaggttaaaagaactatgaggaaatatcaaaaatactctacaacatatccgaatttcatttgcttgcctccttctttacttagacttcccgctaacccaagcgagcattcaaatatctgtcatccggaaaatttggtcaaaaagaaatccaaactactcataagtattcgaaagtactccaaaatatttgaattaaccgaaaaacttgataagaaaaagctatccaaaaatactcgagaatatcttaattacttaaggctatataaaaatggggaaaatgtcaaaaaaatcactaactttcaaatttgggatgattaaatcatgaactgcgaggataacaaaaaaatcgtaaagtttttgttaactttaaatttaaatgacaatgttggttgacaagccaatttagacatgtcgttaagtaggttaacagacaaactttacggtgttaaaatcccgttagtcgtttctgttatggctacacgtcatcggtttattgtacctaaacgaagtcgtattgataaatgacaatagacaaaatcccac

SEQ ID NO: 37299 - DNA, 315 bp, Arabidopsis thaliana columbia
ccgtcaatcgcttccttagacagagaaatacacatttaaatataaataaaggattactaatgaattactatcactctctttattaaaaaaaaaagtatcatgagtatacttgaacaaaaggaatgacaatattagtttcaacttgatcattgtgactgatccctgaaacagtcactcagaggttaatacatgtaaataaagcaaagtcttgagatatagagcttaagaattaccattgttaaacacccatattggggatgcaccaaggtcttctgcaagctacaagaaatatttgtttcgagcttcgtaattatt

SEQ ID NO: 37300 - DNA, 468 bp, Arabidopsis thaliana columbia
gttcatgttaatgcaaaggaaaaatctagggttcatgtaggcttatctttaaagtaaagctgaaatttgaaagagaatcatttaggtaattctccaatatgttatttttttctttaaaatgaatggtaaaaacgaatctgtaaattctagcatcataattagtagatctcatatccatcaaagaagatgtattgacatcctccacaaatccaaggaggagaaaacaaagataatgaagaaaacaacaattaagagagacttagagatacataaatatgaaacccatattaacagtcagaagacaaaactctttagtatgagagtcctgtaaaatatacacatacagagacattagagagattattagggagaggatgtcctggaagaggccaagaatgaagaatctagcgacgaaggttcttgactttggaccatcccttcttacaagatttgcctgcaactttgatg

SEQ ID NO: 37301 - DNA, 567 bp, Arabidopsis thaliana columbia
ttacccactttttttgaccggatctttggcccaaatcatgttaattggcccatcaacctccaagatttcgtctccttcaaatcctctcacacctacattcactcacacaatgaatcacggaaaatcaatctcttaatcaaggcacaaatctattacattcagttttcctaatctatcaaagaatctttactaatcaagttgttgatattataacttccatgaatcttacctatcatttacctataattgctaatcgaatcaagctcattatattctgactatttatctttcaaaccatttatattcactgtcctatgataacgcttatttgaaatgcagttaccaaaacaatcaaatccatatctactctgtttggaagttacattcaagatatgacagtatctacttaacatattcaatcgccttcaatataaagatattgatcaagccgcatatccagcttcatttatttgcagagaatattcactgattgattctaaaaagattacgcctactctataatctaaaaccctatacaatctcacaacactataaatatactctata

SEQ ID NO: 37302 - DNA, 373 bp, Arabidopsis thaliana columbia
gagatgttgaatgaatatatgcaagaaggtggaattgatagacatacaatgagagatttggttgcttcgattcgtgctgttgataccaatgatttcatttgtaaagaggtttgtacatttaactcattgatctggtggatttgaagattgtgttttggtgaaaagattgcataattggagacttttcattcaacatatgcagcaatgaatcactgattttaagctttacattgttcatattaattaggttgtggttgtgtgagattcttggaagactatgtagttatgtgtggtggttatatcttgttggtttgatgtttggattgctttttgtttggctgcagtgggtggtggaaccgaccttgcttgtcac

SEQ ID NO: 37303 - DNA, 558 bp, Arabidopsis thaliana columbia
ggcttaaagtgtagtcccataaatgctttggaatcaagaaaagtttagttgtccattatgtcactaccaagattttggtgtggtatttaaattcaaaattcaaatggccatgtgaaacgagacaataataaatggagggaaaaaccaaacgaaattgcaaagaaagattcagcttgcgtggttttccagcgcacgttagatcccatcatcattcgacaaatttaaaataaaaaaactttaattttaaaaatactgccaacaatagttttacttcctttctctctctttgttgaattgccatcaaaagcctccgacaacggcggagacgacggctgattgaactcagctattttcaactccgcatttgaaatttctaaagcttgcaacttttagtgacaacgaataatgggtatgctttgaagaagctaatcactgggttctaaactcttattcttctccctgagattatcttcgtctcggggaaaattttcagtcattaccggtatttgttgactaaggagatgaggaacctgttggtctgtgcattgacatttggag

SEQ ID NO: 37304 - DNA, 602 bp, Arabidopsis thaliana columbia
gactctagcctgttccttgaaataattcattgttgttaactttgaaagattttgtcaagttgtgaaagtgcaagttccttgagataatctattggtgtaactttgaaaaagtttgttaagttttgaaagtggaagcttcctctctgtatatacctacgtttgcttcattgtaaaaatataggacaaaggaaaaagtaaaaacacaagtcttgagtgctcctttactcttctctctcgttcctatacatctatacatatgtatccaaactcccttttttttgaaaatctaaacaccaagcctctgtttttgtgttcaattagtttcgcaagtaccaacgaagtgttgtagccacagctgtgcaagaaagggaagaacacaatcgtattcgcacaactcctacgagggttctccagggactcgtgccgtgtgttatctcgaaagccatgaagtttgtggaaaagtagaattactatatttttctgtacaatatcaataactatactttagacaacttcttgtacatttgaacgttgattcacgatcgaaactagttagtggacacactttgaagaagatttcaaagaatgtgtttgagagatat

SEQ ID NO: 37305 - DNA, 529 bp, Arabidopsis thaliana columbia
tgatcacctttcaattttttaattgaattatccttgttttgtttaaaattctctgtaacgtacatatgaagtcagatcgaaaacggattcacttttgaaaactaatgtataaaaaagcttataacaaaacaacggacaatgatgtgaggtgcgctgtggtgcaggtgggtttctcggtttctcagtattaaaaaagtcgtattcgtggacaaagaatatagctatccgatcccctgataaaatatatgctaatagaatatagttttgtgtttgtcgctaaaaatatgctaactgttcaattatgtgtttggtttataaccagagttttacttcctagtttatacacaatattacatgttctaaaaaacaccgactacgcttcacaggtagaaatccattttgcggatgagttttgagaagcatctgtagtcaccgtactactatttagaattattgcattttccaaaagagataatataatttcatgcaaaattggttatatatgacaattattgaccgccactaggtc

SEQ ID NO: 37306 - DNA, 507 bp, Arabidopsis thaliana columbia
ctctatgttttcatttgggctgatctatgataaagacgttatgatattggattttccgtatatataggaaatgaagctgatatatatatgattacatttttttttgtttaaatacagtcagtacgttgtgacacaaccttacaattaatgaatctcacaccaagtagttcttactcaataacctggagtctggaggcaacaaatttagccttacaaactctttctctcttttttttttttttcggacaactaatttttttatcttaaagatatgatttgctcaccttttatcaaaaaaagttttaatataatagtttgtttgatttctttatgtttaatataatagtttgtttgattttaatttaagttaagagcactattacgaagaagaagatcaaagagagtttgttgaggatattaatctgattttctcattcgatcacataatgtgtaatgtacatgtatttatactatagctatacaattgatttaagttaccagctatac

SEQ ID NO: 37307 - DNA, 589 bp, Arabidopsis thaliana columbia
catagttatctcttttaataaaatgttatattagccttttttggtgtgtttttgagattttcattgtacaatgtacacctttttttttatttggtgtaaagtttaacattaaaccaaaaaaaaaaaggatatagacaaaattacatgtcaacatttttgtgtccttgagcattctagaacgacgagaaagaatcaaccaggaccgagtccctttacttaccaatctctctcttcaatacacgccaacgaagacttagctggctttttatccacatgtgcattgcattgaccaagtctctgtcacagctcccattttctccacgtggcacccattaatgtctcattctcgggttcatataccacagccccgtgaccaatgaatttcctcaaactgagattttattacagacagatctgtgtacttttattttattaccactagacgtgtccactgcgtgtactgtaccgagtaacaaaaagagaaaataaaaaaggaatgagaacacacaacaaatcaaattatagcttttatttcgtcaccctttctttttatttagttaaggaaaatgagaaaattatccaatattga

SEQ ID NO: 37308 - DNA, 563 bp, Arabidopsis thaliana columbia
ctgttgtaagtacatggctaaatgcgtcattgttgagttgtgcgagcgtctcggggtaaacctcgagcatatgtgaaatgagcgagaaatactgcagaatttgattgctaagtgagaattataacagtaaagtactacgagaggtttgatcaatggttgatgcaaagccctaccgtcgaagcaaagcttggggtatttgaggagttccaaagttataagtggagtgattatatggagaccaaagtacaccacctgtaagttaaaaaaattacacaaaccattcttgtagaattcatcataattaacttggtttacctgggaaatatttgtactttgtgtctcaatactatcagatgaaaaatcaacctgcaaaaaggtaataccagttgttagaagataaggaatactggtgaatgtgttatatattttctacagtacgtgaaagcaagaacgtttaccatatctttcgagcacaaatgggaaagtagctgaagcagacgcagtaaatccttatacttttcggtttttgctcattaagcaaggtactagagagagacaatgat

SEQ ID NO: 37309 - DNA, 466 bp, Arabidopsis thaliana columbia
taacgagtacttaaagtagtccccttaacttttcaacagagccaatgtctatagaaacagtaaacaaactttgcttggtgaaattgatgcaatccttgagaagtaatccacaaactttggatgagattttttcaacaaaattaaattcctttgccaataaagagaaacgaaaagtaagtagaatccagatgtactagtaaaaaaatcacaatctctggtccgatcaagtcatgccttatgaattccaataaacttaaacgcgaaatggcaaatgcaactctaacatagaacaaaccagtcccgatcaatttttttctccgactattcaaagtccttaaaccctaaaatttctctttgaacattccatcattatccaacaatgtgagacgtacataccttccaggataagagcttcgaggtctaaatctttggcgacgtttttctctgtcgctggttgaacaaagac

SEQ ID NO: 37310 - DNA, 511 bp, Arabidopsis thaliana columbia
tgtacaaaaaattatatatatcaaaaaaacaccagacaacttacagacatcgtactgtaacttaaaataaataaaactcaacgtgtagttgggaacattcacgtcactaccagagagagtcacgagtgacgaaaacctttgaaatatgtcatctatcccaattcgttttttggctgattataactacgcaacaaaaacaaataaagatgttacttaattacaatacctgaagattaatataggtccacaaaccacaatccacatacacagagttataatacattagcatctatcttaccatcattgctacggtatcaagacgaataatgaagataccaaagctaaagataaaagaaccaaagctaaggataaatacagtaagagcattatcacttttattccacgtgtcattatactgatgacgtggcatattcctaattaaaaagtgttattaggatcacggtaacgttacttccctaacaaaaacataaatacgagatagatagctatt

SEQ ID NO: 37311 - DNA, 530 bp, Arabidopsis thaliana columbia
tatgaaagtattaaagtagatggtccatgctgaccatccaacttaaaaacaaaatgcactaattgacatgtgaccaaaagtatgagtctagcctagttacatatacttttcgtgtgtcaagcaatatggttgtcaagtatgtaacaaggagtggtttacgtatcatatgtcacttgttacttaggcccatattctatattacacgtctaagtaacattgttgtctaccaagcaatggtcatcaacctcattctcttgaattcaaaaaaatgaaaagcggtacaatgagtttttaatttaagagaaggaggttaatgaccattgcatttgactactaagtcacttctcaaaaatgtctctaccaagacatttaacacataatgtctttagtttaaagacacttagacatttaattaatatattttttggggactttcgtaagaatatgcacattttgggtcaataattagagaaatgaatatttagaatggacttataggtttgagcatatattagccatatatatgacgg

SEQ ID NO: 37312 - DNA, 406 bp, Arabidopsis thaliana columbia
gtgagtttgatctcaaagtataaacaagttgaatcatcagaaagcaaagagttataattatagattcaaactcataattaggatcttaaactatggtatcttagaaaaaaaagcagagagaattattcgataaaatgttcatcattacaagtgataatgcagaaaacctgacgtccattgaagactctcctggatttgtaatagagacgatactctctcataaaccaattgctcatcttcagacgactctctttatccgccttgtgtcctatagtaatacctaaatctcgtcgttccaccaatttcctcagccgtctccttggacaggactgcgatgcgagcgtcttcgagtatccacgatccctcgcaatgaacaccttccaagttactatacttgcgattgcgt

SEQ ID NO: 37313 - DNA, 394 bp, Arabidopsis thaliana columbia
caggtgcaggctcagaggatcccgaatctcgttcttctgctctctaagtttgatttttctgaattttcttctgcaaagcaaaatcgcagaagtcgtcgtgtgtccgcgttgcatcgaaccacttgttcgattctctttcgtcatcctctcttatatcatcagcaacaacaacccttgtttcaaatttcttcatttccgccggatttataatcgcagattgattctgatcgatagagatagggttattcaaggagagacctcgattgacttcaattgtcttcctgattcgatagataagatttagggttagcttgacgttgacgttgatataggggaatggagacggacaatgggaaggggttgatactagctgtagcgtcaagtgttttcattg

SEQ ID NO: 37314 - DNA, 331 bp, Arabidopsis thaliana columbia
  unsure (1)..(331): unsure at all n locations
tacaaaaggacaaagcacatgacataaacgaggattgctatcatgcgataaacatacataaaaccatcaagctgttgtggcaaatcagaaaaagccaaacagcaggtagggactatcgtatgngtatgtcaagtgtttcatancaaaacaatggcaatgacattaacaccaatcaacacagtcaaaaacgtataacgaggcncaacaacatgaactatctagtngtggtcgaaacccgtatgccatcaaagggttcacagacacanacacatataccccacacgccaagctcancgacaatgtgaacatccaagccgcgatggaccccaga

SEQ ID NO: 37315 - DNA, 633 bp, Arabidopsis thaliana columbia
gttaaatatctacttctctctgtttactaaatggttgagtattaataacactgaaaccaggataccatttcctaatctctgtctggtttcctagtttcagtggtatttttccggtctagacccttgctgggtggacgaatcctaggccaaaatgggatctatatatttttgaagtgagatatcttataacatccatagtgagctaacctggtttggttttagattgaagagactttcttcaagggttgactgagttgtcaatgcaaggcccaccatattggacctattggtcaccactgcaagagtaaacttgtaaaacagttacaaacaatggcatataccagcatatcccattagtacatggaaaaggcagaacaagtcactcttctctaatcaatcattctccatagttccaacgaaatacttgaagaaactcaatcatatctatctcacttttgacaagcataacacttctttagtctgaatacttttcatgttactacaacataatggatgcatcattattcattaccttccaacacagagttttggtggatgctttatctgttgagtccgcatcgccaacataagcaggacctattcctgaaatgagactttagtttgttgggcaag

SEQ ID NO: 37316 - DNA, 511 bp, Arabidopsis thaliana columbia
gatgatactataacaaattccaaacaagcaaaagcactataccaacagtagcatttaatcgttctatacaatccgacgcccaaagaaaaaaaaatatcaactccatttgtgtgagcccctttattccctgacctcccataaaaaccaccaccaactttgcccacaataaaccaaaaattttgacttacaaaatacaacaaaagttaacaaacatataaaagtgcaacaaaatcgaacacaagtacaccaaaagtccccaaccaaaaatacctctccaccagcttcttgattgaccagagtccaaaacctaataaacacatatatgttgtttcattgtttgcattcatgtgaggtggaaactaggcttgggaaagataaacaacgtaccatggcactgagtccttaagttcgctgcgacactcttctttggcctcgagccacaacggtcttagacaaaacctcctcaagatattcacaacgacttctatggtgatcgatcaaacacataatt

SEQ ID NO: 37317 - DNA, 566 bp, Arabidopsis thaliana columbia
ctgattttggtatggtcataaattgttcttaaattacatgtttaaaaacacagatacagtacagtgtctttttgttctccctatataagtgttgatataaaatttctttattgtaataagattaactcttaattaaaaacatcaactaaacgaataaacagaaaaatgttaactttaattgtatgtttttaactgtggttcttaaaagggatttaaaacttttatgtaatttgagttttgatcttgaaacttcgtgtagctatagtctaagatcatagacttcaattcataatggtagcttgatgatatgcaaatatgagcccattcttttcgacacagcagaaatgagtatagggcctctaggcgaactatatttggtcgtaactggtaaaagatatgtcgtctacaatacaacagagcgtatctaaaatgggatataaagtgcttaaagattctgatatgcaaattccaaaattgaaaattaaagaactcgtaaaacaagatgcattgtccaaagagacaaaaaagagttcatctttatttcccattttcgcttaaatgataat

SEQ ID NO: 37318 - DNA, 618 bp, Arabidopsis thaliana columbia
accctgaaaactattggcaaaaaatgaagagacttttcaataaccaaaccaatgattatgcccaaattcaataagccaatcaatgattgtgcagaaaatcaaaacgcaaacgcaaacgctaccttttcatgggataaggaaatgaagtgagagtaatggacgaagcttttattctcctatggaagacatttatcataaaggagagacctttttcaatttctagaactgggaaaacgcgtgaagcttgaatttgacaagccattagaaccagtctcgagttttctgagatttagggttttctttatattacgtcacagcgatctactagacacaaaacgaacgaatcttaacggatcatatccacaaggaatatgaaagaaccagattgatctaagaggagaatgcaagaagcttggcttgaaggaatcaatggagattggtgaagatgagtgatgattgagaaacaatgacaaaaggcattgaagctttttagattttcattctgttgaaaaagacattttactccttctactcttttttttgttctgaatttcaagttttcaaattttggaggacgattatcaattataataaatttggtaattcacatattatttg

SEQ ID NO: 37319 - DNA, 619 bp, Arabidopsis thaliana columbia
tagtaacggctgctctaaagtgggtatggcggttgggggccattttctatggatggtggtgcagctggatcgggagcattcccgtggtccggcttgagggcttcgtaggctgtctgaatggcagtctccccgagccagccaggccggtagcgcgcagtgacggtctccgctaccgcggtcacaggagctacaactctggacgccgctacttgcgcgtacgtcccggcaacaagagcaccgagttcaagaggcatggtcgtcagactcgcgccccggagagaacttgggtccatcgacgcagacagaatgcggaaaacaggactccgacatagaacctttttctccccatgacacagtataagctggaaatacccgtcttcggcatctggcggtattcgcgcaacgaccgtctcccgcagccgatgggtctgcacgcgtttcgaagctttcttgtagaacttggcgatatcccgctgccacgcgcgctctttattcgggtcgacttggtcagcacggaccgcaaccgtcggtgtagcattcacccagtcatcatgcatgcgaaaaagggcttttgcacgcattcccgtcttcccggtccacctttgcattgtaccagagc

SEQ ID NO: 37320 - DNA, 506 bp, Arabidopsis thaliana columbia
cagtctctcttcttctggagtgttttttaaagcctcttattgatatcgagaaagttatatatggaaacttcgtggatttagctactagctagtgcgagaaatagaatcccatcgatacgaataccggcggcacatgtgtatctagatgactagataagaaggcttcctagttcagctgtgttttgcttctttctttcatctggtccaaattagtaactggtctcgctgtcactagccgccgagttggctcactagaatggtagcgacttgacaaggtacgacctatttctgtaccccattttcaattttgatctctgcgtgatatctctctgtaagtagtaagattgggaaatttctccttgtttccagacatatttaccccagttaccttataattgaaaatttgaagcaacgcatccatgggaggtcaaagctcaaagattggtacatgttgtcacacaagactactgctcttgaagctccagatgttggtgacgtctctgttt

SEQ ID NO: 37321 - DNA, 488 bp, Arabidopsis thaliana columbia
ctataagacaagtaaattaacctcctagaaatgccaaatgtgtcatacgttttctttcagattatagcaaattaaacaatcaacacaatgcttcgagaaacataaacccagagccagcttcttacctcaatgaggcacacaacattattcagcttcaacagcctccggtttgggacctgcacagacaaattaatatcatacccacaaattcaacatgagagtttcattcatcaatcaaacaaatgcactagctcaaagcctcagactaatctctatcaatatcagtcctatatgaattcaatgattttgctaatcaaggcactaattaaccaagacattaaccaatgagaaccaaatacaaaaccaaaggaatcgaataatacgcttcagcaaatcatccaccattaaactcaccgtggagcgaaataggacgatgatcctttcccaaccgacgccgcgagtggaatcgagatactgctgaacaagat

SEQ ID NO: 37322 - DNA, 661 bp, Arabidopsis thaliana columbia
ctgagagaggacaagaatctcaaaggaatcacaaggggatcattaggaaagaaaaggttagtctctccagcaaacatcgtttaagaggttcatcacgacagatgaaaagtgtttctctcacacttgacaatggcttaagaagagagaagcaagaacttaaagttcttttaggatccgtgggttcaaagagcaacaaagttggatacgttaaagagatgttaagcttcttgtcaaacagcggaaacttatctaagtcggtaatgtggactcctgcaacaacccgtgttgcttcattatactctgcagcagatgtctacgttacaaactcccaggtaatcctcctcacacctcaaaaacattatttgatgcatatgcagttttccactagaaagtagtttacagttaggttttggtttagttttatcagttttataggaacttgaattactgaatcaaataaaccaatttgtgattgatttcagtttggttttggataaaacatttcagttttgtttttgtcaaaatgtaggttttgatttcggtttgacatttcgattttgttcggtatatttattttgaaccttgattttttacagggagttggtgaacatttggtagagtgcaatcgagcaatgcttatggcttgcagtggtgggacaga

SEQ ID NO: 37323 - DNA, 529 bp, Arabidopsis thaliana columbia
ttttcttacatctcagtgttttgatgaatgaacgtagaaacaggacttaagacatcgttttggaatgaaaatgtttattagattgctcgcttaaattcaagctatcctggaggtttagcagcatacattaagactgcgaaagagcttctcgctgattcgaaagtagggaaaaacccatatgatggtttctctccttctgtaagtatcatcaaatcttctttttttgttggtatgaattcaaaagttcattgttttatgttgtctctgttggtttttaacaaaaggttcttgtggttcttgcaggtcacttcaggagaaaatctcacttttggtactgacaacttcatcgaaatggaaaaaagaggtgtcgtcgaagctaggaatgctgcttttgttctggttgctggtggtcttggcgagcgtcttggttacaatggaatcaaggtacatagtgaacaatgtttcatttacttaatcacttacgcgtagatagaatagatagacctacaaacagatttgacccagttat

SEQ ID NO: 37324 - DNA, 570 bp, Arabidopsis thaliana columbia
gtttcttgcggtcaatcgtggctttacttggcgcacgtattctagaggatcggtctctagcccaacggagaacggtaggagaatgtagccgaagagatttccccatctgcattttgatttcttggccatcatatccgctagagcctatattgcatcattgaacaataatgaaaccacacaatccgtgtaagaagtttcaaagataccaagactatatattgatgtacctcaattcctgcgtttggtctcaagttaatcataatggctgaacgaagtcggattctcctcatggactctttcgatttcggtgttgcttcttgatctgtttcaaaacatatgacaagagtttctttagatcagtgtgagatctaaattaatatgtataacatagtgatgtaaaaacaactttaccatattttcgactaaggtaacgcgaaagtccggcttgcgttactccaagaagaacatcgttcaccgtctaacaaaaatagattaaaagcaaaaaaaaatgtcagcgagtatacatgatcaagagattcttaaaattaggcaataaaacaaatttaccat

SEQ ID NO: 37325 - DNA, 377 bp, Arabidopsis thaliana columbia
gttcaacgctccgcctatagattgagaaatgttcaaaacacaaaatcaatggagcacaaaacatttttctttgtttctagaactataatctcaaaaccgtctacttagagagtgaatgatttgtagagtatgtatatataccagtagaggatcattattctctttatccaattccttcttctgcctcgcatcatcattagtaggtgaaattgaaacctccattgcatctgcaaaagctgcaaatgcacttgtatgttcatttatctgtgtcatcactcctatgctctcgtagcttctctccccaggactgaaaatgtagcccatgtcctggaaaaataaatacaattaagttgcctaagggatacatgtctatatat

SEQ ID NO: 37326 - DNA, 600 bp, Arabidopsis thaliana columbia
  unsure (1)..(600): unsure at all n locations
ttgaatgaattggaaaattctgcaatggttgatacacttgcttggtgtctatacatcattcaaattcgaaatcttgagccttttgcacattggatagaatctcagatagcagattcacatttgttaaagaactataccgtaactgtaaaactggtttaaagggatctttgtattttcacatgtattggtttcgttattgggtggtatactttcctgtaaacactctgtgtagttcgatgtagacctacttccccttcgactatagtatatttattagttctggaaatcgtatgaatagttggttagtcagttatgtaaattcctctactattgttcatggtcacattggccatagactacttagtgatttagtatcttggttaaggaggtactttatagcctctgctttgttatatagtcatgttgttataatccttgggtatggaacaacttgaatcatgacacattgcatgcatctcgaaccgtctttacacagaaacatgttttatgcattcacaaagtgttcacatacaagcgatttttgaataccattgatttcctttcgatagattgtacatgtgtntatatttttatattggt

SEQ ID NO: 37327 - DNA, 487 bp, Arabidopsis thaliana columbia
cttaatgaaaccaaacttcattcaattttagttttcgcgaaatttgggaatcagaattaaacctagctatcgcaaaatcaagttcggaaatggaatcaaaatcaaagaaggaatctacgaggacttgagtaaacgaagagactcacaactttctgagtgatttgagagtaagaatcgtcccagtgaggtgaaattagaggagacagttgtgaattcggaagcgattgagagactgagaaaggtcgattcgttgaagaaggagttagagaagagtaacgaggatcagaggaagagatagattgaagtaattcgaagcgaaaaggagatcggtgatggtaagagagagtcggatctacgcctgagtttgatgtcgcggccatgtaacggcggtgtatctccggtggtagagaagatgggatttagagtgattttatgaagcgattttggagaatcgtgatttaggtttttgtgggggaagatgaagaag

SEQ ID NO: 37328 - DNA, 556 bp, Arabidopsis thaliana columbia
tcactatgctgaaatctaaaagcatagacacaacttttaccaattccaacatagcaaaattcagaaactaatttaactaaacataaacacaaaagtgcatgaatctgctctaaatagcaataacagtaacaccacaaaccctaagtccagcaactaaactactcaataagtacttgcaatgctaattccaatactacaaacaaggttaatcaaaagagaccaaacgcaattaacaccaacagaagcagatcccgacacaattctcatcaaaatctaaagcaacgacatcatcaaaatcataatcaataaaaccaaacctcacacacaatcgaaaacacgagaattataaagcaaaattcacaagcaaaattgagaagaaaaaagacttacagtagatttgatcacaatcgcgtcagagacaacctgatcagcaacagctccaccaccgcgagtctccgccgcatcaaaccggtgatactcaccaggagcaactagaggaggcttcatagaagaaagagaaggatgaagctgccgcttagaagatgggaattgttga

SEQ ID NO: 37329 - DNA, 403 bp, Arabidopsis thaliana columbia
atgatgctgaatttcgaagctgattgatcaaagaatcttcttaatgccctgatatgagcttattttataaagaactacagtacatacattgtttacatcagtgttatttgaatcatgctgaaacatcttcctcgtcgacagtggagatcaatccaattgattagtgtgaaatatagaactgcacattaggccattaacgctaatctaatcactactagccgaactctaggttcagactacataacgagtgcaagtaaggcataactgctcgcataaccattgctacatcctctagggctacagggtttatgtaacaacctgtagccgatctcaaatccacgtactcgagaaagctgaggtacaatccgtatgaaccagtgcagtatgaggtaaatgtgactct

SEQ ID NO: 37330 - DNA, 869 bp, Arabidopsis thaliana columbia
tttcttctcctacccaaccaaagtttctcatcattcatttcagatcagccatggaggacgaggtaatcttacatcttttcgtatatatttattataaacacgatttagctctgtttttccgccggagattataatttgccggagacctttattcgagatctgattgatcatttcttatatgcctacattaactttgatacccattagatttctttttgatggaaatcgatttgatgtgaaattagctgctcgttactctggctttttccactcatcctctatagatgatctggtggagtgtttgtatagagaagaaagacatatgagttcattagaattgtagaaaagtgatggaagattttccgtcaaatcgttttctcaaaggcgtggtggtctattgttgctcgactggaattgtataatagagtttctctgtcaaaccattttggcatttttttagtagacttgggaactgaaagagaagaaaagatggatctttgaagtctaaaagaaaatgttgttattgttggtctccatcttcgtgactcactaggaaaatttatggttttatctgagttttaaatggcacaaagcgcaccatggctcagagagtcctttagtgcgctatgtgccatggctcaccaaagcgcgcgctttttagatctgtggtgttctattaacagattctctgcatatggttttagccttcaagcttatatcgtctatggtgttctatttagaaaaattagggattttacatcttctaactggttaaaatgtcgtgggttaagaggtaagggtcaaatccgttttagtttaagataaacctaggattgatttggtttgataagctaattatacacatggtt

SEQ ID NO: 37331 - DNA, 610 bp, Arabidopsis thaliana columbia
cccgtgtgtgtgtgtgtgtgtgtggatagattgtgatagtgtatatttgtgttgtaggcttcacaacatgcgatatttctctttgcaagactccctcagatatggaagaactttaaagtgagtctatactacaatactcattttcactatttttgtgattgatgtctcttcttgttgaacttggtgttttgagcttaagtcacgtgttaatgttcagtcatgcctttatgttcctgtgatcaatctatagttaaacttttatagtatagtttaccttacaatcttttgctggatacaaacactgttattattgttcatgattcatagatactcgttttagccatatatatatttctatagattctgcagaagtatactttcagaagtatatatgtatgaagtccaccgggcactgcttatgattaacattactttatctctatctacagaacaaaagcactggagaacttagtttcttaactttcttcatgaactttgccgggtcaataggtacgaaggctccttcgtcggatgtctcttctagtttccagtggatatgtaataatctgtaatctcataatactttttctgtttcgtcgcagtgagagtt

SEQ ID NO: 37332 - DNA, 563 bp, Arabidopsis thaliana columbia
tgaagattttacaaaacctaaggtgaaaagacttagacatattcttgaggatgataaaactgagacacatatattcttaatgatatcaggttttgagactcacaacattagaccattggactcgtgtcgtcccataaaatcaacatctacactctctattatgtcaaagtagcatgtctgaagaaagatattttcatcagaatatattttctgtttgctataccgtgttaatcttttattaggtttctcatttctctaatatctatcagttgtctataatgaataagggtaatagaaattttttgatggcgcagacaacaatccggtgtaagtattttgggaggttgcaactggacatatcgctcaaagagacaaagacatggacacgtgtgatgagagttgactttgaccgggtcccttacaaaactcccgcccagtgtggtagacatagctttggtctgctttcgggcttacaaagtgggttgtgtagccagagatcttggcgcatttttactgttgaagtaaaacgacactggctgacgacttttgcaagtctacaattt

SEQ ID NO: 37333 - DNA, 526 bp, Arabidopsis thaliana columbia
ggaggtcgactcatcccctgatcggtgacttacccatgccgatctccagagtcccttcttcgatgtcgagatcattcgtccccattttcacagatcaacgataaaccaaatcaaagcagctcctgaaatcaatcaacgacgcagtccgcaattcaaaatcaatggaaattcaaatttcgatccaatcatagaaactcggatgcagaaagtagaaaatccggtgaaagtgaaacaacttggtacaaggaaagagacgcaatagaattttctgatgatctaaatcaacaaagcacatacctgggaacggttcgattcgagcagagagagagggagagagggagagagggagagagagttatggtttatgagtctctctgtgaacgtagttggaccatatctcaaatctatcgtttttgtagagggagggctcttatttacgtgtaattacagtttaaataccaaactctataacattacaaatatggcccattaccagattgtgttttctgcacgtcaccataattga

SEQ ID NO: 37334 - DNA, 403 bp, Arabidopsis thaliana columbia
tctgttttgtgctgcaatatattaaacagtctacttcatttactggtataattcaaaggcggcactaatattactaaataatctctgatatgatctatatttagttaataaattaccataatgataaaggatatttaacaagtaacaacattaactggcaacaaaaccatccatgaactacttcggtgtaaaataaaaactgaaaattttagataacaaatgttactctaaaattagtgtttataaacgaaacaatttctctaaaatcttcattcttaataaccctctctttaagctttttcgaaacaaaagaaataagatgaagaagtcatcaccattgctctgtttctctcttgctttgttttctctcctctcatctccatcctcttccactcgtataatc

SEQ ID NO: 37335 - DNA, 707 bp, Arabidopsis thaliana columbia
atgtagctttttgattatctcgtgaccttaagacattcagtaaacctttatgagacacttcaagacgttgaaaccctgttttaacttgagtctcaaagttattttttcttagatttgtacgtctagtagtcgtctttcgaacacccgagtttgatttatttgtacgagaaggagaactttgtccttgttcattagtagtgggtatcgatgatggaacaattcattgaagatcctcatcaaatgttagttctaaattactagaagaaaacatggtattagtgactacaatatccctagctaaacagtcggttaatcgaaatttatgactatttggctacatttatgccactatataaccactagttagcgactgatatagtgactgtttatccactacatgcgactgttgttttatagttttggtgactgaatactacctctttgtgactgattacaggtttaattatcgatttagcatgttatttttggaatcctaattctattgtaattacgaatatataaacaaaaaggcttgtacttaacattcagaatcaaacatgcaacaaaatattcaacattcaaactaaaggttaaaaacccaaaccaacacaagttcaagtcttaaaccaaacaaacaaacacaagttcatgtttcaaagtttaacgacaaagaagagaagaaaggtagcttagggactcttctgttg

SEQ ID NO: 37336 - DNA, 508 bp, Arabidopsis thaliana columbia
taaaaactcaaaataacttaaatcactcaaaatagaagattaaatacactcatatttttagaaaaattctaatcactaaatgaaacgaaaaagacatgcattacgtattgaaacgaaattgatctgttattatttggttcacaagatttgttataccttcactttccaagattaagacatagatatcatccacaacacaacatctttgactccttgactctgctgataatgaaacagtcacgggtctcaacacgacatcgtttttgattctttttatgttctaattttgtcattgtccacttctttgacactcttaaaaaaattacagatttatcatttaattagttaaacattactaaatcaaatacatcgactgatagaatggcaatgatccatttataatctaaaactaaattagacacagatccgttgtctgtgcttccatttaatgttcttctcatagtttcgatatacaacataaaataatatcgaataaataagtcttgtg

SEQ ID NO: 37337 - DNA, 547 bp, Arabidopsis thaliana columbia
cgggtaccgagctcgctgcggcttttgctgagctaagagttaccaagttcgccactgggaaaaccaagataaagttcaagtgttcatgatcagatgtttggaaacataattaacgataattggctagcttcttaaaacacatatcctcataaactaagcatttacctcaagactaaaagatttgatacatgccacagaacaataacagaatgaaggaggtgagaagagagtagtgacaacattacctcctaaaccactagcaagcatcgcaagtttaatgcttttgctctctaacctctctaaagaaacagcatcagacactaaacttctctccctctcaagctcacagtgcttgccagcacgaacccaccttttctctgtagtccatggagagaaatcaaactcatcaataatgacccaatggctcaaaataatctattcccaaacgtcagtgttctaatcagcttcctaaatctaaccatttcaaaatgaacgttacaaagaagataactaaacatgtggtagctaaacgacaacgcgacccagt

SEQ ID NO: 37338 - DNA, 333 bp, Arabidopsis thaliana columbia
atgctatttgcacgtgatgatgatccacatcccaagggaatagaccagatgttttacacgatttgttggtaagccatattcagtggaggattagtgctgagtcgaagctccctggatttgctgcgctggctagcttacggacgaatgcatcacgaggtgcccgcctttgcgtgaaggagtacgccgtctccaccacggcgagaaggagtagcaccgtctccagcacggcgaaaaggagtagcaccgtctccatcacgcatgcggaaaggagtagcaccgtctcgatcacccatgtcatgatctgtgaatctagttttatattacaaaaaagtg

SEQ ID NO: 37339 - DNA, 458 bp, Arabidopsis thaliana columbia
catcttcttctttttttttcaatttgtagaaccatcttcttgaattttgtttttcctcgcatatgtcgcaccataggcacaacatatctcttaatctctgctataccgttattggtaacagagcagaagtaaacttagaatagacataagtcacaatcagcacaccagtatcggtttcttaatttgattaataaaaaagaagaattcagatgtaatgtattatgcatagcattttatccatagttgttcctttggttgtttcttgtgtgcgacgttttttaccaacaggctccatataccatattttaattgaagcccaatcaggcccacgtttggtttagggttttagtttatatatatcatattttactgtataaaaagaaaactaaaatatgacagtaatataaaacagttctgtctggttctagtaattaccctaatttgtactctatctgaat

SEQ ID NO: 37340 - DNA, 526 bp, Arabidopsis thaliana columbia
atcccccacttattgttacgatgaaacaacaacgttgcattcaaatctcaaattcctataaatcacagataaaaaagtaattttgttttacacgtctacgtggttacaaatcctaatcacgtaactaaacagtaaagttaaagaatcttgaaaaataaagatctactttacgttttgtagatatttttaattgagaagtgaacgtcaaaaggtaattggatattttcgttaaaatgttatcaatcaaactcggacaacaattagtggtaatttaactatttaaaaaccagactaacccattatcgtatagtgctaattatgaactatgaaccgattaaacaacaaaatttactatataaaatcatcaggtgcttttcttaatctcaacggttaagaaaaataaccaattagatgtgtccacgtaagcaggcgtaccataagctaccaaccaacacatacaccagattctcaccaacagaggaaaaaagcttctactataaagcacacatcttcttcttcatctctc

SEQ ID NO: 37341 - DNA, 550 bp, Arabidopsis thaliana columbia
ctaactcgatccttatcctcggtttcttgagagagatctaatcctgcaactactatgacaaaatccgctcccttggcgatggccacagcttctccaaatccggtatcagaatcacaagacacgtctgagcaaccagacgcataagatgtcttcttcacatactccagaagttccgtgaacaaagtctttcgttgacacggctttcctttacaaatatgacatttataaactgtttcagcgaggagaaaaatttagcctgcttgaaaataacaagaagatagatagtccgaacctgtataagtaccgcccatattgcttatattattcgccattggaccaacgattgctaatgaagaaacatggtttttgttcaaaggcaacaacttgtgatcatttttcaggagcacgataccctgtcttgttgcttccagtgccaattttctgtggtctgagctacaaatgtcatttgatcctaactttccgtactgtcctcttcttggatcacatcaaaaagtccaagacgaagttgaacagcaaagagatttagcag

SEQ ID NO: 37342 - DNA, 1117 bp, Arabidopsis thaliana columbia
tatcttacatagttagctcatgctactcgttctattatccgagacccatgaatcagggcaagccctgaagggggctaataagagaaataaatgaatgtggcccctaaatttactcaaaagttttgcaagaaaaaatagtttcaaataggtccccaaacaaattatttttattaaaaaagcccccaaagatttgaaacgttttataataaccttaaaaaaattattttgttgctttggtccccaagtaggaccgggcctgccatgaatccatgatccatcaaacttacatgtagtaggaagtaggtcgtatgacacttttcactgcttaaaaaagatgacccatatgataaaaatatagttgggcctaatgggctgaattaaagatccataagtttaataacccaacccgtaaatccatttacccaaaaaagttttttttttttaaaacaaaatcaattagggttttaacaaaaggttttagattcctggattgctactctttctcacctgtgccgtcctgtggaaaacatcgttctttcaccaacaatggcgaagaagcgagatcgaattgtcaacactcaaccttttatctccgatgacgcctccgtcgcttcttccaggaaacgatcaaaggttccaaaaacccatcagaaacaggaaaaggtgagtttcgtcattttttcaaatttcaagcttttagaatgtttcaattgatcgataatttgggtatttttgcagttgattgaagctggtatgagcgagaagatcatgaaacaagctcttgcccaacaaaaggaagttgctgatgaagagaacgccgagagaaaccctagtagcgccgcttttgctgttgccggcgctgcgactgctggagaggagcagaaaattctggaggaggaagaagatgatattgatgattttgatggaacctttgaaaaccagagccaattcgataagcaagtgagtatcttgattctatatagcattagtttatggaagctctagattgaattgcttagaacgatgccaaaattgagtctttcatgtttatgttttgatattgttatgtaacttatattaggaggagattaatgaggatgatgagaagttgtttgag

SEQ ID NO: 37343 - DNA, 596 bp, Arabidopsis thaliana columbia
ctcacagcggatctaatctgctacacccagtcctagactagatacagtagacatatagctaagagttgagctgctaaacttgttcagaaccttatcagtaacaagcataattaattgagtaagaccattcaaaaagagtcagacaattcgaccccatgttatgtacgctctgattgggttcagcagattctacaagatttgtcctttcgaagaatcaagggaagtaagtaagaaaactaacctctctctggttgccgccggagaaaagacaagagaatcgtcccttgcttttggtgattgaggttcgaagagagaagacagagttagggtcaagagtccggtggcaacaacggaggtggagaagtggcgaggaagacgaagggtttatcaatagcctcgttacgtgtcccatcgctctctcttcctctcccttatcccaccacaataatgctttcaccaaatttctcctacattttgtagtctgttgtattggtagcatttgcttttgttttttggattttaatgacaaaaataaaaaactttaaataaaatgaaggttagcatgactaatttgttttctgatccatagaattttt

SEQ ID NO: 37344 - DNA, 599 bp, Arabidopsis thaliana columbia
caagtagatagtttttgacaagataaatgcaatattctacaaattcgtttattgagtgtgctatggcaatgaccccgaaaaacataatcaggcaaacatttgtgaaagcaagggaagatatgccagaatttcttacatgtaaaattgccacaaggtttcctgtaatcatcatcctttcgcaagatagtaacgtgatttccagaagtgacagccacaagttctcctcttggtgaaataaataacgacaccggcttattagtttttttcggattccagtattcactccacttttccttgagttgactaacaccttaataccataagagcacagagatgaagaaccaatgagctatactgctaatttaatgaaaagagatgtacacaaacatgattcctacaagctcataaaaccaaagattcaaaaatcacagatctctgagttaaccatctgcgactgacctttgatggaaacaagtgaccgaagtcctcctttcgaattagttccatctgcctaaacttggacagcggatcaaagcgtaagatataagtaaaacactaaattgtatagcaatgatgaatcttgtcctgaggaagaggag

SEQ ID NO: 37345 - DNA, 450 bp, Arabidopsis thaliana columbia
caatggtaacaagttaaaaaaagcttaccttgtaagaagaaatgctactgggtaaaggtctacacatgaacaaaaagagccaaagaagccattaaaatcacgaacccagagcacaaaattcagataattgagatagagtaagagcagggagattacggaaaatcgatatcgaaacgagattttgaatcctggagagcgaaaggagagaattggcggcgtcagtggctagaacctcgtatgatttgggcttatacaagggaacacctctcctaggatcggaattagaagaagtagatgagattgcgccagccgcatgtttgcggtggctccgcatctgattctgctggttagaatcgaaggagaagagaagagcgccggtaacatcgcaatcggcatagccatttttgctctctctcgcgcgctgtgtttagacggtagtgataacactgg

SEQ ID NO: 37346 - DNA, 519 bp, Arabidopsis thaliana columbia
cgtcattctcgttcttctgttgaagattttctcggagctgatagaaaattaaattttctcgggaaagtgagaagtttctcagttagagagagaaacagagtaaaagtagttaaaaaagaagactcaaattaaatggcgcttggattctgttatagagagagtttctcagctctggaactctgatataaaagtaatcacagccgtcgatgaggtttagaccaagttgagatcagcggttgtcaagagaagtagtcctgagctctaccgcagtggataatagcatgcaatatatttgacgccgttagcaaccgtctctggaccctttaacgtcgtcgtcttgttgtaaaagtaccgatttgataactgccaatcaaattccggttcaatccggttaagggaagataacaggatttagccacgtgtcatgaggttgtgcagattagactgtagccagtgttatcactaccgtctaaacacagagagagagagagagcaaaaatggctatggcgattgcgatg

SEQ ID NO: 37347 - DNA, 560 bp, Arabidopsis thaliana columbia
ctgagaaaagcttagcgaacgatggatattgacatgttgcagagaagctctttcttcttgcagatttatcgattctgacaggtggagaaggtaaatgtctgagttggggagctggtggtggctggaaccttttaatctgtgggttatcttcagttgcaacaggatattctgttacatgtgaaggtaaaaagtcagcaccagggaatcagaatggccattgtaaaaatgaggggagagacaagcatatatcacctcggcctgtactgactggaagagagtatgctatgctattgttgcttctgtgaatagcagcaaggttttgtgcacgtcgatgattcatgcgaactgcgaaaagtgcaaagaaagtcccagcaaagctaacccaccaaccagtaaaaaggtacttcctgctcctatgcctttcttcttctttttgaccttctgagtctcaggtctgggaaaattcataatggcacttgactctgttgttggatagcagtatcattttgtatcagtggtctgacgtcaatgggaacttccacggtttatagttggggggt

SEQ ID NO: 37348 - DNA, 507 bp, Arabidopsis thaliana columbia
cctactttaagttgttgcagccaaatcactgatagcttttctcccaaaactctgcatcgtcaacggagaccgattggttggctgtaaaaaacaactgcgaagtaccaaagatcaaaccttcaatttgctagccataatacaaaatactctatattgaagcagaaattggctagaaagaaaagcgttgaacatcaatgtaacactaacctcttcacaaggatcatcaagagttccctcaaacaaccatgaatccaaaccctctatatatggcaataaacttccagcaaacatttgcaacagcatgtgaaatccttccacctggtccaaatatttatcgctaattcaattacgaaagtgaccaccaacaaagattaagaagacaaacacagaaagtcatgaacacggtcacgacctcaccaccttgtacaaggcatacttcatcaagcttcttgtaaagataatggagaacatggacagcaatctcagcagcggaaatcgtagagtttg

SEQ ID NO: 37349 - DNA, 897 bp, Arabidopsis thaliana columbia
caacgagaatgtgatcaagattatggcaaactcagatggtctaaggctattgcacacttttgagaacatatcatctgaatcctccaaggtacttaaaatctaagctaagctttaaattacttacacccaattgaaagatttagtcaacacttcattctacatttgcagcctgcaataaacagcatagcagcggcagcggcagctgctgcaacaagtgctggtcacgcagatcgatcagccaatgtagtttccatccaaggaatggtaagaaatacaattcttttttgttctttcactcactttattttatctttctattattcatcacttgcctttttagaatggagattcgcggaatatggtggatgtgaagccagtgatcacagaagaatcaaatgataagtctaagatatggaagcttactgaagtcagcgagccttctcaatgcaggtcactgagactccctgagaatctgagagtagccaaggtatataaaatatacattttctgagccatgtatagggtatatatatatagctgttcttttttctgacaataaaaccaatgacttttggcagatatcaagattgattttcacgaattcgggaaatgctattttggctctggcatcaaacgcaattcatcttctatggaaatggcagcggaatgagcgcaacgcaactggaaaggtgaaattgagactctttcttagtcaaataatgataagtgtcactgatctctacatctcgattttccgtgtaggcgacacgttctttaccgcctcagcagtggcaaccagctagtgggatcctcatgactaacgatgttgctgaaaccaatcccgaggaagctgtaccttgttttgctttaccaagaatgattcatatgtaatgtcag

SEQ ID NO: 37350 - DNA, 601 bp, Arabidopsis thaliana columbia
taagtgattcgccttaatcagagtgacaaatttatcataaatcaaaacattttcaaattttgtcaattcaactttctctaattaatgtttatattattatatcaatgcacagtgcgttacaacacatatgcttcttagttaataggagttgttactgtatcactagtattattggtttggtcactcttttttggggtggttacgcacgtatatactaaatatagactatgatctacttagattttaatatttgtgatgaattgtgaactataagaatatagtggttatgactgaattttttcatagatttaataaatcttccctcatggcataatattagttagttaatatatagtggtatagtggtcactattttatttgttaaatttggtttgatgcattggtggtcattataacaagcataaaaaaacactaaagctagtattggattcaccacgtttttgtaattttgttatttgatggaataataataataaatttagcctgaatcttgcatagatttagttctcttaattaatctccctcatgacgtttaatataacggaaatatggtggtttggttgccactacacactatata

SEQ ID NO: 37351 - DNA, 444 bp, Arabidopsis thaliana columbia
  unsure (1)..(444): unsure at all n locations
nnnnnnnnnnnnnnnnnnnnnnctaaagccttcaagtagtctaaacagggaatataaagtaatagctatctaggaacatgggcagctctataagccaaaaggctataatacctaataatataaactaacgggttaagtagttatccaccggatagcccactaagacccacaacccagtcggaacgtcagaaaacatgatccaacccggtccttggcgggtatagcttacaagtccaatatactacatagtagtccatgagctatatgcgtacttatagccaccaactctagattagcagatccagtccatctacagatgagctggagcataggatgcagcaagtcttggtctgcctgactatacacaggatgcagcacggttctagactctgctatacataagtatgttgagtctggataaaacccggaatcataggatgacta

SEQ ID NO: 37352 - DNA, 310 bp, Arabidopsis thaliana columbia
gtatatgggttcggacctgaaatgttctctaagcaagtaatgtttattcttataatattgatttcatcatatctaaccgaaagcaccatgtccaaagataatatgtttaaatgaataattaaaattagtgtaacggatttgtcaagtagatctaaacacgtcatgatgggcatcattaactattactagacgttcgtaatgccttacacactaacgtcacgttatttatagattataatgcattaatatgcaaagcagtaaatcggtttaccgacgtcaaaaaatattgttaagagccaaagacaatcct

SEQ ID NO: 37353 - DNA, 378 bp, Arabidopsis thaliana columbia
tgattctcgatggctcaagaacgttgacctgatatcttctaatgcagccggaaaaagaagccgaggacccgtggttcggacgtagtgttgagtcgatacattgtatacaaagactttctcttggttgactataagtagatagcctttgatggcttgtaacgctacaggctcctccatttggtaccttcttctttgatctcactctacatttgaagttcataatgtctccgagaagcaacacgtgaatgatttcgccttcggatgtgaatccataagctttagcccgttcggacgcatcaaaaacataacttcttgctagagaatggttaagaccttcacactcagattccctgatcttcatgcttcttaagtccaatg

SEQ ID NO: 37354 - DNA, 219 bp, Arabidopsis thaliana columbia
ccaaacatatattacatgaaatcacataaaagaataaaaaagaaagagaaaccttttcgagaatttcaaaaatcaaattcacttccatagagagagaagaagaagcacaaagtccagagagaaagagagagagaagctgcgaaaatctttcatagttctcaatgacggggctagtgatgatgactaaaggcggaggttgcggcggcggaggaaaaggag

SEQ ID NO: 37355 - DNA, 594 bp, Arabidopsis thaliana columbia
caccacccttgcatgaatctttctttgaagatgacttcgtgaaacaactgaaaagcttcttgaagaaacccatctctcttgaaatctgaagacgatattgaggctaatggacttttttaaggatctttgcgttatatgtacctctattagactacttcgtacccacatatatataacaccacgtaagatcgatgagatcgaatggtcgagatgagtaatctaaaatgtcaatatcttaacttaggaagtttaacgttattttgaaatgtatattttacatttttattttaaattacaaaacttaggttgatcatatttaataagatgacatatatagcagcccaaaacagtaataaatatatttttgaatgtagaagaggccaagaatagaataaagtcgatgtggtttttgtatatatatttcattgttactaaataagaaattaatttaactatttaataaaaacaaaatatacacaaatattcactttcttaataaaactcaaaaggcaggctcatgggctagataggctcactttcttgttaataaataagaaatctacctatatatctagcaatatcactacaagaaaa

SEQ ID NO: 37356 - DNA, 601 bp, Arabidopsis thaliana columbia
caaaggttaacattattggtttctaagttctaatttttagtaggaggctccgccaacagtttttgaacattgttcctttagcataggaggaaaaaacggattgaacggaagttgcggaatacaattggtttcggcttccaaaattgctttgcaacaagctgaacctatcttgccgaacttttctaagagtatggattgcgaaaactctacgatgcaccctggaatatttatcacagatgataaacattttgttatatcaggtaatcctggtacaccgggactcggtagaaatggaaatggaaaaggaaaaagtgccggaaattgtggtaattgggcatttacagacaatgcaatgcataaaaccgctagaaataagatcacgttttttatagccataataaaaaaaaaaaatgtttgaaatattccaatatataattctttctcgtgtttgttgttgagtgataaacaatactaagatcaaatttatttataggggaagaaatgaactatggtggtactaattgaatttgtctttatgaaacgtttttcaaatctttattaggtaatttaataacaggcagtttcttattttgattgagtg

SEQ ID NO: 37357 - DNA, 417 bp, Arabidopsis thaliana columbia
caccgttgagtagagtaattcaatagagtaggaaaactaatattctttccaatacatcaccaaaaaccatcttttttagagaattcatgtgactatatatctgcataacaaaagaagataccagtaaaatcaatcaaaagacccactcatggaaatttgtattaaaaccatctgtttcactctaatcaatctagacagttttgttcagtctaggcattatcttaaacattacagcatcacaaattccactaagaaaacaaaccaaaacttgtgactcactggaaccagatcatccatcagcttctttaaacaaattcatcaagcaactgattgataaacaggcaatgccaagctctcaagtaacttgagatgaaacaatttaacattcttccatctaccaggaactaaatcaccaat

SEQ ID NO: 37358 - DNA, 211 bp, Arabidopsis thaliana columbia
ccttcacattaaagacaaaaaaaaaaagcgaaagaaaagaagcaatcgtagagagtgattctgggcatatgcttggagtatctctccttatccctccttgtggttctcttcaaaaccccttcttccttctccttctgtaaccatcttcttcaccatggctaatcctcaagcttctccaattctccatcacccccaaaatcacctctctctc

SEQ ID NO: 37359 - DNA, 754 bp, Arabidopsis thaliana
tcttcaatatttcaaacttaaaactcatatgaactcctggatcattctcgcttactgaactctcgactacaattgaattgtttatcccttgagtgtttccgtttatgtatgccgtaaaactcgcttcttcctctgcttcgtcgtctttagggttttcggtttctgtggctgtggtgttagagctctcgtctgggttacttctgtagccacggcgaatatgaacctcaccgtctttcttgtctttctcagaacctattcccattgtggctcctttgttttctccagtgagagtgtagacgctcactgatttatcatcaccgttgctttttccccaagttagcttactgattccatctctgatgtcttctttaatctttctgctcattgaagatgatccttctctattcgtaactctcggatttccaagattactcgttaatgcgcctttggttttctgatgattgtcatcggtaggacatctctgttctgttttgcgtttctgtctttttctccggtagatctctcggtcctctcgtggtctctgatgctgctgccatatgtcgtgtggtttctcttcgcgttgcatcttctctacctaccgcctgaagtgatctcttcgtttcttgtaatgcaagtttctcagtttctttgctcttctgttgtccctgatctgcttctaacttctgtacaccgtcgtcatgaagaactttcttcctttcttgtaacgcaattttctcgatttcttctatcttcg

SEQ ID NO: 37360 - DNA, 599 bp, Arabidopsis thaliana columbia
ttattggtttcaaaattagaaaaatatatatattaaaaagaatgcatatttatataaaaattcatattaattaaaataatttatcaataaatacatttaacatttttaaaaataaataaaaaccatggactactagtttaatacaaatttaaatcttcataactcattctacatacaatattcttttatttccaaaatcaagatccacttattcgtccgcttccgcatccaaacaggcccatttggattgtggaccaaagccgcgagttacatgcatacttgacagagacgtagctaaagcggagtaagacaacgtcttcatgcagaagtagagcatcaaagacattaatttcttggttggtttgagcatccacttcttaccatggtaagtcaaagtttgtgttctttttttgccatcgtatataattcttaattatgattgatggtctttggtcagaatgtcagaacgtgttacttttcaactatccaaaaaaaagaatacttatcgtgtcgtggttgtggtggggaggggttgacgaccatctctaacatatttttatcaatttcaactccagaatatagcaagttccaaagtacag

SEQ ID NO: 37361 - DNA, 761 bp, Arabidopsis thaliana columbia
gtttcatattgtttcagaaaaaataaaaaaaaataaaagataggaagttgttggagtactatatcatagaatatgctcataaatttatgtttaatattaatggactattgacctcctcattctaaatgcctgcaattaattatgtattgtaaatgtaaaaagcattaatgatttattgatttagaaaataaaaattatagaaaatcaatctttttgatacaataataaaattctagaagatcaatctttaaaatccggagggagtattatatttttggcttctcatgaatcaaagcaactggttgtcgctaatacacaatgttcaagaaagcgggctaggcggccatctaggtgtcgcctaggctgtaggcgctcctttaccgcttcaactttcttaaaatcggttcttttagacggcatgatcgatttggcagactatgcagtcattaaacagattagacgatcattaaacggattcatgcatgctacgtggatttaaatgtgtcttaatatttttgaatttttaaaataatatatttaaatttctataaaaagcctatactttttattattttattttatcttattttataaaaaaaaaaacacctgtaatctcaaaaatttgataattttcagctttttataatgtgtttctcaatattttatgtaatagtatacaaatatatatcattttattctaaaaccgtttaacccgtctaaaatggtctagacctaactgagtgtctaagcgctaggtggag

SEQ ID NO: 37362 - DNA, 556 bp, Arabidopsis thaliana columbia
atatataagattataataatgcaattgaacttacaaagtattattatattattacttgttcaccggttgaattaccaagtatttgtccaaggaacgtagacattgcattaacttgatcacctaatgtctttacttgtgtcttcagctgggcaactaattcagaattttctatatcttttcttctagttgcattggaatgtctcactaatcttgaaggtgtgggcccacgaccaacacaatgtactcggcctggacgctctggaccgaacacctgactatattcgtcatccaagctagcagtaccgttgtatgtgacttgcggatttagattcaataacgtcgtaagtgcttcctaaaacgagcaaagaaagataaatattctacatagttaactagtaaatccaacagagactttaataaaaccaatcgcgcgtaattttgcctcatctgatacgaaacttccatcatgtttcttgcgactctcaataaaaaactccactcgacatggcgttttcccagtcttgattttctacgttaaacaatatacaaattcaac

SEQ ID NO: 37363 - DNA, 819 bp, Arabidopsis thaliana columbia
gcacgatatattttgattttttttttgttccttctgaatgtgtaaaaaaacatatgagatgttacatgaacaacaacttaaaagaatcttctcagccaacgaaagccttctatctaatgaggacctaaacaaaagccaaaacaactctttatctttcaaaaacaaagctgcgagaaaacgagaaatgaatcaggtttagttttaatcgtgcaaccaaatctcgctcttgcatattacggcatatatagcgacaaaattattatttttgtatcgccttgtcaaattcattgctgcaatacataaatcatcgtgcaccaggatcttgctgcaccattattctaaggttaatttacctagcaatttgactttgtcttcttatttttatttattaaatcagattttatcagaatctaatctttacatatctaactcaaaccggatcacttggctagttggctccactcctgaaattggtaagtttttgaatatcgaattagttctaatgatgtgaatgatgttttcctttgtcctttttaagctttaacaagagtatgggttatagaagaaagaagagagtcaaatatgtgatcagattattcctttttggtcgacatgttatatcattacatatatgtattggtaatttgtccccacaaatcaatttgaaaattggagacatgtgctcaagaaatagctttttaattaacttaaagtcgcctcgtcgttatactttgtttactaagaaatgaatcagattccactttctttacccatgcacaccgcacgcgagtcggtcggatggtcgtcttagactgtttg

SEQ ID NO: 37364 - DNA, 710 bp, Arabidopsis thaliana columbia
aggatccccagctacgttttatttatagaaaacaatcaaaggaaatgttttggtttgggctgggctgggctttcattgtacctgcttaagaggcccaaggccgaacatgcttcttctttttcgtctacctttaaatcagcccagtgtgtttgttctggaattcataattcatagtttccgattaaaaagcaagagaccaggtacaatctcaacctgtggattgcatgataaagatgattttaatcggaaaccgtaacgattcaaaattgaaacaaaagtattcattgaggatatcaaaattcgataacctaacgcatgtgtctcgaattagagaaatcaaatagtgttttctgggcaaaatcaaaaccaatcgacacaaatcgatcttttgcgaaaaaaatactaaaaagaaaggcaaacccgtgtaaacttcatcttaatctcatgagtaagagtttccagataagcatatctccgtgatgaaactttctccattccattaccaccactgattgaagatgcgatcaccggaaaacaacccaaaaagcaaacaccgtctccatctatcggtaaggagaattcgagagattgatcacagagtaagacgagagactctttcgattaatgctctcattgttctcatctgagaattcccatggccacggcaacattgtggtagcggcggaggagaaacggtgagagcttgttgc

SEQ ID NO: 37365 - DNA, 782 bp, Arabidopsis thaliana columbia
tcagtgatatcttaatcacaaaaccgaatagtttcgttctctataccttaaattaatctggtgtgttattaccagagagaaatggcgttaaggcagaagttaggatggtcagaaggagatctgatgagatcagatgctaagccatgttcaagactgatgaaacaaacagctgccattttcactgttggtggagctcttggtttctgggttctttgcagacttcactatggtaaacaaagttctctcctttctaatcagtgatttgcgtttccatcaaaaggttgttctccatatagctattgaatccagtgctctgcataattgattgttagaaagatttcttgtagccttatgaaaacataccaatgcgtattaccattctgttttctgttctgtagtatccgtttcttatgagaaaaatgaatccaaaaggagctttgattgaatagtttgatgtggtgaaagattggatctttacacgttttgggaagcaatacacttgttctttgattcctattgtcatgaaaaatgattcttggggttggtttgttgtttatgtggttttaagagtaaaaggaacgtagaatagaatagttgagtcaattctaagatagaacggttataaaagcaaatgttttctttgggaaatgtgtaggtccaaggatcacagtgccaaggagtctgcggtgggctgggtgtggtgctttgtccgtaagcacatcaactgcaatgcttgtccgtctcttcagccctgaatgtgaacacaaaacattgctgcatat

SEQ ID NO: 37366 - DNA, 790 bp, Arabidopsis thaliana columbia
tccaagatattgaataggtaaatatcccactgatcaataccagccagccctcctcatatagtgaagttttttgtcatatttatatgtaagctagacatagaccaaacgtagccaaaacctcaagaattccaccaagaggtaagggtgagccatctgagatctcattagatagtagtgttgatcgctaaccatctcgtacatgtcggattagtaggcttctcgtatgagattgatacggggtcaatctcatatgacatatcattggaaggtaccttcccttacgagatctcgacaaatatcaaaacaactacaacacttttcttggtaaaggtacaactaggccaataccagaagaagaaaaaaaataagctcaccaaagttgctgaaaatgcctaggtaatgagacatgattttagaaatcacttgaaaccttcgctcattttgaataaaagtaaagggcataaatgattgattgcatcaaatatatttttacttttcggacaagcttttacaatggattggatatattttcttgtgagaagaatagaaaagggatattctataactgctttatatctcgtgtccgtccacgtcaccacatctgacgactggaataatcctcaggtaccatcggatatactttcctaagcaccggtcttacctcaaatataatgagataaaactttttattaaaccaaatctttatctacccataaatggtaaaaacataacatagacagctacgaatattccaagctatatgcactacttaagttttagttataaatgt

SEQ ID NO: 37367 - DNA, 1350 bp, Arabidopsis thaliana columbia
tcactatccacctttgcgagcgacttgtcagtgagtttgcattgtagtatatgtaacatttcgtgtggagtataggttggggttggaaaaggaggggttcactgctagttctttaggaatgaggaatcttttgtgatgaattgagctcttgtagtttgatcgcacgctacttgtagcattggttgagaaattctgatgtaagaagttgttaatacatttgtagatgctttaaatggagttatttggactgtcgagttttagaatctcttgtacggtcttgattgccataccctgcagcatttcattttatttgctcttagttaaattgttgtttggaaaattgatggataaagattagggttcgtttagagaaatgttcttcatgggtctctgatgaaaaacttgggcatgttctggtgaaaacttctcagtacgcagttcatttctatacagtgcgaaactgcttagcgtttgcattgttgcatgtttaacatttcttggggagtatagtggagttgggaaaggaggggttcagtgctagttctaatggaatgaggaatcttatgtgatgaattgatgtctcgtgtttcggtcataggctagttgtcgcattggtagagagattctgatgtaagaagtgagtaatacattcgttgatgcctcaaatgtatggtcttattgggcttcatccctgaagcaggattttgttcgccccttagctattgttgcagctaggcagtttgaaattgattcaatcattctattgtctccacgagctttttataacctcacatttaacttacacaggtggttatcaggtagtgacctgaagaagattgtgctctttggttgcccgagtttggaaaaaagggcggtattcgctgctaaaacattgcgcaactttttcgatatccatgagaataatgtaagcctatcacacaccacaactgtctctatctcattttgtaactcaccaacagcatctaaccaagtctttttttgttgcataataggtgtgcgagaaatgcgtgttaaaagagaagtgcaagtttccaaaccagagtgtatgggatggcaaaacaaagcacttgcacttgtctgttgtgatgaaagtcatcacactatatccattagacttgactcatccgaagctacaagttcctcaagaggtacaagactcagtttcaagattgctgacggagattcagaacctaagccgaactatctgtactcctctcgcatgagttaacattatcaaatatttgtttgtagtaaacatcaatctagtgatcttgcaaatggaagttgaaccaaaaaagactcttatgaagaaaaatccttcacttctac

SEQ ID NO: 37368 - DNA, 1262 bp, Arabidopsis thaliana columbia
gatttagtgtccactagataagatttctaaacaaaaggtcaatatattgatgaaaattgaagtgattgaaatcaagtttttccaatgatagtacactcgtttgaagaaaatatgaggttgaatcaaaaccttagttcaaagtaaatgataaagcaaaagctgaaatcttacaatttgaaagtgaccaatatacaatgcgagaaagcaaaagaaaaaacaatgactcaacctataaggaaagtgcatgacaatcactcatggcttagtgaatagtgaccatcgccttttacaagtttacattggctttgaaaccctccaaacttttcgaaacaatctttcgaccaataactagtttacgggactaaccaatacaaatcttggaaaatgatgattctttgaccatctctattctaaccccacctattggagtttaaggccttttcatcgtcacgatacgcatactatgatcactggctctagcaagatgttaaggcacacaaatcggtggcaaggaggtgactggcccttgtgtcattatccttctcaaaggcattgaaccaactttttattcacatttgtttattatatactaaaagaaataaacaaaaaaaaagtggataattataaacttttggacgccaagtcactcgtttatccatttggtacggattttaatgatatctctctctcaagagccccttttatgcaaaatctctttttcgctaccaatggcattattcgtaattaacttctaacttgaggggcgtttcattatctcctcctcgtcgtcctccctccatttttcttcacgtctggttttctctctcttttcctctatctctctcctctctttgtctctctcgcttctgtgatttgggctttttcagatgggaaatgcgaacggcaaagacgaagacgccgccgccggtagcggtggtgcagatgttacctcgtcctcggcgagatctaatggcggcgatccttctgcacgcagtcgtcaccgtcgtccttcttcagactctatgagcagttctcctcccggaagtcctgctcgatctccatctcctttcttattcgctcctcaggttccctctctcgaatatctctctctgtttaatcgttgaatttgatttctggttttgaattgaatcgattgaaacattcgcccaaagagataatagtaagagaatctttttgatttgtttcgttgagtaagagaatgttcgttcacttgacttttcatttgtttcactaattgtgag

SEQ ID NO: 37369 - DNA, 930 bp, Arabidopsis thaliana columbia
cttaaaacactaaaccataaacccggtttgaaaaaattgatcaatttggttaggcccaataatagcttaatgggcttctttagaggaataaaaagaagaatatttctatggaaaaaaaaaaaaaaaaaaagagagaatctttccggtgaatgggaaatggcaagaagaaggatacgagtacgatgaagttgagttagagcgggagagagagacataccgttgaccactaaagacgagagctttagagagagacgcaacaatggagctgaatatttccgagagtcgaagcagatcaattcgttgcattgtgaaacttggtttgtcttttgatccctattaaaatacttgctggatcgattcttagatcgcattttagttgttctgtcttatgggtttgattctgatttgactattgaataccgaagatgaggaaagactttaaagatctgtcttttattcatttcccatcaattttacctgtctagactttgtaacagcagaatgtctaaatgatttgataggaggtgcggcaattacttgcaaaaacgagctggagaagattcacgatgaaaatctggaggtcgtggcgtgtcagttacgtcaagctatgttggagggttcagctccaagcaaggttattggcatggattggagcaagagacctggaagctctgagatttcttgtgatgtggatgacataggggatcaaaagtcttctgagtttagtaaatttgttgtggttcatggcgctggttagttggagattgattcttatctgcttaaatcttataatgaaggatcaaaatacatttttgatttagctcttacagatcattgacctgcttgtgttagttgagctgttatttagtttttgggttcttatgtgttgtctgatttttgcattaggtcctttggcacttcaggcagtag

SEQ ID NO: 37370 - DNA, 771 bp, Arabidopsis thaliana columbia
ggctgtgctcctctgcaactcccctcattatctgcccaatccttctgtatccattcattgtcaggctttgtctcccgtttggatcaaactgcagatccgacagtaaatagtggttatccgtcagtccatgacattcaaatcccctcacaaactagacaatcagcatccctagcaaatgtttgaaaccaaactaatggatttaagccggagaactttaagagagagtttcctgtgaaccagaaaattcattaacttccatgggccaaaaagtgaacagctctgttagtaacatctgtgctgaatataaattcactaagctcgacaaggggaccactaggtagcgtaataagaaccataaaaaccatatcttcctttattcctctctgaataagaatgcaaactgaagcaaagaatccaaagatataatcttatggtgaattctcgagcaccctagactcttccaatgcaaaaccaatacccaaatccctagacaacccattcctcctttggtcatcttccatttatactgattcgtttatcttttgctgactgaatattagagagatgacatgactaatgcaacagctgcactcttctaactacttatgcagacttatcacagcagagccatattggagcagcatacataagcgatttacttgtaaccaaaacaataattgcgaacaaaaccctgagtaagtgctcagtcagatagtctacacgtatttgggcaaagaaagaacttacagcgctagagtcttgaccaacaac

SEQ ID NO: 37371 - DNA, 676 bp, Arabidopsis thaliana columbia
taatagtcttgcggcttcagaatcgctgctcttatggcggccatcatctccggcggccgaagagatctaaccggaatgttgccaaaccagcatttcaagcagaggtcgaacgcaacaaatgcaaaacagagaagaaagcccaattcgagcctcaataataaagcccaacattatctttaaagcccaacgtacttacccatcgctttttgttttttgtttttggtgtcacaaaagcaagccctcttaactttgacaatgcgatatttcgctgtttttgtatgacgacgagtaaaacaccattcgagagagtgattgatgtttgcttgcttgtatcggaagggatcgttaagttcattgttaaaatttaagaaagtctttgaattaagtagagactttttcgagcttaacattaaaaccaaaacaaacaaaaattacgtagagagttttttaagccaataatacatagagctgtaattttgtttggtgtgtagtcgaatgtaattgtgatttgtgaacctaatgttgagtagggatgatgatgtgatcattgtgatgtatatgtgaatggatgtgaatagtgaaagataattacagtaaatgtggacagtcgatagttcacacaaaagaaagtttctacgccatgtatagaggagaagaaactgttactgtgatgaac

SEQ ID NO: 37372 - DNA, 482 bp, Arabidopsis thaliana columbia
tttctgcaataattgaaacatatattaagatattcagctttgagagccctgacttacaaactcacatatcacctcctaaagtcttagtcaaaagtgatcgtttgattctcattgcattggaagctatctcaaaaatctttatggtctccaaattatttttaggattatccgacggtgaaatatgatgtagcggaaaatatgtaaaatccgagcaaaacctttagacacaaattcatgtgagtaagcactcggatgaaaataattatacctaagatattcacctttgagattatcccagcggttgtgagagctcaaacttaactcacaaactcatatttgacttcctatagtctcggtcaaaatttggaataaagttagaagtcaaattgaaaatgaaaggaccttgatgttttggaagtttaattaaaaagtataagaagtaaagcttgacatatgagtctctagcctcccatctttttttt

SEQ ID NO: 37373 - DNA, 1694 bp, Arabidopsis thaliana columbia
ctttatctgaaagaaacattattctctccacattagcctcacaaacaaagctttgcaatttattggtgtgggggcaaaagcaaaactgttcttgattcatacttttgagagctttcctatctggttacaacctcatgctctcatctaagctaaggtagaggtaaagggtcgggtaatggatatagcaggtaaactgtcgtgcatatacgccatgacaaagaaggacaacatgccgatggaaaggagtagtagtgcgaccagctggaactggtttccgagaagatgcgaaacggaatcctgcgagaaagttgtagaaagaaacagagcattcagtgcagcgagtcagagattcatatggcatatatgcacacacggaacacatcttcacaagtcaagcttaccgaagacagaagagaagaggaaggcagcaccaagacctatggtatcgccgagaactcttgtctctggtgatttagtaaggaagtaggcctataaagaagaaattcaaacattggcatgctcagtaataagtgtaatcatttcaacagttgaacaagaagatgtggatgctttcagtgatacagtcgtggatcataaaaccgagatggaaagcacaaagagtaaaaaggaacacaatcatatgttttgaaggaactaaggtatgcaacaataggagaagattctagcagatcaactgttgtagatagtttcttaagccctccctaaagagacaaaaacaccattgttgtcaaggaattgaaataaagcttgcaagagaaccacatcaagaagaaacaatgacctgaatattgcactaagttcctaactaccttcctcaaaggacaaagttcagatttttaactctgtagtaacttgaaactaacactaagaatagagacagagagagcaagatcgtacagatgccataagaacagaaccggtcaaacccccaaagagagaacctttgcttccagatttgctatcttcaatttcggaatacaaagttcaaattttttagtgtattgagccaaaaatccagataaataatttgaattatgagatcagtagtaacttacaagcgaagagaccgcctcctagaagaagtacaccataagtagcagagacgactggagctagctccgacacgtccgccttgcagcagagaccattacctcgtttagtcttcgatttctccgacaacttagtaagtcccgaccaattccggccaccattactaacacttcgtccgagtttagtgctcctcaccgacaccaaagacggagatggtaacgttagcgcaagagaccacattgcttcgtcgagtttgtctcgtcagtgaagagaaatggatcaaatatgacaaaacaaaatttagttcatcggtccgattcggtttggattgggttatagagtacaaagttcggttctattcccaaattcggtttgatttggtttggttttatcaactttttcaataactacgcatctattcttcggttcatttcagtacaattgtttggttatctcgatttaattttggataaatttatagtaatttcggtttgttggttcctaaccaaaccggttaccgaatttcatccaatcatttgtattatacatccacacagtaactcttacaaaatgcaaatcacatgaatgttgttttgcttgattactatacacatcacaaagca

SEQ ID NO: 37374 - DNA, 567 bp, Arabidopsis thaliana columbia
gatacaatttgatatatgattcaaatacatgcaactttatctatccttatagttaattgtctttctgatattaatctgaactattctgaccacttgttaataaagaaatttgaaggtgttttacaaaaataaacggaccatggataaataattatctaatgtaaatgatctagatcggatctttggtgtggtcatgtgtcccaactcccaatacccggcggcttgccaggtgtgtgtgggcacaggtcttattcgacggctagctatttttgttttaaattacttttggcaacattttattattcttttccgagtccatgtgccaacttgtatttagcatctttttttttgtcctcaaatcttcttattacacaagaaagaaaatataactagttccaagttactacatgtcctgtagaatgtattcaatcatacttagctaaattgtacacactcctactaagtttgtttccacgtacatatatatataattacatgctgtctagaaagagatacgatgtctttggcaagagttttgatagaagttttgcagttagccctgtgttt

SEQ ID NO: 37375 - DNA, 957 bp, Arabidopsis thaliana columbia
cataagtacattctctgtctatgtcaatcttctttatcaaataaataaataaataaaaaactccctgtcaatcttcataattgataaatattacatagttcacgaaaaatatatagttcaacattacttagaagttagaagattaaattttcttcatataataatgatcggaaagttgttccaatattaatagaatataatatcgtttccagaacacatatttttgttctgataataagtaataaagttgatgtttcctggaaatcagaaggaaggaaggtatattacgaaagagattccgagatctatacagaactgttttttaaacaaactgccatagttaatcacatggtggccacataaagaagaccatagaaatgatacaaagcagtgctgaagtcgttgccgtttacgcggttttatggcatatgtcattatgatctccctctccctctatatcaactggatacataaacacacatactaatgaacttctataaatataacatacatagaatgaagctgaagcataaacagcccaaccaagtcatatcttatctctgttctttgactttccctttttacagattctttgccaatagaacctaagaaaaagacataatatcgttgatggagaaaattacaaaggaagaaaggagaaacagatgccttccaagttttggaagcatatatcgaagtaagaggacgggtaagaaagaggcagcagcagcaaaaaccaaggtagaggcggatctgattattgtaaaaaatgaagataaatctaacgaggaacagaagaagattgaaaaatgttggatgatgagtgaggatggggaaggcggcaagtcaactgtagagtatgatggtcaagcattttaacacaagtggggtcttgcgtggggatgaagcatcagtgaggaggaactgaggaagtacagagatttgatagataaagag

SEQ ID NO: 37376 - DNA, 373 bp, Arabidopsis thaliana columbia
ggaactgtgatctttttgtttaactaaacaaagaggacaccaaagcaccttcgacgcacgatcgtagctgagcacgtgaagccacgtcttctctttattcgctttacctaaaataaccttaactgatttcccaatattgccccgctggtgtgattgaatgatttttaaattgttattgtcgttaatcatttgtaattttctccagattctgcacgccctcgtttatttccaataaataaattgctatcaacatacattacaccaaaaaaaaaaaaaaaaatgacgtatgaggactttttgtaggcatgtaaaaaaaaaatgtaaacaacaaattgaagtccagataaaaaaaatttacatttcgaaaatttga

SEQ ID NO: 37377 - DNA, 541 bp, Arabidopsis thaliana columbia
aaattgaagtccagataaaaaaaatttacatttcgaaaatttgaaatcgtttactgatccgataataaagacgcaaatacgaacatggttttgggctcgttttatttattgagatcagatctttgtatttgaaattaaaattgaaaagtaagttatagcttatatgtcaggagaaaaagttataagccgacttgaattgattctggttattgaatgtcactagactctagagcattggtctttttactcatcgagtcattgggtaacaaaataaatgttgtgtcttaatatatcaaccaagccaattagaattatcaatggttaattatgagaaaattaaagaaagattagaaagattgttaagggcaaactcgtaaaaacgacattggaaaatccaaaaacatccgtagagattcttcttcttttttatattctattggatcagcctgcagaatcctaagcaacaaccatagcattacgtacctaaattatcaaatgaattacgtatattaattaagaccactagattttcaactttata

SEQ ID NO: 37378 - DNA, 537 bp, Arabidopsis thaliana columbia
ctaaatatattcaaaaatacccaacaatacccgaaatatctaaaaatatccaaaacaaaatatccgaatgggatactaaattttaaaatcgcaagattcgaaaccaaacaaaaatttcaaaacacacaaatagatactaaactttaaaccgaaaaaaaccaaaaatagattaaccgaaccaatataaccgaacactcaaattcccacaaccagaattttgaggaaccctctagtttaaaacatgttcgttgaatgattttgtttgtgttttttttatctattcttctttaattgggaagttttggaaggtcttctcagatagtaatgaaattttgttctctgtgttgatgtggtagccgatattatcagatagtaaaggatggagaaatttgtattatcatatttaccattggttccttatcggtattatgcaagaaatagagggtaaaatgtcatttcatagactgctcttagtactagcactggtataaatgagaacaacaaatgaagcaattttccgtctaaaaatcacaagtt

SEQ ID NO: 37379 - DNA, 813 bp, Arabidopsis thaliana columbia
tggtagattagagactgtagtaactaaggttaattatgcatttgatcctgttgacgatgacaaaatcataagaaaccggcttctaacccgaaccacgaccactcgaggcgagcctccattgaagaaacttcagaagaagttcacttcttttgtactcgaggtggataaagaagaagagaactataacgactgcggtagacttgccaaagcttttttacaggaactgtcaactttcgagattccgcttctgaagagccaagcggttgtggaagcaaaccttagggagaaagagagctttaatgaggtgaaagatgagacggaaaggcagataatgcaggcgaaacgtgagattgaagatctaaagaagcagcttgaggagagtaaaatagatagacagcataaagaagagtgtgagacgataaggaaactgatttctgcgcaaccgccaaggtcagagacagagaaggttatatatgaattgaacaaggagattgctgagcttgaagcagagagcactgcaagttggagattgcttgagctaaggaagaagcagtttgctctcctgatgcatgtggtaatgtcaaaaaaccgaaccttttacgtttcagtcttcattacgtgatctatgtttgaagtttgagtttgtgattgtgaacgtttttgggaatgtaggtggatgagttgcagaacacaatggaagatgagcagaagagtttggtggacgagattcggtcagcgtcggaagatcagaggaacataaccgacgctatgtctgttgattaagtccaaatctcgataaaacctgcatcatgt

SEQ ID NO: 37380 - DNA, 589 bp, Arabidopsis thaliana columbia
tagagggttgagatgttgcaacctctggtacagtcgattcagtcttctgaacacgatcaattgaagaatgcacactttcctccacctcgatgactaggggcggcagagatgttaaagaaccataccccaccgattgtctagctcctctgattctttgactggctttgacacctgaaattctgcttccgtctgtgttggaattttaggcttctcgtagcctgctctcgtctgagattgttcagcggaggaatttgatttggatttctggtggacaaggcgctgaagatcggagaagatggattccattctttctcactcaatttctgatgaattctctttgggcacaagctttcgccttctcgtcttcctaggatggttgatttgatctgtcaaaccctaactcctctttttccctccaatacccaagcgaattttcctttgttctcatgggctcttgaaactccaaatggccttggacctaaaaatcgtgttaatctgagacacttaacaaactaattagtgcacatttgcaagtagtcaaccattgattccaacattctgttacacatgtgtttcagcattgataata

SEQ ID NO: 37381 - DNA, 746 bp, Arabidopsis thaliana columbia
caggtcgactcatcctattatacaaatctacctttcttcccaagcaactctaatatatatacgttagttctctttacttcagtgtaagaaatagaagtcagtaataagaagtccatttcattactttctcatcactttttttttttgtcgtcaactagttttttttacataaaggtgaattggagcccaacaacatatatctaactaaagcccaatcttagacccaaaacaaagatgacaattgaaacatagggtaagaaaaggacacgtggataaacatgtgttgcacaagttgggatggagtcgcatgacgacagatcaccgccatctccaccggcacggaaccaccgttcagatgtaaactataagaaaacctgccatttgcaactcccatattggtcccaaaatggtcgcaaactaggtgtttacgactacttaacgacgatattagaaggtcgctaaaaaaccgtcgctaaatattgcagtgcgaaattggtcgcttatgagcgacgaattttggacacaaaaggttagtcgtaaataagtgaattatttgtgacaatatcaagaagtggcagatatgcgactaaactgcaacgatgtacacttaggtacatatgtgacaatgtagttgcaaaatagtattccctcttgcgactaagttcaacgccttataatgtaatcgcaaaatagtaccgttacagcatcgattgtgccactttgtacaattttgtgtaattgattta

SEQ ID NO: 37382 - DNA, 490 bp, Arabidopsis thaliana columbia
ttcttgtgtgtgactggtgatcattctactccagttgagtatggagaccacagcttcgagcctgtcccattcacaatgtgccggttaaaggactttgtgagagcggttggaggagaatcagctctattagagacatctttagacccttttccacttccaacggatatagcatccagtgaaaatgtcatcggaaaagaagaagaagactgtgggaggagggaagcttctctggcgattagtggagattcagtctcagagttgaacgagattgcagctgcaagaggatgtcttggccgtttccatggcggtgaaatgatgggagttatcaccaagtttctgaagttggatgtataaatcaaatttcataaaattttgcattttttctttgaaaatttggattttggaagtgtaataaaaaattatcaactctaacaagctcaggaagttgaaaatcaaatgtctaacaatgtttggaggtgtagttgcatgt

SEQ ID NO: 37383 - DNA, 510 bp, Arabidopsis thaliana columbia
tgatcaataataggtcggtagctacaacgtctattccgttcctcatcagctttagctgtcataaaaccaagctcagccgccctacagattgacagacagagacatcatgaggaatcaaactcaaatgcaaacatgaaatgatgctttcataaactaaaaatcaagtcggcaaaacagaatcgcctttgaaagatttcaaacctaccgctgatatctcgttagtggttgggcatatcgaactgcccttattttttcttcaagcaaggatctttcatacaaagctgcaacagctgctgaaacacgggacacagatatcacctgtggactgtccaaagttttgccacattccccacctgaactattctcaaagggcttctccatgatcacatccttatttctcaaccttgcatcatccaaatcctcgacaactccagagcatttagatctagttccttctaaccggaacaacattacctgagaggcagattctactatgcactgtttaaacat

SEQ ID NO: 37384 - DNA, 787 bp, Arabidopsis thaliana columbia
caaatgcaaccccattaatatcatttgtatgcaaatccttattttctctaaaaatctctagaaaaccaatcagatccctatgcctaatattttcaacatgttttgcaatatctaaaattttaaaataagaaaattattgattataaattatgagaattattacatttttacatagacgattctaccgacttctaatggttatcttaacgcgtataattacattaaaaaaaagagagttgtagggtaattaattaaaaaattaagaaattagagtaatctgggaattggatagatttcgtgctaggtaattatttatttttatttttttttaaataataattttaataaaattcgatccaaatgggcttgggcttaaagtctacaacgcaagtgacccagttacaaaaagggaaatcggaaaaaagttcaccggaaaagaaaagcggctcgactcttgttgatcaccgttcgcagagtgaccaaatcttagatctggcaaaatcaagactcacaactttgcgaccccatcagaagattgaaacaaccggtgaaagatttcagtttccgaccaaccatctctttctcccgatgcaccaacccgccacaagtctcccagaaaattagtcaccccgacgaagcggttcgacggtgagaaatccgacctagcaacccctcacacttatagatatcctcgctctcctttaccggaaacccctgaaattccagaaccgccgtgactcgatccggacagtcggctcactcgagacggcaaatctagaagctggtg

SEQ ID NO: 37385 - DNA, 290 bp, Arabidopsis thaliana columbia
acgccacagtgaccccccgaagcgatctgtattagatgtggtgtgactctacacaagcgttactgtagtctctgtctgggaccgtattctttgcagaacggtttgcacattgcggtgatcacaagcatgcgcataaccgttatgagtatcactatatagagtatcccgggccgtaaacaactgtgacatatccggtatagtctcagtcgccgcctgatgcagtggccacttatgtggcctcgaagttctgctcttatcaaacacgtgatcgttgccaagaatgagcttgg

SEQ ID NO: 37386 - DNA, 313 bp, Arabidopsis thaliana columbia
ggagctactttctccgatccaaacaagaaatcagcattattacggaggagagcattacagatatctacaatgcatgacgactaagagcatagtatatacgatatccaaatagatcatgacgtttaatcccacatttaatgatggaggaaccaactgtgaaagaagaagacataattcacaaccaaaccagtactacagaaatgtatgatgcagaaataccaagatgccttctgtctcatccagctgacactcctcacaacctgtccgttggatgcgatcccaaacttccgcttggatgcgatacgtgcggcgg

SEQ ID NO: 37387 - DNA, 595 bp, Arabidopsis thaliana columbia
gaaattgtgttcaaaattgcccctgtttctctgactatatttattacatacaaagcgtatggcacctctaaacgctttgtggtgttttgtttcttctttcttatgagactttgtaggttttgtgtgatagtgtcggcgttccttgtcgaatagtcaaaggacagcaatataccggttcagatgatgtggcaatgaactccattaagactgatgatggcaggtgactttcaaattaaattcaatcgctgtgtaattttaacaatttctctatcatttggagagaaaatatatatatatatagtcaccaaatgtgtgcgtgtaaaaaatgaaactatgtgcatatggacttggggtgtgtgtgctatttatagctaactcacatctctgaaaaggttagagcaaatactgaggcttgataaaagtgtaactttctttggtctaagcaacaatactctttagaaatgaaagtacgattaagcatgtttcatgctttgtacagtggttctttctattgttattgcagtctgcagttgcaaattattttccttacgaaccaaatgtgaatttcagggagtacattgttgatccatgggag

SEQ ID NO: 37388 - DNA, 313 bp, Arabidopsis thaliana columbia
gtcagcaatataccggttctgaagatgtggcaatgaactttattaaggctgatgatggcaggtaatcatcacattaatgtgtagattcaatatttgtctatcattcatgtatattgttatctaatctgcacctcctgaagctaatattgaggcttaaagaaagaaactttgttatatgctattcaattgtgaatttcagggagtacattgttgatcttatgggagatcccggcacgcttattccagctgatgcagctggactacaaatagactatgatgaatctgccaattccgcaagtcctggagacaatga

SEQ ID NO: 37389 - DNA, 342 bp, Arabidopsis thaliana columbia
ctctgaacgtcggttgcgagttgcgacaacctcaggcccgtctctcacacatagcaacatggacatctgcctaaggtccaaaattaaagggccaaaattatttgtattttgttgttggagttggagaaaaataaatttagaataaaagagtcctttatcaagaaagtgtttaagacactaacttaacataaaaggcccataaaacaatcaacctagttaaactagtttaaagaattcaaaccgaagcttccttattgtcctccactgagttgttgagactcacttagatcatgatcagtatcagaagctctctaattatcatcggacgtaaagcgcattaga

SEQ ID NO: 37390 - DNA, 494 bp, Arabidopsis thaliana columbia
cttaacactttcttgataaacatataaagggctcttctattgtttttttccaactccaacaactaaaaaacaaacaaattttggaccttttaatttgtggaccgtaggcagatgcccatgtttccatgggtgagagccgggcctgaggtggtcgcaactcgcaaccgacgttcagagggagaagcagaggtggtggtggaagcaaagagagttagatgatggctgtggtgaggattatgtaaagtgtaaacatgtgtcacttatctttgcttattttacagttggaggaaatgccgaaatggtatgtaccaataacatatacatgtatctgtagcataataagctgatgatcttacacgatcaacaactacaagatataaatctcaccacaatgaagaaaaaagacatatagttcacattaataacgggtttcgggaaactttaatccttaggtatttcaagaaccttattatatttttggttccactgaaaca

SEQ ID NO: 37391 - DNA, 1222 bp, Arabidopsis thaliana columbia
cagacttcgagtagaaaaatagataatggattacaaaaacgaaaaataaaataaagatgcttcaaatttaacctaaaatagtattagatctttgtaagacactaagacccaaggattaaacattctaggaactaaattataattaaactcttggaaaattaagatctatttgtttaggaggcttttaagatatacatgtctaggctttaatgagctttacgaccgaagaaaattagagagcttgtgattttgatcatgatctgagtgagtctcaaaaactaaaaggaggacaataaggaagattcggtttgaatactttaaactagttaactaggttaattgttttatgggcctgttatgttaagttaataatttttggggccttttatcttcaacatataaagggctcttctattgtttttttccaactccaacaactaaaatacaaacaaattttggaccttttaatttgtggaccgtaggcagatgcccatgtttccatgggtgagagacggacctgaggtggtcgcaactcgcaaccgacgttcagagggagaagcggaggtggtggtggaagcaaagagagttagatgatggctgtggtgaggactatgtaaagtgtaaacatgtgtcacttatctttgcttatcttacagttggaggaaatgccgaaattgtatgtaccaagacaatatacatgtatctgtttttatacttgttttaatgtctacagtgttcgataaagataccctgatcaacttcataatgtaacaaaaatgaagtcatgtatcaccgtagtggagttaggtttgatgaattttaaaaataaaactaattcaactagcttaaaattaattatcgccaaataagtaccaatcgtagcccgggctaaaccttagtattttaaatatgctaaaaatctatttacagatagatggtgcatcgccatcaagtagcaaaataagcgtcagcgcaatactatcaacgaaaaaagatggtatgttaaaaaaaggtttctagctactacatattcgatttaaatatttatcaaagtaataataatctacaatgtgatttactgatcataatgcgtggaaggtggaacctattatattgttaatacttaacaatattatcaaagtacaataatgtgattgctgatgcatcgtgacgtaaaacaagaacaccttcaaagtcaaacaccaagagagattgtcgttac

SEQ ID NO: 37392 - DNA, 537 bp, Arabidopsis thaliana columbia
cgccagtgtgctctaaagtaatgagaagcttcatacagatggccatttgcggtgtgtagtgggtctctctaccgtaccctgagacgcattgcgctgtttaatcaactcgggaacgcagggtaggcactgtttgtcaagcatgtggttggtatattaaatactgtattgtactaggctaatagtttcacaggcgcgtatggggtgagtgacatattctgttcaatgagataaaagtcgagaaaaatgttagcgaataatgtagatcttccgaggctgtccaataatatatttaaaaagtggcagagggcacttgttgcctgatatataacatttaaaaaccaccaaatcatcaaatggggtgataactcagttggtatgagtgctagactgaagatcaaacttcatcctaagcctgttctaggtatctagaagtccccggttcgatcccgggtcatccagccaaatttttttcgtctattttgtatgttttcatgtgtgcaggtggtggaattgacgagatatagaagtgtagttaat

SEQ ID NO: 37393 - DNA, 520 bp, Arabidopsis thaliana columbia
gatgtatctatccataataacaagtaaaaatttgtattatgtataaaatgattaaaattatactataaaacagaaaataatttaactttaaataaatattaaaattttaattttaattttagtattatttattaaattacatgacacgccttccagaagatccactgcacctctactttatctgtaacaaaatattactatcctttcatctaacggttaaataggaaatccaccgtagtcattgatacagctgattattcccaagctcgaaacgagaaaagactagagcgcgcaaattttgaatatatttatttattgtctttactttccatcaaattttgaagaacgaaagaacaatgttggctaagaggaaaccctaggaaccatcaaccgagaagaacgaagaagattcgaaagatggaagggacattggagcgacactattctgcttcaattcggtcaattttcggagctttcttttgagaatcgtccatcgtcgaatgttgctcatcggagtttc

SEQ ID NO: 37394 - DNA, 593 bp, Arabidopsis thaliana columbia
cgagggtcctctctctctctctttctctttcataagttgccaaacaagtaggagcagagtctatctaatatctatgttcacattattattactattgattaaaccccaaaggccaaatccaaatacaccattttcacattatcttgacgaatgtgaaattttactatttggttattttctctttggcttctttcttgttttgttcacattatgttctgcactttttttctacaagttgccaagaggattattggattagatcatggcagagagaccaaaggcattaacaaaagatttgaagataagaaaaggtaaaaaagccaaacatatctccatagattaaaaagaaagatggaacaattcaagattcgtagttagagggttgattaaaacacaaacacttaaaatgctagaaactatataagtaaaagcagggcaattctccttctcttgccttcaccttactcaaaaatattgaaggtgagaattaaaaaaataaacccaaactgaaagattaagtaaaaaccaaatccaaactccatctcattctcctgagattttgagtaaaaggatgatcatttgagtctgtttga

SEQ ID NO: 37395 - DNA, 835 bp, Arabidopsis thaliana columbia
ggatccccacattgggctccaccaggaggaccagtacgcaatggtggcgtcattccactgaccaccacaggcttaatatctggtgcattctcggcgttgctgaccatatcctgagaaactggtgatgctgaagatgtttgaatcgaaggaattgcttgtgtagcaggccgagctacagccgggatatggggaaaactaggaactggtgccatagaagttacggtgctaggctcctgcaatttcattccaaaaatctgattaacaggcttctactaatgtgaagatatgctatctaataagctgattgagtatacaatattatttcacaaatgggatattcatatgaacttaacattaaatctagttgattaacacataaaaatttgtaatgtcttatcaagcaccagagaataaatttacaattcattttcggctaatatctagtaaataattcttataaaacatacaagagtcggttgccaatagatagagctgactcctccaactgactaaaaagatcaaatagacttacaactttcacagtagcagttggaactggtccaacagaaactggttgccgattctgaataggtccattggctgaaaatcatacaaaaagagatcttcatatagagaagcaggatagaatccatagaagcacaaagtaaaatcaagatagttggactaagaaaaatggatgttgtcagtagaagaacctgatgacacaggagctggaggttgcccagtgactggaatagatggagcaacagtggccctgtccactttcacagggctctgcataataaatgacatctgaattaaatgtattagggcg

SEQ ID NO: 37396 - DNA, 580 bp, Arabidopsis thaliana columbia
atctaaaactacaaaaagagacaaacgaaaatgaacagtttggtctcgagaaaaaagggagggtacgtagaaggtgaagaagagtaagtttgtacagcagaagcttgtttggtcgtggtctcttaacgtaaacgcagagcagaggcatgggataatgctagctacttcactgtcaattttcacatctccctttttttatattttattattgtagagaaataaaaattattttgttaggtagttgatgacaattccgttacatggttttggcaatttcgttttctcaagaaaactctagtctgttggatttattgcagtttttgcagattttctctattctcttttattacttcttgtgttttttgttttattatgtctctactttcgacaagtttatctttcttcttcctcttctttaaatgtgtaatgcagtacatttgatttggcctctatcacctacctcaatggatcttttgttaacagattgcattaatggtggttgagttcatttttcatggtttaagtaataaaaatacttaaacaaaggccaaggaaatactattttgtgaaaaatgatcca

SEQ ID NO: 37397 - DNA, 343 bp, Arabidopsis thaliana columbia
ttctcttccttctttgtcaatttaaaaggttggggaggtttaagaatattctgaaaaacatctttcttgtgtttgttgttgttaaccatcaatgtactaagattaatcacatgcccatactcatctatttctcttccaagtacatctacacgcagaaaaaagcccttggtctgtttacgtgcaacagccgtatctattggcagctcctgaaatcgttcaagagcttcaaggactcgactagaagtagtgcccgatgcaatagaacaagtatacggcgcttttctcaaacctagctacatcttcaaacctggaactcttgtgtgtcgtcctagccgcaccattc

SEQ ID NO: 37398 - DNA, 784 bp, Arabidopsis thaliana columbia
tgatgctgagatgattcccagagcaagatagtttgtgctgcaagtgacacaattgtaatgaaaccaccactcaacgaatttacttgtggctttgacatgtcgtgtgctctgtttgtatttgtgagtgccggttggtaattatttttgttaatgtgattttaaaacctcttatgtaaatagttactttatctattgaagtgtgttcttgtggtctatagtttctcaaagggaaattaaaatgttgacatcccatttacaattgataacttggtatacacaaactttgtaaatttggtgatatttatggtcgaaagaaggcaatacccattgtatgttccaatatcaatatcaatacgataacttgataatactaacatatgattgtcattgtttttccagtatcaatatacattaagctactacaaaattagtataaatcactatattataaatctttttcggttgtaacttgtaattcgtgggtttttaaaataaaagcatgtgaaaattttcaaataatgtgatggcgcaattttattttccgagttccaaaatattgccgcttcattaccctaatttgtggcgccacatgtaaaacaaaagacgattcttagtggctatcactgccatcacgcggatcactaatatgaaccgtcgattaaaacagatcgacggtttatacatcattttattgtacacacggatcgatatctcagccgttagatttaatatgcgatctgattgctcaaaaaatagactctccgtctttgcctataaaaacaat

SEQ ID NO: 37399 - DNA, 766 bp, Arabidopsis thaliana columbia
aaagtttcttagataaccgttgagctagttaaggcaaatatacaagattctacgaagtataaaatacctaagctcatgtactacgtggcgttccggacatacatgcattacgattaaactcaactaaaaagaatagtgtaaacgatcaaacaaaaccatataaaccaccaacgtaaatcagttctaaagtccccatgaacgcccttcgaaacccccctaaaacttaactagagatctactcacacatattcaaagaacacaacatcatatgaataagaaattgcataaaaaagagtgagtatagaaaagggtttagagatcttctttggaaatccaaagcttgataaatcttcttccattttcaagtagagaatagaaattgaacagaaaagagagaactaatgaagaacaagagaggggcgacttttaggcagtgggaggcgcaggaggcagcctgattttgttggtggttctagggtttcccctagacttcatatggtcaaagggtagaaacatttttccgttgattagtaaatgatgggccaagttcttgggcttcgtagggatgctggaagtcggccgcaagaggaagggaaggagtggttgtgcgccctagtggttggtgtaaattcgaggggacccccgggtccaagtcaccatagccggcgtttttaaattgatcattttcaaaaccgcgaatttaggacatgtcttcactctttggaccataacttctaaacggcttcatggattgcttcgattcgac

SEQ ID NO: 37400 - DNA, 617 bp, Arabidopsis thaliana
tgcaaaataaatcacaatctcaaagaaaccaagggttagtactctccaattaagataattcttctttgacttgagattgaaattaaaaaaaagaaaaatcaaattaccagagccacccatttgctcaaggcggtagaggagcctgtgacggaggtggtggcggatatcgcaagggaggcggtaatgaatacggaggaggtggtggcggaaatggaggaggcgacagtggttacgagatacatagtagaaggtacagatctggtggaggttgtggtggaaaaggatacgctggtggtggccgtgaggtggctaaggaggaggtgacactggaagttacggaggaagcgtagtggggtttggtaatcgaagatagtgtagtttattgtcactgttagattgttgagagatagggaagatgatgataaatcctataagatttaaatttgaattttgaatattgaggttatcctataatatttgattttgattttggaaaaagagagagaggaagaagagaagttttcgtaaaagagatggtgaagaacaaaagaaatattgctaaagaaaaagagaaaataaggttgagggcaaattggacaatttaacaagctaaagtg

SEQ ID NO: 37401 - DNA, 807 bp, Arabidopsis thaliana columbia
tgtcgaattttgaagcaatggatactgaatttcgtttcgctttctgattctctctcaaatctctccgttactctcttctcttcttcgttttttcgggtttcttcgtttcagtttttttttttgtctttttcaaaactgaaccgcatcaactaaaccgaaaccaactgctgtagggtttggtttacgtcgtcaacttaaccgatacgaactgctgcacagtttggtttgtgccattattaagttttcccagagtaatttggtccgaaattgaatgacgagacaaaacgtgaaaaccagttctcactttgacaaacggttagagcaaatcttttttcgtccacttttgtgaaaatttcttcttaaacatagacaaaaatgcagtagcgtattgttatttgtgaaaaaaacatgtttttttgtcaaccaataataattaagttcaaaagagttatctttgagaaatattgtttacataggtaatatgatgcggttcggtacgaattttttgtactaaagaatctgatttaacatttgcactacgaaaaattaaagataaagaaaaacttgtaatttttttcttatcgctctaaaagaacatgtcatttaataaaaaaaaatcatattatacttaaagaaaagcgtagaaaaataaagtgttttaacattaaaatcatgttttaaaaacaaattacatgtgatcttaataaataacatgtaatacaaaaaagtaacattttaaagagagagatattctgctattacgtgtaattcaaagaaataacatgttacggaagaaagtgacaaaga

SEQ ID NO: 37402 - DNA, 519 bp, Arabidopsis thaliana columbia
gaggtagaggatcatttcaaaatctctggagtatatcttggattttgattctaatgatttactcatgaaactccaaaagtgtttcatttcaaataaattaatatacaaatattttacaagtcttttagttttgaataacactgaattttaataaactatttaaaatcttaattgaataacaacaaactttaaaatctattaagcatgatttaaaaagataagctccagtaacactagattttaaagctggatttagaatcattagatgaataacagtacattattgttgaatttcaattctattaaaatccatcaatgaataactgcaagaagttaaaaagttgaatatccttagtgaaggatcaaggaacatcaaagtcgttgtagtatagtggtaagtattcccgcctgtcacgcgggtgacccgggttcgatccccggcaacggcgttttttcccaacttttttgaagcagctgaaatcattgtgggtcgtaagaggccaaacgcgttgtttgagt

SEQ ID NO: 37403 - DNA, 781 bp, Arabidopsis thaliana columbia
taaaactatccttttcaagtggttcgagtgtaatatatatgaatctggttaagcaattaaaggacaagatagaagttggtttcgttgccgggaaattcttatgcaacaagaaaataaaaataattattaaacaccatgtttagtggtcctccataggcgcgtgacgtttaaggcgcgtgtaagtaacgtaacggaaagagttgtgaaactttgacgacggcgagaaaatactaatgtctccgtcaaggtcgtcgtttgtgacagccgacgccgtgaatgacccggtctctttgtcgtcttcttcgtttactctcttttcttccactaacccgacccgtttcagtgtatgtttttctttggggtgttaaattcacatgaggtgacaaaataccaaattagagttcaaatctgaataacaaaattgtgtccacttggttataacttattataagaatatgatattttgcattatagactattaaaaatgtaacaaacttcatggtgtggtggcaaggaacaaaaaaggcccataaggtgaaacatgaagaaaggagaattagttatgaatttgccactaaaatcaaagctattttcctcaactgtcccaacttgcttttatataacattagcttctaatgtccttcattctccatcacctcacttcctctttatactctcccttcaattattgtctacatttagatttttaacacaactgaatgacactataatgatttagaaaccaaatttgaacttctatacccaaacttttaactttgaa

SEQ ID NO: 37404 - DNA, 783 bp, Arabidopsis thaliana columbia
ccgctgtattttagtctcttaatttcctgacccaactactcaagtaaggcgaagaaagcagatggaaattaaatgccaacataaacttcaagtctcataccaaaacaccaattcgtaagtgtataagaagtagaactctactcgtgaaaactgcgacaaatttaaacatcaaaatgtggtcgataactgaaaactgaaaacaagggtccacctaaacaagagagagcctaacagaactagtaaaccaagcaatgacagaattcaattccagaaattcatccatctatcgaacctccatttactattgcacataacctttaagaccaacacaacaacctttaaaagtgacataccaactctacacttaatctacaagcatatgatgaataaacaggaagaagatataacaatgcaacaattaaaggatacagttctgccttatgtatcaaagtctctatcttcatcataattcacatcttcaacaagaagtttcaccaaaaaaagtcaaaaggtaacaaaacaccgagttccactaagtcatttaagtaccttggaaagtccaaatggagcgccctgaaactgaaagcatcgaattgagcaaagcagaagcagtggccgtgtggtacggtagcatcgtctcgacgcagcagctcaattccaccggagatcttcaacacatttcacaattgacaatcaaaattaagttaatcgatgttttggagtagctagagaaggtttcctctatgtttacctgaaaatgcggtgagagagaggactctgttt

SEQ ID NO: 37405 - DNA, 666 bp, Arabidopsis thaliana columbia
gagacaaaatcttttaactatattcgaatatgatactatgtttggagatggctgaattgctatataatttataaatttgttagcattatcatatatcgaaattgtagatttttttgggtcagaataaaaatctggttccaaaaatagaaagatgcatgcatcgaatgttttttttgtttctttcttttttcacttattaaatggagtatttagattctatctaacttatataaaattttctacgtttttggatttttttttccaatgttttttaaataatctatactccattagctatgaataacatcagttcatttgattctgtgaaggaacatcattattcgggcgtgctctttgggattgacatcctacaagattccggtctaagcgaaccccttcgataatatcgactttttattgcatagaacaattaataaaaattgaccattataataagacattgatctcaataacttagggagcattattatgtgagacaaaaccatgtgaccttttttttttttggtaggcaccgggaggtaaacaccgtcctgaatttatttatgaaattaaaattacatccgcactagtcttggaaccgaaattcctaactcatcatccctcaaaatcgagtctaaactattcgggggagaagcaaaagcatga

SEQ ID NO: 37406 - DNA, 511 bp, Arabidopsis thaliana columbia
ctaaatccttgaaaataaagaaatgaaagattttaaacgattgttagagagttttttataatcttgttgattagtttttcataatcttgtaaagtttctcaaacaatctctttattttgataatactttccatgacttttcatgacttcattttgtgaagaaaaatgtaggaaatcataaccaataacataataatttaaatcattaacaatcattaacaatcaaagattcttttgttttaattgaataacacaaaacttttaatggctttataagagtatgaatctaataaaccaaaatttatgaaaattttagattactttttacaaatcttaaatgaataacacaaaaatttaacatacttttaaaaaatcttgattgaataacaatagattttacatgacagtttaaatcactaaaacttttttaaaatcataaacgaataacaccccctgagtctctaattcttgtccgaaaggatgttgtatatgaacttgaaaccgtattaatc

SEQ ID NO: 37407 - DNA, 661 bp, Arabidopsis thaliana
catcaaatctaaggagaaagatcagtcaaattgacaatcagataaccatggtactataccaaaactacatagacctcatccgaacatactaatcagtcaatgagtatagctcatatgtcactcaatttcacttcaccagagaaattaacaaccctaaacgaaaatgtcactcaaatttctgaacttttcgagtaatctgcagaaacacggtcgcataacctataaatcgttaactatttccccaaaacctatagggctaacaagtaggaagagagtgaaatctataacaggctaatgaattcagatttcaatgacatcgaataagaaaagtatcgacatttagataaacttacggcctgggctttgacagcaaagctccgacgagaagtggagctgagggaagagcgtcgagcaaatccggagcggagagaagcagatgcggaaggagaagaaagggttcgaaggaaagaaacagatggagaggaaagtgaagactttgctggaaaaaccctagaagagggagaagagatgagagtagttgaagaagcaacagacgccattgctgctacacacactttgtgactctctgagtctgagctaccatacactcttatctatctgtcaatcacctctctttgtagtggaagtatgaggtggagat

SEQ ID NO: 37408 - DNA, 497 bp, Arabidopsis thaliana
gaaaactcatgaaatccacattatgcaactaacaatacaaaactagagaacgcaccttgtcttccactttttcatctacagcgcactctactgaatcaaggtccagttggtccagctgagtccattcatccagcctcctattaactgcagtttcgaaaacaaattaccaaaatcaaacacattgatgatcataagatttcaaaatcaccaactttgtcatcatattactcagcttaatcacaatagtataaatggttcaaaatctttagaagcaaagtataatgcagaatttgatctccttctcaaaaatctcacacaacttgaagccaattccaatgatccaattgataaagtcttgcaatttaactcttttttcttcctacattataaacccttgactaaatttccactttgtgaagctcacagtacgaatcaccaaaattgaaaacctacatcaaaacttgataaggaattaaacgacatacactcagtgtaat

SEQ ID NO: 37409 - DNA, 1131 bp, Arabidopsis thaliana columbia
aacacacacttgtctgttcagcaggcaaaagaactcatcgaggtgcctacaataatctaaactaatgtcctacaggttttctctatgttttatgtctatctttctcctgtcagcctatatctatgatttacgcgatctataaaaatgctgtttgattcttccaggacgagaaggctggatttgcatatctcagtctacgagaagctcggccatcttcgtatgaaatctgagaaacatttatttgtgatatacaaatgcatacgacattttcctgttcttccataagcagtttggtggtaaagataacatctgatcgtattgacaaatttctttgacaaatttgcagatattcactaatcgaaatgagggagcatataaagaagcgccctcctctggcaacaacggagaaagttcagcaatttgtgagggtaagggatctatgaaatgtcaccgccttatatgctccacgcaaatagaatttaacaactcatgtgactaagacaagtttaagggggaaagatatcatagggcttgacagaaagtgaccgtatgcagacatttcatggactgtttttcaatgcaggcgacagggaaagaagccattgttgctgggttttaccatgaaggctacgaagagcctctcttaatgcttatgagacgaagaggtgtccattctggtttggtggttaaggttgagtctctctcttttaccatcaaatatatattaatgccctacgagctactacacacttgggacgtagacttagaacctgaattctgttggaagctctttccatatgaagttttgaacttttagtagagaaaatttcaggtctgattgtaagggaatttataaggcttcttttggtaatgcagggtgaggagggggccctttcaatgacaacacgggtgcgagctgcaagtgcatcaaaagggtttccagtcaactactgttccgggtttcgttcattgagttcggacacggctctagatgctgacggttagaatagctataattactttccttgtttcaaactagaatctactgcttgtatattttaaccgagtccagacagggtgacacttaatttcacaggtgcaaattagtgttgtagtaaaccggattgtaga

SEQ ID NO: 37410 - DNA, 638 bp, Arabidopsis thaliana
agagtatccccgctgcttacgttgagtttctccaccattgatgtcaccgtagaatgtggcacggccatgaccccaaccagaatgcggcacttggccaccatgggatgggagggcgccatgggatgggtgagcaccatgggatgggtgggcaccatgggatgggtgagcaccatgggatgggtgggcgccatgggctgggtgggcgccatgggatgggtgggcaccgggtcttccaccgggtacgtggcttgcatgatcatgaccgttagtcataggtgcaatccatatcaccattaccatcatcaaaatttttgcatataattttctttttaagagttccatgactttatctcttttatattaaatcttactaatcttattgattattgttgatgagagaatgtaggtatttatagctatgtaaagaaattttgggcttgtcgatatttttgggattcaattggaattctacgatgttgcttagactaaggaagatgttttgtggcttcttagatatgactggattctccgaaatttcattaaagctttaccgtcaggtctataatttttgtttagccaacggttatggttcagtactaatatatttttaacatctagatttgggtacgtatatgatg

SEQ ID NO: 37411 - DNA, 1112 bp, Arabidopsis thaliana
gataactttaatggttcattcaaatttgcccagagaggaaaacccttaagtaacaaatgcaaaaatagaccttaattatggtccaagtaagcgaaagtaaaaattatactcatgttcaggaacacaatgtccaagtaaatttggaaaagttagagaaaaagaaaatcaaatttctaagagatttgtgcaagcttgtgtgattatagaagataatcacacctcaatcttatacagcatctccttgtttcatgtctgttaaatctgtaatccttattgttaaaaagagttgagaatctcaaaatcatggcgcacgtgaagatcaagaagttgttggttcttgtgttcaaaaaagatgtcgtgccgttttaacgtttagaagataaatatgcgtgccgtttatgattggcggctttttttgccaactataggatgacaggtcataaagaaatcaattctgacacgaaaaaaggaaatagaaaaaaaaagaagagaacaaatctttttgatctgtgcgtatggttgttgtgtctcttcttcctcgaatctcgatcgttacatcaccgggttctagccttcacgatgtgcttttgagcatgagatttggtttgacgcgacatctccctctcaaacgatctttctccaattattcaatcacttccgtatctccagaacaacagctcaaatctccggtgaccatggcgacgaccgagagcaagaatcttgtagaagcttccaaggaggagacaaacaagaaggagacagaagataagaaggaggtgggagtttcggttcctccaccgccagagaaaccagagcctggcgattgttgcggtacgggttgcgtccgatgcgtttgggatgtttattacgatgagctcgaagattacaacaagcagctttctggagaaactaaatcaatttgactgatttttcctcgcattgttaatggagaaattaaacatttgtctttgtcgatttgatgatacagtgcttttgttgaacaacattttggatctctctatgaacttgagctgatttacttgtgaatagaagaaagtagtgattattatatcgaccataaattgatttcaatcaaatttgctcagagagga

SEQ ID NO: 37412 - DNA, 646 bp, Arabidopsis thaliana columbia
  unsure (1)..(646): unsure at all n locations
acataacattcaaagtagtactatgactaactaaatacacactacataataagagtcaaaacccaatatatcttggccaatgccttaggaaaatgcacaaacaaactcaaacacattgaagtcattaaaaaaaagtggtacagagaatattggatgaggaatattcaccagacaatgatcctgagtagaaagttgaagaactagagcatgatttggactagtagtatacataataactagattttaacctgcggtacaccgcgggaacaatttattttttaaattaatatatataaaagtttgtaaattgtatatagttataaaatgtttttattttatagtttacaattgttattaagtaacgtcctgccaaacccgtcccgccaacctgtcctctaaaaaaaactcatttattttattaatgttgatcttatttatgatatgtttatgaattattgtctaaatattttgtaattttgtagtaattaaatgctatcaaatatctatacggattgatgattataatcatgtagaaaagcaatatcaaaaatgataattttgtagtaattaaataatattaaatattttggaagttttattttaataattaatcgtgtagttaaggtagagagattntgggaagata

SEQ ID NO: 37413 - DNA, 540 bp, Arabidopsis thaliana columbia
ttacaggtacttggaatttttggatttcaaatcatctcctctttcgcagaatagaaaaacccaactcttttttctctatttatagttggatgagcaatttaattgaccacatcagagacctacatccagttttggatatattgaatattaagtatataaatgagggatttaaattgagtatattaaagagacgatgaatccaattaattctaaagaaactgagtcaatttatagggaaatttcttttatttatggacgcagtaatttatacctctatgaattcagaattattaatttatagagagattttccttatttgtaatttttaaaaacaactatttaaaaatttaagattttacgtcataatcaatattttctataattagttacaaataaaaaggcaattatcatgtctaatatataatattccaaattttcaatacaattaaaatactataaataatttccacaaaattaatgcaaatttaatgaaaaatgcaaaacacaagagtgatatttcctagatgtgtcatctagata

SEQ ID NO: 37414 - DNA, 400 bp, Arabidopsis thaliana columbia
gaggtgatccacgggtagtgccactgaaacattgcaatcgaggtttttttggagactgttcaaatttctctaaactctgagaaactgttttccagtttatttatgagttattcccaaaatctctgagacaatgacgaagaagaaatcagtgaaatcaaagaatccaatcggtccagtccaaatcaaacaagaaaataaacgatgaaatgcaaaaagagaatcaaaccgaggtaatcccgaaaaacgattcttttcctcaaactcgaaaaatgattccttccctcgaactcaatccaatcgtaattgcttagggttcctgactttttctttgattccgtcgaagatttagagaatttggggttacaatctgactactgttacttttgtatcagttgaatcg

SEQ ID NO: 37415 - DNA, 580 bp, Arabidopsis thaliana columbia
tcaattttgtcgatctaatataaagtagatatttgtgtaataccacactaccacaatttttaaaatcatagtggtatataaattaagggtttactatatttattctagtctatccatttcaatgtatatatcattttaacataggcacacgaattatagtaaatttattttattttatatcctgaatatcaattacatatcgaacttaaattatatactatatcaatatttttttttttcttttttttgtttgaacatccaagaggttctgcgctgaagcccgtaatccctctaggccagaaaccacatcatgtaatattagtttcgtcccaaacatcactcgaaccggcccaagcatgtaatatactatatcaattttaataatacaaattagacatgttatttttaggatattgaatttttattacatgttttcagaattaaaaaaaaaacaatctaaaaagcatattgttaatattaattacgtgaaattggatgcaataaaattttaggatatttgcggtttatcttttaagagagatcaatcggaactcgattgatataatgatatgtatgtgtt

SEQ ID NO: 37416 - DNA, 502 bp, Arabidopsis thaliana columbia
tgaattttgctgttccttaataatactaaagtccatttcaaaacatagccaataaaaagcaattatgtgacttaagtaaaatgcgccaaacataattttttaaaaagttttttagcgaattatcaaatttgaattcataaatactaaaacaaaaattatgtaaaaaaatattaatttaattagtttgaaaaatatttagtttcacagcattgcataatttattatattaactagattctgacccgcacgttcgtgcgagattttatattataagaaatgtgttgtataaaatttacattcaatatagtttttattggttttagtcatatatattgtagtatctataaagaaaattgttgattgttaattatgtttgtttatgacataatagctaatattgtgaactataagtcaaattgtagagttttaaactgaaaaatagattagaaatatcttagatggaaaattatcttaagttatagtgatgttaagtattgttata

SEQ ID NO: 37417 - DNA, 848 bp, Arabidopsis thaliana columbia
gtaatatgtaattacaatttttatgtttagatttatttgtgagtcgaaatatcaatttatatatattatgtataaagctgattatttataaaattttaatattttttcacttcatgaatacatataacaacaataatgatattttgatacaattatatataactatgttacttttgtggtttaagattttcctaactcgattataaataaatcaatttcttattttatgtacgtcaacaacattgtgagactcataattaaagtttggattgacatcaactaaaaaagatctgaaaaatattcgtacaaaaaaataaaaagatagcaaaaatgaatgtcactgaagtcaacacttttggatcttttgtcattgtatatatcaatattagagaaatgatcttgttttggatgatttgaaatttgttcaacttgattataaataaactatttatggtttaatttattctccagatataatactccaacaaaattgttataggctcatgattaaatatagaattgatataaactgaataagatttcaagagtattatgaaagattttagaattctatttataatctagtgttattcaattaaagattaaaaaaaaaatttacttgaatgcaatgagtttttgaccaaccaataaaaatagagaaatttaaagagaagaataaaaaattataatacgaatttctaaagtagaactcaaattctctctaatacaacatcacccttctcgtgtcaacaagcacctcacgcaacataggtaaactagaagattatcgtgaagcaattaccatcatatcggcaaattttgctttccgtttgtgatttttttttatt

SEQ ID NO: 37418 - DNA, 754 bp, Arabidopsis thaliana columbia
tacttatcaaatatatgaatctcgtaagattgatcgaatcacaaaaaaatggggaagacgatcagcttctcagccataatcctcgtattcttattggtttccacaggtacatgcatactctcaatcaaactgcaacccgatctggaataacatcatatatttaattgctgtgtatacatataggattgatgaagcaaggagacgcgcaagcgaaaagtgtgagtgggagtgcaagcttctaccaaacttcccgtgctggttaaaaggtgcgggagaaggcctttgcgacaacttgtgcaagtacgaaggagccattagcggcgtttgcgtctctgacccccaccgctgcctctgtcgcaatcgcaagcccggctgctcctgatttcatcacatattcttgttcaagcagtatttaagcccgttttacacctaagaataagtttcttaaaaacacgcaaaataatattacgtcttttgtttctgataattaatacttttatatatcccattttataagattttcaagctaaaagcaaagtatttttaaaaagaaacgataaaatgttttgtcatttttacacactattattgaaattttattctaaaagccatagcatacactacagtactaaataaacagaaattatacataaaagctattaaaaatcaaataaaaggaaccaaaaattctaaaaaatggaacagaagacggtgtaatgtaccctatatattatcacatagttcattttgttgg

SEQ ID NO: 37419 - DNA, 923 bp, Arabidopsis thaliana columbia
atcaatttattacagtctatgccagaaatttatgcatcctacctgatataaaaagctttatcgcatcctacctgatataaaaatcagtgttctatcctttaagttgttcatgtattttcattccaagagcagccaatgttgagacagattctcttgctaagcttgccttatccgtttatgctgaaaacattgttagttaatccaagtattggcgtttcaaaaaagaagtgattttggtgcaaatatcttttcacagaatataaaataatttttaatcaattttacatacatgtatccgggacaaaaatatagttagattcattacatttagaaggttttttattttatttttgtagtttagggaccggccaaaagtatttcaacttaaatccaagacccaatgcttagatcacgttccgaccatggaaaccaaatccaaattcctcccaaagcatctttttagtttgagacccacttttggtaatttacgcacgtgctacttcatcaatcatccccattcatcactcatccaacatgtctatctataaatagacggagatatttcgtagaactcaaatcactcaccacataaagtaaaagtctcatctcttcataaaatagctttaaaccaatcaagtagagtttcttctcaagtctttttattttatttttatcaatggcttcttcagcagtgtctctccaatccatctctatgacaactctcaacaatctttcatgtaatcaacaatttcatcgaagctctcttcttggttcctctaaatccttccaaaatcttggtatctcatctaacggttcagatttcgcctatccatcaagtttcactgccaagaagaacctcactgcttctcgagctctctcccaaaacgggaatatcgaaaacgctagaccaagtaagttaattg

SEQ ID NO: 37420 - DNA, 386 bp, Arabidopsis thaliana columbia
tcctctggagtatgttaagttcacacgtgtgaatgaaagctttcgctcacaaagcttggtgctttaacgtctctagcctctaccaaaatctttaagccgccatcgatctttccgatcacggaacaaccgtacgaattgaaagtatctctgcggcgaagtagaaatgtggacggaggaatctttggatttagtgcttgtaccgacgggtctggtcgtgatggttgcattccatgtctggatcgtctacgctattcttcaccgccccaagctcactgttatcgctctcaacgctgagtctcgacgacaatgggtcttctctatgatgactgtatgtattaatatcttctcatttctattgttcctcttttggtgacattctgggattt

SEQ ID NO: 37421 - DNA, 909 bp, Arabidopsis thaliana columbia
ctaccgtatatttttagttaaaaaaacgaaattattaaggttgtatacttttcacaacccaacaaaagctaaaaagaaaaacaattccgtcaacagcaggattcgaacctgcgcggcaaagcccaattgatttcgagtcaatctccttaaccactcggacatattgacttttgctcattgtttctactatattatatatatactcagatattatcagtaccaaaataaacaaacaaaaataaaagcttttggagatagaagaagagtctgggagagctcttttactcatagcagttaagaagacatggaacagaaagaaaaagacaatcccgaaagtcgttttattttcttaaatatttaaaacaagatagcagacgaagtattaagcaacaaaatccattacacttatttaaaatcattataagccaaaatagacggcctataagcaatcaccagtcttcctactcttcattggtcttcatcttccgcaggactaaggtcgtctcttgggctgtatccgtctctaggacaacggtcctctctgggactaggactctggtcttcataatttgtttttgttcagattaataaggaaaagaatcaagaaaacaagacttattcgaatcttttaaataattatttgaatatatatatattatctccactagacaaataattttcccggggaaaataaagtaaaggaatgagaaaaaccttatccaaacttttaaaatgcccgtggcgatctctctcccaacctcatctacttctcatttcttccctcgccgccgcggccatgcaaatcaccgatatcaacgcttttccggagctcaatcttccacggaagatccgtacattcggaagaatcaaactggcgtcatcatcatcggcgctggactcgctggttta

SEQ ID NO: 37422 - DNA, 490 bp, Arabidopsis thaliana columbia
tattttcctttcatcttaacatttcaaattattctacttttgtaagaaatcatataaattagtttagctgttgcagttttcttcggtttcggaaacagtttccactttttttttaaaaaatgcaaactttactttatctctgagtcaaatataaacttttcttttttctccactttaattatttcttggagataaaaaaaatagcaaaataacaaagttacacaaaaataaaagtaacgtcgtagaggagaaacggcaacaaaaaagaagtaaccgttgtaaaatattattggctgattccttacgtttgacctctctctccctttatttgttacatacctgatacctcccttaatcgctcttacactctcgtgatttagacgcgcgactaagcaatttccacggttaaaaaagtaaataattatcggagttagttactttcaaacaatttttatcctttgagaaaaaccatttcgatttattgaaaaag

SEQ ID NO: 37423 - DNA, 295 bp, Arabidopsis thaliana columbia
ccgacgaataaagaagatgatctggttatagtgatctctagtagcagacgatcatcataaatatgagagagagagagagatgtgaaagtgtttgcctgatgatgagagaaagacgttcggcgagttgtcgttttcgatcgccggcgactgactttgttccgagtctctggttagagacactgactcgacaatatttccgtctccactcaactagtaaagcttcaattagttttccgtttgccttattctattattcgaatcgagttgcatataataatagtacttccaattcgta

SEQ ID NO: 37424 - DNA, 600 bp, Arabidopsis thaliana columbia
ttttgtttggaattatgatatgtatgtctttagattattgtctgattgattattgcagcaggttcgacttaatccgactactggaaaatacagatggcaaaccgatatacttgaggatatcctggtttccaacacaatacactaaggctggagttaatctcattgctcttcctttaacctcatccaaactattagttttcatagaacttgattccttgttcatacctgatattgagacctatgtggaaaaaaagtattcctctccccttataaaaaaaataaaataagagattgatatgatttttggtagtgtataggggtaggaatgttttccatgacctcattactgtatattattaggaatgatcaattacaaaggttggaaatatgccgagggtatcaattcattatgcgagttcccctttgtttactcttcaaaaagaataagtctcgggaaagaaagaataccaaaagaaaaaaaaataaagaatggtcaatttatcatggtatagtacaagaatgaatctagcaggttcttgaatattaccttgcttgatgagcccagcgatgaaagccttgtggatatagttgtggacttaa

SEQ ID NO: 37425 - DNA, 1267 bp, Arabidopsis thaliana columbia
gcttcagatgtagtagcagaggttgtgcagacagccagatggagaagaatctggcaataacgaggatgagcaaaaaaaatagtgacatctgtataaacctctctggtgcatatatgaaaggtaatatatgaagctagaaactattttataagaaatggaaagtaaaatactaacttatattttgtgaaaacaaaatcttcgatggtaaaggtaatacatgtcagagcctcttctgtttttttgtctccgtgtgctatatttatgcagtatctcttctgtggtttctttgtacgtgctatatatgtcagagcctagctctacctttcaactttgatcactggacggattcattgtgcttccttaaaaataagtgatgctgttgttatacgtttcttcttgtttttgcatacactttagttttggctaatcaatttcaaattccaccaaagatggaatctaattgattcttcttcagtctatataatcatcgcagactaattgtgtctaaattattgtcgaagtcagtgggatcaagatggtgttcttgatgcagcaatcaagtggggctctaacttgatgcacaatatccatacctgagaaggcttacacttctccaattttggtgttcttgttccgtaatgatttaaggcgctaccacactgtaacgtatgtctccctcgactacaacagcttgtagtgaaggtagagaactgcaattgctgccacagcttgaagtgtcttgatttgaaatcaattaagctgtctactttcattttatcctttggggtgagcagttttacacgtcttgtcttgcttctagtatgaggcctttaacatgaaggatgaaagatctgcattctacttatatgccaaacttgcatatatgctctcactatagctcatccatataacagagaaacatgttgtcaaatgcagattaaggcaaaaaaaattcttggaagattggttcatcatttgctctcaaaaagcctgcaaaatttctcttaaaggataatctagatgatgacttggatcttattgatgaagattctctgctaacggaggatgacttgaagaagcctcaagttcctgctggtaattaaagacagccacatgatctttcttatcattgtacatcccttgtgtttaagatgtcttgcattttttgcagccagcggttgtgagcccccaaaaaagcttgcaagaactgtgtctgtggtcgagatgagatcgagagaaaagctgtgaagctgggcctcacagagga

SEQ ID NO: 37426 - DNA, 495 bp, Arabidopsis thaliana columbia
gatgcaaaacaagcctaaaaacaatcaccaagtaccttaaacccaacaaagaacctaaaatctaaaacaagcctaaaaacaatcagcaatctatttatgcggaaacgacgtcgtttatgcggaaaatttggcatctcatttcactccaaacgacgtcgttttggagtctttgggcacgtcacaatccatgtcaacatgaattgacggtgggttaacaatgttaagcattttccacgttttttatatattttagtttgtatatttcaggtttgcaatttgaattttatgaaagtgagagtttgttttagtacatttaatagatacttgtacgatacttttttagttgaccaaaaaaaataaaaattagatacttgtatgaattcaacacagcttatatgtcgggctatgaaaaagacgatattcccatatatgaggcagattaatcaaatataggtagcttattgtgagcaagcaagcaatgtctttaataagaac

SEQ ID NO: 37427 - DNA, 403 bp, Arabidopsis thaliana columbia
tatttataagattaaatacttttacttacagtataaaggttttcctttaaaatatgtgtttgaattaatatgtaagggatttgacacactttaattgcaaactcatggaaactacttgtgggcatattgcttagtgttttcttttatggctttcttataaataatggtaacaaatcaataattacataatatgatatatattatacttacctcacactcataggaaaattttttaagtaaatttgaaaccaaattacaaaataactaatatgatgtgatgatatgtttcccctcgttctttacgtatatatatatatatatatatatatatatatatatatatatatacatctcatgttcccacacacacacttcacaagtttgagagagacacaaaacgaga

SEQ ID NO: 37428 - DNA, 537 bp, Arabidopsis thaliana columbia
tggtttatgcggaaaatttggcatctcatttcactccgaatgacgtcgttttggacgtctctggccacgtaacaatccacgtcaacatgaattgacggtgagttaacagtgtcaagcattttccacattttttttttatattttagcacaatttgtatatttaaatttgaatttttatatcatacaagtttgaaatttgaattttatgaaagtgaggatatgttttagtacattttaatagatacttatatgaattcaacacagcttgtatgtcggggttgaaaaagctgattttcctcatatatggacatgagaggactaatacttgagcaagagattcgaagagatggacgttggatcaaatggatcaagaattatatcatctcacccataattcacaacattctaaatttatcgaaaaaatgataaagcaaaaaggctattacgctaataagctaaacaaacagatgtgatgtcattgtggttggtcagggggtaggtcaggctcaggaggtggagatgcccaaactcgaggtt

SEQ ID NO: 37429 - DNA, 171 bp, Arabidopsis thaliana columbia
aacggccgccagtggccagtgtgctctaaaggatgctggagcggagtgatgataaacatgaacaagtggatggtgcctagcgcgcaaaagagtctaaactatacacaaaacctggagctcggaagctcagcatgtgtgctgaaggagggacctctgttgacaggttagacg

SEQ ID NO: 37430 - DNA, 608 bp, Arabidopsis thaliana columbia
tactgggctcatctaagatagttctagtaatagatacctatggtgggaatacctattatcctaaaatcaagttctagttaattactctagaactagcattaataacaatcgaagatgaagaattctaaatatattatctgatcttattataaaaactcacccaattgagcccgtctagcataccaaattaaatttaatactaacactaattagacaaatgtgagaaaaataatatcatcaaatgcatataaattaacgagtaagaattagaattcttctcccagtgtcaagaagagatggagatcgtcatccaaagaacccacaaattgtctgaattaatttctccatatataataaataattttttagaacatagaattttgaatcgggccgcatcccctgccttacttaagatgtattctcgattttgcttgttttcatttttcttgtcaaagcttgtttgcgtctagataattcctttgaaatatataacatgtaagaatatgatgaaaagagctaaactgtaattagtacaaatctactcacaaatcaccttagaatcgaaacgaataacaaaatcatcatcccttactttttgcatgattagt

SEQ ID NO: 37431 - DNA, 575 bp, Arabidopsis thaliana columbia
taatttattgataataattaatgctaatggcatttcttgtaaataagttccaactctaggatttatttcacaaaatggttgcaaaaatgtatatatagattattgaaggttatagtccactacaagcattttagttattcgcatgagcggcctcgtcgaaatcgtttacaaagttggaaacatcgaggtacgatgtaccctcaaatagtctccacttcaattgtgatactatcctcagcatagcgaaattacattcctccactctctcaaagtcttggaatctcaatttttttccactcctctaatgcatgagggagagttatttctctctggtaactctccctggttgtcaaaccgtgcttttaaagcacgcaacaactttgttgggtgttttctgtgagcatagtcatgcttaacattttcatcgagatgtattcttaagaatattatcgctttttctttatcttttggaggcgataaattttctgatttaaggtttaagataaatcttgagactcaaaatagagtttgacattagtggtacatgctatgtactttgagccagtaattttgag

SEQ ID NO: 37432 - DNA, 782 bp, Arabidopsis thaliana columbia
acacttgaacctgatggtaaagagagcatcctgcctttccagagaaactacataagagaagttctggtctcttattagggtagccactttacttgagaaaagtggaagagaagaaaagttaaatagaacttgttcttgtggtttcattggtgagtgaacaaagagagcacacggctgttgctgtgtttgtgagctgggtagttttaggttttgacaagagcaaatcaggttgttgatgttgcataacactgtccaaacttatctgtgattgatcagtttgaaagttgttctaataaagtgtgtttattggagttgtgatctttatcttgtcaaagtacttaggattcttttacttcatatgttagatataatattttgcttaattgaatatattttacaatgttcataagctataagatcattatatgatgcatacgttttatccaaccatatcttcacgtaaccaacttcttctcaattaccttaactgttcacatgtttatatatctaagcccatatttttaggtgttatacatatatatatttatttactttgtgaggattctggaaaattgaaagatatgatacaacagttatacgatatatatattgaatttaaaactttaataattataattaaaataattagaatagacactgtaaatatagttttagtcggacaaaccttactcaacattcaatactagtcatataccgaaacataattgggttatctaatttagagcttcgacacatgcagcgaggtattatcagtgtggtga

SEQ ID NO: 37433 - DNA, 480 bp, Arabidopsis thaliana columbia
ttcaaggctgctgaaacatgtttggcctcttgatgtaggtttcgttccgtttggagctgacaatacccgcatgtccagtcaaagacacggtaaatgacattaccattcactattcttttatcatattactactgatagaacttcatcccattaggaggattttggagctatatcattggttatataagcaatgaatcagttcttttagtgtatctttgatggatggattacgactcttttgtagtttgagaacaaggcaaatgaggtagttgcagcccttccatgggtgaagaaggtaaatgtgacaatgtcagcacaaccagccaagcccatttttgcagggcagcttccctttggattatcaagaatttcgaacatcatcgctgtttctagttgcaaggtacatatatcttccaatgaatttctttttacacagctcttgatgtttctttttgaactgaagtttcttctcaaatttaa

SEQ ID NO: 37434 - DNA, 501 bp, Arabidopsis thaliana columbia
ccaagttttcttgtggtcaacgactagattttattgcaaaaaccataacctttatggataaagacatttatcagaggctgatgatttaccccaaatatccgccacaacgttgacgttaagtggattatgtttttatttttttttaaaaaaaaaaatctaggaggatctggatcgaaacccataatctttcaggcccgaaaccatatcatgtaatattagtttcgtcccaagcgtcactcaaaccgacgacctctaaggttcgcctagaatctttaccaattgagctaacgacacttggttaagtgaattaaaattttaaggacaatactatgaaaactagctaaaccatatgcaaatagtactataaataagatatttatattttgaattttatgttatttaaaaaaacggactacatggtcaagttctgaacaagtctagagaggccaaagtttttattgatttggcatcttatggtttaagtcgatattggtgcaagtg

SEQ ID NO: 37435 - DNA, 614 bp, Arabidopsis thaliana columbia
caagggaatatgatgacagattgagagtaacgtgatcattcatgaatgggcctgttggataaagctatcgattctcccaaagataaacatatatcaccacttgttacaatctcattaccgacttgccgtccctaaaaccaaaccaattaatacgtgtcaatatcctacttacaccattctcattcaacaatttttctgtttttcatggtctgaaaaaaaaccttaatactaaatttgaagacaccttaacaaatgaggataagagcatattcatcatgaaaaattcaaaaattctaccgagcgtcgttagctcaattggtaaaattcctagacgaatcttagaggttgccggttcgagtgacgcttgggatgaaactaatattatatgcggtggttttgggcctggagggattacaagattcggcccaaaacctcctgatattcaaaaaaaaaaaaaaaaaaaaaattcaaaagttctttcaaacaaaaaaattattagatgtttttgaattttatataactaaattatagttattaaaataagatcaaaccaatgtacaagagaaaaaaaaagtgtggtgtggtgatatggtggagagaaaaaaaagtgtggt

SEQ ID NO: 37436 - DNA, 545 bp, Arabidopsis thaliana columbia
tgtctggcgagtggtgttttccccttaacccaaacgatcctaggagcaagcatgctttattatcaacttgaaaagtcccatcctagaccataaaaccgatgaggttgtttccatccagaaataacttaactattcaattattaaaatgctcgataaatgctcaaggttgtttccataaatgcatgattcatcggggatgctgcctctgcaatgttaaaatcaactcgatcctccttaacttccacaaactcatcttcacaatccatcgaaacagtatgacaagcagttgtaaggctactcttagtccatctcgggagggtctctcgaagaggtgttgttgctgtccactcaacagtttaacaacattgatagattccaatgtaaaagcaaactcctggagtttcctgatgtttgtttgcacttgagaaaggccggtctttagctgtccgagttattcctctagcatggcttcagttttagtcttaacaacgggtggtgggtgggcttggatgtaagaagtgttagctggagaagcaatggtgtag

SEQ ID NO: 37437 - DNA, 624 bp, Arabidopsis thaliana columbia
gtatctccagaaacactgggtgtaaattcaaatgatcacgatccaccagctagcatacgtcggagtccaaaatcaacgtcttttgatgcacaatggtatgccattggccaataacctgaaagagcgttatgtatcaccactgttgtatttgggttctcaacacttggtggtgaagccatggggttttgagcgagggacattgttacacttgcacacataacgataatgagagctacaagttctgctagagcacccatgttgtttttgttttttgttttccttgcaatatgaaagtatattgaatatggactctttccacttagtactttattgtatttataataccaaactttattgattatgttccctaacaagcttctttgttttgttgactcagttacataggttatatgttttgaataatatgagtcaaagtaaaacttaattaggtataaaaggaaatctcatcttggtaaaaagacagctatatcttattatataaagtatggatttcaaagttgctaactcatataattgttaccatgtcaagtcaaacgatcagatgttacatgtgtcatcaaaattaacttttttatctctaaaaaaatgaaaatttaaaaagta

SEQ ID NO: 37438 - DNA, 470 bp, Arabidopsis thaliana columbia
gtttctttgtcccaagcgttatggaagatattctcagcctctaaaattaaacttgaacgtcgaaattttaaaaaggaccagatggagagtaatataaaattagcgggtgaaaaatagaagaaattaaaagtttcagggtgaaaaggaaaaaaaatgaaacctgtcagaccgccgtgcgaccaccccggcaagggagaaccgagccgagtaaccatcctctacagcaccggatgcatccaaggacaatcgtagccgtcaatcacgctcaagccgcacggtcacggttcatcaacaagggtttagggcctgtctcttgagaaattttctcaagaaaacagatgtacgagcctatagttcaagtaaggtcgtgaccattgatgctttgtatccatatataaagaaaacgtttctccactagcttatcgatgtgggacgcaaaattcctgaggaaaagggatcataagctaatg

SEQ ID NO: 37439 - DNA, 642 bp, Arabidopsis thaliana
tcttcttctttctcttcttcttctttctcttcttcttcactctcttcttcctcaacattctccggatcttgctctgtcagcgacggctcctccgtcctcgtcggcgcagtctccttcgttgccggcgcagtctccttcgtcggcgcagtctccttcgttatcgtcggcgcagtctccttcgttgccggcgcagtctccttcgttgccgtcgcagtctcctccgtcgttgatttcacggtcgttccaactcctctcttcctctcctttagaggcggcattgttttcggcggcattagggttaggattagaggagaagaaacgattctgagagaaaagagagagaattagggttcgtgttgttgagaatttgagtgaaagggagaggagttgtttgtgttcacagagaatcgagagagagagagagagcggtttctctcggaactcgtttctttgagtgaggaaaaaacgaaaaaattgtaagtgttgagtctgaattttttttttttttggttttcaaattaaagtgagaggatatcttggtaaaatccttcatttatgtatttaaattaaatcacaaataggttctgttttttgtgggaagatatgagattttctcaagcaaaaagggagttatgagatgat

SEQ ID NO: 37440 - DNA, 561 bp, Arabidopsis thaliana columbia
agaaagagaaagtgctattaaatcacacttttatagtatatgtataaatacgataaaagtcgaaagcaatagttgtacttgtacatattagaatacgagattgtaagagttaatcatttatagacgataactaattggtataggcgtatagttattgaatttctaaatatgtgattcccggctttaacttttaagaacgttacttgaatattggtttggaattttgttgtgatttttgatgaacttgtaaaacgtaaaagaagaaaacgatattgaaacaaatcgtcttaatgttagggttttctattattaagtttatgaatgagttatttgaccaaaaaaaaagtgtatgaatgataaatacaacttgaaggcattgtatttactaggttgcttatatatatatgtcccaaatatccaataggacacatgaattttttttttaatggtaaattctatgttcactcgaataggggttttcagtggcatacctgaagcatatttttaccccaatatatatatggtaaaagatcatataattgggggaggggtattttggaa

SEQ ID NO: 37441 - DNA, 260 bp, Arabidopsis thaliana columbia
tcagaagcattgagaaatttggctgtcgtttcttcgttgacatacgcacacggtgcccgttttccagctaattaatgttgctttcaccgactaactattttgtcatctaccaaagttatcgaaggatgagaaaggctttttgtacttaacaaaacctgaaaacgacgtcgctctcgaccacataggtggaagcaatcacgtgcgatcacgccaccagtcgtacacgaaagcacttctctccacgtggatcagagcgatgg

SEQ ID NO: 37442 - DNA, 512 bp, Arabidopsis thaliana columbia
cagatgctctcttcatgtttgagaacgacactgataaggcattggcacatttgctccatggttcttcctaaatttggctttcaactctttatcctatagtttattcaagtgaacatcaagtttgataacataaagattggtaaagtatagattattgggttttacttgctgtaaatgaatgattattttttttggagtttaacgtttgtcggtaagaatatctattcccacatccaaatcctagacttcgtataatgcaatgccaataaaatggcaagtttagaatacatagatgaaatggtgtaattagctttcttcagacaaatgtcatttgttcttctttctctataagcaccaaagagccaagagcctcacactttggattcgtctttggttctactacactcctgcgcatatggcttctgaaacgtatggaagtaaattagatatatatctgattccattttatttacattgaaaactaatgacttaaatttaagtacataagcaag

SEQ ID NO: 37443 - DNA, 381 bp, Arabidopsis thaliana columbia
ggaatggaggctaaagagatagcgtgtaagcataaatataaaaatgactacatgaagcaatggcttgaacataaaaactcaagccctgaatgcagatatctgcatcctacaggaagtgatgatgagcccaagactgatgcagaaacatcgagaaacgatgataacaatgacgatatcagtaatgcttctaaggctcgtaatggatcatcaccagactcaagtacgaacaattcatcggtaatctatactaaggctcactatctgaagcaggtttgcttgaacagaggagcactgatgggatcgtttgaaatccgtctttagtgtttcatgttgtctggtttgcgcctcgtttctctgatttggtggtagatgtattccttg

SEQ ID NO: 37444 - DNA, 355 bp, Arabidopsis thaliana columbia
cgccagtgtgctctaaagtgaacattgacaccaagtgataattaaatttgaaacaaaaaaattataaagaaaattgattagataacaacatggtaacaacaccttattgatttgttgaagctaaactttatttagtacaatatcaagattacaacacaaggtcgctaatgatgaccagtaacttcatatctaccaagaaacaaaggaactaagacatactccagtaacgatccacacagcatttactgtacttgtcttgagtgctaaacgtttcctcgttttgtttttttacgttggtatttgctttctcagagccgcagtgacagcttctgtgtagcttcacggtaatcataaa

SEQ ID NO: 37445 - DNA, 600 bp, Arabidopsis thaliana columbia
tttttaacaggtaaagtagttctaatccattttgagtacttgtatttgttttttttagattggggcataacaggacaagttgatctaatccaatgagaaattgtatttttgaatttaagttgttaataaatgtatgatctataactagttgccatgtttttgtaaaatatttcagttcttattgtaaaactagttgctatgttttttgtaaaatatttcagttcttataattagttattgctaattttatatcctgattgtatcgcaatcctctgcaataccgtttgcttatccataaagccatatccatatggagatgttttttaaacaggtaaagtagttctaatccattttgagtacgtgtagttgtttttttttagattgggtcataataggacaagttgatctaatacaatgagaaattttatttttgaatttaagttgttaataaatgtatgatctataactagtttccatgtttttataaaatatttcatttcttattgtaagacatcccataaaagttttccgtttctgtaacctagttcttgatgtccaaatataagtatatatgtttatttattgtgtaaaatagctata

SEQ ID NO: 37446 - DNA, 625 bp, Arabidopsis thaliana columbia
cctcgttggagggcaaattcggccattttgggcctaatggctaaaacgtggttgacccagcccactttgtctatttgtgaaagaaaaagtcacaagggtgttataacgtgaaattttcttaaaaaagaatgcaggttaaagctattgttggatatcgcttcctactaagttcactagaagctccatgcatgctttatctaaatgcttatgatcaatgtttttttagtgtagttgtgtttaatagttttaatatttctatcgtttactatgttctagttacattgagagcctgtgattatggtcacgtcacttcttttattttttggctatccggctaagcatatcaatatatgtttattttgcttattatgtaactaagtcttatagaagccataagtattgacattgtgacaaggtcaatcattcaatgattttgatttatttgtaagaaacttgcagaaacaacttatttaaatctctggatcacaaagactctttcacggtttcgcctctgatcttcattgtttcttctcgatgtggcctctctcggtgttgtaagataactttcaccatcatctagatcttgtaatttgtttcgtgaccctatagcgcgaattaaaatcga

SEQ ID NO: 37447 - DNA, 405 bp, Arabidopsis thaliana columbia
ttaagtctatcttatgttacttggtgattgctactgctcatgtaataatcattaccagctttgtcttgaatttggatggatatatccacaagttgtccaagcaatagttaagtctagatggtaggctcttttgccagctgctggcatctgtagaactttgcaagttgcagcaatctctccacaaatcgttcaagcactacttcagtagatggagttctcaataattagagttactttaaccacaagatataacacaataacgactctatttaggaaaaattcggcaattgtcaagactcaacagtctctatctgtgaaagtgacgccgtcatacgttggctccactatcgcatcactgcgtatgcaatgacgaacgtgaacaaaccttgaaccaacttttgattg

SEQ ID NO: 37448 - DNA, 837 bp, Arabidopsis thaliana columbia
aacaacagaaacaactcgaatttgctatcaaagactaccttcactaacgattatgccacattgagaacaatagtcaccactggacaaaaatcagcattcaaatccaaatcactaggatgtacttcaaatcaagaccaataatcatcaaaatcccaactaaattgttaagaaaatgcaaaattacgctaacaacaagacggattaaaactctcgtaatcggagatacaacatttcgctcagcgagtctagcaaaaagctaaagagagaagaagcgcaagttcaaaccaaaaaagaggaagcagaaatgtacaggggaaagggggaaaaacgcgaaacctcttgtgctcaaaggcgacgagaggattagaaggcttagaagcagcagcagcagcagcggcggcggcggcaacgctcctcattcgttagcgtgaaaaagagatctaaccggtgaagagttggtgagaggacgaagaagaagatccaaatctctacgctagttcatcattacccgaatgaagttgaagcaggaggaggaagttgcagtagagagagagaggaagtggagaaatcacatggaaagggcgagattgtcgaccaaggtttattacatgtgtgactctctctctctctctctctctctctctctctctctattttgactgcgtttcgattccttgacactgagtccaaaaggtctctttcatctttctctcatttttgtatatcttttttactcctatctttttaactacttactgattttgtatgtaaatgtgaatttcacagttgtcttccaatattttgctatgtcaattttatcttcagataatttgattg

SEQ ID NO: 37449 - DNA, 480 bp, Arabidopsis thaliana columbia
tagtaacggtcgccagtgtgctctaaagccaaagctggggtgcgttcgcaaaagaactggagattgcagagaagaggaggcaagcggctgagaagaagagggagctgcgagacttagagccaaggatagagaggcgatggctcgagcaaagcgaccggatcagaatgggaagagaaggttggggagggagagtaaggtgttgcttagccgaatccaaaggatggtgggggagaccgcatgaaaacagacagtctgaagcaaaaagagatcgagcttgcaagcatgatacccgctgtataatggttattatttcttcttacgtttatgtatatttgcatagcatggtgcttccaatttagctcaaagaatagacgatactaaattaccgatggtcttttagagtagtaagattgtgtatactatggccatctatctacaatggagaacgattgctcgaagattgcgggagtcaatatcaag

SEQ ID NO: 37450 - DNA, 523 bp, Arabidopsis thaliana columbia
gttgaataattgtgcagattttgaatttgtggagagtcgtgatgggtttggctgtggcttggttcatactcgatatgggcgacaagatgaggatgagataagcttcgcttgtgtctttgtctgtccttgtaggatttttgttttaatatgttagttgattataggtgaggtatacaattctttgtcatgtattggattcacaaaaattaaaaaaattaatttattccttgactggaaaaatgtttaaacaatttgtttgttaaattgtgctaaaatattataaagaatctgtgagtaaatataattttattaggttttatgtttctgcaacccaagtttcaatgataaatagttaaaaactgaacgtatccatctaaatccacaattttcaaccaatttccatcaatatatatatatatatatatatatatctgtgtatactttttagctcacttatatatatagacattgcacgccaattttatgtgattatgctacgagtatatgtgagcttttatttaag

SEQ ID NO: 37451 - DNA, 779 bp, Arabidopsis thaliana columbia
tcgacttttaaattatagtttagaaatggttaagatttatttttagtaacttatttttggaaagttgttgtagtttatttgttgaataagttttgctgaatttggtggtttactttgatattgaaattaattgattgtggaaattattaaattatttatgagaatatttttcttttttttttgaaaacgggtcggattgtttcaattagtatatgtaaagggtttagaaatcttctctggaaatccaaagttgatgaatcttcatcctttaacaaatagagaatagagaagagaagaagagaaaagataaacaaacatagtaagatggacgacgacttgagagcttgattcgatgaggtagaattccaatggagctgagagtctcgactcaagaggagggcaagggaggcgcaggaggctgccaaatttcgtgggtctctttagggtttacctaaacttagtattttaggccttcattgggttaaagggtagaaagagggattgaagtccgcggcaagacgaggggaaggagtggttatgcgccctagtggtcggtggaaaactcgaggagacgcccaggttcaagtctccatggtcggcggttttagattgattatttccaagcggcgattctggaacatgtcttcactcttcgggccatcacttctaaacggcttgatggattgtttcaataagacttcgacgttaatcttgactcttctagctttccaatgacactgggataccttgatgccgtgatcggaaagactttggcttga

SEQ ID NO: 37452 - DNA, 521 bp, Arabidopsis thaliana columbia
tattcaaagctcgactaattcattatttatttattttatagtgtaatacctctctttttcttgtaatttataggtaatggaagtttgtactttcagtaacttttttttttttttttttttttttcataaatttccaataaaacgaaaaaaggtaactttcagtaactttctatataggatttatgatctacatgatttttttttatagaaagtgtgtaatatcgcacatatatagtccactaagacaaataattcgaagtttctttcttttatcatcatcagaaatgaaaatttgatacgtcgatgtcacacacaataatatggccatgtttacgagtttgattggtatttagaacatttcctggatattaaaaaaagttataggagaccgagatacgaaaaatctaaatatttatatatgtagaggtgtatgcatgcacataaagtcgtacaaagcaattactttagcaatatgatttatttatttttaaaaaaggaaaaagtaattatgttataattat

SEQ ID NO: 37453 - DNA, 541 bp, Arabidopsis thaliana columbia
cctacatatggtgaatttaatttgtcttcttcttttttttttttttttttttttttgttaaagatatggtgaattttgttagacgtaaatagatcgaaacttgtatcaaattctagtttttttaaaaaatatatataattatatatcatattttttcataactcataatttgtttactcatttcttataaattcggtcataaataaagttaatgtgtaataagactgatgtggaatttaaaagtttgacaaaatggcaaaaagagatattgcaacacttgaaaacttaagatgagattgatacataattcacattatatagtcgaaattgcaatggccactcttgaaaccaacggacaaggattcatctaaaagatcgaacgatcataaaccccttgatgattcgaaattacacaaacggaaattaaaaagacattaaaattcaaattcaaagtcgaataaaattacacaagagagaaaaagagagattaattcagtagtctgtggttgggagctgctcgtgtgtggtgttgatgaagaaa

SEQ ID NO: 37454 - DNA, 636 bp, Arabidopsis thaliana columbia
ttctggtttgtcaaattctatgtcttttcatgttcttctgagttttaatggttgatcttcaattacttggccacaatctctagagtttgagactcttgacttgtcttgcatatattcctctgtagattggttttatgtttggtttcaattccttgttgaactattctgatacggaagttttcctttctaaggtttggtgtttcctttttctgataaatagtgatgaagatcgattatgatgatcatgtaagaatataatctagctttggtgtttgtattggtttacctgagggaagaaaagtctttctctttgggactttaaactttgattacttaactccaacattatcatagttgggttctgtagttcatttcacttatagcagtaataactcattgattgatgcaatcaatcaatcctgtgatggaaatggaatcatggaaattgagggattcagggaggattgattgattagaatttcatatttatgagagaataagagaactgatgtgtgtttcttttcctacttcttaaagttgtgctcttcctatttctataagctcttgtggatacaacagttgattacagtcttatggttgtttagggtacacaagaatggaagaagagtatgagag

SEQ ID NO: 37455 - DNA, 531 bp, Arabidopsis thaliana columbia
tacaccattttctttctgacagagaaagaagagaaaaagatataaagtaaaatttgtatgattagcacaaagatcaacaacaagaagaagaggaaatacccaccacactccaacaccctaatcccatggataaaacattaaatgaacgagtaaaataattgcacaacaccttaaacagatctttgtctccagagtttcaacgtgcccaaaagaaaagcacacacaaaacaaaacccatcaagggaaaaatagctatggaaatgaaacttgtagctagggtttatcttcttttatttcatatattatctattttgctttctgatcacttcaaaagcctagggttattctatcaacaagctaccagtcatttttcagaaactggtcatatgaatcaaaaccctatggaaatatcgaggaaaggatattattaatgaaaaaccacggaaaagatcaaaagaaatcattcagaactaaccacaaaatagaaccactaaaagaccgaaccagagagggaatatttaagacatccag

SEQ ID NO: 37456 - DNA, 492 bp, Arabidopsis thaliana columbia
  unsure (1)..(492): unsure at all n locations
caccgccgccaccgcctcccccntatgcagtggaggagctccaccgccgccaccgcctccccctatgcatggaggagctccaccaccgccgccgcctccccctatgcatggaggagctccaccgccgccgccgcctccccctatgcatggaggagctccaccgccaccgccgccccctatgtttggaggagcccaaccgccgccgcctccccctatgcgtggaggagctccaccgccgccgcctcccccgatgcgtggaggagccccaccgccggcacctccccctatgcgtggaggagccccaccaccgccgcctcccccgatgcatggaggagctccaccgccgccgcctcccgtgatgcgtggaggagctccgcactacctccgcctcctggcggtagagggcctggtgcaccagcgcctccagcacctcctggtggccgtgctcctggttcaccccacctcctggaccaagaccttcgggtggtggac

SEQ ID NO: 37457 - DNA, 575 bp, Arabidopsis thaliana columbia
agaggatccccgaatgatatgttgaaggttgaagttcaactcgagggcatttcctcaaccaagtggtacctagttagatttctcaaactataggaacttgaagctccatgtttttcctttgttaccaaaccacctaataataataaagggtaatttgtgtttgcatttttttttacatatattttctttctctagcaatattaaattatcattcctcttctaacgaccatattaagttattaactcttgtctcttcaagcataatggttttcactcaaataaaataatgtatacaatcaatacatatacgtcaacagcaaatgagggtggacaagacactaaataacttattcttgattagaggcttttgatttgtaaccaacctaatggttgataatccgcaacatttttcgtagtgcagcaaaatgaaaagtaggttaaatatgggttaagcccaaaaaccattgtttctcttatttgttttgacatcttccggaccaaaatacccttcgtagagattgatttgagtgttctagagtgttgcaatacattcaatctcgatcttggcgtttaga

SEQ ID NO: 37458 - DNA, 440 bp, Arabidopsis thaliana columbia
caaattcgaatcgtttaggtctcgctttccttttcctcgaagaagtcgcagagccattaccctcttcaacccaagttatatcccccattacaacccaaaatttatatctcaaaacctaaggagaagaaaaaaactcacacctctagcttaagaaactataaaccctactactgcaatgaaaggcgaatacatttactgattcttgaaccaaacaaaaaaaagtcgtcgcgtggaagaaatttcccttaaaacctgttaatctgacgaaatgcacgaattgaaagaaaacagccaccgagctaatcgtcgaaattagtcgctctccgagaagaaattgacggaaagcacaaagaacccgacagtaaaaaaaacaacaccagaaagggatgggagagagaaaggggagagctctgattctcaggcggctttgagaggtggtg

SEQ ID NO: 37459 - DNA, 963 bp, Arabidopsis thaliana columbia
  unsure (1)..(963): unsure at all n locations
tgttgtgtgttttaatctagactcatagccagcaggacaataatagtctagattaagacatcttggtcgattccaaacctttgcgcaaaatgtcaaaacaaaacagcttctactggtatactttacacacctctacctacccttcctgagcgtgtctaaagctccctggctatatctaccctcatctccaaaagttcgcaaattctttcgcaaatgacattatgttgctccacgaacttgacctttctttcacctcaccagtttccgtctctttcacctcaccggctcctgtctctgaaatttgtctgtaaaaacaaaagatataagaattcaaactgaagtggtgccaatatgatcaacttgaatgactttttctattactcaaaaacaagagatccatcaatgaagtaaattatcctaatataaggatcggaccagtaaagaagagacctagttgtatgcatttgatacctggtctcagtaggcacaacatctgctgaaacatcagctccttcaagatggtctgcttttgactcttgattgcctaagtgcgtcaagttcctctcttcatcagtctccgagttttctattccctgagttgcctctgtttctcttttgtcatcttttgcagtaatgacaaggttgttgccctggaaattactttcatcatcagaattagagtgagaagtatctattatatccggcctctgctcacttcctatctcaatatccacactgccagcctgtgaaacagaaacaaggataactaagccaattgataactgaagcctaaggaaattaaactgatcacaccaaagcaagattttttctttacttgaaactcaggttcaacaaccactaggagagaagtgtgaggaagcatcatctggtacagagggagagacttctgagagnggtttagcttctacgattggcacaggtgctggagagaagtgtgaggaa

SEQ ID NO: 37460 - DNA, 586 bp, Arabidopsis thaliana columbia
ataaggtcgacggtagatttcaagagattgaccacgcgtcggtgtaacacttggtttctccactgattattcatgcgagttgaaaaaggaaaaaagtaaagaaaaaattaccaataacggcaaaattgaaaagggggaagaagagaagaatttagggattttggcggctttagggctctctctcagtctctctctactcccgtcgtccgcttctttttccatttccctctctgcgctctcgtctttgtcttcttcttcttctctatcccgattctacggtggcgctctgatccctaaatttctaggttttaccattttctgtttccaatttcaatcgcgatccgtgcttttttcgatggcgtcgattttgatgctgtgagaagagttacgccgtcgccgcctcttagtgttcttcggtgtgttaaaaaatgtcgcctcctctccgagaaaaaaccctagccgcgatctataatctgttgagttttcttttcctcttaatttcttcaaatcatttctagtttctaggtgatctcgagctcgattttgactctttttgtttttgttgtcgcgtgaattttttttacag

SEQ ID NO: 37461 - DNA, 133 bp, Arabidopsis thaliana columbia
  unsure (1)..(133): unsure at all n locations
nnnnnnnnnnnnnnnnnnnnnnctaaaggatgatcaggctaagtttggtagacagttagcggactcgtggtgcgtgaagtagcaagcactattgagtcaggcgagaacgccgaaattgtaagttgtcctatct

SEQ ID NO: 37462 - DNA, 437 bp, Arabidopsis thaliana columbia
gggtttcggtggaaattggaatggacacgttttttcttatatacgtatcacgttttggttttgactccaatcaatggtttaaatcaaaacatttcggattggctattttgacagcgcaaaaaagaaacaaccaaaagtccgattgggctaaaccggagatacccaattttggtcacatactaaaaactgcccctcataagtgtgcaacattggttgcattacagaattgacattacagtattggcttagagctctaccgtacatgaggaaaaccaagagcggttcgaagtcgtggatgttcaaacaaaagagcggttagtacaagagagcaaaatgagatttacacattcgtactatataatataatacaaatatatatacatgaataaatgataaaatattttttacagcaaactttgttatatatatatatatat

SEQ ID NO: 37463 - DNA, 522 bp, Arabidopsis thaliana columbia
ttaaaaactttcaaaattttataatatttaacctttattaaagtgaatattataattgtttcaaaaattaaattttttatgaagttttaaatattataaatattttaaattttataatacggcgaaatctagagtcgactagtttaggttgataataatacggaatggtatacaacgggtaaaatcctagaattaacaatcaaaatataattatacaatctttaaaaataaaataaaaattaacagaacaaatacaatttcaatttaaaaatttcgaccacattataaatatataaactctatactaccgttgataacaacatatacttatagatcatcttaaaaacaaaaattcaatttttgtttaaagagaaataaaggcttgtggtgtacggcagattaatatctagtaggattgaaaaaaaatcattttgaactatgttgagaggaacagggctgatttatgtaatgagttggagaagctatgaattagttttttattctcagaataataggatgtgc

SEQ ID NO: 37464 - DNA, 225 bp, Arabidopsis thaliana columbia
cccttgcactacaatggtgaaaattgttcttcctttttcagttgaaaaaattattgatggttctttagttttgtattcaaaagttactagggaaagaaatggctatatatggagtacagagaatcgaaatgtgagtacgtcaatccgaggttaaatcactgcacgagagactagacccactgtcgatagtgaccaagtagtataggaatcaatagaggaaggagg

SEQ ID NO: 37465 - DNA, 546 bp, Arabidopsis thaliana columbia
ctctagtaaagtgcgccagtgtgctctaaaggctgatcaagcaaggtttggtgacagtgtaacggacaagcggtgcgaggcctggcatctcgatttgtagtccaaattgacttgatgttttgtttatcattctctacgacgaagtagagactgcatgaagaacccggaagttcaagcaggattcagggtttaaggtttaaggttaaggttttgcgttgagggtttaggttttaaggtttagggtgtacagtttagggtttagagttagggtttagagtttaaggtttagcgttagggtttagggtttagggtttagggattagattttagggttttggatttagggtgtagggtttatgtttagtgtttaggagcaaatatatttaatactttaagaagcaaaaagaatctaggttagcgtttcagagttaaatatgactagatgttatgtgtataattgaatataaacctagaacctcaaccagatcctgaaaagtaaagtagtgcttccttgttaaactgttcaaaaccacaaactcataagaa

SEQ ID NO: 37466 - DNA, 616 bp, Arabidopsis thaliana columbia
tcctcttcttcttcttcttcttcttcttcttcttcttctttgtttgctgccctgtctctctgtgtaatctcaagattctgattagggaaagactttaaaacggtgcgtatacggttagttagggagcggtaaattggtcagaccggaccattggttattagattgatttggtttaatgctactctaattcttaggttctttctaaacgcatcgttttgatatcacccttttctctctgaggccgtacgtggaagtttcaaactctcaccatctcctctctctctctcggtctgcagaagaaaaaaagctcggcaattttatattttcccatcgaagagattcccaattcttgagctttctcaatcaggctggcgtaataaacggtactccaatgtcttctttctgaccctagatttaacctggttcagttcgatagtagggtttgttcccccttccgatcctcatttctgatgtcagaattgtgatctagtattcaatttcagattcttttttggaaatctagggttcataacttaatagaagtttttaaatttcgtacagtggccatggcgttgcgtgattttgataagattgtgtacattgaggtgtgatatag

SEQ ID NO: 37467 - DNA, 655 bp, Arabidopsis thaliana columbia
tgcttgtaagtagtagttttcccttttctgataaatcctataaacagcaacaacttaacaggaaaagaataatgacttttcacaaattgttgcatctattgcagtgatggcaaacatgatacaaagtactagcgtcctgatttaatgtaaaatcctttttttcagcaagaattcctgttcggttgtatgttcgaagtctaaataaagatttcgagaatcttgaagatgtaccggagatcgatacctgggatgacatctcgtaccttaatcgccctgttgagttcctcaaagaagaaggtaagaatttcatcttaatgatccacattgttgttattaccttgttcattgaaaagaacccaaaggtgttatgtagagtgaatccaactgttgttgagtctctctttgtgtgagataactgatttcttccatcatctaacagggaaatgctttacgttacgtgacgccattaaaagtctcctccctgagtttatgggagacagagcgcaaacgagtggtgaagaaagaagcatagatgatacagaagaagcagatgggtcgagggagatgggtgaaatcaaattggtaaggatacaagggatagagatgaagctagagatcctgttttcgtgggtggtaaataacttgatgaacccag

SEQ ID NO: 37468 - DNA, 519 bp, Arabidopsis thaliana columbia
agtgtgctctaaagcatggttgctggagctgaggaagaaaaacaagaactagttgaacgtgtagattcgggtttggtcttgtcaaccatattaaccgagttatttctttggcaaatgagtcaacatgactaagtcaaacatgggagaccggctacatgactacgtcataaacgaaatccgttgcccgaagacctggacaagtaccaagaccccgacgatttagagggtgcacacgaagacatatgataagcgcctgtcattacatcgatctgtgtaggattacaattttccttgaattagttttatttaatcaaaaaatgtatgtatttccaaatagttgttttcgatttttaaccacatgttatatataagcacacatataaacaatattttgctcttgtgctttgtttgtcttgttattgtttctatcatatacaaatgtgctatgtacgcatattatatacactacttgaaaattgttctctaataatatagtttccaagattggaaacagaagac

SEQ ID NO: 37469 - DNA, 569 bp, Arabidopsis thaliana columbia
taatattcatcagaagaagaaaaaagaaagaaatttaatcatgttgagttgtggtataaccttatcgttttccttttgacgtcgtctataaatttttatctactatggtaagctaaaatataatatgccatcaaacccatcaatctttttgcttactttatacattcatgtatcacctaaaactaaaattagaggaaaatttgttcatctaatacatctaaattactcaaaattttatgagacaaatcatttaagtattactatataaaaccaagtacatgaatgtatcgtagattcagaccattcatcacgacccatatccctatgctcaccagcagctgtctttcttcctgaaaacgtccaagccctaacttttttccattttccttccaatctcaattcactttctcttttccaaattaaatttttcttgtttcttcttagtagtcttttttatgttataccctgaaactttaaatacatgaattatcgaatgatatatcgtctaagaccaagttccgatcccgaacgacgcgtggattgctatttccatgcacgaaggctactct

SEQ ID NO: 37470 - DNA, 532 bp, Arabidopsis thaliana columbia
ttatgaagcgattggtgaatatttatttttttgctcaatttcgtttgcgttttttgatgaaaactgcacgtgctaagcgtgtgaagagtgaatcggtagggactcacggcccggctcattatgtaccaacttgtgtgagtcaacaagaacccacccatatggttccaccacaacccatttttgcggaattctatggggaacaaacaaaaatcagataaattccgtgaatatcctaatccataatataataattaagatttttcatatggttaaaatatgttttgaattttttgttatatttgcaatatgttactttgtagagttttcttatgtagacctttaaatttatgaaagtagttttttatttttatgatttattatttgattttagcatggtaaatattgttgatacattctaaaataccaaatactaaatttataagaacatatacactatagctcgaaacccaatattttctttcttccaattataatccggcataaactataaggtggtgttatcaatcatgga

SEQ ID NO: 37471 - DNA, 914 bp, Arabidopsis thaliana columbia
tgcactataaaacgaaacagagctcttaagaatggggtaattggtcttagtggactcctcaatccattagctaagtaacaaactcaatcaagctatccctagacaatagattcaaaaacaaatcaatccactttcgtgacaatgactctcataactttatcacttcctaatctcaattttcattgatgaaacttaacaaagcaggctttaaaccccaatctattaaagtcaataagcagtctaaacatccaaggtcttgggctagaatctacaaatctctgaaattagttggttcagacattttatcaagcacttgttaggtggagaaagtctgaaatcaattttcaattgatcagaaagaaaatagcattaagaactcctaaaatataagggaattatgcatttataaacttagctagctaaagaacagaggaatccacctaaacctaacccatcctcaagaactttgaagaagactactcaagaacaatgaagaacatcatagaacaaaactcagaaaaatcataaaacccagaaatcattataaacttagcaaatgatagatcttaataagataaacaagtttgcagaagaaatcaaattcaaattctcaacacaacaaccagaaaatgcaatagaaatctaagaaccctaatatccagtagacaaagcaaagatattttgggcaaaaaacataagaggtctatttatatgcaatactaggataccctaattgggaaaaagataaaataagaaagtcggcgcaacaccactcgggtctaggccgagtagaaaagtcgagcagctcctctttgtcacatcactcgacttcaggcctagcagcttggtcgagtagcttctcttctcctttattccctcactcgacttctagccgagtgctatggtcgagtata

SEQ ID NO: 37472 - DNA, 540 bp, Arabidopsis thaliana columbia
tttgattaaatttttgaattacaagatttgcgagatttgcagcaccgaagctgcaaacattcacgatttcgtcacattgcgatttcggcttcctcgagagttattattttttaatttttatatttttgtaatttttatctttttctgtttatttttttttgtgttgtttcattttcgtattataactattcagatgtgattgtaaacttattttcttaaacgtgaaaattggatttatacataatgtgactgaaaaaaggttgaaaacatcatttcttaaattgcgtaaaatttatatttttaaaatttttaaaactataattagttaataataattcgatccgtagacggtttgtccgctccgaccaccgtaacaattcaaaaccgaagaaaattgtttatacgaatctattccgtaatatatatatatatatatatatatctatatatactcagagatatatatttatgcacctaatcgatttcatctatagtacagtcactacgcattcgacaatatatatatatatatattcttct

SEQ ID NO: 37473 - DNA, 782 bp, Arabidopsis thaliana columbia
caacgatcgatattttatcaaacgatgctactgtataagtttctcatcatatgtcctaattcctccttattatctacaccagttagacctgtcctccaattttacgctttgtacatacagcattcggcgaaacacatgaaccgaccatttacacatcctgagacagtgtcggtcaaaataaagtaaagaactcagcacaatacacccactaccacttcctcctcctcaaacattaacacaccattattttatgttttctttattacagacgtcgtcaaaccgccgtaataactttttaataaaataaaaatccactcgcatttttattttcaacattgtgcgtacggtgcaattcaatgaacagtgtttactttcagtgtgtacacttctgcggactattacaaagtgcacgtcttatcctacgtgttataatctcatatgttactgtctgaaatggacccactacgtaaaaataaaattaagaatcaaccactcttcttccatcacctcttttggctttctctctactctctctactactctctcaccatcactgagttaagagaactaaccaagaacaaaattatctctctaacaccagcagaatcttagctggattcatcacgctagcccagaaagtttcgcacttctcttttctcagatcttgaactcttgtagacgacagaagaagatagcacgatggtcatcctcctattcatcgtctacgtcctcttatcttcatcctccggtctagtctacgccgaccgtcgtgtacgccacga

SEQ ID NO: 37474 - DNA, 608 bp, Arabidopsis thaliana columbia
cgacatatctcctctcttcactctctgtctcttctcatctcaggtaattccaattttagttttttttgaaggttacttactcgtcacattgtttgaaaaagattgaatttttatctgtggcttagtcaaatcatggttcgtttcaccaagttgtggttctgggttttcgtgatttttcttttgggtttttctgtttgaatttggaaaaataaaggaacgttttttttttcggggggagttttttttttaaagataatttttggagagtttttgataattctgaggaagccaaaagaaaagaagaaaacctaatttgtgttggtggggtttgataggaaataatggagagtgttgaattgacgttgaagaacagtaacatgaaagacaaaaccctaaccggcggcgctcaaaatggcgatgatttctccgtcgacgacttgcttgacttctcaaaagaagaagaagacgacgacgttttggttgaggatgaggctgaattgaaagtacaacgaaaaagaggagtctctgacgaaaatcccttcacaggagcaacgatttctccacgctgatgtccaactagcgggctttccgtccggtatgaatttgtg

SEQ ID NO: 37475 - DNA, 579 bp, Arabidopsis thaliana columbia
tttttttgaaatcaactagaagattcgttgacaccaagatatcgtagatcacccaattcgatatgcttataagattatatgaattttgaatacgataatttttttttatttttttataattaagaacttgcacgctaagatgatcgagatttgccaactacgacgacaaaataaaagaataatttactgttcaataatttctctctcgcagaaaaggtctataaaatagcagtctcactctcttgagttatatacatctcggtctcattcacgtgtttattctccctatttttcaccatatatatatacatgacgtcatccatgtttcgatctccttgcaagattccgtcggtgaaaggttttgagcaaaagagctacgtaggccttaaagcagcttcgtataacgtcagagtcaactcttttaaaagcagtgaagttgctagtcaactccaaaagatcgactcgaccttgatatggccggtaaatgctctcgaggcgcctccagtcccgagtaaaccagccacacctctgattgatcagcctcttgtaagtaacacttattttagaccgaaatgttta

SEQ ID NO: 37476 - DNA, 535 bp, Arabidopsis thaliana columbia
caaaacagtaccttcatcgacaaaaatccgtggtacatcgtgtacatataaagttggcgacatgatttttttttcgaccatttgagattgggatagagtaagctctactgcacatcatctgcatttacaccttcaaggctgcgacatcgcacattaaccgcgttagttttcaattttccacagcccccttccaaaagtctatcggagacaatggaattttgtgttgtgtagtcatttgtatcttactgcattgacagttataagctaacacgaagttcttctttaagttcttatcagaaagtcctccaataagtgttagatagctcaaagccatgtcgagttatagagaagacttaaaaacgaaaggctcaagtatcatgacaaagattaattaagactgttgtttgcacaatcaactctttctacgtttcctaaatcactgaatcaaccaaccaagaaaccataacatagataaacaacgtcatatcaacaaagtgagaacacacaaattacaaaacatcagtaatatagatag

SEQ ID NO: 37477 - DNA, 549 bp, Arabidopsis thaliana columbia
tcaaatttgtattaaccgatcaaattcatcgtcaatcgacactaaaaagtatcaaatcaaaccgacttattaattgcaaccgattacatctctcaatcgaatccaaaccagcataaataaattctaattagaaacattctttccgaaccaagcagaccggattatttcaaatttttatcagtaataacatcctactcaaaccgaacaaaccgagtataacaagaattcttggaattccttaagagatcatatgcaaaatgaaacaagtttgatctaaagacactctaaagaaacgttcctataagcaagttcgatctcttcttcagtcatctcaacggtcatatcactgtcatagccacaagcaacccgagaggtcgattcatcttcgcccggttttgctagctcagcttcgtagatctttttccacgactttgcttgtttgcaaacttcttcctttgatgctgttgaattttcctttttagaagacgattccatctttccaagctccttcactacacgagggacaaagctccatagctctgtaactga

SEQ ID NO: 37478 - DNA, 584 bp, Arabidopsis thaliana columbia
ggccactgatgcttacggatttgcagaagtttctggagaagaaagacgtgtgcactatcctccacgtctgtccaggtccagccacccaccgtgactacgttcctgcggtggagtcattggcagattcgtaaattcggccaccattggttttgtcgtcattcacactaataccatgccatgatcgtgatgctaatttaatttggtaacccggtggtcatgtaaatactgattgatatattaaaaacataactacacgattgatgattcttgtgtgatttgaaaagaacgctgtctaaaggcccattgtccatcgatgggcctttttgctaatttctacattgcccatgttgtgtagtctgattttcgctaaaacgttacgttgatgcgtgtactcaatcactcgcccaccattttcttctgtgaaacagttggcaaaagttaggggccgccaagctggtttaaactgacccacaagcgaataaatgtcagacacgtgtaaaggacaaagagagcaagtgtcacgtatctataaaagctaacattagaggatatttttgcatacgtgtgacatcgtcactggtaca

SEQ ID NO: 37479 - DNA, 531 bp, Arabidopsis thaliana columbia
atacataatgcatgtaaaattagagagagagaaaaatatagatttttatggatctgaaattttaagaaaacaaatttttaataatgggtattttaatttgaagattatggagatataataaaaataaataaaagaataagctagaggtgtgttaaaaaataagggttattgtcaataatattcagtttctgctttggaaactatgtttcatataaagtcttccaatacactatacacggatacacccacctcaaatagtcgaaagcctttttaagtaatttcacaattccactacaaaacctatctcacacaaagtgtattacacaatcagtcaaaagtccctattttgctaattataaatagtacactaactacttttataactatgtttcaaaaagttaatatttttcatctcacttagtttttaaccattattacgtgaaggatccttaatccacataagatggttggtgtatgatatatcctatcttcactgattttatctatgttttaggtataggattttgagtt

SEQ ID NO: 37480 - DNA, 562 bp, Arabidopsis thaliana columbia
aaagcttgtctccgctttactatctcctcgtcttttgttccccgcaaagaaaaagaaaacaaagacaaaacacataaatcttatgactgaaaccaaataaaaaaaaagaaacaaaattgagacttacaagagagattggttccattgatcaacaggtgattgtgaagaaagtcctaaaccaatcatctgaagatggtgatcagtagctaaagaatgatgatgaagcttatcatggaaaacagcagaaccaccagattcaatagagcttgctctcatggaagaagaagaagatggtgaagaagaagaagatactttccaccagcttcctgagttgatgaaatcatgatgatctcccatagcttctttttttctcactatatatatatatatatatatatgtgtgtgtgtattgatgttggatcttaatttgttgtgtcttctcagattgtggttacatgaaatgatgaggatcacacgagagagatacttatagttataaatatttatcaatttagattggatatttttcctggtagggttttcgtgactatttatgaagagt

SEQ ID NO: 37481 - DNA, 851 bp, Arabidopsis thaliana columbia
ctgaatcattgtctaaatattttgtaattttgtagtatttatatgctataaaatatctctacggtttgttgattataatcaaattattataatcatgcagaaaagcaatatcaaaaataataatttgtaacattattccaacaaagaagccattgaaaatgtaatcgaatcaagttatagtattttaaaatggtgctttttctattatcgtgtagttaatgcaatatccaagtaggaagtttttcctagcaagtataaatctttagaacaaagcacaatcgttgcatcgatttccgtgaaactctctcttttgcggaagagtttcgtttcttagatctagtccgctgttttttctttgttcttcaatcgttggtcaaatctactcaatgaaagtccaggagtgggctgaatctattctctgtcaacggtggtgtggtgttttcccctcgatgtggatgtggctcgggtctgttggaagggagttctacagcgtttgtcacacggttattgacgttgtgggttgcttcagttgctccggctcatcccttagtcttgagctccgcccacgggaatgattggggggataaaggagggttcgttgttcgcacggtggttagctgcagatgctttggatcttagagggctgttgtggatttcgcgtttagaggttttggatttgagtcaccagcttctagatccactacaattttgcatccatcgagtcagattgaatcgtgatagcttaagaattttttggctgttctcggttgggagagaggggttactgccagtgggttgggttagtttttcaggatccgattacgtcgatgtgcctaatttgagcgactaac

SEQ ID NO: 37482 - DNA, 520 bp, Arabidopsis thaliana columbia
caaagtaagttcaatgaaaacaacgaaaatttgtcaccaaagttaagtaggagtgagaaaaatggtttcctcgttcatttgattacaaagataaccatagaaacttaccatactcgtaacaaaaccaactataccaaaactaaccaaacccctaaaccgcttcttcttcatcttcacggttcttctcatcgccaacttctcttctaatgaattcgcatcttgatattctgcatgtaacgattcaaccaacgagcgaaccatagtggtctcatctacaccaccaccactttccaaactctgcaagtccagttggttgattggaccggtcttttccttgaaagcctcttcaagttcggttaacctcatagccatgaaacgaagtttcaacatctcttcttcgtcttcatcgtccttaaccgacgatatctccgcacataaaagggtttgcgtgacaacaaccgggttccgaattctcggtatgcgttaagatcaccattgccagaacagaattcttgtaggt

SEQ ID NO: 37483 - DNA, 561 bp, Arabidopsis thaliana columbia
ggtaaataacaaatatggttagtttagagatattatatatattaaatttggtaattaaattaatttcgtttttagttatttgtttttgtagaaaatggtaataaaaccaattatggaagatctaattgaagatttgcgggtcaaaatcaaataaaaaatccgacccaattggattccttaaaatgtacttcaaaaatgttaagtagatatcaacatattttcaacgcttaatttatgataaaattctaacaactaaatcatcagaaatttttcacaaatttacaagaaaaaatatcaataaattttcaacaattaaattatcatgaaatttctatgaagttccaacaaataaggcgtcggtaatttctcacacgtttccaaaaatattttttaacaaagttgcaacaaatatgttattagtagttcccataaacaaaccttcagaattgttgaatatttgtggcaaattatcaatgacattccaacaaaatataggttggaacaattcgttagaaacttcacggtaaattccacaaatgtcaacaaaaaaatatcagaact

SEQ ID NO: 37484 - DNA, 960 bp, Arabidopsis thaliana columbia
gtcaaacaaatctataagtcagtcgcaacatgaatactattacaataattgaaaaacgaaaaaaacgccaagttaattaatacagccgtatagaatcgtaactcaaccgacaatcaataactcagccatatcgtttattaactcggtcgtaactgtatgctattttagtaattaatcttttccaactaagtcagccgtaacaagcgtgagttattggttaatccagccgtaacgacatcccataactaagccgtctttgataacccagccagccggaaaaagataactcagtcgtgtcgaggaaataacttagcctaacgttgtcagggttatgctcgaaattctcataaattagagaaatttcattaacttagtcgtaatgtaggctaggttatttcataactcaaacaaattttataaatcagatcccttatataaatcagtcataacgtaggctgagttatactcataattctaccgttttctcataagtcataactcatatatttttgtcgtaagtcagccgcaacataccgtaactcagccgtatctgccaatgtatcgccttatggatgagttcattaatccacatcagctatttctgacgtggcagtggcattccttgtatttacattttttcctgtaacgtttagtaggggcacaatggatatacaaaaaaggccgaaatatgacagtaataaaaaaaagttccttatggttctggtgaatacacctaatttcttttctatttgagtaaagttcccttatattaatccatattatactattactattttaatttaatgaaaataaatcggattaacatgttttcacataaacaaccccttctactataagaaatcgatagtatgagatgagccaatataaagaataataagtgaaaacaatattttaacgaataatattctatgaaaaccttgaaaatataaaacaatgaag

SEQ ID NO: 37485 - DNA, 469 bp, Arabidopsis thaliana columbia
tgtcaaaggatcatgtaacttccttcttagaccaattcaaagtcaatttaatagtgactgttttttttatttgtgaacacaatttagtagtgacttaattcattcttcttcggcacatcctctccgctagggttttcaatttgtctctttatttcttttatctcgtcttcagacatgaatatgactacttgtgttactagaagaacccagtagaagattgaatcgtacttgaatttgattcttaatgtaacatcgaagtttcatgaaatatggtggtgcatgtagaatgatttgaaagaactgatttgagtacttatatcactaaaatgcaattattttttcagtcaaacaatcagagagaatttcacaattaagcatgcttaaactagaaaaatttcaagataagtgaccttttgcgatgtgattgtggagactatgtgagtgaagacaaaacacgtgaaaatataat

SEQ ID NO: 37486 - DNA, 561 bp, Arabidopsis thaliana columbia
atatattcttttgaattagatgatgtttgcacaactatggacaactaattagttttccaattgattttgacgattgatattatgcatagtattttattatggaccgaatcatgtttaaatagataatatatgatattttagtttagaaataaacaaaaattgaatgattttcacaaatcgaggtgcaaaaatcttaaacatcaaataaaaaacaatagaattaaatgatttcataacacataattttgtttatgttttccaaaatcaaaaatccactaacaaataactcacactttgtctttcaccaagaagcgtttcacaaccttgatgctttcatccaaaacagtattgtcccaaatctctcttgacgatcttccaaatgacggcgtacgtccaacctctgaatgtcccatccgctgcttttcagcttcatgatcctctcaatctgctgtcttcgcaagcctccatgtgttctctttgatctcttggacagcttcgtcatacgccccctttcttgcttggtcccattcggacatcttctgctttctctcaggcgggtat

SEQ ID NO: 37487 - DNA, 513 bp, Arabidopsis thaliana columbia
tacagtatatatgttttaggtttatgataatctcttttctataattttggttgactagcgtgctataagtttagttaattatggtaatgtagtatacaaagttttgatatatatcacacacaacataagagtaaagaatcgtgaatcctccagagatgaggggagtgagatgcgagagagagagagagagacgtttctatagttgggccctaagtttgtttttccaatctttaatgtgtggggatactagtttttactaggtgccaagcaaagcagaacaaaattgaacaaaagggatagattagagggaaagtaagtagggggttggaaaaaggataagtaagaaaacaaagggaccagaatagtaaaacatagaggtggaactgatccggataagtgagtggggtctttatgaaagggggccacttgtaagaaaacgttttaattttgatcgaaaagggcgtatctgttggagggcaaatggagaatgtgttggattttcttggggatttg

SEQ ID NO: 37488 - DNA, 592 bp, Arabidopsis thaliana columbia
cggacttcttgggccctatcttccggtccacttgactctccaatccgggcagctttgacctcgatgtcacattcacctcgcggatcaatcactccgcttgtattcttgctcaagaaaggcccgtggctttcctctttacgtggcaatctttgacaggtcccgagcccgtggtgcgggatccgacaccaacatatatgaattaagtttcttaagttatttggaaatattagtttgaactcttcaacggttgatttttatttgggaattgttctttcgttttctttatcttggctatccgaagggttaccgacacatactgattctttcaagcatttgcatttgctattacatgagacaagatgtatcatgattttaaattagaaactattttttcagttttcataaaaaaaaatttgtaaattaaaagagttaatgtcaaatgataatgaaaaagaaaaatttgcataaattgtaaaattgttaacacaaaagaaaacaaataagatgagatacgctttgaatggaggttcggagaaagcggagtaaatgttagccatctaattagttctggagtggccaagacaataatttg

SEQ ID NO: 37489 - DNA, 356 bp, Arabidopsis thaliana columbia
gtcaacgacaattctaatcaatttaaaggtcgtcaaatcattatcacgtgataggagatgatgagaacatcgtcaacaacatggttaatcataatgatcattacatgagttgacatagaaactgtgctataaagcttaaggatgcattaacatgttaactcaagagattatggattccattcaggatgtgatgtctgattgtctatcatgtatgaccacattttcgctagtcaagaaactccaaaagaagggactatttatttgtggtcaagtcaagaatcattttatcagtcattatccatggagagtgacctagcaacttcctatagtcatgcactatcttaactttatttatg

SEQ ID NO: 37490 - DNA, 575 bp, Arabidopsis thaliana columbia
tcgagtaatggagtggtaacttcattgaactttgatgcgatcgataatgaagttaccgcaactagttccaccatccaattcgtccattcctgcatttatttataatgaacatgtcattaattcaaccgcaattataaagtttttatcacattaagtaattgtgtttgcttatgtatacttacgtcacagcaagtcatgtagacgaaccgatcaaaacaattagcggcggaaaataccgtttcatatgaaagatttagccgactccgagtctgagaaagtaaaaccaaaaattaacttttggtttataaaacaatatgatgttaaaaaataaaaataatacataccaaatatttttataatatcgataattaattttgatgcaaaaaactttttcgtaaacccaaattttaaaggctatcttgaaagattttataggttgttataagtatctacaaatttttgcggtttactatcaaatatcacacataggacaaacaaagagataataataattaaggtacatggattagccattgaacgcatggaacctataatcggttacttctttgagacga

SEQ ID NO: 37491 - DNA, 455 bp, Arabidopsis thaliana columbia
tggtcatgcttggtgtcattaactttgtcggtattctcttcaccttccttgttccttagcccaaggcagagcggccatgagcacaagcgggccaagcccatgcttgcagccgattattcaataattacattttcggcctccaaatactgaagttgttctatggtccaatgttcgcgtcagggaaaacttggtccttgttttgtttaacttcttaagttcgaatctcccaaatgccgatattattacagtttttcttcttccgtttttgtcaaaaaaaaattagttactaaattataaataattaacctcaattgcaattaatcttttggttccttttcttcctctagcattgtgtggtttattggtccttaaactgtcagctttttagttcaaatccatccattttgtctatattgtctctgtatctcatacttattctataattcattagtggt

SEQ ID NO: 37492 - DNA, 587 bp, Arabidopsis thaliana columbia
ctgttttgctaatatattttagaagatattacacttgcaatatttattattatttttttttcgtttttttccaacgagtagctttgttacatgtgttaaatatattcatttaaacagatggaattttgattaccttaagaattttctgcataattaagttctgttaaactctaactattgtatttctgttgatttttatttcataatattttactcttgtgtttatcaattaataacatttcttccgtacatgaaaccgtgttaaatgtcaatcaattaaccttttatccaaagtactttcacaaaataaaaagtaaaaattttaaacaatttttaacggcgtatttggaactgaggttactcctaataagtggccaagtcccaagtatgtaggctcatatggctaaggtggcctaatttcaaatcacactcaacgaagttcttccataggttacgtacaatattatactagttctcatcataaagtagttttaaggttaaaaaaaacctacggtataggtggtgggagtactagttactagctagtataagaaaagtattcgtatacatatttgtgtgcaaggaag

SEQ ID NO: 37493 - DNA, 594 bp, Arabidopsis thaliana columbia
gagaattttgatcggttattcctttatatgttgaagaaaccttctgggccaacaactttccaaataggcccaattcaaacccattgtacaaatgcaaggctactttcgtcatttttcgtaaggcgcttgaattttgcgttttcagaatcttggtttctagggtttcacttaccttccctccgcgcccttgagctctctacctgagcttctccgggattcctaaagctgaaattcaaacacctccattttcatcctcaaggtttgctctctctctctccctctccatcgatccattagatagtgtgattactcctatttgtgtactgtcttcgatgattggcgtcaatcttactaccttctcgtttaaaacccagtaacttgcgattttgttgaactttttcctcaattttctttcgattaatcctctagaaacccgtagctaagcttagattagtgatttcaatcgcaagattcaatattgatcttgcccaagtgaattaaagtcgcaaaattgatttgtttttgtttttttagctttcttatgtaattttgctcaaagctatatgattttttgtctttgcagggagataaata

SEQ ID NO: 37494 - DNA, 768 bp, Arabidopsis thaliana columbia
atcataagaaccgagaagattgacaaaaataaacataaagacaattatattaagtactagactactagtatagagagcacatagatcacaagatttagtattattctgtttgtcaaaacactatacacttaacactttacttatcatctaaaatcaataaactttcatttacaatcgaaaacttgcatttgcaatctagactatttcttggaccttttaaaaaagttatttatttccataaaatgtaagaaattctataaataggctctgttatccatactattatacatatgcatctaattttatttaaaatgtaactaaaacagttattgataaatacattatatcacaaaataatcaaatgcaaaacctacagaaatcagtaaaaataaaataaaataataaatataatccacagaaggatgaaacaagtggcgattccgacagaagccaactctcttctcagcctcatgtaaccttaaaaactgtgagtttctctaacataaaccaaccaacacttgccacgtgcccagtcccattactcctcctcacacacctcttgagtccgttaaaggccgctccttttatgttatccacacgacccatcgttttggctctgactctatattcactataataatattaatacacgagttcatagattttgaagctaataaatccacagagatttactctctttgatcacaattcaatcagacactctattctcatctcttactcaggtcaaaactctctaaagttggaatc

SEQ ID NO: 37495 - DNA, 319 bp, Arabidopsis thaliana columbia
cagtgtgctctaaagacccacgaaacagcagacgaaaatagccaccgaacagacatgttgtacagataacggtcgagtcggccaccaacggccaaaagtcatacggacgcactcgaggatttcgctgtacatggtcaagacacgtctccgtatcggtgtagctgtctggatctgttccacaatcagcatgagcggcggcatgacagacgccaattcatatgatgcgtacatgactgttgagccctcggcaattttttccaagcagcctttcgcttcagacgggcatgtgttcgcggtttgcggttctcttttcgagtga

SEQ ID NO: 37496 - DNA, 502 bp, Arabidopsis thaliana columbia
aagaagaaacaaaattgcctagtcttttgggcggtggtgaaatctctatgctgcaatgctttatcaatatgtttttgttggagtctttcgacgaaacccaactgttttcacagaagaaagtgaaagccaagcaaaacgttaattcagtaataaaatccctttttaatacaaatatgtaaaatacaataaaatgctggccgatcatagctcgcttctttttgaagatacagccgcaaagtggcatggtatttagcttccttttccgctttctcctttctttccaaatgtactgatcatcaagttgcatgaaaattattactagagaggtaaatcaaatattataagtaattgctacagaaggtaggaaaacaacaagatgtggtcgaagtcgtagtacacggttcgaatatccccccggtatttgcgagataccgcaagcgatgtgccagcctggtccagccagtattcctcagatgttgcaaaccctcaatcgactgatatg

SEQ ID NO: 37497 - DNA, 595 bp, Arabidopsis thaliana columbia
gatgagaaagtagtcgagtttgactttaaaaccattctgttggcaagtagtggtgacttaaaattttcataaccttgaatactttcaatgtttttgaactagcaattcgagagaaactcgagattggttataatcttcagtgccatactcaataaaaaaaactagcaataatccataagaaagatgatttatggttatcatttgaccacatgaagacagctactcaaaaaagtgtttggctttaagtaaacttatggtttataagagaaagcatcatatcagattgggcattgataattaggtataacacagaaaagtcgtcattccagcttgacacgatccatgtcgttgatcacaccttcaagctgcgcaatggaggaaaaaaaagaagagccaaagatcaaaacaagagttcatgtgcactagtcttagtttcagtttatacaacataccttggcaatctgccgcaagaagaaatcaccataacgttttgcgggttttgattcgacaacgtagatcatgtcctgcagtgtcaccaggtttagagttgttacaaacgttgtaaaagcaccagagtatagatatcagaaagaca

SEQ ID NO: 37498 - DNA, 552 bp, Arabidopsis thaliana columbia
aattcttcccaaacaaaacagtaaagggttctattttggttttcaaaccctattttcttctttcaatgaaagtatctaccagatgaaagtgatataagaaaaagttagccgtgcttgtgatatttcagattttatgaactcaagaaacttcatggaattgaggacgaaagagcatcagctgagaacagcggccctaagaatatagcatctggacttatctgtatgactcgttaagcgtatcttacttaaggttcattgattgtatagaacctgcttttaaatcacaatgacatgtgcagccattactctcaaatgcgttggtccatcaatgggtgaaaaacctcacttgacaaagaagttaccgggcagtatcacggttgtcactacttttttcttttgtattgagaatccgaagtctaaaactcggaaaatatgtaccgttttattgaaagttttcgattggtgtttgtacaggttggaaagctgaagatcttatctgagaactttttcaagctcaagtccatcaagccaagattatttctgcaggaagag

SEQ ID NO: 37499 - DNA, 808 bp, Arabidopsis thaliana columbia
cttctctcacgttcagatccaatctataggttacactagtttctggcgacgatttattcttacctcagccactaagaagagtaagctggctttatgatgggctattcccaactcttcgtattattgttctcctcattctgactcattttctctagttttttctgatttgcttgagatgatgatgtcttcagtttattcatgccatatataaaatcgcatgaatgaaaacacttatatcatcatattgttatggtacaaactattggctttatttttatgtcactttctcaggtatactcttgtttgactaggtacattaaatttttctaatcaaattacctagagctttttctatagagatggtaaaaggaacaaaaggtatcttcatcctgaattttgacattaaagccccaaaattccattacaacagttcctaggttctacaaaaaaaaaaggtatagagagaggaagattgacaaagagacgagcacctagcgtttctgcagtagtcgaagctcaagggttgttgaacgaactgtgcctggagaaacaagttacaactactttcagacaaccattggaaacaatgcaccaaaccaactcgctttctcatgtgttcagaagagctttaataaaaatccatttcacttaaagagttctcagctatacttaagtaaatattaaatatatgggtgaaaagaatttatgtatgttttactatgtgcatggtccttttactagacacaagttttcattccatgatcgctatctcaaagagggtgaaggaaaaatgttatttcctgaagag

SEQ ID NO: 37500 - DNA, 466 bp, Arabidopsis thaliana columbia
gatgatttctactatgcagtagaattgaatagttgcataaaatccaaaaagtaaggtacaacaatcaattgaattagttgataaacaattgacggtttgagcggaggtgggaagatctttctttaattctttagtgtgactgtttgatgcaataaaaaaagagacatgaatggatttattttgttttgtatgtgaatgaatgaaattgtgtgtgtaggaacaaactctctcatcaaccttttatttgcaaaagcaaaacatatctacactaaaatgagcattcatggagacgtgaatttaagtgtatattaatggtcattaccgaaaagatcagagccggctcaacttttttgaagaccttgtgctgatttataaaaattggctttagttaatacggtttttaattacagagactagattttacccgcggtataccgcgaaacaatttattttttaaattaatata

SEQ ID NO: 37501 - DNA, 554 bp, Arabidopsis thaliana columbia
cctaaatatatatatatatatatatatatatatatatatatatagcgaaatactaattataaacttattactttattaaacaatctcatagaaagtgtgcctcacaccttcttcacatagatacgctcgttcttgtacctaacaatacgtaaatatataacctaactaatattacatattaatccattaataagttatggtgagcaaatttgttatatttgggttacaagatatataatttattatttgccaccttctcaaatgtgaaaaggttatatatcaataaaataatattgacacgccaattatagtaaatatttatgtgatttactcgtcaatagatagatacattgtgttatacttccattactctatttcaaacatttaattagtcaccactcaccagtgtcgcaattgactaatttagatgttatgatattttttttgtcagtctttaaatttcagttaatgttacccatgaacataagtaaaatttatagacgacaaaaaaaaagcttacaacgactaaaatagtcaaatgcgaacacacgtgt

SEQ ID NO: 37502 - DNA, 444 bp, Arabidopsis thaliana columbia
tcccccctactgcctcaactatcaattccatttcgtcgtctttttgtctaacctaagttctcagctgaattcttcttgttcatggtagaatcatcatgctatgttctctctcttttcactttatggttatgtttcaatgagcttatgcactcaatctaggaatattctctttgtgaaaccattccacagatattgttggttcctaaacagtgtagttatagatgttaacgatagacgccagtggaaaatgtttgagcattggatctgaatcccttggtccaatatcttatcccatccacacaactcaaacactgcaatgatattgtagtcacagcaagtacttcaacacttcagtgaaagatcgatcagagtggtttgcgaaatcttcagactgatctggagatgcacagttcgtatcgacgatcatatctccgtagcagtact

SEQ ID NO: 37503 - DNA, 547 bp, Arabidopsis thaliana columbia
ttctttatgattcttgtctacttaaatagtggagatcaaagaatgtgtggaaagagaacgagagagagagagagagctctgcagaaacaacacttttattgagggagaaaaaaaagaggtaaaatattatatttctccatcgttgtcattatctcattaatgtattaaacaaaattctattgtctttttcttattattaaatggtttttttttccaacaaaacaattctctacaataccttattattctgaaaacgcttattgcactcttttcctagtactaccaaatgttagtcccaatgtaataaccaaaaaaaaaaaaaaactagaagtgaggaaatatttatagggtgaattgcaaaactaactgtttttgataatttatttaagaaactaacactataatatacaaaatgtagaaattaacactagagggtagtaaaattactaaattagtctttttgattggagatggtagtggtggtgatggttgtggccggtggtggcggcggtggtggatggagttgatggtggtcggaagtgttggt

SEQ ID NO: 37504 - DNA, 400 bp, Arabidopsis thaliana columbia
  unsure (1)..(400): unsure at all n locations
nnnnnnnnnnnnnnnnnnnnctaaaggctgatcaagcaaggtccggcgatagttccagggctcagtgctgcgtgaattaccacgaatatgaacgctgaggtgacaacgcgtgacgttgacaggtcactgtacgtacaacgaagaaaaggtatctcactctgcttaagaaagcacgccggtgtcactctgtagcgtcacacgatgataaggcgctgcaagacggttgtagaggtctctggcacatgtgaaagacagcatctancctgtgcgtcgtctgcattcggacagattcgcagtcttgacctcgacgaatgatggggantttagcgaccagatgattcaacatggtactgagattcanacggtttatgtacagtgtcttacaaggtgtgganaataa

SEQ ID NO: 37505 - DNA, 491 bp, Arabidopsis thaliana columbia
cagttcgagtctgcgatattgacagatgtcatatgttgcgtggaaacagtgataacgcttagtacccagcttcgatatttgtgaggttgattgtgttggaaggataagcctcgtatcttcagattgataggtaaaacgccttgttatgctttctagatcgcctggaattttgttttgaagttggttgttctgacagcggcgggtttgacaaaaagattgcatccggtgaagagaagcgatgataactcctagctctaggcgttcgggtattcgggtcgggtttgggtcaggtattttgggttcgagtttttcgggtttagaaatttaagacccgttctatatataaataaacccaaactcgaacccgaacctgaaccgaatccgacccaaaaccgaacacgagttgttttgcttgaatatatttaaaaatatacaaaaataactaaaatatccaaaaaaatcctaatattttttatatataagtataaata

SEQ ID NO: 37506 - DNA, 573 bp, Arabidopsis thaliana columbia
aggaacattgaaaatgctgactgtgacttcttcgagatcgtgttcttcgagctctgcatcgagagatttttggacattgatgacccatcgagtttcgtcaaacctgtgttgctctgtagatgaaaaaattggttttttaggtaacatggttcttaaattttagaagcagctcaagatcttggatcgaatcattcttcttctttcaatctgagagtaaagaagagaagaagaaacagtttttgtcctatttgcagttatggtttcatcaagactttactctgtttcaatggtattgaaacggccttcaagtttcatcttgaataaactgtgtgaaccgaattaaagattcacaattcgttttttgtgttcatcaaataattagttcggttggaatgagtcggttcaatttaagcagacgaaaacacacaagacataaacttatatttgcttcgtaaggataacatatccgtgttcaggataaaaatatccttgtctcggacaaacaagaacccaacttggcccattgcgttgcaagtcttgttctggaacaaaggattacaaaaaccctagccg

SEQ ID NO: 37507 - DNA, 566 bp, Arabidopsis thaliana columbia
aagggaatcaggagatttaagttccaataacactttcataaggtccagacaattgacaatcccccattttcagaaaaccaatgccaccagctagataataaatagaagctgctatactctggacgaatcttaaagtatgtaaatattacgcagatcgtaaacgaccatgcttcaagagtatacatataatatatgaagagattaccgtagcatgacaaggggatatcgtggctgatagcctccaatcaatgttctctccaattggtgcgttcacaaaactagccatcaaggcattggtctttctctcactggatacactctgcaaagccagcatgaaacagagagggaaggggggaggtcaaacttcattttataggcaggcatattatctaatcaaagagactgctgaccctgttaatatggtgaaaattggaaacaaacctgcgctagagaaccttctggtgcagataagccatagaacctcagtgatacatcacactgagtacttcgatgtctgaacttggtcgtcacatcgagctgctcaaacctaccacacagcacctcag

SEQ ID NO: 37508 - DNA, 481 bp, Arabidopsis thaliana columbia
  unsure (1)..(481): unsure at all n locations
ccctaactaactaatcattgccttaagttattcgtcctaaaaccatttttgttatcatgaaaatatctgccaaaaccgctctatgacttatacaattcgtacatgaccccttcccaatcaggcaatcaccaatcacaacgttttttaggctgatcaaatgttgattataagatttataagataatagcttacaaattccattctaatttgtatagtaaatggaaagatatcattttcactttaaattgaatttatcagataatatcttcctacaaattgcattacatctgttatattattccttttatatgtggtaaatatttttaactatatatatatatatatatatatatatgtatacattagagagatttcattcttatcttgatatataaaggttccagatgatgaatanaactcatattacatagaggtgtattaaaagagtgtcttcgaaattacatctgtatatgtgaacatg

SEQ ID NO: 37509 - DNA, 246 bp, Arabidopsis thaliana columbia
acccccactcactgaccgagctcgaattcgtaaaagatgtgagtgatatataatgtggttctttgattgtaccaattgacatatactagatgcatagatcagaaactcaaacaaatactcagattaaagagcactattagcgattatccgtgattctgacaatagagttttgactatcggaattctcgcagggtatatgactcatgctgtctgctaagcacaaatcatcgtactaacatcgtagta

SEQ ID NO: 37510 - DNA, 440 bp, Arabidopsis thaliana columbia
tgttttttagaagaaaaagtatttttattgatttttatttgtaataaacaattaaaaataataaactataacttatttttagcgaaacttaatatgacaaaatatagcccaaattctattttgagctatattttgttataaatttttgataatttacaaacatataaattttccttttggcaatcatatttttttaataaatttaaagctatgtctttttatgaaacaaaatattcatttttctggcaatcatttgacctttgaaatttatatataatgaaattcaatataagccaaattcatatatatatatatatatatatatgtatttgtctatccataaataccaatatatatgtatatattatggtatttgtgagtttatatatctatacagattctcatatctatacatatattcagcaggagttatatatgta

SEQ ID NO: 37511 - DNA, 517 bp, Arabidopsis thaliana columbia
taagctttgatacaatgatacatgttattttctgattaaaaatggttataaacttgaacggtataagactttagtgtatagagaacaatttagagaatctgtatttatgtaaccgcgacctttcggaaacgtagaaggtggtcgcacaaacaaaccaatcaaacccttaatcgatggcactcttttaatgtctaataaacttcggttcgtcactcgaccggacaattaaatatgtgattaaaagtgtgaatttccggttcggtagagattactggtatttgttaatccgggccggaccgggccgtatctgaattatgaacactttcctaatgtcatagaatcgttcgtgccgtcgtcgctgcgatctgaccaaaatcaaaagtgttacgattcggtatcatcgtctctctcatttgtgattttgtcaaaccctgctctcttttctccaagtgctctcatggtgcttcgctcttccggcgcgctgcgatcgcccggacttcctcgcttctcagagctc

SEQ ID NO: 37512 - DNA, 346 bp, Arabidopsis thaliana columbia
ctcgatcaattttagttctgctgagtatgacgagttatttgagttgatgtctaacttcatgagttctctatatattttggatatgagctttcagtcaggtatagggttaacgaagagactgatacacatacagacatgtgaatcttgatgacactggattggtttggatcataattttagtttaggatggctattggtgttgccaaagaattggctaaaggaaccatttggatagctgataatggaatcagaaacaaagcttaaaaatctcagctaatgaatgtttgcttttactggttttgttctcctttgtgatatatacctgagttttcatgaaaatggtaac

SEQ ID NO: 37513 - DNA, 551 bp, Arabidopsis thaliana columbia
ctgtggagattctccttctcgaatttgtgctctagaaattataatctggtaagttattcatctccatcggtttccttttacttcccggagcagtctccggttcgtgtggatttcattcttccgatgaatttgaagtcctattgtctcatatatgttctttttccaaatagagaagataatctgattcagactttttcatgcttctgttacgctgatttcaatttcttgttggtttgattgctgctacggttttagctgaaatcgtctctgttttctatgttttcctttctgaaattcattcatattgttaatgttttgttgcaggcaatttgaagatcttgtgggtcacgacacaaacttataagcaagagcttagcattttcatcatctgctgaagaacgtatgggagaaagtaatcatcttcctccctttttatctctttcgattcatattagtcctcaaaagatatgtgctttgttagttcttgttactagaatagaggatcatctaaatctcacaactaagttgttgactagctggaagtgattgtc

SEQ ID NO: 37514 - DNA, 576 bp, Arabidopsis thaliana columbia
tcaaatcgcagcgagttccgactaaggaaggtcaagcatatgaattcaaaagatggtgcggttttacttcaagttcaatcggttaagcactagacaactaacaacaagggcattgaaactatctagtgaacattgcaaatttacaaggctatgataatcattatcccctatgcaagtgcaaaatgcaacaacctatatgataatattctaaaaacagccctaataatgcaaatgtaaactacatgacactctatttttttggaatcattttcggaaatttttaaatttttatgggttttctatgccttagatgatgcaaaaatttgaataagaaaacatgaaacaaaattagatacatcttgaactctctcctaaacttaaattacactgtcccttgtgtaataaaaattcaaagaagaattcaagagaaataaccacacaaagcaagaaataaaagaaatgcaatgatatatacaatgaaaaggagtgatacctcaacatttagacgaagaggttctgcacaaactcgtccaggcggtcttgtgtgtctcaggacacggtggaggtgttggggtt

SEQ ID NO: 37515 - DNA, 633 bp, Arabidopsis thaliana columbia
caatcaaagtgtgcatcccgtggaacatcagagcgagcagaaccttccagctgctttccctgccgagccgtagccagctccttctcccgagtctccttggagcgatcaacagacgaccccgggttcacgacgctacgcccctgatgacctctcggaggctcggatcgggcagtgcgcctctcttcctcaactgaacgcgcagcccgatcctccccgctcggaaggtgatccttctcctgagattccttcagtgctgatgtcttctgacgtttgtagcgagatgagtaactcccgacctcttcggtattcatcttcatcttccttttcgctaaagagaaggaaaacgcataaggaaggtggcacggacgaataatcacctcggacgaaagcgcgtacctggagtttttctagctttcttcggcttgtgtaaggataagcgttccttctcttcgcccgtcggccaaacgtatgggctaacagcgcgaatcttcagaagatcttctttgagctcctcggggaacgggtcaagaatctttaaacgacgaactgaaagagaaggaaaagtcctatcagaaacgagaaaagcaacaaaaaagaaaatactttcgacatctgaaatcaaactaccgggcg

SEQ ID NO: 37516 - DNA, 534 bp, Arabidopsis thaliana columbia
tagatgacacttttagcgtcttgatttattatcttatgatgcgagataacggaaagagtgaagattgtaaataataatgggctatattaatatctatgtctagaggatgaaaatattaagtatcgatggatgaagatcacgtaattaaacctccctcttcccaacataacttatgacccaaaagctcctaccaatccaaaaaaaacgttaacatttatagcataggtgtgacagcattaaatgctaaggatatcttggaagatatctccccgccgacattggaaatttaaagatacggtaaatcattacaattgatatatatgaggttgcagtatatcgaatatagacgttggtctatttattagcactatatcctctttgctgcaacaactcagatctaacacactaaatagtttagcttctgacaactttaatgcaagaggaagataaacacatagagaaatcaaagcttaaaggtaaaagtaaaagttttgggtattacttatattattgttcatgttaacaagagtgttt

SEQ ID NO: 37517 - DNA, 663 bp, Arabidopsis thaliana columbia
tgacaccgctacaaaagcttcaaaatcatcaaaatctttgtcaggccgacgatatatgctcattccatcgatatatgtcccccatatacgaacgtgtatgttctaagtcgtcaatatgacgctagtatctatacctaggcgttgcttatatggtttgagaataatgtcaggtctttttgacctcaaacaatataacatttttttgtccaattgccaaaagataacagcattttcaagctgagtgcaaaaataaatcataaaaataaataacattaataaaatcaatcagttagcaagtaaaaacttatgataataccataaacttcttctctaggccatcactagttattaaatgttcttgcttggctttgagaagtgatgtgatctttttgaaaaaatttatcgtctctttgcgttcctgcaatagttatgagacaaatcttagaaaaaagataaagttagaaaaatgatgcaaacaaaataaggagttagcaaataaaagtttataataatactttaaatttcttctctataccaatcttaattattattttttttgcgcacctttgagaagagatctgatatatttaaaagaatgcacattatctcttagcattcatgcaacaacttttttttcccatcagttacgagacacttattttg

SEQ ID NO: 37518 - DNA, 564 bp, Arabidopsis thaliana columbia
  unsure (1)..(564): unsure at all n locations
ccaacccaaagagtcttgacatcatctccagatccacggtcaatagccttgtgttgctggtgctggtgctgttgataagacccgtattggtgaagctgaggatgatgctgctgataaggaccttgattatacggaacatattgatgaggatacatcagcatctgttgctgctgcatcatcatcatcgccgccgctggtggatattgcatggcagccatccactgttgctgttgctgttgctgctgctgccactgctgaggtggaggaggggtttgttgattcggcggtgtggctccggaagttgccaacgtcgaatctgagccgttggttgtctgcatcttgatccgatctgatctccggaaaggganaacagagtctcccgagttgtttagattcaagagtttcgagaatcttcttctctatgaatatatgtcgttccaacaagtgtgcgtaaaganagtgagagctcgttgagctctggtaatggcngagagagagatagaggtagagagagatttggtcttaaaaggaggcggagagagagagagagacgtgagttaatgg

SEQ ID NO: 37519 - DNA, 526 bp, Arabidopsis thaliana columbia
tggtacttcactcacgatttaaccgagaaattcaatttcccgaggattgttctccgaaccgttaacctctcagctttcgtcgctttctcaaagtttcatgttttacgagagaaagggtatctttctttacaaggtacacttttgttgacttttatatatctctagtttgcttcatctttgttgacttttcttgctcttctccatatggcagagactaaggcagactcaccggttccggagcttccgtatcttagaatgaaggatcttccatggttccagacagaagatccaagatcaggggataagttacagataggtgtgatgaagtcactaaagtcttcctcaggaatcatattcaacgccattgaagatcttgaaacagatcagcttgatgaagcccgcatagaattcccagttccactcttctgtattggaccctttcacaggtacgtttcagcttcatccagtagcttacttgcacacgacatgacttgtctctcctggttagacaagcaagcaacaaatt

SEQ ID NO: 37520 - DNA, 466 bp, Arabidopsis thaliana columbia
ttactcatatactggtaaaaaaggataaaatatgttagtggcatcattgcctaagttttcttttgtagattttgaagaaaaatgaaaagaaaagatgttgttcattgaaggagaagatttaaagtgttgattggtggctctactaagcctacgaccaacagtagtgttacctaagggatctctttcattttttcttagtttatactatttcacttattaattgattaaccactaattctcttactaacaataagataaagctccatatcatgggtttcaatgataacaaaatgtgatataactactctatagtctatacatataggtagcctattcctatgacaactagctaacaaatattatgatagaagggaaactaaataaatcagaaatgtgagatactacgtctttataagaaatcttttgtgttatacaaaaccaagctaataaattaggtcaatatgcg

SEQ ID NO: 37521 - DNA, 229 bp, Arabidopsis thaliana columbia
  unsure (1)..(229): unsure at all n locations
agaaagctacatcatagtaagcaaagctattctcgtctcctgggttgagagcgcacgaggcatgaactatctcgtagacgccaacgngaagacgtcttgcgtgaggtatacactagtggtctgattgattgaagctattgtcctcagtccttcaccgtaagacacttggtgcttccccataacgggacccgaaatcgcatcttctaccagagatatcacatccttgata

SEQ ID NO: 37522 - DNA, 389 bp, Arabidopsis thaliana columbia
tgatgtaaacacgttttttcgaataaattttatattttattcaaaaaaaaaaacatatctttttttttatttgaaccagcgatttttcgcatagaaattattattacccgtaaattgattgatattaaacatgtacataagttgtataaatttattaattatcattttttggatataattttatttataaatgtattggtattatctgattaaaaaatgaaggtggttatatttaaatatttttgttaacatataagtcttatgtttatatagaaaagatgaaggtagttatatatggagttccacaagactacttgcttaattattaggttgtcgcaattggaattggagtgttaattattcatgagttaactactgtcattgttgac

SEQ ID NO: 37523 - DNA, 547 bp, Arabidopsis thaliana columbia
tcatcttcagcagaatgaacagatcaaactcagtctgattcacctcagtttcatggatgagtttaagaataatcattcaactgaatcattcagatgatctattaaaacatgaaaaacaaacattagttttaatattcattgagatggttcatccaaatggccaaacaaacaggacctaagtatcttatttaaaaaaaaaaagatttcaagataaagtatagactattgtcactatactcaggaacaaaaagaaaaatcatatatttttatcatttgaagtatttatagaaaccatttattattgaaattatatcaaaataactatataaaagaatagttcttcaactaacaatgtgaatatttaacatactgatcagttgactcaataaggttgaataaaaataatatatcttataaaaccgtagtatttgctctttgattggtagatctccatgcctccatccatttattaaagaacgaaaaattccggtaaatagaattttatttcgaattataatgtgtttatttaacacatggacaaaaatat

SEQ ID NO: 37524 - DNA, 595 bp, Arabidopsis thaliana columbia
gacaaactaattgaagatattggttttcatatcctaagaggctaagacatatttacagtgttcctaattaatccaagtgttagaaaaaaaattttatttaaaaatatagattttttttaaaaagaattattttaagttcctatgcattttattaattaataatgatgaattgtatactccaagacaaataattgaatactattgaaatgatgcatctgtaatcaaattttaatttgtttgcttaatatgtgtgaaaatcttagaaacttggatttataaggaataaaacggattattagttttctcatttattaatagtttcatagtttgtggtatttgaagaaggataacatatattatgtgctctttgaatatagtttttgaatttgtggtattttgaccaaaaaacaatttgtaatatttttacagtaatcttcgttatttttgattttacaaaaacctataaaatactatacgtaaaaagaataaatagtgaaaaatcttccgaaatgaactgaaataaaaaggtctaaatgtgacgcaaggactagtggtgtttgagaggaattgctatttgcaaagttgtatttggagc

SEQ ID NO: 37525 - DNA, 351 bp, Arabidopsis thaliana columbia
tggtgtttttttttttctggtaaatttatagtattttattttctctacctgtcgtctctccatttctttttgactttaacggtttgactttttttttgcaacatttaatacctctactatttttatgaaatattctctaaaatatggtaccaatttgttactacaagtgtaggaaaaaaaataatataagactagctttgtcaaacttattgagaaaaagaatgactaactatagtgaaaagtgatcatatatttagtgaaaaaagtaaaaataccaagtctatatatatatatatatatatatttatgtgagatagtatatatatacaattaatgctagtctctttttga

SEQ ID NO: 37526 - DNA, 515 bp, Arabidopsis thaliana columbia
aaacgtgagtttctattttggaaacgtaagtttccatcgtgtttctaaacctagatttttaggaaacgcgtttccgtgacgtttttcgtatttccggagagtttccgtttccgaaacgtttcggaaacgagaaacgcacctcagagcgagtttccatgcaacctaagcgcataatcttgcaaaaaaaaacattaatacataggccttggttattttttaatccaacttctctataaattgaacctgaacttaaaccaaatcagaaatacataaatcggtcggtttgtgaggtattaatccgagatatgagatattttatctatttcttgttaacaaattaaaggagcaagaatcgtccttatcaagtaaggacttgattttcaaaatatatttgaattcctattatgtaggatctattgtggatctagttggcaagagtgatgtgtatataaaaatgttacaattgattaatagccacaatgaataattctgccaatgaacttgtacattgtagc

SEQ ID NO: 37527 - DNA, 564 bp, Arabidopsis thaliana columbia
  unsure (1)..(564): unsure at all n locations
tcgcatgtgatgccgcgaaacacgcatggtgaatcggaaggcttccaagattgtagaatgttgtgagagtcgtcgaggcggtttttgaagcgaaacagagcttgtttctcaacggtcgattcaacattcggcgggaaaatgaagaggagaaacgtggcagccacggtggcgaccacgctgccacgtaggaggtctggtcttctcgacatttatagtgattcccaagggcaaaacggtcaatttgtagtttaggtgttgatcatggtcgatgcactggaattcccacctacatagaaaaataaagatatgaaatcaacaaactaaccactatacaattaataatccactcaaaataaatttgatattttaatgtatgggattttcatagtattatggttttccaattgtgtttactgtttattattattatattctatgcacgtatattactatatatataacacatcaatcatagcaaagattttgtaagaagaatgggtgcatgtgatttgtgaacagtnttgtataaacataaattagttgtgatcatttatcatcatgtat

SEQ ID NO: 37528 - DNA, 448 bp, Arabidopsis thaliana columbia
tttcatgaatattattactattgtcattttcgataaagtgataatattcaggatcctcttttgaagaaaatccgttttaaaatattataatttaaactcaccagtttattttacaattctaaattaaaagaaaaattgttcgaaaattacaaacagatctagatatatatgacctatccagaaaacaaaatatagaagagtgcaagaccatgcaaatctctattcaactttcttcttcaatggataatgctaaatatgtagataattacggtttggtgatctataagaaattaaaaatctgtattcaggaattaagattttaatttaaaataatttcatgagtattattactgttgtcatcttcgaaatagtaatcatattgaggatcctattttgaaggaaaccagttttaaaaatatatatatatatatatgtatatatatatata

SEQ ID NO: 37529 - DNA, 526 bp, Arabidopsis thaliana columbia
atgcttgtaagttgtacttaacatctatcctgtataatgataaccaggtcagtgaagctagggacatggacagggatgctgttgagagtgatcttacttttgctgggtttgcggtaatgacataatgctttgtgttctatgcagctttagtttcttcatatgtttgtataggtatccgatggtctgagtatctccattggtttgtaatggattaatcatgcatcacaggtcttcaactgccccattagaccagactcagcccccgtgctcttggagttgaagaattcatcccatgatttggtaattcataccgtgtatcttgtaatgcgcacacactcatagattattggacctcctatcactaccagtggttcattcagttccttttctactcagtacagaattacccgtaaagcagctttgtcattactccattaaagaactataattgagtattgatatagacatatatatattttggatctttcatttccgctttctgtcttcatctcattgttttgcagga

SEQ ID NO: 37530 - DNA, 534 bp, Arabidopsis thaliana columbia
ttttgcatcataagttctctgttttgatccagaatgttccataatctcaaaatgcatcccaaacatgtaaagacctgaaaaagactataaaagagtctagaaataacaaaaaaactctaaaaaccagtatttttatgcccggtccgaccggttgaaccgtgacccgaacatttttttggtttgggtttagtgctaaaacctgacaagttcaaaaccgtaaaaacccacaaaaactcaccattaacccgtgactcggttaaaccggacgggtgtgggttttaaaaattctcttgattttggaataaaatatgagatttaagactttattcaatcatttgtagaaatgttttcagttcttaaactcatttgatgttttagattttgatgaagacttcacaatgccgccttaaaaaatgaatcgaatggtgagtgagaccccgatattagttgtgtgaattccgatgttttatgaatttatttccgtcattggtgatcttctaatatatttgttacggtattagacatttagttaga

SEQ ID NO: 37531 - DNA, 629 bp, Arabidopsis thaliana columbia
aaaagtacaaatacgttaaaaaacaaattgtttgccagccaaaaattaattaaatacgtaattttcgaaggtgtaatattccaacttgtttttgtatatttgtttagcttatggagttatggttgtgttattatatattgaatgggctatttcgtgttgacaaataagctctttagttaaatattattatgttcttgattaaacaacaaattaagaaccggccaaaccattgaacagtcgttttctggtctttttcattttattggttacaccttctttgtcataaaatagaaattatgttatactttctttcatgtatcgacacgtgcatttggttagtcttaatcccatttcaattttatatgatttatcatattagcagaaaacaaatatgctaattatcacatagataagccatactaaaagtatttatctgaccttaggttaaaaaaaatattaaaatatagcttataagaaacattcactactgagttgtcatatttctactggccgacttagagtgcacaactaaaatatattttttataaatcatttgccataggcaaaacaaaaacaaatatctctgtaactttttcgtcaattttttcttttaaaaaacacttttttat

SEQ ID NO: 37532 - DNA, 753 bp, Arabidopsis thaliana columbia
ggaaatactgatggaggtagcaaggaggggagaagagagaggttacgggaccccttgtcttctggttgcggccaaagatgatttggatccatatccaatgtcagtgcaggagtctgatagggtaaatgcatcacttaagcctaatatgatttgatgagatgctgctcttggtatgattgatgattctattatcggatgacaacaggtttgcatggaattggggatagacatccctgtgtcattaagcatgaaacttggggagccaaatagtctcttctcaagaatcgtgagtacagcagagaaccctcacatgagcattccagagacagagtcaggaagaagaagcaggaatatccgccaactcgtgaatagctcacttctatttgtctcaggttccttcctccttcttcacaagatctatgcatttccttttttcttgagcaaaaccattaaatcatccaaagctttactattaaattgcagtgggtacagctgttgggtttgccggattagcagcttaccgtgcttattccgcaagaagaatgcttgaagctttttgcccccaaaaaaaacttagtaataaaacacttgatgtttttctttagcgattcatctgctttgtatagaataaaggtaaccctcgttgatggcttcaaatctccgctccgtcacacctgaattttggagtttttagatacaattattatgtgtgtgggttggatttttttctcatcttcgaggaatctttcttat

SEQ ID NO: 37533 - DNA, 302 bp, Arabidopsis thaliana columbia
gtcaagtacaactatgatagttcatataatagacgcctactcaaatgctacctattacctaagatcaagttctagttagctactctagaactaacattaagaacaatcaagatggataactctaaagatcctaacaggttgttaatctactatatcatctagatgcctagtgagaaaccctaaatccgtagagtagattactctgacatgatcatagaaacagatgacatgtttgaataggattgcatatagaaataaaagataagagtagagtttagataagatcttctctctatagagtt

SEQ ID NO: 37534 - DNA, 918 bp, Arabidopsis thaliana columbia
tagataacctagcaaagtggacaatctactaaaccatatgaatccctaatgagaaaccctattcctaacaagcagattactcagacatattgaatgaagcaaacaacatattcgagtgtgaaagcataaacacagtaagtagagaaggggaaagaagggatctcttcactgtattaagatctgaataaaactctgaaaaacaatcgatgaatagcttatgtctcttagtaacagggatttgcaaaagcttgataaaagacttgataaaagaaacttaggtctaaaaacaatatataaaaccctaaaaacgtccagggactaataatacaaataaggaagtcttctgaggcaaatttcctcttatgtaaacttgaaagcgtcttggacttttgttggcccaaaactggtgtcgatcgacaccaagagtgtgtcgatcgacactcctcttgattcctgagtccaaaatcgtccttagcttccttttccttagcttttgctccaaaatgttttcttatctccattgctgtcccactgcatagaatacctgaaaagacactaaaaagactcgagaaacaacataaagactcaaaattctaaccctaaatcatatataaaatcagtgaaaatagggatatatcacttatcgttttacatacttgaaatctaaacatttgatggtagtgtttatttataggcatagctcttcttttgtttttagtcctcaaagtaatcctatatattaatttaatttactattatactaatcgaattccttctggtgtttgtgtttatcaacaagataatgatggacgcatagaaggcaaaatggtgacatgtaaagatgtctggaatttctaaacgacaaagtgattgtgcatttcaacgaagatagcggtcatccaattggagattcttgtg

SEQ ID NO: 37535 - DNA, 648 bp, Arabidopsis thaliana columbia
ctcctttttgcatgaaaaattaataattcttccttgaagctcaaatacttgacatatgcctttaattgccctttaactcttgatttctccatggaaaatctaataaaaatatagtaaaagtgggcgaaaatacgatgttatcaactcccccagacttagactttgttgtcctcaagcaaacaacaaagccaagctggtggagagattttgaaaaaagcagaagtctcttactatcagagaccatgtcctaaaagatatcatgtggacgcgtaaagacaaaaacttcacgttagaacattctcactatataatcaaaacattcactatccttatccatccgtctcggacctacaagagaactcaagaatctcatcagttaaccctcttcatttattaaaagtagcgtgagatttctcactagagggtgtcattcggggtagacggaacttggtatgaattggtgtttaagtgggggagttaaagtgtttagagttaccgtatagtctcgaatgcaggatatgttgcaaaaccgcaagagctatcaaattggttgaggccacagtttccaaccacgtcttctattaaacacctctttctcctttacttctttcttactttcggttccctagacttaggttttctgagggg

SEQ ID NO: 37536 - DNA, 527 bp, Arabidopsis thaliana columbia
aagctctatctttggctaactctacacttgtaatcatggaccactttcacttctcaactctctctctctctctccccttttgtcttgtccattgtcttcagtgatccccacagtcaccgaatcatcatcaacatctgcatttacccatccttcgttgcctcttgattcggtaaaagaccgttttaattagacagagaccctaagcattttgtatctaaagagtcttctggggtttttaatggttaagactttaaatatctcgactgcaacaacagagagaaagtacgtgtgacttccatggcccttaaattaatgttcctctttctctgaaagttatagagagtcttgaaggaagccataacagaactcacaaatgaacagatgaaatcaaacaaaaaaaacgataattatatcattcacattcacacacacgtgagaggaaattaaacggatgaacgaattttactaattaaccaaaatattattccctctattaatatagactcagaatgtgaaaacctcgaaaa

SEQ ID NO: 37537 - DNA, 501 bp, Arabidopsis thaliana columbia
  unsure (1)..(501): unsure at all n locations
cgtggtcacattattaaactatcatctggttgtatgcttcgacaatatatcaaagtgtagtcacttattctgctgaaacaaatcgcattagtaatagtaggaataggatctgtcttagcttgaggatggtttaagatatatatatatatatatatatatatatatatatattatttttttcttttagttagcttagaagtgaaattacttgcttagaacgccgatatttacataagttgtatcgtagagatttacgttacttttttgcaaaaatcattttctatatatttccaaaacaaccatgatataaaaacaccttaaaagaatgacagccgttctgggcgacancncatcncgnagcnancanttgtctgtcgngngtcggtngagtctagaagtaatagtaatttgagagagaaaaattagtatcaccagtttccgtttttttttttactttctatttattatttattcttctcttttaaattattaattttccca

SEQ ID NO: 37538 - DNA, 606 bp, Arabidopsis thaliana columbia
  unsure (1)..(606): unsure at all n locations
gggtacggatctgcgactcacgtctcgatcgatcaacaaccactcaaaaatatacttttacgtacgttttgatcttaagaagattacaatcactttaatccgaatatatgtatgtgttatgtgtgtgcaacgagtgagcattgagtcaatttatgtaattttggtggacatagagaaaagacgaaacaatagaatttgcctattattagtaatttagtataggctcattggacggttgttgttattttacttttttcctcacatgttacatcttatctttatgtattctgttcttttatttgcacaaaaaagtattctattctttcttcatttcccatttttacaatttgagtatttttgtcccgtacatttagcaacggatatcttaatttcgcctaaacgcttgactaaaatggaaacgagttcttggtaacaactttcccgcaaatccaccacgctaaattgtaatatttactcacagtagaatagcaaagtttacgttttagacctaagtccaattacaattttcatatttttgataaatattataattttatttacattttcattggtaaatcatgagtatagagggtaagtnaatgagag

SEQ ID NO: 37539 - DNA, 502 bp, Arabidopsis thaliana columbia
ggatcacatgatgacacgtcgaacccaaacactttctgcttccgtcaggcttaatatcctgggagaattagggttccaaaaacatattctcatcacatccgaacaaataaaattcaccaaatcgaaataaacaacattcacacaaattttgcagctaaataattgcatgagaaagcaaatttttaacaactccacagaatcatgaaagagattcatctatctatttgaatgaagcaattatagaaaggaattaaccttctcgggattagaaatgtctatttcaatagatcgcttcgaaacctctcctcttcctcttcctcttccgattcttcctttgctcacaacatcattctctttcttcctcgtcttacgctcgctttcagatctcccatcttcgactaactcgccggaatctcttggtctgatcggcttccctctcatttctccatactcggagcaaagaagagacaccaattttaccagtatcgaaaggaaatgaaga

SEQ ID NO: 37540 - DNA, 577 bp, Arabidopsis thaliana columbia
gtatttaccggcaagtatctccattagatcaatagctttctccacttgcacagagttagccattgctcgaaactgtttcctcattaatttcacagacgaatcatcgacaaggtccaatggcgcaattcctaccttctcaattctcttcaaagtgtaaacgacgctctcaatcttaccttgtcgaagattcgacgaaatccctttcgataagagatcataatcaaccatggaagcgaaacgagccacattagctccggactctgcagccaaagtctcggcgatgagagcgacgtcctcaattcgaccatcctcagctagcttcgaggcaaaatcagcgtaatactcaagcgagccatctggaatccatcttacgacattggagaagtggctagagagagaatgagtcgcggagactgaagcaggagaaggtgaatgttgctgcggtagtgacggaagtagcttggtgaaagaagaattggatttagttttccggttggactctggtgctgtggcgtaacagcgacggtggtgatggtgaggattggttatggcggatgaggagcatagacaataacaa

SEQ ID NO: 37541 - DNA, 203 bp, Arabidopsis thaliana columbia
catatttgatatgcaaataccagcaaatagaaactgggtctacccaacatggcgattcctgccatcttctccttgtcaccaggtgtgccaagtgtcatggccaccctgacataacagtatgtgttcaaaacatcatggcgacccgcatttgcatagtaaagggctaaggtgggagggccaggtttttcagggctatgtgaatg

SEQ ID NO: 37542 - DNA, 788 bp, Arabidopsis thaliana columbia
tgtaatctgatcgtttgaaatttggggaagatagtgaaaggagaataaagtggtttggggtagatatgtaattatgaggaaatagaggggtgtttgattaactttttagagttttgaaattctttagaagacgccgattgggtatgaatgattataaaccggttagttaccaaaatgaattgaaattgggtggattggtttggttctaattaaattcaacaacttgtttggttgctttgaccaaagaccttgttatttaccatcaaactacgaactcgttcattttctcgaaatttcatttaattccaacaatcagtgcttcacactaggtataagatacatatctagttaatttataaaaatggctctgaatctcctggtttcaatacactaatagtagtacagtaaggaatatatggtgtttggtgaatgtggtgattgagacacaatatgagtttctttgaatcagtatcgccatgagaatcgtgattagaccttcagattggcattgtaatgataccttgtttgttgttcatagttatggacttaagactctaagaggagcaataaaaagaggttgaaatgatgaaacaagcacataagcatgagaaataacgtcttcattcttaaccatgaagaagttcaaacgtggatccaaccaaagtctagcaaaggaccagacttaacataacattaaaagttgttctccaaactcacatgattctccactgaagagaatctatgaacacaatacaaaacactacaggaacaaaacatcagagtagtat

SEQ ID NO: 37543 - DNA, 362 bp, Arabidopsis thaliana columbia
tgcaggtagggattaaatatgataacgtaacctcctttgcttcttttcttattaattaagaccactcgtaactaataaagatgatagatcttttatataaaaaattgtattcgtcaatgctcttttatgaaaacaatagttcaactacccatacttgcatctattagctatctagtattctcatattattacaaacattatgcagattggagataattaccaacatttctatataatcaatccgaatttggtgattataaatacttaattaccattctggaagtaacaatattacatgtagtatctatgttattttggcatgaaaggcaatgatcttaacttctcaaagtatatttcccact

SEQ ID NO: 37544 - DNA, 347 bp, Arabidopsis thaliana columbia
atctcatttggagattgtatacaatatttgaactctataatttgcagcacacaatatgtccactaaaatgaaatcgcagataagttgctaatatgatattatcttcataatctatatatacttgctaattatgtccatcgtttttgcatatatatataaaaaagcgcacatgccgaatctatctgttcactatatatcctgtggcaacagtctttgacgaagattaactaggcgtaggcaaccaatccgagctgcaaattcgaagaagggtctatgcatgcatgattattgattgtgggttacagtagtcaatagatataattctttagcttaaggtactacttttg

SEQ ID NO: 37545 - DNA, 537 bp, Arabidopsis thaliana columbia
tatgttggatcacgtcaaggtgtttataaaatcccgattataattaatccattggaatttataatgaattagtgtatttgcaaatatatttgacctaggatattataacacatatataatgatgagtaactaatagtacgtacaaacaatacgtcaataccataatcaaatataaaaagatggcgcaatggtgaagcaaggcaccccaaggcaaagaagtgagctcataaagtcactgaggcttgcatcttctaatattcgtctgctcctgatccctttttatcttttgttttttcatattatcaaattggtaatataaagaaaaaagcacctcccatgctttatatatagtttatatacacacttgagtcatacgagatttatgtgtataattgatataatcaaagttgttaacgacagaaggtaaactaacaatcttgaatttagcactccctctccattagtcaaatatttacatttaattatcaattacttgcaatctccgttatcaacatttaacttttactatttgcatat

SEQ ID NO: 37546 - DNA, 392 bp, Arabidopsis thaliana columbia
ccatcttggaatttctcttcagactgctgtgttattgtacacatcttctaggatggttttactgaatctaactatgttcaggtgacagtagaggggcagaacaaagatgggtctagtgtacaatatgatcaaatctgcaatgctctcttaccacaaggtctcaacccactctctgttccgccaaaagagctcgcagcctcattagggtaacatgtccccgtctttttacagtaattttgctgtacagaaataatttaagatatatgtagactgtagatcaatctcctaagtgcatcttctactcctgcagatcattttactcataatcatctattatatttgatgaattaacattcccatggttggtggttggatcaggtacatggtgcagc

SEQ ID NO: 37547 - DNA, 212 bp, Arabidopsis thaliana columbia
ctcattcatattaatcttcgcacgggattttatgaacatactcgtgtgactaggatattgtccattcagtctatgtaggcttgaagctaacacgcgtccggaaggtcgggagctctagtctgattccatgcgtccacaatacatccagtggtctcaaaaccccgtcgcggaaagtgtcacacatcctgcagacaaacggcaagcattcgcct

SEQ ID NO: 37548 - DNA, 801 bp, Arabidopsis thaliana columbia
gttgctttcatataaaacactctttctactataagaaaatacttagtatatcagtgtaataaggaactttttgaattgacaacttatattttattttgggaatgtgacacgtttagacacttttacaaaatcttattctttttgaggcacttttcagggatgaggcacttttctttgtttttggaggtaaaaaggacaattatatcatttccaaataactgtctaatcacgtaatattttctttaaaaagaaatgaaatttgctttttttttaatcttatatctgatgaaaaaggtcttcctctctctcagatcttcttccttcttctttctccttaagcagacatctatccatgaaatcaacgcaatagaaacgatgaagaaacctcattttttgaagaatccaatgtttttcctatttcttctcatcactgcttcttccttaactatactcatcttctcctttcttaaattaccggaaacacctctcgccgctggtaaccatctctgcaaactcggagacgacatctccgacgaactcggtttcttcgggaagatgatgatcgaaatgttacctgaagatctggttttcatagccttcgtaccgtcggaaatatcattcagccgagatctagggctaaaattaaacaatagtcgtccgattaaatcccatgaagacaaaaagaagataacgagtctatttaaatatatccataaaaacgagtccatttaagtatatccattaagaaacctttttactgatacatatttattcattatacaatgtacataataaaagaga

SEQ ID NO: 37549 - DNA, 569 bp, Arabidopsis thaliana columbia
ttgtgctcatgattgttggatctttgactggtgtcatcttcttctcgtataagattggtgttgaagggaaagatgctgtttattctctgaaatctcatgttgaagagagtaattacgctgagaagattgggatcaagcaatggatggatgagaatgatgttccgggaatggttgatatgtatacaacgaagttttatgaaacggtttctgagcagattgatagtttggcaatgcagtataatatgacggagttagtcactgggattaagcattttgtgatcgggcatcctcagaacacgtcgacgccttccacggcgcttataactccgtctccttatacagagaagctcatgagtttgaggactcgggttaagaatcgagagtggagtcagatatactcggaggttgatgtgatcttcagggagcttattatcactagagaagatttagtagagaaagctaaaggctttgctgttaaaggaatggatgtatcgcaacgggttttctcgagcagcgcatctggttgttggaggcggtgctaagttcgttttctctattggaaacttgat

SEQ ID NO: 37550 - DNA, 437 bp, Arabidopsis thaliana columbia
aagattaatcaatttagatcataggataagtgtcaacctcagtaaaccatatgtaagaactttcatggattcgaacaatgcaagaattttccgagactgtcattaagggatgcataaatgtgagactcaaacctcaaaacaactcttaaagctctctctcaccaacatcaacatgtgaagcaattataataaacatgtgcaatcacatcaatctctttgatatgaagtaaacaaatcgtctaacgtagacaacatatgaacatacacattgacaagtttctgtggccaaataagggataaagtagttcatcaattgggataacaaattaaagaatcgtctttctgcagaagagagtaaaaaaaaaaacactcaatctatgaaaccggttcttctgaaaacagcattccttacctgccggagatctctccctttaagt

SEQ ID NO: 37551 - DNA, 557 bp, Arabidopsis thaliana columbia
ctcttggcagattcatcaattcaaagtccggcggacggaaacttttcttctccgtcgttagagcttcttccgatgatgctgattgtaatgccgaagaatgtgctcccgagaaggaggtactcaatcccacctctgtatttgtttcattctccgctcaattttgtttctttaacaaaacccatgatgataatttttttgcaattgggttgttcaacattgctgggaaatatgagttggttacttagaagatttagtttcggaatctccaaaattagctaattagtgaaactggattataaagtggggatttttacaattgaaatgatgtcattgatgaggtttggtgggtgaacgcaacaggtaggaacagtgagtatggaatggttagctggagagaagacgaaagtggtgggaacatttcctcctcggaagccgcgtggttggactggctatgttgagaaagatactgctggtcagactaatgtttcgcaaatgggttgctcggaagttcgaggcacttgtgcacgtttctgcttagcagatgacattctgtacag

SEQ ID NO: 37552 - DNA, 572 bp, Arabidopsis thaliana columbia
ctatagttctatgagaatacagtgaaataatgccactttaggtaatgaggttttgttgtgtcaatttataatgatgatgactgcaactaatacaatagaaatactcttgtatcaacttaaaatcgttgcggaaaaggttcaatttgtgtctaaacatatatgagatcacattgttaattgtatagcagattcaaacatatgttttaaagaaaatgaatttactgatatagaagggactaataaaaggcaagaaaattcgtaggtcgattatggaagattaatgaaaaataacaaactaattcaacaataacatagttctaatcaaattgtttttttcttgctttgtcgttatgactttatgccattttattctaccatttttgtctacgctttcgtcattctcggtgttaccaatcgagcccatgacatcggtaaacatgaatacactataatgcattgcctacgcatatgtttatctttagtattttaggctttagtcatttattttaacgtaaagaagtgtgaacaatcttttaataaatgcaaaagtagaagcacgaaggaataaaaaa

SEQ ID NO: 37553 - DNA, 406 bp, Arabidopsis thaliana columbia
aatccacatcgtgtaatattagtttcgtttcaagcgttactcaaatcggcgttctctaagcttcgtttacggtctttaccaattgagctaacgacactcggtaataaagaacaattcaccaactaagactctgatttgttataatctgcatagctataaattcaaggagaccggatttgaattacattcattaggtcttgatacatcatgaacttttaatcattgatcatccacgcatacacattctcacaggaatacaaaatgcattgaacaagccagtgatgctgtataaaacagcgctcttcatgtagttaccagctgttactcgtgctgatgctattattttcacttcctcggagttctctcaacgaagcctcggcttgtgccgtgttaggtctatttgatg

SEQ ID NO: 37554 - DNA, 651 bp, Arabidopsis thaliana columbia
ttgcccgcgttcttctcctcgactaaagaagcatgtgggccacgcttttgtgggcctctttcctatccatatgtcaatttttagttggtcccggacttccggtgcgggatccaataccaacagtgggttgcctcccaccaagtgcttgtttaatatcactagcttgaccggattcttgagaatcaatgggcacgagtgcgggaacttgttccgaaacaaggtcaccaataagtcaacttcatccttagaaccttacaaaccactctttttacagatttcctacatttttctttccactccaaagtgagaatgcttctagctttggaaaaaggttttgaggttcctttacactacaccttatactcgatggtgtctcctacacgctgtagtggtatcaaagtcacatgaggatcttttgtgtctctattcaggacttcctcaacatcactcaagtcaatgtaatcctttacacattcagcattagcctcatcatttgtgtctatagagaatggttgacctcaatggtgggattttcctcatctttctcatgtcaaactccaaagcatagtcccaacctgaaggttgatcatgcttctctcacatcaattatataccctgttgtatttaagaatggcgtacctagaatgagag

SEQ ID NO: 37555 - DNA, 467 bp, Arabidopsis thaliana columbia
tagtaacggtcgccagtgtgctctaaaggggtgccgggtttgatcttgagcatccccacaatgccctggccaacgccgccacgacgacgtcaccgcactgccgtggtcaccggtagtaacggggcctgcattcagccacaaggcaagccagtcaaggatgacgatcctcgagtccaggcggttgggcggcccgaggacactggatgggccaacaaaaagtgggtgctaagtgtgcgaacggcaaccctgaaacggatcctaacctcccttagggcttagaggccccgacaaaaggaggagacggagcttgttccatgacagcacccgtggaccgcgccgtgtgatgtacggcattgatgtgcggttctggaatggcaggattgtgattcgtggactcatgactcgccaggatcgagcatcagtattcagcatgtcttgagccttcattctaccaggttctccgtatg

SEQ ID NO: 37556 - DNA, 595 bp, Arabidopsis thaliana columbia
caagttgagcaatatatacccttgttgatgaggtttggctgccaacatatagattgttgtcaaattgcattcgatgcaatttgaaaataattttatacccaaaagcccattgttctataaaaaggcccattatgcttttcttttttttgtatcttgctcgtttactttcacgaaactacaccacaaagtccagtaacataagcgtaatggatgtgacagtgacggcaaatattcccgaaacaccaatgaagagactcgaacattttgattttgggacagactcggtgaatattaaaagttttcggacaattagtatatatatcagaagttctggaaaatactcaaaacagtaatacttcttaaatatcaaaacttccggggcaatttattatatatcagaagttcaaggactttttaagaaaatcgtaaaagttcctggcgttttgtagattgaaaaagttccggggcaatttagtgaatactataaggtcaggggcaatgcagtaaacagcctccaaaagtcaaaattctacaaagttttacaaaataagtcaaagttttaaccaataggaggaaagggtttcagaccagagag

SEQ ID NO: 37557 - DNA, 612 bp, Arabidopsis thaliana columbia
cccgaatcttgctattgttgagaaataatcctaactgaagatgtgaatctagaaacggaatttgagctgcacaggctagaaattcgtggacaaactcatctactgaacttgtttgatgaagagctgctaattgttcgaacggagatgcggtaacgtcttctccaaactgttacattaattctatctgaagctgtacccaagacagtgttggaattagccaacaaagctactgtaactagtgcaaagcagcatcttccatactcatgaaagcggtctcagccttctgaacttcatgtgcttgctacaaggagaaatattgttctactcgagccagccatcatagtggatcatcaccactgaagatcgacatcttgactagtttcacaacacatgggtggtgattgtgagtgtaacacccgcccttccatataggccaagacggtatgttattcatctgatcttgccaaaacgttttctttaaactccacacacgaacaaaatattgcacataactccccacacttactatcatgaggaaaaagggaaaaaggggtgagtaaagaatactcagtgaggggaacaactctgccactgaaacatagaacattttat

SEQ ID NO: 37558 - DNA, 543 bp, Arabidopsis thaliana columbia
attctccaaaggaaacagtcagtgcacacttgtgcacttccccttctctttgcaaacaacacaagaactggccaacagaagtgtaggctaacattctcctacacataaacaatacgggcaaaagcccaaacaaaaagaaagcccaataacttaaatgaaaagcccaatatgtaaacttggaatttttttgacatcagacttcatcaagtgacgaaaaaaacaaaattctaatttataaattttaaaccatttctgtagcaattaaataattaacgaaggttcacccaaacaaatcatattttaactaatttataataaggttttcttgaattaatattccttagttgcgccgacaaatacacgaaatgaaaatataagtttgttataaatttgacggattttaaattaattcgatgcataaaattttcctttttttttgcttaattttgtttttgttttcttctccagtcaaagaaaagctctttgcgcaacaaaataacagaaaacccagagacaagtgagagaactactagagagaagaat

SEQ ID NO: 37559 - DNA, 526 bp, Arabidopsis thaliana columbia
ggttgtaaatattcaaaattattggtatatattaattaatagtctgtatatataactcacaaaatgtcattaatatttttcagcatatttagatatcatttagtgagttatatttttatttgatatttacgcatccttgagacagttgaatttgcaacatcaatttaaggttatagaagaaaattaaacgtagaaatgttttatacaaaactctttagtaatcatttaaaatctttttttttatatggaattgaaatatgtttccaagtaggacatacaaaataaatatgtttttagttttattttcaactcgaattttattattggcaaggaaaattataaacaagatcatctatcaatacacgtacttttcatgtcaaataagaaccaaactgcgtctgtccaaagacaaacaggagtggtcggtttgtatttttgctaccgcctaaaacattgggacgacacaactcaactccaacctttgacaaatcaaaccatctcttctctgttttagcaagcttcagat

SEQ ID NO: 37560 - DNA, 378 bp, Arabidopsis thaliana columbia
tactgtggttccgtgcatgatatacagttttacctgaaactccttaacaatatctgtgttgaaaaaaatggctccaaaaagaaccaaaactggtaacaagttccccacattttttattcgaatatttttatatgtttaacaaagccatgagtttttggtttgttcggcgcatgtggttatgcatgctttggtttgttctatagttcatgggttcaaatccacccttcaacattattattattcttatttttaaaatgcttaaaacaacatagttttgataatttgacttatactgtttctaaaatcttatacacgattaaaggttatacggggttacttttgatattgcggtattgaattgcatttatttaaaatgaa

SEQ ID NO: 37561 - DNA, 600 bp, Arabidopsis thaliana columbia
gaagctggttaaatgaaatactcttttcgcgagagagggtttcattatgttgactctatataaagtcttcttcttcttcttcattgtattcattcgaaagtgagagtttgttattctgttgtaacagaaagctgagagactccattgttgtgagctcgagcttgagacttgttcatctcttgattttcgtggattgccaaattgattcgaccccagacgtagacgtgatcacatcgatccgttgaactgggtaacaaatcacttgtgtgctctgttttctttctcttttagttggttcaagttcttgagagtacaaacgagtgatcaagagttgtgagagaaacgtttaatcgaagatcagagttgtaacatctgtttaatcttttttcaaatctataattaatgatgtaggtcaaactgtcgtaagaccactctctcaaataagagatcgattgtggtatttaagggttgaattccacaaagctctcggataacacaatagattaagattttgaattaagctaaacaaaagataagaaaataaaaacaaagcaaagtaagcaaatgacagatgatgggggttgtacaatctagatgaag

SEQ ID NO: 37562 - DNA, 555 bp, Arabidopsis thaliana columbia
  unsure (1)..(555): unsure at all n locations
atagtgaaatcctggtgcagagtgaaccacaagggagaggtctttgctgagattgatgacntagtcaacaaatcgacattatgtctataatgcgcgattgttttcctttatagaatttatagtagactggacaacacgtaaancgccggaaancgacccttttgaagtatacacacgaatatgagtcagatgtacaacgaagaaatcctttttaatgtctctatcgttcttacttcttgccagtaaaatgaaaggcaattgttaatctaactccaatattgattgcatgtacgagcattnngcgcgtttgatgagtatatctggaaagtatcctaggtggttttgaaaagtaccaattccaatgtgtctatgggtatggcatctaattgaagactgacgtacagtggacntaaattacgtagtgggccgtaaagatttacagacctagntccaggantttaagttttnctcgactatcgataggaaaantttagggcagagaatagaacctngngacgcagcgggttagaataatgaaacgcaaagtataaagag

SEQ ID NO: 37563 - DNA, 843 bp, Arabidopsis thaliana columbia
cacctataagacaaagctcgagctgctctaaccctaactataattgagctaaaatctcccatcaaatcgagaacccaatagcaacaatcgaaagaaaagtagctaattgaaggaggtagaatcgttcctgaagctaacctctctgggatgagtagaatatggatgactagcgtatctagaagcttcaagagcttcttctagatcgagctgcgatgcggcttctcggccaatgcggtcaccaatacaaattcccgcgctcgtcacatcacgcatcacaatctcatcgtcttgtgacatcttattggaagaataaacaacactggaacgaatccaaaaccacaataaaatacgcggatttttaaacagagaaccctagtgaagttcttgggagcgagaaaaccaaaaccctaaatcgattttggctccctcgcaaaaccaagagagcgggaataagaaagagaagttcaaaattccgattggagaagaagaagtgagggagaaggaaaacaaaaggtgtctgcctggacacagtaaaagagatagtcgcaagggtttaatacggacgggacagggtttctctcggaaaatgctaatttgcctttcctttccggctaaacaagtcgggtcgaactttgttgttgccttccccgggtcggggttaattcgtttcaaattatttttaaatttttttaaaaattcgtaaacaaaatattttcaaattgattgtaagattatagttataaatttggtaattattatatttatagaaatgatattattttaataaaaatatataagaaattacttattttttaataaaataaatattaagtacatttatca

SEQ ID NO: 37564 - DNA, 470 bp, Arabidopsis thaliana columbia
ctagaggatcaaccgtgcatcagctgtgaagatgcgaggtctctttgaaagattccggagctctgtctgtgctggtagtgggattgctgattttgctgactccttgcgaactttggctcaagctttagccaagtaagttcccatctgtacgcttcccaaaaagataaccttagttctttttctcttgtgtatatggcagtacttatccactttcaagctcttgttctgaaaatgtttctctgaatttgcatttctcctacttgggaatttcacagctccgttaatgaaaatgaagatgatggtactactgagttccggaaatgcatccgagtcctggcagacaaagttagcttcctctccaaacaccgggaggaattattggagaagtgccaaaatcttgaagccacaagtgaacagacaagaaaggatttggaggaaaagatagagctggtgaaaacattgtacactaa

SEQ ID NO: 37565 - DNA, 597 bp, Arabidopsis thaliana columbia
gagccaatgcagccttggtcaatgtaaattctaacattgatcttgcaagagcattcagactcatgaggcttcctctctatagaaacaatcctcgcatccacccaaacctatgcaagaaacagatacagagtattttgatgagtttgaagatgcagagtatttgaagaatcaaattcacgcgatttcagctacatgtaccggttccaagtcatcctcgtggatacgatagagaacacaaacatcgatatcaggccgaagaaacagatacagtcgctcaaagccgcttttcttgatctgagacgaagcctttggaaaggacggatatcttccaacacataaccattctctaacagacgtattgtcatcattccatcttcgatcctcatgtattccacaggcttccatgtacccgagcagaagaactcgaaagctaaagagtaagaaccggaacattgttatccattagtcaaagtaatccagtctgtactttggcatttcaatccaacaatttccaacttctcaaagtactgaatggtttatactttaagtcagctctgtgggtacttgcacttaaatgagacagaagaaattgatata

SEQ ID NO: 37566 - DNA, 413 bp, Arabidopsis thaliana columbia
attcaatgatatggactcacacgttcactatgattgtacggaaattctctaaatcaccgtgtcattcttttctagccattaaacgatttacatgaatacattaatagaggaaaattgggcatagatcatgtaaaaaccaacatttctgaaatactaaccaacaataacttttcttttcttacataaaatccatatactttccaattcaattatttacatgtaaaccaaattttaacagttaaaactaaaatatcatgtagaaacagttcaaagttcaaaccatatataaaagaaatttttagttttgtaacgcattaatttttaattaagtatccgcgattccgcgtacataatccttttaacgtgtgatacatcgattattactgcacaaacagtttttagttttataatgg

SEQ ID NO: 37567 - DNA, 435 bp, Arabidopsis thaliana columbia
cagaggtcaaggagttagccgaagtgccaacaataggaaaattggaagaaccaaaaactctgctgccagaaatcaaaggggtggccgaagtgcagcaatagagaagatggaaggaccagggactgaaaaagcaaaaacatcagaggttttaactccttcagcaaaaattgaggcaggaaaaagccagaaaggtccaaccgtaaccccaaaagaaaaagaatggttattgtattagatgttttagagacaattaaatcttcgagcataacttcaaagaaaactgttgaaacttctgaagtgtctactgaagctattggtgctgaagcttcgaagcaacaatttgaaactgaagccgggccttcagaggcagccaaggtaaaaccttttgaaaccgaagaaacgaacattgcagaggcaaccgaagaaataaaaata

SEQ ID NO: 37568 - DNA, 509 bp, Arabidopsis thaliana columbia
tgaattcttaaattttgacaatattaaacatgaaattgaccaaatatttcatttttctcaaaaataagaattttagtttgtgtatatatagaatttagttaacaattatgtataacaacaaaaatgctaaaaatctatataaaagttactattagtttaaaaaaaaaaatagtattagttatttaaaagttattacttattagtgtttatttacaaatagtattaatgatttaaaaggatgaaagatataattcttattaaaggacgaaaataataattttggacagatttgggttttatatctgaaagactcaaaaacctatcgtcatttatcttcaacaggcggaataacggagatggccgccattacagctctcactctccgctctcctgtttatctcccatcatctgccacaagccctagattccatggcttcaccaatcaaccaccaccagctcgtctcttctttcctcttaaccccttcccttctctatcaatccaaaaccct

SEQ ID NO: 37569 - DNA, 531 bp, Arabidopsis thaliana columbia
tgagaacttctaagaaaagcagagttctacttacgctaatatgattagtagctgaccctttcataacagttcaagcatatcaactcgaaaagaggcaagcatcttgtaaaaataagatgcacttgatcccaaacttaagttctcttcaggtcgtcttccccaaaaaacttctaaggttttgagtaatttactgtatagcttcataaagaacatgcttcacttattactgcttccattcagaacattcttcacttactacttgcttccaaacaaaacattcttcacttattacttgcttccaaacaaaatattcttcacttaatacttccttccaaataaaacatgcttcacatataacttgcttccaaacaaaacattcttgatttgaaatgaccgttaatatccttaagttaagatttttttcatgaggccttcatcaaatgtggggcttggtcttgttttacttcaagcaacatacccctgggaaatcagtggaatgtttaatttctatgaaaaaagactccaaacaaa

SEQ ID NO: 37570 - DNA, 623 bp, Arabidopsis thaliana columbia
  unsure (1)..(623): unsure at all n locations
tagaagaggaatacacagctctattgtcagatgagtccggagaggcagagtatctcagttcgctacagagtcaggctgagaaactgaaggtgacactgattttatataggcgtgatttgattactaactatatgataatgaccacctccacttgttgtagggaatttcttacattgctaaatgtggttgtggagaggaatacagtgttggtttagattaggccaaagttatacatgcactatcaccattcaagcagctgtcaaactattatcttaatatgtgaacaaatcgagaaccaaaagtagctttatgtactagttcttttgaatctgtggactgggttaattgtttttagtttgtagaaagatacaactatcatgctgtcttgtggcagtatataatgtcttacagtttgaggttctctatatgcatgagaacagcattttactcttgatgatgcaaatatggccatatgggtatagcattaaccttaaatttttgataaggtgtgtgcatatacaacattgtatattaagccctcattataagccttaagactaagtcacttactanatgcgatctaaaaagatttgagttgcatcgacatgttgagtgtgtgtatg

SEQ ID NO: 37571 - DNA, 636 bp, Arabidopsis thaliana columbia
aacagagaactggtgggtatgtcttcaaagcaacgacctccgatgttagatttgatcggagatagttggtgacgaagagaagtttgtcattcgattaacagagtacagaaatataagtttgttgactgaatattagacattacaaaagcttgagttttgttttatatgcgattaataataaacacaccagaggatataagctaagttactaagagagttaggctgagaaagagatattacagacaaaaacgacgacgtaggaagacaatagacccagagagagagaacaccagagtagtagcagttgtcacagtatcagtgatttgttggttattaccaatcttcttccttgttttgttgtcacactgtcttctaattcagtagtaatgttgctgatggtggaattggtggtgttgatgatggtgtgggtggtaaactggaggagctggagcaggaactggaccattacaataaccgttgtacgctgggtacctgatagagagccttggtatgagcctgggatgatcccggagagtatggataaggtgggcttctgttgctgtagactgttgtaggtggggatgggtaagctctggtgaacgtattgaggagagtgagagggtatctgatgacggg

SEQ ID NO: 37572 - DNA, 542 bp, Arabidopsis thaliana columbia
ggtgagcgatatcgtatcgattgtcgagtttttggatcagattaacggttatcgaagaacacaacaaaaagaatgttttaatctcgttagacgattgaagattcttattccatttttggatgagattcgaggttttgaatcaccaagttgcaagcattttttaaatcgtttgaggaaagtgtttcttgctgccaagaaattattagaaacttgcagcaatggcagtaaaatctatatggtaaaactcattttggtgacaattttttgattgattgtctcctacgtaacctttaattgtgttacggttattttgattataggcattggatggcgaaacaatgatgacgagatttcattcgatttacgaaaagttgaatcgtgttcttgttaaagctccttttgatgaattaatgatttctggtgatgcgaaagacgaggtaaattatgtgtccctttccgggtgcgatgtacgggtctcggcccaaaacttttcggatatttaactaaaagtttgtttttcattctttatctacactgtgtag

SEQ ID NO: 37573 - DNA, 580 bp, Arabidopsis thaliana columbia
tagtaacgtccgccagtgtgctctaaagcagccccaattgtatgacgacatatctatatacgcttaccaacatatagcatacatcatccattgaaaatgctctcacgacaccgaattcttgcattctggctattttaagctggctattttaagcttaggcacagaactttccgctgcatattcattgctagtacttgcaaagccgaaattcacagaggcttctgaccgacagcagttatgactcgtccctggtgcaccacaacaccttcctcggtctctttgacggcattcgcaaataggctaatccacgcctcgcgcgaaaatgacacatctggcgcctgccgttttgaagggaaatagtcggcgagttcctcccacaccatcaggtaatcttcagtccagcccttgaagtcgtgcttcctcttttcctgcactagtagtcgagcattctgaaagccaaattggtttagatgtgtgtcaagggcatcgatccagtcgttttgaaccccctctgttgcatgcgcccaggagaatctggacaatgctgtcgcaggccgtcgtggacactgtgcggaaggag

SEQ ID NO: 37574 - DNA, 565 bp, Arabidopsis thaliana columbia
tattattagtaattttttttatatatacagtattctatatatatatatatatatatatagagaagtgtatttaacacaacttttactaaggtaacaatattttgttttgaccaaaaactaatgagtgaaatgtgaaaacaagaggggtcgcctgaacttattaaaaaaatacgatatacatcacacaatctcacaatacataaagttttttttattttaatttgataaaccaaaacataaatgttgtaaagacatacatctattttgaaataaatatgcatatttatattttaaactatgtagaacaataaaaatattaattaatgtaagaataaagagtttcacatgcaaaccctgtttaagtttaataatgaagtattatatactattttcgaaatctaatacatcattattgctaattaagattaagaataatggagatataaatacgggtgaagaacacgcgcaattgcggtgggcacaaggaatctgcggaggaggaagaagcatataccccacccaatctcaatacgccatgccctgggaagtaacaatttttttattc

SEQ ID NO: 37575 - DNA, 439 bp, Arabidopsis thaliana columbia
tgacggaccggctgaactacttcctgatttacccgctgaactaccttctaatgtactgcaccaaatgaaacaagacaaggaaatcttccttactctacacttagacatgtcaaaaagctttgtttggcggcctgcagagtttctaggtgacttagaggattcactacacgctataaaatacaccacaccacatttgattggaccaattttgagctatacttaccatatttggacccgtttgtcataaatgtctcatggatctttccccttttgtttgagcgtcaacttaagacattccataacatgaagaagcttccaagacgtcacaacttcctctccaagttgagaagatacaagacacatctcagttaccttacttggacatattctacaataatgtccaacgaccatattttattaaatattgcaatttttttat

SEQ ID NO: 37576 - DNA, 540 bp, Arabidopsis thaliana columbia
  unsure (1)..(540): unsure at all n locations
atcttttgtataaacaaggttttgattcatcctgtgttttggagaagtaatattacagtatgcagacccaaaaggcaaggtaaatattaatttttggctttgtatagttctttgcatttatagctgattcttcccctctcttgtgattgtcttgtgtgagttttgcactttttcaacgctgaatcttgaaggttacattcttgtggtcctgaatacttattttttttcctatttaatcaaatcttatcacaaattttctctaatcttttatcgaacaagaagaccaaatctatgtagcaacaagtagtgaccatcaatgatctcttttggttttctgactcgcttgcaactttggagtgtgatatcttcttggtttacaatttgtcattcttttctgttttgtgtcagaaatggatctccggatgttcctaagaaggtgtctcctcgagctgctcggccactgaagatcgcagcgctagagcctgaatcttcttcatctcctatctcagctactaacagaacaccanaggataagagcca

SEQ ID NO: 37577 - DNA, 296 bp, Arabidopsis thaliana columbia
taggatcgggtattatggttaaccgccttgcccgaatcggtaaattctctggtaacttccctcattctttacattttgggcttttatgattgtacaagttagagacaaagagactgaatcaagtagttatgtttgtaagtgtgtattgtgtattgtgatgctaatactcaatgccttataaagtctcagcttttagactataatgttgtgacttggtttagcttcttttttctcggagttgacttgaaagatttcatctttatgcgtatgatcgataagaatagcttctgacttgg

SEQ ID NO: 37578 - DNA, 513 bp, Arabidopsis thaliana columbia
taacaacaacatttagatcaaaggagaagaagatttaagaaccagttaaaacataaacagaccattaatgaagagatgaacaaagtttaaagctttcaaaaaaactttgcaatagaagtcaatgcccgaaccatacaaacaaagtcaaagttgcatggtgcgttcttgacttccagtttcttctagtaataaaaacccaataaaaataccctaaaaaaatactcataaccaaccaaaaaaaaaaaaaaaaaaaaaccaaaaaaaatgaagagagaagaatccagctgtttttttcttttcttacagaagttgtttaatgaggtttgtccaagaacagaacagcaccaacagaagcagcagaacaattggagttaatgagcttctcttctctctctctggcattgaaggcaaaagaaggagttaattcccttctctgttccatcattgaagagaaagagaccccagaagaaagagggaagagagcttttaatggtgtgtgtcaagctgtagttg

SEQ ID NO: 37579 - DNA, 457 bp, Arabidopsis thaliana columbia
caggtttccatcttccaatagccatcacgttcctgagaaatcaagccaacatataaatccagagtactgttttttcttccaattcttgtaacaacaacaagaacaaagagagaaatctttagtaaatcagcactatacctcttgcttccatcttcctctccctgcttcttcctctgcatcgtctgtacttccttctggattaatcacttcaagcccttcatatcccatcaaactgagaaaaaacaccatcaaacaaaatcaaattcttcacaacaacatgcacaatcttccccaactatatcactagatcttttccagaattcaccaattaacacaagacttcgagtcccaaccaaatgaaatgatagaacattcccaaaaccaaatttactcctccgtttccacatggagaccaaatcaaagattaacataacaagtatgtgaatccagctgacga

SEQ ID NO: 37580 - DNA, 543 bp, Arabidopsis thaliana columbia
cgactctatacctgacattttgcatatgcagatcagacagaggatactttcagcgcaagattccgtgaaagagttcatctttccatcaaagaagtccgacaagtgacaatggacagtaacatgtagctcaacatcagacttcatcttatagcgtttctgctaacacactgtactctagcttgtatccattactcctctacacttgttagatatgttcacaataaatgtaagtcagatcaactgtgaaagctgataaataaatatagaaccaatacgctagtttgtatccattactcctaagtagacagaaaatattaaattgattgcggcacatataaatattagcttctgacttttatgccaatttaagaacaagtggattttcttctacctaacacagtaatacactactgatacatccaacgaccaccgtccgattagggatgatctgaaatcggacggtctatagaataaacgaagactgaacagaaatctaatggccgaatcgcacactcattgaccatataaaacggtctcgtgttg

SEQ ID NO: 37581 - DNA, 622 bp, Arabidopsis thaliana columbia
tcccaaaagatacaatcagacacaacatggaacagacactgtcaggtggagaaacaaagcaaaagaacataaaacaaaagaaaagagttcagaatcaatacagaatgggccaagaatcatataatctaaacgaatactccaaaaactgtcaggaaaaagaagaaaaaaaactcgaagatacacaagtactttgtgaagtcaaaagtgttaaatttaacacccaaactatgaaggttacttctttagggttcaaagggttattactagaaaatttctgttatttaccctaatttcttctttagggttcgaaggtttactgctactaatcaaaaacagctcaagagatcaatcttcactacaaaaaaggttgaaaatttcagctgaagaaaagtaaaactagctactatgaagtcaaaatgcacaatcttcaatgagctcaaatcaagaacgctgactaaaaaggaacacagatcgattgactaacacatcgaaacaagcaaaatccgagctagatctagaaaacccacaaaacgagaattgaaatacattgtacacgaaagaatcaatcagagagagagagagagagagagagagagagagagagagagagagagagagagag

SEQ ID NO: 37582 - DNA, 492 bp, Arabidopsis thaliana columbia
atgatgtagtttattgagatctcatcattatcagtaagtaatgagagttaaattgactttaaaactagagttaaatgtggtagagagagagaagaagacgccattgaattctggaaaaaaggaaagaagcagaacttttgctacacttgttcaccatgcacaatccactcgtccctttgctcttggttctaaactttaacctaacctaatctctaaactatggttgagtgttagtttagtggcattagatcttgttgcgttactatcatcataataatcttatcaagatttagaaaatcttaatcttccaaaaccctagattcatgaatgtaggttatacaaatgtcacttccttaccataaatagtaaaacaaaaatcattaaaaaccaatggtaaacccaaatctctgattgcccagcgtccattttaagcctctgtttcgatctgcacaacacacatacacacaacacaacacaaaccacagtctctct

SEQ ID NO: 37583 - DNA, 860 bp, Arabidopsis thaliana columbia
tcttcttctcttcttcttagaggatcaaatttactgacctacatcagcataagctttagcaaaacggcacccgaagaaacggtgatataagaggtggagaagctgaagcatacccatgaagaatcgttatctataacctcgagttcaagtttccaacacgcctgcttttgctgtaaatccatcgtcgccggcgggtcgacaagtttcagcgttgatcggaggaaattaaaaacgaaaccagggactgtgattgggcctgtattgggccttcagacattgatgttggtataacgaattttttttttttttttttgattcgaagtttggtattaacgatttttgaaaagaatatattacagtgtaactggaagatatctaattggttaaaaagtaagaaaggtggagtcaaagtatatgtatagagatttgtacatagatgcaatggttggagtcagcgaggagcgatgctgggaacaaagccgctgctgagatcgcttcctagaaggctcgacgactcgtaaaggtctcttgtcacattcgacgacgatgttgacagcactgacgaagatgacgccaattccactcttgtctccctatcgggggatgcttggagcagtgactccaagctccttcaccacctccgccattcctggcctcatctctggtgagtcgtggctacacctcagtgccaaagccgcaaacttttcaacactttccatcgaccacggctccattctcttgtctatcagcgataccatcatatccctctgctcagccgtcttcacctctcgtactatatttttccatgggatatggcgtgcataccagtcagcagctccaagaacacaactccgatgctg

SEQ ID NO: 37584 - DNA, 600 bp, Arabidopsis thaliana columbia
caacccacaactatgatcctgcgcaagaacatcccacaatcgtgtgatggtcttccaatctcatgattccatcaattgtgtcttgtattttcctttattattttgttttggactttctattttcattatttttattccctggtagtttcttttagcattccttttttctttacaaaaatacgtttcatgtcgtctaatctctaaaatacgtttttgttttaatctctaaaacaaaaacaaacatgtcgtctaaaattcgtgtacaccattccacgaatgggttcagaaatagtacagaggggagactttgaaatttaaaaggtgagaagagtaccttaaacatagaatcaagtttcataaatttacttaactgtgtgtcggagtagtaaatggtttttattatttgtaaacggtcgtgacgattaatttccttgaacttttcattatcttagggccatttcattaatggctcgctcaatgttaactaatcagaattctatttgtttcttaatcagagtttacatcgtcccacggttttaactatatatgcggcatggttttacaggtataatagctgttagtttctttaagtgagtgatg

SEQ ID NO: 37585 - DNA, 492 bp, Arabidopsis thaliana columbia
tgcaccttcattgattcaataaaacttgtattactaacgttattgtgatccccgtttaaatttgttgcatttaatttgttagtctaatatttaatttagatgtgggttacataaagttgctttgataattgggatatgtttttttctgtctaatacacagataaaggcaaatatacgatcaatcacagttttaattatttttgttttttcaatgaaacaactctgacaaagaagatttggattggccaagtgatctcacatattctaaaatgtgagaaaaacaaaacagtattttgaattttttttatttaatagaagatttggtcaattgttaacataagttgatgatgaattagttgccaaaaaacccaaaatccattataacttttgcaattaattactctgttactttttaaccctaaaaaagcatgtatgtatgttattagagacagacgactctctctactcataaaatctctctcacatagatag

SEQ ID NO: 37586 - DNA, 434 bp, Arabidopsis thaliana columbia
gtgtagctatatcggtgctttagttgaggcatagtgagaaatttagggaaattatacaatgaaagcatacaatatttctacatttaacaacacaatgaaattagaaacggaaaccctcttaattaatagtttaactgataccaatttggatcaattccaaagcttatagtcaatggcatgaaatgagtgatgtggtgggatgaacgtaacattcatgctaaactcgtaagcaaatccatgattaagaagttgatcgtgatttatttaattacatttcctaactaccaaattagagatatttaatcattccattcgcacctaacacacagcaagacataaagacccacaaacctcaggctccatcattaagactcatgtgtgcatgaacagaagttttctgttcaaacaatatcctcagcgcaaaatcaaatttg

SEQ ID NO: 37587 - DNA, 472 bp, Arabidopsis thaliana columbia
ccaagcaagaagaagattcttcttttttttgtgcaatgaaaaagattcttcttgtactgaaaacgaacttatgaaaattcgtttgaagtattagtaaacctctaattgagaaagagggtttgtcctttctcttttacattgaatacgttgtcgtttactattgcaactcagagacttaagcggattctcaaatttagggttgcttatcaatgaaatacactatcaaatctctctctatttctatcgcttcttctcttctcaatctttcacttctaaacaatgttatgttctttgttggggatttgaacctagcagcttcttcgtttgtgtctttggagttatttaatccatcatctgttgttttagcggtgattagcagggatatagagttcctgatttgagatctcgattagcagcagctcaagacatctccttagctcatgtttaaggatgatggcgctccaatttattg

SEQ ID NO: 37588 - DNA, 590 bp, Arabidopsis thaliana columbia
tgaatcccaaagaaaattttaaaggtaaacatatcatcagaccataatatcctgtcacatagtcacataattgattcactacaaaatgagagatcatacaaatataaccagataattacatcttgatattgattatttcatcgaaacatcgccaaattcatttgataagaaattaaatatttggattgattaataaaaagtgtgttttaaaagtttaacaaagaagaaactgtgtttatagtttagactattagttatagaataaataaaataaatatttatctatcgttttttataagtaatttttgttaagagcgaactttaacacccaattcttcccctaacagtttcccgctcgcgtgaattaggattttgcttgaagttcgacggttacgtggtgcgtggagactgacaaggaccaaacgtcttaggcgtgcgcgtctggagtccgcgcgtgtggaagacgtcgcaacagatttgtcatgcgtttctctaaaggtacgaccccgagacaagtggatgagggtaagagcaaaaccttcgattgatttggcggttatttctttgttagggttcagaggagtgttgag

SEQ ID NO: 37589 - DNA, 524 bp, Arabidopsis thaliana columbia
tggggacttacgatatgttcaggtgatttatgtttgagttttttttggctgttctgctatttaatctggtgcagtgtggtgatgagttttttttttctttctatagatggctgttacgacgcatagtacaaatcttcgtgctccagagagatataaaaatggttgaacatatttttctatggttttagtttcttttcacagtgatatcgctgcattgcaattagagtggtttctgagtttgaatattggtttcaggaaaagtgcaggtgtccttggtttggaactcgagaaatgagagatctcataatgcagataagttgcaagcattgtccaccgtgagtcttttggacgtcgtgattcctttagcttgtttcattcatttttatcacttatatatctctcatttgcagtacttgtggagaaagggtggccaaacagcaagtttcacctgatacattctgtctgggctaactttcagacatcaaccaacaatgtgagtcagagaccagattttcttatgctac

SEQ ID NO: 37590 - DNA, 561 bp, Arabidopsis thaliana columbia
agtgtgctcgaaagagacgaaatcgcgaatagcgaagctccactgctctagacttcttccagtctagccgcaattctatacggcgggccaagtccgcgggcctgagctagactcaattgaagttaacgagcttctcacgctccaccgcccggtcgatcattggcaccagcccgcatcaccgcccgcagccaccctgcagcttaacgtcatatgttacacttaaccaccgaaatctcccgaatcacactgctcgattagccagagagtgactggtgcaccaatgatcgagcgcgagtatcgcgggatgaaacgcataacgcgctgggtggcttttttgtggctttcagccattgatggatgaggtcagtgtgtccctgaacctttttaaggctccaaaagattgagatgaagaaaatggagcgtgggtggagctatcatcttgtcttgagagcgagactgggtggtaaggtatgtggggaggtatataagagggacgacgaagctgagtccattcagatgtctaattatttgattcccttttaccatcattttttctttgtt

SEQ ID NO: 37591 - DNA, 610 bp, Arabidopsis thaliana columbia
ttatacttaaacgacactaactaataaatgatcaacatgtaaggtctaactaatttgatgggtgtgttaacttgttggctaccatcacaccatgtaaagcatccgagcttgagagattacattattaaattcattttttttgagtttaagttattaactataggttttaccactactgcttgaatacttttgggaaacatgttcattttttattattgggttgcatgatgttattaaaaatcgaatatatgttccaacatttagtgtgaactatatatttacttgattttttgtcaacttttattgtctaaattattttataattgaaaatttaaaattaatcaacacatctatcgtatttattgattagattacattttttgtcaaaatttactttagtcttttttcaatcatggtttaattcgtttttaaagaaagtttacgtaaatgtaagagtaaatctaaatgtatttagctatatgtgcaaataactcaaagataagagtaaaagatgtaaataaactaaactataagtttggaatctcaggaagaccaacggccaacaaggctttaaacaaaaccaacggttgcgagaatgccaagcggagat

SEQ ID NO: 37592 - DNA, 554 bp, Arabidopsis thaliana columbia
caatcgaagaagagatacattctcctcccatggaaacagatgctaaagaactcacgggagctcgcagatccggtggaaatggaccattggtggctgataaggaacagaaagatagccaatcacaaccaaactcaggtgcttcaaccgagccgtgagatgaaattcaatgagttagctatttttttataacactctttgatgtaatatacgattgaaattaattgaatttaccctcccaaaattctggaagttgggggttgataatgtcgtatattaaatataggggtggtttattgatagttgggtgaaagtatgggtttaaatcataaatatcagaagaagacggttgagaagtagcttacctgtctctagtcatgatgtaattcataaatgctcctctcctccgatctctccgccataaaatctactctttcttcttctgggtgttcaaagaattagtcgttctcgcgtattcactttccatggcgggctttctctccgttgtccggcgcgtgtactcactctctacaattggatcgtctttgctggatggc

SEQ ID NO: 37593 - DNA, 469 bp, Arabidopsis thaliana columbia
tatatatggtatcgaacctatcggtgtgacggtgtccctatagtggctacccccaaagtctgtcgtctcccattattactctgtcgtctcccattattactctgccattgcaaattttggagtttgcaactccattttctcccgccttttattttgtcaactaattttctttctattgcttgacaaaaaaaaaaaaaaacgaattgcctttatcattaagtcaactaattttcttcttcccttagaaactgtatttagttactacaattgcaaaaaagggtatgattattaaacttttgaatgcatggaaataaacactataaacttagtttaactgagaaaacgcatatatacgttgggtcaaaccataatactattatctttggattagagccttacgcatactcagactccagatggtttgcagaatatttgcttatgtctactaattcaggcaaacattgttttt

SEQ ID NO: 37594 - DNA, 605 bp, Arabidopsis thaliana columbia
taaatgcaaatgtttcataaaaaaaattcttgtttgttaataaaattttaataacaaattcttcgaatttttattttccgggtgtttggtgaagttcggatattggatactaaattaaaaagaaagaataaataccaaaataacttgagaagatacgttgtatcgtgcaatgacggcgccatatatactcacatcgctctctctctcgaactccaactaacataaatactttataatttaaagacagtttaattgatggatcaaagtggagtttgtcgttattgggttcgtccacgtaaagccatgatagtgatattcatgtgaaccaaaagacagattcagtcggcaaactctagtggccacgtgcgcatttcacgttttcttttgtcctttttaaaattttatctttaaatcttgtttttttctgcattatgggaccccaaaccggcgatgtgtctctgccggatacattgagtctagagctattcggtgatttaaagaatggttaaacatgttgatttgctacattgaattgcaattagataaggttgcacgagtgataagactgtcgtgcatattcttaatatatttagattgagtagtgt

SEQ ID NO: 37595 - DNA, 520 bp, Arabidopsis thaliana columbia
cttcttcctctcatatcatcatcatcgttgagctctgccagtctccgagaacagaattatccttaaaaaaaagatcgaagcgaatcataacaaacaaattttcgggggctatttttttttgcatggtgttattcatcgtgtccatagctaaagcaagcttcaattcgttttcctcttcaggtaatttatactctttgataatgtaatttacacgattgcgtattagtctgtttcagctacgtgttttggtttcatctgaactatttacagtttttgagaagaactttgatttagcggattgggatcaaatctggattcattttcgctgattttgctaaataaagttagcgaaattatattttaaaaaaaacttagggtttgatgttctttagattgatttggtttaccatagataagaattggaccctaataatatttaggaatctgagaaaacattcccttgataaagacggccttgggaacctggtcccggggaatttggtggggctccggttttttt

SEQ ID NO: 37596 - DNA, 142 bp, Arabidopsis thaliana columbia
aactggttaactaaccactaggtcaagagggcttccaaaaaaaaaaaaagttcgttttacttttcagttaattttggtttttgttaacggaagttaatgttccgttatttttaagaccacataaagagaaaatgtctagtta

SEQ ID NO: 37597 - DNA, 483 bp, Arabidopsis thaliana columbia
atgtgttcctcttagaaaactgactagatgtcttcagagaaaaagaaagaaaacggattaagtccaaaattaagatcaatccgtattcaatattttcttattagattttttttttttgaaaacattcttacacaaaaatagaagaaatcacatcttgaagtgaaaaatgtatcatacatatttttttgtttagtcttgaaacaatacaagagaaatagaatgacaagaagtagtattgtccagacaactaaacgtgagattggtaataagagcttttgattaatggcgaccgcgccgccaccactaccgcttccgctgccggaaccttgaccagagcctccacctaccccaacacctattccaattccaatcccaatgccgacgcctcctccatgccctccaccaacaccaccaccgtgccccaaacctcctcctcctccacctccagcaccaccaccgccaccgagtcctcctccggcacca

SEQ ID NO: 37598 - DNA, 540 bp, Arabidopsis thaliana columbia
tgtaggtccagcagaatttcaagttgcattttttcggtttagctctgatttggttcaattcgtttatctgttctggtttgctttgatttgataggatccaccaatacggttcggtttcccgactattgttaaccgggtttagggatattggttattgacaataagaacaacaaaaaggctcgagacaataacatggacgttggcatttactgttagctgccttggtttgctagctgtgttacattgcttttggttaaatagataaccaaatcagagaaagtacaaaacacaggaacaaatatcaaaaagaaaataccattggtaaccattttctagacacattgactcatatatatatatatataccattcaccggaaaaactggttttgaccgatactgccgtatgtccctcttgtgtgtgacgcctcagttatgttcttctcagacaacaaccgtgagaagcatctgacacgatacacctaatgcagaaatcaaatagccattaggtaagagccataataactctttcgagaacatga

SEQ ID NO: 37599 - DNA, 541 bp, Arabidopsis thaliana columbia
aaattctataatcgaaaaactgaaatcgaatggctacgtatcaaaaatatccgaaatataaacacattttcaaaaatattatttctttctagattaaataattaaaaatagttgaaaatatttataaaatatttaaaataattgaactatccgaaaataactgaaaatatccaaaaatgaccgaaaatctcccaaaataatcgaactatccgaaaatattaaaagtataataaccgagtggatactaaattttaaaaccgaaagaatcagaaccgaaacaaatattcaaaataactgaatgaatactaaactttataaccgaaaaacccgataaccgaatgaatatatactaaaaccgaatggataaccgaacgccaagttattggattttctaaaaaagattaaaggtttcgagcgaaattattatagctgtttgggatatatagcctaagggaaggtcatgcagccaaagtgaactttctcatggagagaacatatgagatatggcaatctgtggttactctttaccagacattagcat

SEQ ID NO: 37600 - DNA, 558 bp, Arabidopsis thaliana columbia
gttgtatatgatcaatttgtattggtaactcaagaaatgctgtcataagtgcacttagtccctatagattttgttctctaattatgtttttaaatggcagtaaatactacctttgaattttgacacatgaagtcataatgctttctaccttgtaatgtctttcatcctttgtcgtttatgttctcctacatgcaggcagagatgacgcgaaacaattagaaacgcttagccctcccatcatgaagcaaattctgcctttagtggaacagctccctcccttgtacatggacttagtaaagggaagagaagattttgttccaaaaccagaagaaacaagacgccttgtaggtgaaacgcataatgttattgggtttatgtctcatcatggagccttatctcgtcctaataaaccatctatcttattccctcacactaatcgagattcttcctaataatgtacagataagatcctactattggatctctaggaatctgttgataaaattcgaggatgattcaatagatgaacatcaatcctagctcaggtgcttggtgtgg

SEQ ID NO: 37601 - DNA, 355 bp, Arabidopsis thaliana columbia
aggtttggtgatagtctactggataagtggtagcgtgaaatcggaaagagtatcacgttacgcgacaaggtcgaagttgaaggtcaattcatgtaccatgaagaaaacgtctattatctggttaagaaaggatcccctgttatttgtagtgtaacagctgataagcgtggcaagagcgttgtagaaatctcgataaatgttaaagagccgatttagcctgtgggttgtttggcctgggatacattagcagcctcgattttgcccaatgatggggcctctccagctgagatgcttgcctattgtactcagattgacaacgtttatgttgtctccgctaaaggtgtgggcaataagg

SEQ ID NO: 37602 - DNA, 289 bp, Arabidopsis thaliana columbia
  unsure (1)..(289): unsure at all n locations
ccattcaactagagggtacaatgttgaacattctttttaactggaaagttgagatctttcctgacatttacaccagacacactgctccaatgtacattccatatactgcgccaaatcaaatacctggacccatgatatcgctaaaatagttctccactatgccttggatgtttgtaagtgctctaagctctaaggnagtttggaaatttagtgccccgtttgaagttacagttttgattccctcgagtgtgagacctttctctctagcaagttaagcttacacagaatt

SEQ ID NO: 37603 - DNA, 475 bp, Arabidopsis thaliana
atatctcgacaagattgatagttgttaaatttctttcaacatataatgttatattatattcaaacataaagtaagaaaaactcaacgcttttgactacaagatttagtatatataaatatgggaaatttgcataaataactaacaaaaaaaactataattcactaactaaccatcctaactatgtaattataatattctctgtattatatgtaatattactcaatttgtccttgttgcctcaataccttcagtagcaaccaccaccgctggccaccaccgccggtcaccaccgccggccaccactgcctgccaccaccgccggccatcaccgccaactccgaccaccatctattccggtcaccaccaacaccggtcaccgtcactgtcggccaccatcaaatccggccaccaccgactccggccaccactaacttcggccaccaccaccgccaccgacactgtcggccatcacca

SEQ ID NO: 37604 - DNA, 433 bp, Arabidopsis thaliana columbia
ttctactagagtaaagttttggctacttggttgctatagactatagatcttgcagagaaacagcatccacatttaaacactatagaactagaatttcaagagctgaaaaaagttccatttcatacttagagaacctgaaccaaacagcaacaataccaagaagcagagatcaagacatcagagacacggagccaatgacagaacatattaggattttggtcgaactaggcatcaaggttcaagaacatagcccagagaagattattagttatctctaaggatacacatagccaagcaagtacacgagacgcggtcacagaatcacctatgcttatgcaaaacgttatacacgactacccacaagatcatatgatgcaattagtcaccaaaatattgtcagcttcctagtctaaagaaaacgtacaagttacat

SEQ ID NO: 37605 - DNA, 619 bp, Arabidopsis thaliana columbia
catcatcttcatcaagagagacgagctggatcatgagacgaccgttggatctgtgagctcgaaaatactcgttgcgacacactttctcttccttgagtaaaagccgaccatcactcgtgtactctcgcttcagcaccgacggcacgtgcgacggcaacattggaggtgacattatctcacgcgccactgtctttttctcctctcttctctcacatggcaacttgacatcaccggtcttgtcggagaaagcgttgaagcagctctcttttccaatgtagcctccgttgtaggagagagatgacatcacgatggtcgagttttcttggtagtgagaactgagagcgatgttaccaaattttgaaagctctctctgtgtctatagatcgagttagtgaggttgagttaaataggagttagattcatccattcttttactaccattttggaagttttctttatgagaaactaaacgatgtatacagagaaagaaatacgtaaaaagaggaaagaaatacagaaacacatgtgaatatctatccattagttaaatggataaaatgaccaaaacaagaataactttgtttcaccaaatgaataactatacaccttgacaacaaca

SEQ ID NO: 37606 - DNA, 252 bp, Arabidopsis thaliana columbia
ctttatcgccgaacgagaaggtttgtgaagaatccttgatgactctgtctcgtagccttgggtttgtgaagaagaagaaaagatcaagacttggtaggtctgggaagactttatttactacgtttcttgaaccgagttctatttttgatgcgactgatgaagaattagaagtggcggattgtttgattctattgtctaagagtgctcccaaggttgtagacgaattgaaaagtctttctgaggcagtacgtg

SEQ ID NO: 37607 - DNA, 485 bp, Arabidopsis thaliana columbia
actcaatagaaatatgattagatggtattgaagccatgtactcatgtgatgagtaacatagtttaatttccttggatcacatgaactatgcctagaaaattggaaaccttttctttatgcaccaacttatttgattatttaaatctgatttttcctactggttcattaagttttagtgaaaagagtgctctcgaagcatctccagttgttcgtgagaacccccataaaaacacttgctttcaaagtgaagaatatacaacatactggaaccaagaaacttaatttcagattcaaatacatgaatatacacacaaatatagtttttcgctgttttattgtccgataaacggataggtacacaaaatacagcaaaggaacgataagaaatcaaggggttgcttcttgcacaagaaatgttttacatgtcttaaaccctcgaaaacatcacaaacaggccaaatgttatctttttggcttttattaca

SEQ ID NO: 37608 - DNA, 142 bp, Arabidopsis thaliana columbia
tgatcctatttcctctcattgtcacagatccgaggattctcttcgtttacaggtatttcgatttcttcaattttcgatttctgtgtcactgatcgcttacggttatggaatttgatcttgttgttttgatgcatttgttgat

SEQ ID NO: 37609 - DNA, 455 bp, Arabidopsis thaliana columbia
taaagacaggactagtgcatgtgtttatgctgtccctaatttactcaaggccctaaagattgtgtctttgtctcgcgtcgttgtccacttatctttctaattaaattttcaacaacaacaaaaaaaaacaatttaagaaaaaaatatttgatggcgatatcaataactagatttattttcctgatataaattatggaggtttttagagataaacgggtgtgatttaagcaatatatgtatgctcaaaatgatttatgttaatctttcacatcaaattggttgtcaattgtcatcccctacatcatcaaaaaggacgttaataattagaataaactcaacttttaatttagatttcaaagacataatgagattacgtttttaattgcccatttacttgatacttcgaaattcgattgagaataatttgtgacgttcaatgaatcgatgttacattg

SEQ ID NO: 37610 - DNA, 519 bp, Arabidopsis thaliana columbia
aaaagattctacatatttatttaatttctccttcgcaagttcacattagatttttataatttgttctgtttagagtagtgtttagtcatcattagagacatgaatgatgattgatttgtttgattaagtggataaaaactgaaaagtctctcacatgagtgtttaagacaagcatgtaaataccataatcctaataaactccatccattacataatgcattgttcatgtctaatattaagcactgggcttgttgaactctcccggatttactggagaatgaagacccatggatggctctctcctctcaacctgcattgtctcacggcgcctatcataccttggcctaggacggggtctagtatgacgctgttccgtgaacctgtactgtggtctgggtatgacctttccttcaacgtacaagtcacctgaacatgagagccatagacagatggtatcagtattaagaaccatatctcagtacccaatcattcagacaaaatctacaaacgttacacacc

SEQ ID NO: 37611 - DNA, 577 bp, Arabidopsis thaliana columbia
ttttttttttttgaaaaaaacattaaaacaattctactcgagggagtaggggatcatgaatgtaagtgtttttttttttttttttttacatgtgaaacataataatgggaagtggtgagttgttgcttgggaatgaaacaaaggtagagtcttgagatcgtttggtaggcatgttttttttttatcctcaaatgatcatatcagtcattatccctcttttttttgcctctctattaatttaatctcccctaatttagtgagtgataataaaggagttttttttttttttttagtgagtgataataaaggagttagtttccatcaaactagttgtatgattcacagataaaaaccaacaaaataaataaaaaaattcgtacgaacaaattgaaaagaggagtgaaggtaagtaagtcaacgggaaggttgtgagatggagtgagcaccgtttacgctacttctccactgtgtgcattcaatgaagtgattctactgaaaatcttatgtaaactatacatgcatgatgcattgagatgcctatgtatttataattggcatagattagtaacacatgcgt

SEQ ID NO: 37612 - DNA, 510 bp, Arabidopsis thaliana columbia
atgttcagagattcgagaaatttgacgaagaggaagagtaattctgaaattctatctgattactttctatttagtctcttgtacacttgtaggacgaatcttattttgtgttctaaaaccattatgaccaatggtagtgtgataccatttaaatagtgaggaagaaaggctggaaaaacaattaagtaacaataaatagattttgcgactattgaaataaactggtttgcaggtgatcgaggtttgattggaattcaatagatcaatatccgatgaaataagattgatttgctttctctctctaaaagatttaagagagaagatagaaaaaatcatcgcccattaaaaaaaatagatattaagaatttgagttttataaaaaaataaaaattcaatgcattggatattactaaaaggaaactatagttggagtcttcttattacgattttaattatatatagttggccatttttcttcgaatctaaattacggacccatgaggaaaatga

SEQ ID NO: 37613 - DNA, 523 bp, Arabidopsis thaliana columbia
gtatgcatttttttactctgaccaagtaaaacgttttgtataaatggttttgatgggtggtaactctataaaaatgatttttcatctcattagaagaatactgcatcgaacaattattgaggattaacactggagatgaacaattatgtctactaagtatttcttgtataatcttgtgtctctatactaatgagttattactcttgtgtaggagctacttgtggaggcgtggagcaatagaagcgagcaacttcttgaaaccgttgcttagaccaggtgagctgagatgcattggtgcaactatgtttgttatatccaccttaacttatttagcttaaacttaaccaaccaaacccactaacacttgtggggctataattcacttacggcccaatggccttattacaaaacacaaatccaactccgttcttatgttggatttgtgtcgttgactcttcttcctcctttggtcagtggtcacgacaacttcttattctcttcttcctcctttggtcacgacatc

SEQ ID NO: 37614 - DNA, 225 bp, Arabidopsis thaliana columbia
cgagtcaaatagaagtaataagcaaagaagacgacaaaaaaaaaaaaacaggtttcacattcatatatggttcacacaagaacaaaagaaactaatttgcatagaggtacaaattgttctaaccaaaggtgacaagtgagttcattattgtagctatgagaatacctgttgcatgggaccaaaacccctctcctcgtaccatcactctcatgctgagcttcctgc

SEQ ID NO: 37615 - DNA, 623 bp, Arabidopsis thaliana columbia
gggtttacatttctatgtttcattgttttttgagtaatgagaatcagatatcttctcactaacggaatccacctcttgaattcagcaaaccagggaaaccccaatgagaagagaaaacaagattaggatataaaccttctttgttcatctgatttgtgatgcgcatataaatgttaaagatccttcttggcaaagctagtgccttaagaaccagcttccttgatcgatttactctgaacccttttgctcgagtctcgttcttcttccccaagttctgtcttttggtcggcgacctcgttgttctttctggtggtggtgttgtcaatctctcgccatgatcagttagcttcttgtaccgataagattgtctccaccggtacttgcctacaatctgcaacatctctgtttcttataaagttgtgtgtatgttgttgttttaggacaatacagagtcactgtctaatgaaggataagaacgaaacaaagagatatgaaactaggaaaacagtaacaaaacaggaatataaaaaggaaatggttttgcttaaaaagataaggagaagaattatgtgatgataatgattgtgagggaagtggcttaaaggcatgtgtttataaagaga

SEQ ID NO: 37616 - DNA, 523 bp, Arabidopsis thaliana columbia
ctttgttatgtatttatgaaacactttggatttgtgattgaagtttctagctttagtatctatataggattgttgaattcctcatgaatctggtgtgaattggatgattgaggttcttagatcaagtcatggattagatcaagtctctttagcatcactctgataacaaagatctgatatttaatgcttgaatagtgtttgtttaaaggagtactggttttgttactactagtcccacagtttttgagaaggagaagctggtaactttacttgagttttggcatgaaagcttggataaacgtatggagtgataactaaagtaatgttagagttgattttgatgcttctgttttgggtttaatgagtacgggtctcagggttagcctatggttgcatatgattgtttgagtttgtatataaataaccaccggtgtagaaactgttggagctgactctcctcacttgttaggacctgttgggaattttaaaattacatattttaaaaagatgttgtgtctgattt

SEQ ID NO: 37617 - DNA, 325 bp, Arabidopsis thaliana columbia
tcatttatccagttaagtggtcaatttgagtctaatggatgcagagtagattggaaaacttagcaagggtgaagaaacacaaagtttagatggcatgactcaaaaaatgatcttagaagagggcgatccgagaatacgaactcgggacctctcagcacccagagcgagaagcataccactagaccaaacgccctattgataaaagtctgagtgacttatgtttgacttatgaacatagcccccgagaaccaaactagggttttgcagagaatgtatcctatcttaccgcatcgacatgaatcataacttagctccggcacgagtc

SEQ ID NO: 37618 - DNA, 585 bp, Arabidopsis thaliana columbia
aatgcagtagagtgcagaggtctgagcgctccatctgcataagttcttcttcctctattgctgagttcttcagtgcccacaattttcttacttcgctagcttacctctctactcccaggttctctttctctcttcttcttctttttggtttttgtatttttccttttaactttctgtaattgtctgtctctcattgttgggaattatacttaaaaatcgccattttctccggctaggtgggtaggaaactttcaagactttagatacaggctagtgacgtggtatattagttccaattcgctggctacacgttgtttgttcaacaactccgataaaaatcagacactcaaaactcatctttatttacttagtgacattgtccacatgatggacagacctctgcttctttctctagtgacaatatcttttggcaaaaggagtctgcttttctttgctcatcaaagttttgtgttaaagtttggctctttagctttattccttttgcttttttttttgtgctggatgcttcaatctcttatcttagccgtcttggattgttaatctccaatgataaagataaagata

SEQ ID NO: 37619 - DNA, 508 bp, Arabidopsis thaliana columbia
tctgattgtatatataatagataaaatgattaataaaatcattgatttctataatctcaactagatgaatcttttagtttctatagaatcattttatccactatacaagattttattccttctaatatatataccctgaaattctaataataatatactagaataaaatatactatttttgcaacataaaattcattttgtttattatgtcaaacttcagcattcatgcaagattttgagaataatctagtgatgatataattttaaattaaaatatataaaatagttcaacaaagttaatatattttatacacaatataaaatatatatatactcccgattagcaaacaatgtacttaataaatcaggcaaaaaaaaaaacacagaaaattgctgccaactattccgcctcaatgtccggtgggaaactcgcattttccatatcctgcaatcaacgaaaaaataattttgttagaattatataaaaatattaaaggtcaccatatat

SEQ ID NO: 37620 - DNA, 558 bp, Arabidopsis thaliana columbia
cctgaaatgcaaaattgcacatttgaggacaaagtaagaagatgaacaactttatattttatcttttcactttgaatagaagtataacctcggggatcttgttgtcgacgagatttgaaaaagtgggagttttccagcgtcttggaggttttgccaaacgaagaatccgcctttgcaaagctacccttgaaccagcacgcacccaaggatccaatagtccctgctctgcaactgtaagactctcatttggacgtcccatgtgctccaaatccgttgataacctgactgtccagtatcctcgtctcccatcacaattaaaacagctgagcaatcgcctcagtagataaactgctcggttgtacctgaaaccaaagaaacaaatctcaacaggcaaaaagataaagataatctgaataactaaaaagacgagatggattgtttacatgcctcttctggttctcaaaaaaggaaactcctaagagaaccacctttgagttaacccatggagctgtaaagcgattaaatgcagcagcgtgacgagaatcaaagaggaactgg

SEQ ID NO: 37621 - DNA, 333 bp, Arabidopsis thaliana columbia
agaggcatagccctgctcagcccatctatgccataaccaaatacgcagaacatatggtccgatgaagaacacgacacagcactcacccagccccaggatccctcacaagtcgctggagcctatccacagtctcgacattgtgagcaatgacatccaatcgcgagtgccccagagtgtcgacagcctcgaaatggccacgagaatcagccgttctgcattctatcagcacatccgggacaagtgtctacagagaggtgctacatctgcacatatacatagatagtcggaaacaacatccgagaaatgcacataaaggtatgctcaaagaacata

SEQ ID NO: 37622 - DNA, 561 bp, Arabidopsis thaliana columbia
gataaacttagtctcacaattttatttatttgtgttgttaaatttgacaggaaaagtaggcctaatggaccttatcgagttttcttcatgagcttagctgttttgctccataaaaaacgacgccgtttcctgtgcgaactgagaaatatttcttcctcaagtcgctttatgtcggtgaccgacggcgggttaagtttagtgaataaacaaacaatcttcgtaaaccaaaattgataatttttaaattttggtgtgaaatcagatccaaattctggtattttaacaccgtaactatgctgagtaactagtacgattgctgctcactcaccacttgctcctgcgatataaaaactttgcaatctagtaggatcattgtatcttactctctctggttctttctactagatccggatctggaactttctctactctctgctcataaagtttcattctttggggagatctgaggcaaccctttttctctggtgagtactctctctctttcttttgatgttcttgcttctgggtactctacaaatgcaagattcggatatgtacatg

SEQ ID NO: 37623 - DNA, 439 bp, Arabidopsis thaliana columbia
caaacaccgaacacttaacgtgaaccacttttcctggagacactataaattcacgtaatcatagaaaaagagtcatcaaccgctacaaaccattaaatatggaaacgagcactagttatttcctaagttagacttgcatataacttcactaactgcgcaaaaaccataactaaagttccaagattctttatcaatcgtctatgatttattcctcaaacggtttgctgctacaaacaggtgcttcatcatgtttattttagactcataacttgttttttgggcaaaattttaaactcctatctaaaacacagattaacagaaagtttggaccttatttgctatcaacttccttcgctgcaggaattctagaagagacgtcctgcctgagctgctagcggaaattgcctgcagcacatagtattaaatactgaacatttac

SEQ ID NO: 37624 - DNA, 443 bp, Arabidopsis thaliana columbia
gatttcttcgtctgttcgagagatcgagtgtgaatctaagtggaacagatcgtatatcggaggcgaatactccggcggcggtgctctccgttgtgatcgcatgtcgtatgttgatatattgaaccgaaccggtaaagtccgaacccggatctattttatcggtttagtaaaattaatgtagtcacaattggatagtcgtcgttgtcgtcaacaattaatgtacctatttctaatttgttcctagagacttttcaattcgattgtaatctttataatttggaggttatgtatcatatatatataaataattttttaaccattttgaactttaacctgcaatgattcagtttaaatcattggtaaaaattgcactttctccaatcataatgttccgattcaagatatataaaaagagtatattccaacgagttttggttgatata

SEQ ID NO: 37625 - DNA, 874 bp, Arabidopsis thaliana columbia
cctctttctgttagagatattccggctgcttcaggtgtcaaaatctgctacattgtaggtatgaacttgatcttcacttggttaatgatcttgtgttctctggtagcttttatgggttttttgtctaattgctctgttttgtttattatttaatgctgatctgatggcaaatgctgatttgaatgtttgtttgtatagccggtggatggttggcgtcactttgtgtagcagggtacacagctattgcagtgagaaaaatggtgaaaaccgaaatgacggaagccgagcctatggcaaaaccatcaccattttcaacacttgagctatggagttggagtggaatctttgttgtgtcgtttgttggtgctctgttttaccctaattcattggggacaagtgcaagaacttctctccctttccttctttcttcaactgtgctaggttacattgtaggttctgggtaatattcaaaaacccttctttgttctccatctttaagcctctctatctcgcggttattctcagtgtcttatctttctttcttccaggttgccatcttctattaagaaagttttccatccgataatctgctgcgcgctatctgcagtacttgctgctctagcttttgggtatgcttcaggatctggacttgatcctgttttaggtaaagttaccttcactatgaaagaaactatagagaaacccttttttgacctaaaacagaaagtaaaagcattttgttaactgctctttaatggtgacaggaaactaccttaccaaagtagcatcagatcctggtgctggtgacatcttaatgggttttcttggctctgtcattctctctttcgctttctccatgtacagacaaagaaag

SEQ ID NO: 37626 - DNA, 540 bp, Arabidopsis thaliana columbia
cgaattcggcaccgatgtgcttatattagacaaatgtcagaaatgtcattttttgatcaaactatttgagaacttttttttatcaagtttgctacaaagaaatgaggtaattagagtagatatatacataaaggtgaaagctatattcatgagtttattacataatttaaaatgggcaaaactaacaatcaaaatttcaaagaaaagttgtctcatgctggttttgaactggcacgacgatataaccagctaatagacagaaatcatctagactaattttatatcacttgtaatttttacaattttgcgttcaaagataatggtaacaaattaatcactctgtaattattgaaagttgcaaataagatatgaatttatataagcacatcactgattatcaccagagaaatagatgtttacaccgactttttaatataaatggcgtgggtaaaacgtggtggacgactggacgtagagtatataacttgcagaggtcatataatccacaaatccttgacatacatccaaaaccctagaact

SEQ ID NO: 37627 - DNA, 660 bp, Arabidopsis thaliana columbia
cggttacttgcaggttcagcatctcagctccgcctccgtcgccatgaaagtcacagttaacgcctttcccttttctttcttacgggcttgaagaaacccataacaccttattgggccattactgaagcccaaataacattaaaatcaattaaaaattgagttgagaaagggagagagagagtgatgataataatggatgacccccggcaaaaaagataagatttttacagattctgcctcgatcaacagactctaatcagcagcaaatgtggagcgtcaccggagcattgactgtggcggtgccgcctaccgccgccgcttgccgtacgaaaccctttctcatctcctcttcctttcccaagcagacaaagaaactccatctctcttcgccttctctgtctctaccatcatcacatttctcctcctctttcaaaaccgcagctacctccatcgagcaacagtcttctgttaacaaggtttctcttttctttctctctctctcttttcctcttgaccaatcaaaccaaacagcttacgttttctggatgattgcagggagagagcaccaagtaccatttcctggtagcaaacgctaaattcatgcttgacgaagaggagcacttccgaggagcagattgtttgaacgtctccgttacttcg

SEQ ID NO: 37628 - DNA, 616 bp, Arabidopsis thaliana columbia
aactcaggcgttttccattcaatggtcagaccatgtctcctttcgccgttaaatctggtactcattttcaggctggtggttctcttagctctggaaataatggatgcggttgtgaggaagctaaggtaagcgtaaaattgaaatctctcctgattgattgttttttccaatatttttgtaattcttaccctcatgtttgtgtatttgattttcagaatggatgtccgatgcagtttgaagatttctttgttctgtcgcttggacgaattgacataagacagtcttaccataatgtcaacgtgatttatccaataggatataagtcctgctggcatgacaagatcacggggtcactatttacatgtgaagtatctgatggcaattctggtcccattttcaaggttacacggtcaccatgctcgaaatcatttattccagctggatcaactgtcttctcctgcccaaagattgatgaaatggtggaacagaacagtgacaaacttagtaatcgtagagatagtactcaagagcgtgatgatgacgctagtgttgagatcttcgttcggaacactgccacatcttggagatgatatattgccttgtttacgtgagaaga

SEQ ID NO: 37629 - DNA, 409 bp, Arabidopsis thaliana columbia
catatcgcactcaacaagcatcgcataaatctctaactcagaacagactacaacctccctcaaatcctcaacaaccttcctcgaagacgccggaacacctccattcgcgttactaacgctgccgccaccaccacccattattcctctctctctccggattaccggaaaacaacacaaatcagatttgaattcaaaaacttcttagattcacgattctttgacgagcaattctaaaacccagaataaagattcttgatgtttgtatctctttcgttctattgacttcgagtatatcggaagagaaagaagagaaaaacctcttttctatttatgttatttcttttgaatttgggactaaataatgagttcgggaaaaaggaaagaaattcaaatttttggaaagttatgt

SEQ ID NO: 37630 - DNA, 582 bp, Arabidopsis thaliana columbia
ccctatccccaaaacatgggctgctatggaagtatttttagcgtctattgcaactgaagaatatgaatccatggcctcagctttgattcaaatgggcgccacaaacagagatgttgatggcaaagcttttgcaaaagacttggaaaagatgttctcatctatccaggcaagaaattttactctttactgactatgatggctctctgtaaccagctacatctgttcagaggaaccagcttgatttgctttccgaactgtagtgcaaaacaactacaacaactttggctaatcttatagagaaaagtgaatctcttcttgcaggaactagatacagagatagtagtggctacagctcgtggaacaaattcagacactactgctgttgctgctaacgtagttatggatgagagacagatgaatgctcttttcctcgacctggtaagcagttagacgtaatttcttaaggatttttttttggtttgaaagttgttaagaggatatagaagttgcattgagttaagataaccccaggatttgagctttcagcagttgaaaataagtcactttcttataggtgcgtgt

SEQ ID NO: 37631 - DNA, 525 bp, Arabidopsis thaliana columbia
ttagaagttagaacgttcattgattatgctgagatcggataagggtttcggttgctggtggctgtgaggaggcagatcgcttcgtttcctagtcgggtatagtgcttctctctctctctcgtctccttttctccaggatatttgtttgctataggactgtgttggtgtttggttctagtgtggcttccatcaatggttttgtttggttttgatgttactttagatcggctgctgtatatggagactaattattggagtttacgttcgtgtgttgtgaacttgttatgaatgtattgattggtatatatagagtggatgtttcaaaaagctttgcattttttagttgttctcatgaactagattgtatttctgggagttacaacgatgctttatctcataatggttttggatttgtggttcatgtggttgcttttagtggctttggtctgggagaaactttcatattttcggataaaagagctcaaggatgtgctcactcagctgggactttcgaaacagggaaag

SEQ ID NO: 37632 - DNA, 559 bp, Arabidopsis thaliana columbia
taaaattaacaatacatacattaagaatgtcctgcctttctatttctatcacatcaatttcatgtcttcgacaacattaaaacctatatgattcaaattcaaccaacttaaaacggtttagttcagtttaaaatcaacgaaagctgaagaagataagagagcttcactttgcctacaattaactttccatagattgaaattttgacttgctagagaaatatgagacaaattcaacatttaagcagcaattctccttctcttgctgcaaataaatcccatcaccttactcaataatattgaaggctgcaaagacaataagagaaatgatacttaaataaaccagtcgtgtaatccaactccttgtatatgagctgttagccataggcgatagttagtctcatttcaaggctcgagtcttgttactaggattactatgcacagattgcatcttccctaccatacctcagacatcaatatgccaaacaggatcattgtcgaagcttcctttctcaaggcgtgcaactttagctctatgagctgttgttgaagccacgctagt

SEQ ID NO: 37633 - DNA, 515 bp, Arabidopsis thaliana columbia
tagtaacttttcaataagaaatagtaatcgttataaaattgtagtaataaaagtatttataaaaaaaaaaagtataaacacgattttggtggagttgtggcatgtaactacttactttactcgtcacttaaaggtctgatttcttgttgtctctaaacgtgaagacgattcaccgaatccaaatcctcacaacgacatgttcttcaagtatatttgactctcttataaacctaacgagacaagtttatgaatatgttcctttgtttacacttgtaagaaaaccgaaacccatttacatgtctctgtttcgtcccttcatatagtataaaagattcaaatatatatctggagattcttatcgtacaacttttttttttgtatcggtcatattggaatgaaccattttggtacatgccaaaagctgtaaattttcaagtaatttagtggattacaaagagggttgcccgcgagatttaggtccaaactcgttaaattcttcttctatgccctgtttt

SEQ ID NO: 37634 - DNA, 568 bp, Arabidopsis thaliana columbia
  unsure (1)..(568): unsure at all n locations
tcaagaaattttacaaagccgaaatactaaaaaatttggggtcgattggtaacgactgttatatttggctatacagactttgactatagaaattttggttgtagagaatttggctgtaaagactttgactttaaaaactttggctgttaaagtatgattggaactaaaaactgtagaaactgttactattatttttacaatatatatttagaattgtgaattatttgaaaatgagttttgtgataatatactaacaaaattaatttattataagttttagaaaaatacaaaataaaataaatagataaatatactcaaatctcagtaaataaaaaatatatttaatccatataaagatctgattaggtgttttggatcaatgaactatcactgtgatgcaattgatgcaaaaaaataatgaaaactggatctctaaaaagtgaaaatagaaagatgattattaattaatcaaaatatttttgagttaaattacttattgatagagaaattgtttttcatttgtcatggagaaaacgaaaagaanaaaaaaagacaaacagattttatt

SEQ ID NO: 37635 - DNA, 496 bp, Arabidopsis thaliana columbia
caagttacgagaatagtaattacattaagtacagatgagaaatctctatcgtaaactctacatctgtgtgtttatggaccacttcactcactttgtttctctctatacccttttgtcttgtccattgtcttcacttacccacacgcaccaaattatcatcattggcatcatctaaaattattacctagctacttattacccatcttgagttttatttgtttcaaggagatggcgatgagtacagtgtccattagattcgtttcaaaccctcgtaaaaagatttgtactcgagaggtttaatttttgtttttgtatttgttacttgttagttccgtacagtaaagattctatcattttatcgttgaaattctatctgagtcactgtgcggttatagttaaataccctagtaactagtaagcactgctatgagtctattactgacaatttccctgaaccaaaacgatagtgttcgaagctatattaaatgtggacacg

SEQ ID NO: 37636 - DNA, 500 bp, Arabidopsis thaliana columbia
cccccagtctttctcgcattttccctcgtagcagccgtcaatttcaactgggtatgtcttagatcttcgtagcgtttacggttcctgctcaattcttcgtttctcgtggtttgacagttgagttacagaaaacgaggacgaaaagcctaattgaagaaattagtgattagaattttgtgattccgtgaaattttagtattagtaagtatagacagaatagaaaaaaatcccgtactattcatcagctatacatatctgtttgtaattctttgagtaagatcttcaattctcatgtgaaaactgtgttttgaatgcttgtcatagatcaattgttggattaagaaacattgtagtttagtgttagaagaacattaatgtgagatttgttacattgattgacattagtgttcctgtgatttggttttaaaaaatctttggtgaagtgagttggattggattttacttgaatgcttgttgttcccatcttttggctaatgatg

SEQ ID NO: 37637 - DNA, 451 bp, Arabidopsis thaliana columbia
cttttaaagaaaaaaaaaactacttatttcctttgtccctttgaacaaattatcgtttatatacaataagaatcaaaaacttaaatgggcttttcgttatccaaactaatttgggcttcttcttggattgaattgggtttggttgcccagacttgcaagactgtgaaccggacaattttaaaccggaaaaaaccgtcaaccggccaggcattcaatacaaatttaacaatgacaaaccaaagtactagcagtgttcatgagattgtcttgcattcaaacttagaaaacaaaaaagcaagaaccaatggggatgagtaacgcaatgaatgagtaatagctcaatggacaagaagctatagaaatacttccgcctggaccattagctggattacccgggattgaattgcttgaagaaaccgtagctcctccacggtgaagccgcggggactgc

SEQ ID NO: 37638 - DNA, 284 bp, Arabidopsis thaliana columbia
cgctaccgacgttgagtccacggaggatactcaacccgacccggaaactacacagtcagaatccggcactgatccggaccaatacgagtcacgtctcacaaatatcagacacggatacagaagcgggacgggtaacgcagcagaagtgagagaatcgaagaaagggtccagtgggtctccgtcgaaaggtacgggaatatataaaccgccggtaagcttaaaaaaaggggtttaaggtggttggaaaatggagccagggtaaaatcccttcagcgaatagatta

SEQ ID NO: 37639 - DNA, 621 bp, Arabidopsis thaliana columbia
atacatctcaaaattaatcacaatcactcatttatatacaaaattccttttaaataagtatgagcatttttgttttctaaaaatatttagtgtgagaggataatgggttttaagcccaaatgaaaataaaagcctaaagagaaaacaagaagattgcaggaggaggaggaggagttgagtttctgatgagaagttttcgttaatggaagttttcctttttttatgattgctaggcttagctcgagtcggttgggaatttttttaatggttaagatttttgaacttaaaagattcagagagatttttataaaaatgacaatgccaatactatggatttggaataattgcattgttgtagcccaattaaaaaaatgttttttttaagctaattttagtgaacaaattttttcaaaaaatgtggcccaattgagctcaactaccgtccaacggctcgtcgtttgactcatttctatggaatcatcagatttgcaaaagaagcttagaattccgacgaactaggcccaggtcgcccataaagcaaccaaaacatgtgctttacgctaccaactataaagaaaaatgtaaggtcacttgtttaaaaagtttgttttggttaagtgt

SEQ ID NO: 37640 - DNA, 1165 bp, Arabidopsis thaliana columbia
cgtagattatgaatttactatttagtcacgccttcggatatatgttcttaagattgatatgttctaaaaccggttagattgtgcttcacaatggtttttccttctttaatgtatgtaaaaacatctaatatcctttttaagtattcagatatttacaaaaagaccaaggagtataggaaaactgaaaatcaaagagccaaaaaaaagaggttacaaattactaaattagaaaggagcggtatgaatgtcccaagcatgaggactcataaacatcattctttcgtcttcataatcatcatcatcctcctcatccttcagatttatgcatctccctcctctttcttcactagctcgtaacccctcatgcgtctcctgctaattttgttaattaattaacgttacgaagaaaaaaagaaaatttgaaggaactccaaaaactaaaattactgtaaatacgtacctttgtaaaaatatccatagcttcctccattgtttttgttttcatcacatacaatgcttcttctcgagcattttctaattgatcgagatgcaatgtcattggctctgtctctatcgaagacctcctctctaacatgtccattctcttgcttacttccatatctctcagattttatagcttgaaaaacaaaacaaaaagttttgatgaatatctctcaaagtcttttgattgattctatatataagaagaaagagtggattttattgaatgtaatgaatcttcgaaaatatctaacgtttttataagtacgatgtggggacgtaagtgagagacaagaagatatatgacgcaacgtggcgtggtggggcggattacggcggtggattgggaacacgtggcgtgtgaaggatggtggtgaccatgcacgtggcggattagtttgtgagattgcgaatgcgatttttcgatttgcatgaagactgcagatagataacgtaacgagataattcttctactacttcttcccacgatttttattctttctagtattttattaaatggagttggtcggcgtgatgagatattttcgtttctttttaataatgatacaagaataagtacgtggaacaacttaggtgtgacggtcatccgttttggactcatttgataggtcactagaaatagctgtccctgatttaaatatat

SEQ ID NO: 37641 - DNA, 856 bp, Arabidopsis thaliana columbia
ccttccagtctttgaggttgaaccattcagaaaagaagatttctccagccatgaactccttgcaaggttattatggactgaaaccaaaaaacagaagagcttctgaaggttttgggatggcagtctacaagaacgaagcttctcaactccaagacaatgatcagtatctcactcccttccccgccaccagtactcccttatcccaccacagaaaatcaagaagcttggtagatgcagttatcgccgaggttaaccaatcacccaacccttcaaaagcaggaggaggagaagtgaactctactgataagccaatgagaagacgccaaaaatctgaagccgattttagttcacgagctccagaattgctgttgaaggaagagaacagaagcagcagtggcgcgttttctgcaatagctggaaaaaatttagcactgagatccaaagcatcaagcagagctaacttatcagcagaaaccagacatctcaattccataccaatcaatttgatggatgctcctgtgggagacagcttctcaagcgtgaggaaatctgttagcgcatctagtctacaagaaccaaactgtaacagcaacggttcatcgctatggccaacctcaaagtggaccctgaaacctgagttactcacacaagtagccatggctagttctatatttgacggattgcctaagccattaactggtcggagaaacaaaaaggctgtggactaaggttagttaggtacttaggttccgtcggtctcgttatcgactgtccacttttggtttttgtaatccaaaagcaagaagtcaatggcttttataatagattgaggagtaaatagaaagtaaaaagtgta

SEQ ID NO: 37642 - DNA, 581 bp, Arabidopsis thaliana columbia
tttgtatgataaacaatatgggctagtagataaagaggataggcccaaatccttaggcccaatagaaacccagatagtaattgatctgttttgtttcttcgcaattaaaagcccacataaacatactaatatggaggctctttaattttcatcaggattatcccacctccgcgagataacactcttgtacaacgttagcttgtgtgccaatttgggctgaagcccaagttaataacaagtttgtttatatcaggcccaagtccataagatacgtttgaggctttttaagttttgtactagtacgtttccatttgaggaaatctttttttttttggtaggacttgaggaaatcttatcaccaaccaaaatttagactataaattcaaaagagtaaggaaatgaaaagaaaaagagatgtcttaaatctaatattgaccacaataaatatacgtcagatagacataaatacttcaaactgtgacacgatgtctcgtagattggcgattatttcccttgttttttttttgctccaaccaagtaaatttattaacagtctcttagtacatttggagataaagaaa

SEQ ID NO: 37643 - DNA, 597 bp, Arabidopsis thaliana columbia
gtgttacttctctgcctggatgctacattttttaatctaatgtgctagttttagatacttaagccaaccctttccccaaacctttaatttccagtacattatattgatttgcggacctttaaaattttggctactatctagaatggtagtatgatgaagagagaagaactacataaccattcatatttttccccgagggaaatatgctaatttgttctctcgaattatcaatattattaattttatcctgtttgatggaatcaaatgactagatagataattatctaagtttctgcctccatattatttcttatagcttcgtggcagagctggaaggcaaggagatcctggatccacgcggtttatgataaggtaatcaccacatctatgattctcctgaaccagagaaactctctgtattagcgaagttacttacgtaaaagattctttactgctttgatatattaactttgcacgaatctgaatatgttagggaataaacctgcctttgctctgcgacatgatttctattactagtggtttcttacagctgcaagatgagatgttcagaagtgaattttgaactgagtggctgtg

SEQ ID NO: 37644 - DNA, 215 bp, Arabidopsis thaliana columbia
cgtcggcgcttcataggatcggatttcctgaaccctcaggatgtccaagccgtattcctcttcgctgatgcggaaggtcaggaactggcggttgtctgtacgggccaaggcctgcccggcctgggcgccggtgctgggaacgaggtcggtggagctcatcgggcgctgtgcaaggggaaggaggaagcttcattttgcccgctccgcgaacgcag

SEQ ID NO: 37645 - DNA, 598 bp, Arabidopsis thaliana columbia
gtcttgaaatccgcgactctttacaaacaagaaatggttagctaactaaactgagaaaaaacagcaaagaaaatcagagagatcaaaaaaaagaaaaaaaagaacagagattcttttgaactaacgaagacatatgtaagtcttctttgatctgtgtttatatctctttgttttgctacccactcaaagatatgattttgcaaagaaagcttagtcttttgtgttcttgaaatcttaggtttgtgttcttgaaatcttcttaggtttatgttcttgaaatcttaggttatattcagctttggaattcagtgaggtagagaaaagaataagtttagtacggttgtcaaaagacattgatttcttgaaaaacaattgttggaattttaagaatttctgtggttgcgtggtgattttggttagttctaaccttaatttttctcaatgtttcttggtcttcacatttctataattacatttcttctatttcctattctctaatataattcataaaatatatattatgtgttgaattagtgtttccatagagatttgaggactatatgttaagtttatactaagaaaatggttttggtatgtt

SEQ ID NO: 37646 - DNA, 469 bp, Arabidopsis thaliana columbia
tgccactactattgttactctcataccttcttctaccataaaacccaccaccatctctatccaaagactcttcctttatcggactctcagaatcttctctactaaaatccctaaacccaccttccaattcttcccctccactaattttctcatccccatcaccaactttcgatagccaattggatctaactctcttcgctgctgctgatgacccgacccgtttcttaacccgccaactcccaacaccaaaagaatccacatttccttctctttcagcatctagggttcctatattctcatacccagaactcaaattcgttagggttcgagtcctcgacgatttactcgtatctgttctattaccactcgtcgtcgtcggtgtccatttcgatttcctcccttgtgaatcatacgccgccggcgccgcgtggtgatgatgctgctgctggtactggtctccgccgatttc

SEQ ID NO: 37647 - DNA, 803 bp, Arabidopsis thaliana columbia
  unsure (1)..(803): unsure at all n locations
acctctaccaattcatacattctagatctggtactatgtatgtttcgtgaacccaaagtttctgactttctgtttatgaacctgtgtaacaatcatgatgtgagaattggtacacaaagaagattcatctgttaaattacaccagtggcattctcacaatttacaaaagctacatatcgttctattttttacagcctggttaataaaacgtgtaccaaccaaaacctgtttttttcttcatgaaaccaagacagcaaaatttagagtgtgacagtgaaataactataaaagccgattcaggtcgatgaccagtctcaacaggcgatgtttactccccctccttcacatgacataacctagcccggccaggattaagcagagattctgacattctccaaccctatcaaaatggaattttcagatgcacactcgattaaataacttaaaaaggatataacaggtttctcccaagttacctgttctgcagccctgcttttgaagacgccatatgatgtggaaaccatttcacacgactcagcaatacgagactcgagctcatattccgtaggagcaaacgcaggatctaattgctccancgatcttgggttaccatcttttgattgattcatgaaatgaagaagcacatgtgcctgtgatatatgatcatgtaaccgaatgagaaaatttaggccaaaattacttcgtctcaacagaatagtaattaaacagatacaaaatcatcctacatgaaatgctgctttgagaatgtcatctgagttagcatgatgtttgagcagtgcata

SEQ ID NO: 37648 - DNA, 510 bp, Arabidopsis thaliana columbia
acattttgacactttcgatctctccaattaaaatctgaactcatgttgtttcaaagaagattttaaccccgaactcatgtgcgttttaagaaaaatataacgagcccactgataaagaatgattaatcacttccaagaggttccacaacattttatgaaatgaatatgataacattttaataactatcgtggcctgaacgcaggcaatgtcattaacgtgattttgattgttttcgtattcgtgaaagtgattgtggaaaatgacgtaactataagttttaaagatctctttcatacacacattcatgtttacgtccatgtccatgcaactgattgctatcaaactatgtttcgtccttttttccgtattattaccaaactatttttaattaatcaagcggtcgagactcgttgtctagtgtttatgttgaataatgttttggataacgggatttatttgttgatttctcgggattttgtgttgatcctgattttcttatggattcaaga

SEQ ID NO: 37649 - DNA, 591 bp, Arabidopsis thaliana columbia
caacgtaacgtgtattgaggttttgttgatatagtttcatttgaaatttcctaatctaaggataaaaagtacatcttcataacacctcaaacaaactatcttagtaacacaacgaaacgaaatcaaaggtgagagaaactacaaaactcgaaaaagtatcatcgcattttacaacaagtgtagagatccatccagagacttctattgattgactgcttttcaaggcataccaaatttggacaaggctgtttcacatacggttgtgaatgcttgacacgtactctgctcgtctgccttcacttttatctgagctttggctgatgaagtgtttatgatacactcagtgagatagttcgatggttctgattccttttgagcgaaaaagaagaacttgaagtttggagattgaccgcccgatgcgatacagtgaatggaatgactctgcatgtgtttgataagtgattgtggaactgttaaggccgcgattccctggggattcacagaacactcctgcacacgaagttaagacagttacaaactctcaggagtcaaaatccccgagaatttatgaatttagaaacatgatacaaa

SEQ ID NO: 37650 - DNA, 392 bp, Arabidopsis thaliana columbia
aaacaattcgaggagatcaagaaaattcgcggacatgttatatggctagccaccgtttgaagatccaatagcaattcacacagaacgtgaagcccggcatactcggaagactttctagtgggtagacagtggatgatctcgtgatggaaagtatgttagaggaggacaaagaagattggaacattcgaattggaggtagtctaataggggaaataaaagaggtgataatagagcttttgaagaaaaataaagcgtagatttcgtggtgagtaatggatatgcttggaatagatataaggataatatggaaagaggtaaatgtgaatagaaggttaaaagatgtaaaaaaaaaaaaaagaaaaatgagagtggaatgaggaaaggtggtaaat

SEQ ID NO: 37651 - DNA, 646 bp, Arabidopsis thaliana columbia
cactaacttctccacttcctggaaataatacagagttataatcctaggttccttttcacagaaacagttattgcctaatttcttgtgtagcaagatcatatatacaactatgtatcaccttaaaccattgtagttccctttgcatctgaagagctgcaccaggaatgagattaagccttgaggctggggctctatacgcggcgtgatgaagcatattgttatggaatatgtcccaatttgtagcgaggatgttcttcttagcacctatattgtaaatgaggctaaagatcttttcttgtctctggcttaccgcgtagaagaagatgttaagaccactactatttttggaccatacgatatcaggataatgcctcatcatgttctcgatatactctacgattccattctctaccgccttaaagagagcttggtttagaccagcgttcttttgttgagccgcgtcaaatttaggtatctcttgacagatacagtctagtatttctttagcttgagcatgtcctagctttagtttgtatcacgtctaattatgcgtggactgtcaatagaaagtttaatctaagattgataaacacaaaacaatgagggggtacaatttgggatggtaatactgcttcaaagatattga

SEQ ID NO: 37652 - DNA, 557 bp, Arabidopsis thaliana columbia
tgctctaattaagcaagtaacttcaaattaaaacattaggtaccaacaattatggtcttgagggtaaaaaagacgataaaaaagcctcagtgacaaatgtcaaaacatgggaaaagaattgtaacactaattaatccacaatcaagtgaaactgaaaaccctaacatggagggaccaacaaatgattggacataactgcaccaatcaaaaacttaattctgagtttattttggcataatttagtttggtgatacgcaactgggtcccattttaatatgacataattcagagtaaatcatactatgaatcacacaaagaccttaccataaaagtcattcgttattattacttatgtatgccattacaagtctatatccatttcctttatattcccggaaatatttttacaacgaccaagcagagaagttacgttacagtattatacaaagaacatttacacacattacccaaggaaggtgcaggctcgggcacttatgggcgattgaacttgtacaaatatttatttagagcatgtaagacatatcgaggagatattt

SEQ ID NO: 37653 - DNA, 542 bp, Arabidopsis thaliana columbia
tatatggtacataatttgggatatagaaaatctgcgtgtaataaaagcactagtaaagtgtatagatagtcggtcttctcagggttgttaaggtatcgctaactacctcccacagtggtcctctggacggcactttcttattttatctaaactttttcttccattcaactcgaaaatataaataaattaataacatttctattcctgtctagtgttatatgcttatatatcaattatcttttgaattaaataacaatcataggattaaaatggatcatgatctctgaaaaggagataaagataagttaaagaaatttctaatgacggttagatatgcatagagtcactcaggtcacacaacttcattacccccatcctttttaaaggatctgcaagaaacaaaatcaatcaaagtgtttgatttgctgtaaagtcaactatattttttaagagtatgatatttctaaatttaacatgaataattgatttatgctatgaaaataagcgagtatccaagaacttttaagacaaaattagttgga

SEQ ID NO: 37654 - DNA, 448 bp, Arabidopsis thaliana columbia
tttgaaactcgttgattccttgcttgcgacccaggccttctggccgagggcacgtctgcctgggtgtcacaaatcgtcgtccctcaccatcctttgctgatgcgggacggaagctggtctcccgtgtgttaccgcacgcggttggcctaaatccgagccaaggacgcctggagcgtaccgacatgcggtggtgaacttgatccattacattttatcggtcgctcttgtccggaagctgtagatgacccaaagtccatatagcgaccccaggtcaggcgggattaccgctgagtttaagcatatcaataagcggaggaaaagatactaccaaggatgcgcgtcgttaggacggtctctgccatctaacaagcaacacgacaacccctaagaaaggggttacgccatcacaaacccaatacccgcaatagcaagcttcttagatgacata

SEQ ID NO: 37655 - DNA, 495 bp, Arabidopsis thaliana columbia
gaaaagaaaacattaatagtactatcttaagataaaaaatgcaattatgaaatttcatattgcctgccaattgaaaaataatgttacctattgttgaaataagatgccatgcattcgcattttgcacgatctgcatgtaaataattaacaataaaagaaaacgagagaaatcagaaaactaaaggacctaataataaattaataaaaataaaacaaaggaacgtgacaaggactgagagtataaatatataataattatctgtctctctctctctcaactttgactgcgtcttccttggagaatcacaaaacaaaaacattcgtttttttgttgttgttgttgttgttgtttctcttgagaagctctctgaagaagaagactcatggaaaccaacaaagaccaagactttcgcttccgtacacttgtcgtcttcatatttctctctccctcttctcttctctatctctctatgtatctccaccaccacgacgtgc

SEQ ID NO: 37656 - DNA, 640 bp, Arabidopsis thaliana columbia
tcatatattcgattactacaatatggatcatttatgtatagtacatattaactgaagcatcacaaggattagttaaggcgagtagaggagaatgtgaggaagagaagagtggcgggaaactcatcgtcagaagatgttgcggcaaagccaaagtctttaagagtaaagaagtttgtactgacccgttaagttctagctgtaaaagtgattgatagggtgaacggcatttctaaaaaagttttttgtagctgcctagagggattaattctgtggtggttttactttttgtattgcaggcggttgacgacaacgtgttggatctagcacaacggcatgctgaatacactattggttcagcttcctataaaacaccacaaaactttttaaatgacaaatgatacaaaattttaattatgaaataaattacaaaaacatataaagttcgactgggacaagtaagaatatttgaacctcaattgttcaatttcattcttaaatggagcctcaaatggggaacttttagtatatatgtgtcttagaagaagcagagtttacgcatgtattcattttgttatcatactgtttttatgtaaattagtaacaaaagttttcatactctctgcttatgccgggatcctct

SEQ ID NO: 37657 - DNA, 588 bp, Arabidopsis thaliana columbia
ctaggtaaaggttgtctcaaggtattcgtctggacttgacttcaatgttgctcttaagcagaaacatggtgttctggtggtttatgtggttgtctcaaggtgtttggagtattaatctgagatggaacgaagagatcgaatatatatattcatatgctagatgttgctatggttacaaagaagagcggatcaatacaagagttgatgttaatggttgttctgcaagtttggtcgtaagctgttggaagttggttctacaatctgttcttagaactgctatcacatcggaagtgactgttctgtgcgtacggcaggctcaaatcctgttcttattggcgacacgagttccttgttgatggtgaagcagatctctctaatgtttgttcttctgttttatgttgcagtcacaagctagtctacactcactgtgcaagctctgttttacaggtctgttgtaaagatggacccaacgtcattaagaatgttcttcagtgtttttgttacacaagtgatgcatcaagccctctgttagaatgttctcagaatttgtgtgcacctgcagggtttagaagtctcagaatttatgtg

SEQ ID NO: 37658 - DNA, 813 bp, Arabidopsis thaliana columbia
caatgtacagtgtgttcttcttcttctaagagagatggtgagctttctacttcacagtcgtgcgtaagaagaaatccataaggagaataagattactttcactgtggattcgcccatacttaattgagaagaacagactgctaggtttttttttttttttgaaaaatacaaagtcaaacttgtaaagtatacaatacgaattaaaccactaaaccaacatctatataaccgtatttaaccagcaatccacgtatcagaacagaaatgttggttttttcttgtcttgttgatctcttagcttaatccaccaaaagacacaacaacacaataagtggaagacatgcaaaattagttacagagcatagtgccttgtaacttgtaactcgaaaataagacaaaagtatctgaaaaaagatggctagcaacatacagagatggacatttttgtctccaccaaaatcacaactgtaatcatcttctcaaaaccaaaaataaaaaagtaaagtgttgcatgtatctatctttatctgttgataaattaggattgctattttcagttgcaagttaaaacaatcgtagaagctttttacatggttttgatgaaatgacaattgatttcggttcgggtttgaaattacatgtgatttctgtttggtttagatggttttgaaataaaaattaattttggttcggtttgcattagaattaatacggttttgagaaaaaaaacaaaagaaaaaagtcactcgaggctgttttggaaacaaagcgagtagatgtaaaataggcatgattttgtgggtttccctacag

SEQ ID NO: 37659 - DNA, 550 bp, Arabidopsis thaliana columbia
tataaacaaaaagaaagtttacgtaacaaagacgtgttagaattaagtagatgtatattgtaagtttgttaaagaaaacccaccaaatacatccactaaattcttgtaattagggttcttgtaaattgtaattttcttgcttttggctttctaacgagtaacgactgtcccaatcccacctcgttttagctagattggcgttttcttgggtttgcttactcatattgattctgatctttaaccagttggtaacgattctgttttacatattttgcttctcatttgttcagttaatacgttggatacaggtttaagaatctgatcaagtatttaaccttgctgatctagaaacgcctgagtgcatatcttcgtggaaagcagaacaaacatagctggataaagaaaatgcatagaggtaagtaaacgggtaactaagagtaataggggatcaggtttggagcagataaatggagaatgtggagaagaggttaaccaactatttcaacgtatctgaacaaggcaaaacacacatgcagggagggagtgacat

SEQ ID NO: 37660 - DNA, 548 bp, Arabidopsis thaliana columbia
ggtaaaagatattttcttcttttcttattttctaaataaagagaagagaaatagaaaaacaagtcacgccatccaaggctctcttttgcctccgtatcatcacctaaacctatctaaagacttgttcagactactctcagctttttattttgttttttccagtttcagttttttgctcagaattttaaaaactttattggagtttgttaaggaaagctcacgtcatgaagatttgagagagagaggggggcttacgtggcttggcttcctcgttcctatacttgacaccttgcagaacaattgcttcttctagctctccaaaatcgaaactggacgatccatcttggttactgtttcatttattaatagtattgtttaattagtacaaagagaatattcatcatgtgttactacaactatacaatcagaaaccaagaaaaattggagaccaaaaggaacaacaattaaattaaaatataaatacttgattagagggtcgcattttgagttagaagattaataaagacggtcgcatataatgaaagttt

SEQ ID NO: 37661 - DNA, 570 bp, Arabidopsis thaliana columbia
caccataacaacatcaaatcatcaaagacagagatgatacatgcataagtttacaagacgtaccgccattattatcagcataaaatgtacacaagacaaggaggcggtttcatcatgtacaagacgaacacaaacggcacgcacgcctgaatctttcagagaatgaatacctattcgaatagtgcataaccgcatggataagctcacactaacccgtcaatttgggatccaattcgggattttccttgagggatattggtaaggaattggaatgtaataatatcgattcataatggattcatatcgatacagaagaaaaggttctctatcgattcaacaagtgctgtacttatgggaaagcgatagagaaagagaaaaaaaaaaacgaagatttcacatagtgattttttttcatatttttgactcaaaaataaatctgattgaatttatttcgtaccccttcgctcaatgagaaaatgggtcagattctataggatcaaacttatgggacttaagaatgatggaagggaataaaatcaaaagagagatcatataaagaaaagagagaga

SEQ ID NO: 37662 - DNA, 303 bp, Arabidopsis thaliana columbia
gtcctaaatttagacgaacaagtagattattcattgattcaatatatatgaataaaaaccatgaatagcatataaaaacgattaaaaatctatactgcattaaaattaatgctgttttaaatattattgaagaattcgtgcaactccagcttaaggtatgtacaagctttaagcttatgtagtcttcaatcaaatgtgtattatatatactaaaataatttcgtacttcattcgtgttatttttagcgatttctccactactatgacattttgtggagagttttgtctggtgcttgagccgcc

SEQ ID NO: 37663 - DNA, 552 bp, Arabidopsis thaliana columbia
tatcaaaggtgagaatgatgctctagagaacgtaaagccgatccgtgaattttaaaattacgtgatgaacttatttctattttatttatacttttttatatttcgggttgttttattttgaactatgcttagtatttgaacttacaatatttctaaaactttattacatctacgatacttcttttaatttttatattttataatgtttctttaatatatatatcgtccccgaattatcaatgtttgtttttctgaagatgatagcttgaagcacaagttaatcttaagtgtcaaactcacaaaagttgaagactaaccaaaggtgatataaatcaaaccttggttgagttacttttgggaccacactcatggagaaacgggtatgaaagaaattgcttggaagtagcctcattttagccataaggacattttgtctggttgtgccaaaatctttgcggtttgcttttgcacaaggaatccctagttagctgtggatatatataggtgcttgtgttcattgagagacgccaagggagcataaagagagtgata

SEQ ID NO: 37664 - DNA, 267 bp, Arabidopsis thaliana columbia
aaaaaaaaaaaaaaaggaaaaaaattaaataaaacaattacataaataaaaaaaaaaaaaaaaatctataaaataacataattactgtgtttaaaacttatagtaatataatcataaacatttaaacaccgagtataaaaatggtacaaggttaaagttttaaacacagagtattaaaacgtggtccatgatcccaaacctaaagtatcgtataatacaaaggttggtcctaaaatgattatgcccaatattttcgttgttttgtag

SEQ ID NO: 37665 - DNA, 556 bp, Arabidopsis thaliana columbia
tcactgatgagacttatcctttactcatcactcactctcactccgattttccaaggtcttcaggagctgctgccacttgaggagaaggatgatagtccagggggaaaaagcacatcttgcactgtttatcaacccagctgttctcaaacgtgcacctatcacagaaccagcgactgcctggttcattctcgtaaccatcagccttcacttcaggcttaccatcttccagttccttgatgaatccatcgaagtggttaccagtgcatgttgtactgatttccaacttgtgcttatagttagtgaaatcttcaggtgagagggctagatgtatcaactcatcaagcttcccttcgtgcatacaaagcattgtgctcgccagacgtcggaggtgtttcaggtactgcttcttcgtgctttcgtactcgattatagagtaatcaaatacgcaactccatttcagtacctgcctgcactgaacactaagcatccctgcttctcttactgtcctaatgtccagctcggtcgctcgcagttctcgatcagtttcggaatgatt

SEQ ID NO: 37666 - DNA, 546 bp, Arabidopsis thaliana columbia
ccttttatgctgcagatattcttatatggacgtgattcttggttaaagtaaaccgtgtcgttttggatatggtttctagtgctagaacatgttaggaaacaaaggggacaaaaggttcagagaggagttgaattgaggctgtgtttgtgagcagatgaagtcttgtattgttgttgtataagctcaagaaagagctttactaactctcgatcttgctaattaacttctctgcgattactctgttttatggttctgttttcaagtttcatttttaagttgttataaaataaagtgttgtatcaagagagtgagtgagaataaatccccaaagatttcaacattatcgtctctaaacctcacatactagtttgtattaatattttcataaacatgaatcattatcagttgaataacacattgtcacataatattgattgagttttacagcaacacaaaatactccaatctaacaaatccagtttagatagagatatgatgggagcacatatgaataagaatattagatcaagaagaagaagaagaaga

SEQ ID NO: 37667 - DNA, 479 bp, Arabidopsis thaliana columbia
ccgagacagttctcaaagtaatttggaggttctgatacgaaacaagagatcacatccctcagtgttataaccccataaagctcattctcatctccagccgctacataaacccgatgcaccgacctcgaagccaaactgtttataacactccctaaagtcgaatcaggcctacaagttattgcaggaatcgctaaaccgtattcctctcccgctgtagcaatctttgtcgcgaaactcttcaccgtgagttgtctttatcatcaacaaagagatcattcagtcatcattgttaccagagaagttgtaatgagaaacaagtgagtaaaaataaacctgaaattggaaaagacttcaggttgtaaaagcaaatatctaatgtctctcatgctaatgttaccaacaatcttcttattcaacccttcaactacagggagacaccaatgttgttgtcctcatctttttaaatgttcaaggataag

SEQ ID NO: 37668 - DNA, 501 bp, Arabidopsis thaliana columbia
cttccctattcccaaaaaccctgatgctgttatctttgttgctgcaactgtaagtagaaaagttattccgaaactcgaaacatcaaacaatatgtttggagacacattactggttgctgattatatgatttgtgtaggatgatggatacataccaaaacactcagtgttggagcttcaaaaggcgtggcctggttcagaagtgagatgggtcacaggtggacacgtgtcttcctttatacttcacaatgatgagtttcgcagagcaatcgtggacggtctcgatagattagactggaaggagtcatggtgaggtataacatgcgtaacacagcccctttttaacacaaagggaggggtcattatgtaaatgtcttaatctcctcttgttgtatcatttgtgtatgttaggaataagattctttgcgctttcaaaagtggtgggctctgatatttatttgtcttgtgttgtttttgtccaacacatagaaccattttagggg

SEQ ID NO: 37669 - DNA, 384 bp, Arabidopsis thaliana columbia
cctctatccgtagagtacattgaatgtacagaaatggctataagagagtatatctacatatataggattgagaccgagacgcatccgtaacactttgggcgatgaggtttgctcctctgtttgcagcagtgtacactgagcatcaacagcgtacgttttgttctatgctatttttagttagattttggaataaaatttaggtagtatataatgctttagcttaaaatattcttgcaaagaaaatctacattatattgttttatataacagcttacaatattttattttgtctccgatcacactctaattttctcggtccattagataaagaaaatatcaaagacccaatcaagacgactttgctacacatgtagtatgttaaaa

SEQ ID NO: 37670 - DNA, 563 bp, Arabidopsis thaliana columbia
tatcatttttattgtaatgttttagaaaaaaaagttttactgtttgggggttcataaattagatccactattaacataaaattatctaaattagtaatgtttatattgatgagtactataattttgactgactgtgagtactgtaattttgagactttgtgaacaaaggtaaaagtatggtggcatgtgtaattgattgccaattatatatttatttatcataatgatatttttttttcgccattttttttttttcattataatgatatcataatgataaagaaacaaaaaaagagagaaaaatatcatagtggtccgcacaaacatggattagcctaatccaaatgttgattagggtaaataactaacactactcacgtaaggcttagggattagcaaatgaaggaggtacggaacattgtaaccccttgggaactgttacggtcagggtccctgtccctcacttagccgtcgaagtaaatgccatgcctttgacacgtgctcgctggtctctcaaagtctctgtatagaagtttttccaataattgtgtttaaattgagtt

SEQ ID NO: 37671 - DNA, 581 bp, Arabidopsis thaliana columbia
tggttcaagaagagggtaaagtctcagcctcggccatatagatgtttgttgaacaaaagatttgagtacgaccaatataatgtcctcgctttgtttcttgttcattgcgaaccaaaatatatccttttttataaataaactgtggcctttcttaaatatgggtgtattcactaaatctagagatcagattcaaatagattttgtattactattttttatcattttgcaaaagatccactacatctaaagatcagattcaaatatgtttttcattgccaaaaagaaaaaaaaaacatatgtttcacaatattcaggatttacaccaagaaacaaaatttgaggtgcttacaaattagaaaccaagttaaaagcaaaggacttcaagcagtaggcttcctcatatttctgcctgcacgaatcacttcgtccaccaaaagtaattgcgacgcaatcactggcctgcaacacaaacaaatagccggttattgaaatggttcaaccgaaacccaaagcttttattagaattgactagttgggtcgaacattaccctgaattgataagttggcgtttcctgagtaat

SEQ ID NO: 37672 - DNA, 801 bp, Arabidopsis thaliana columbia
caaaaaaacaatgtgagtcacaaatgcagacagaatctaatggaggaaaagagatgtgagctttttcggttttttcttcctccattgatgaaaaagaaaaaatgggcaacaagagcgttttacatgtgttccactttaagagaaaagacgaatatacaaatccgatgcatagaagatgaaaagggtacctctgcaaagtttataaatcaacagcagaagaaagcaaaaacttcaagagttcaacgaaatgacttgtcattcaaaagagatcttaatggacagaaaaaagatacacatatttatgaatagattcatattttaagctactagtttacttactaccacagctatgtgaagaaagaaagaatcattcaatggtacacattcaacaacagacttcttctgttaaagccaaaggatcaggctcggtttcgatttcgatatcgtctacggtgtttcacgtcgcaaacagagaaggatttgctgtcgcggtacttacttgcacctccagcatttccaagcgacgttccaacagatccaacttctcattcaaagaagccaacttgctctttgtggttgattctgaaacacacagagaaattacaaactcacagacatcaatgacttcgataatcaaattagctcataaaagaaagtttcatcacacacaacattgtctaaaaccagctagaattgaagctgagaagatcaaagagatcattacaaagatctctcttagcacatggatctaagaccatacaaatgcaaatgaggggtccgggatcctctaggtgcaggcat

SEQ ID NO: 37673 - DNA, 305 bp, Arabidopsis thaliana columbia
tttttagactttatcttgcatcttctttcttttttttggtagggttgggggacaatgtcccacattttattaattattcatattatcacactggttcagttactttgaaaatgataaatcattgaaccttggaatatgacacgatgattcctgcatctgttgcgtcctgtttctgggtttagctatgtattctcgatggagttagtcaagttcataactctttttactgtgtgtttgaaattctgaattggttcttagtgtttcaagtttatgcttatgcattcgcttgtatgactggtgatgaa

SEQ ID NO: 37674 - DNA, 589 bp, Arabidopsis thaliana columbia
gctttcacccggcacaatatctgctcacttagggctacttccagtatcgtaagcgtagattaaacagctattcacgcgcaactaaattcagaatatgtagccgtgccggatacctgagcatgaaggtaagatttgcagcgaaagataatgcgtcttaccgactgctgtatcaaccatgacaccaaaagagcccctgcttatatgaacctcgcatcagaaaccaataaacttcctaatttcttggttcaagcgcacggtagcaaccgcctagggcttgactttgacttgccaagattcccggcggttcgcatcaagccctaactgccagcccagccgcaacagctaaaagcgggctttgaacagcacggctagcttgacatatacgacagtcagtcatgtactctctgtgatattccaagagctagatgggcttgctgtttgagtgggatatttgcgcacagaaacgtactcggggttcggattctctctggtcaattggcaggctctgcggcatcggcacgatttcaaatggacatactacactgctcgcactgaatttggttttacagcgctcgaggtagactgatat

SEQ ID NO: 37675 - DNA, 643 bp, Arabidopsis thaliana columbia
tggtctctttcactcttgtgttttctaatatttcatttaaacctatttctaaactaagcacatctttgttgattgattgcatttcaaccaaaatcgataaccgaatcattgtttttttatgttttatttcagcttaccacacacgtttagaattttaaaaataaaacaaaaaaaagttaactcgttacaaatgaaaatgatatttttaattggactcgatggaaaggaccaatttattcaacactattgtttagtccgaacacttgccgcgtaagttttccaactccccccattgacctttcgcactttcacaaactccgtatatatataatggatacactctctctttgatcttcacccacttcatcattttacaaaccaagcaagactaatccaacaaaaaaatagtccacaaaaagatttttacagatggcgattaacagatctttacttttgattcttcttttcatctctgtttctctatcgacggcgaggatcttaccggagagtttgtccagtcatcttcgtcggagagatcctcctgtttctaagtcggcggtggttggttgcggagcgagcaggagacaagacggaatatcttcttttgttcgtgagttgcgcggaaagtcgggtctttggtgtg

SEQ ID NO: 37676 - DNA, 623 bp, Arabidopsis thaliana columbia
  unsure (1)..(623): unsure at all n locations
tgatcgtactaaacctacttacatcgctaattttacgctaagccacagacactaatctcatcaactatactaattgttgacattcgacttaattaacacaagataattttatcattactcaacattaaaaaccaataaaagaaagatgtattgcgaccaatgtgcggacactgtatgatagagaaacaacgtggcactgtctgctacaagtccacatcttactttctctctccatctcttgtttcttagtggactgtgttattattattattggcacagaccaaacccacttggctccttcattagattttttttctctctcggaaattgatgggcaataggaaacacgattctctaattctctctctagaaggaccaatagtgtcttcttctctcctcttttctctttctccattagtaacgacctaaactttattttcttttcttgatctcttcttaaatggggttagataagtttcccctttaatttagttgcttgtagacttgagattagtctagtaggttttggtgggctacactaatacaaaagtcaaagtcaaaatttntaaaaaggtttcactttggaagagatattatcacttcatttctcgataggttatgag

SEQ ID NO: 37677 - DNA, 222 bp, Arabidopsis thaliana columbia
tcgtaaactgttaggcagtgtgctagatagcgtacccagtaagtggaccggcacgatggacacgagatcctcgatctgaaatcatatgacccttggatgatgatcgctacatcgtagcgatatagcgcgtcgtgtgctggctgagctcgtgagatgagcgtcgtgcgagcgctggcgggacagcgggtgctctctgaggatgggcagagcgccatgcgcggg

SEQ ID NO: 37678 - DNA, 600 bp, Arabidopsis thaliana columbia
gcttttgaaatcaaatcatatgagtttggatttaagggccgttcgcgggtgagagcaagcgacgggcacaactgcaagagcaccgtgggaatatcctgaatattccaaaggccataccatatacatggttgcagatctgaaggatctaggatttaaacttttagggtagttgcattaataacgtggacatcaaggttctaggatagaattttgaatcaatcttcgtcgacttattgtcagactaccattatttatcaactacaacgtgcatttactatataaaaaatagttttctagattattaatatagtgtagtgaagtcttaaacgcaacaatatatagaacagaaacatcatcaatataaaattaagcatgtttaattaaatgatacatcgtcggaattattttttatgcatcggataaacgtgtacgcatgagaatgaacgtttgcgtcaactttatcccaaacataaagaactaaagaaggattcattatcctttgcacaaaagaaaagaaacaagaaaaaaaaaatgattcttttatccattagaaaataaagaattgagcagattacactataatgcaatccatataattta

SEQ ID NO: 37679 - DNA, 550 bp, Arabidopsis thaliana columbia
tgtagatttagttaccaagttaagattagttacctcagcaagtggaggtccataaccagttagtgatagctctcataaacacaaagtctctcagcactgcacaaggacaacaatctccagctttcatatctcacatgtaataagctttacacagtagcttaacacataatccgttcacagaatggtataattgcatcacactccgttaatacttaatagacacagttagattagttacctcagcggaatcatgaccagttaagtgaagtgaatgctctcactactgcataaggagaagaatcgagctattaagatgtcagatgttaaagctgtagatgctgagaccagcagggaaatgagaaagaatttgatggttttattcaagtgatatcttttatttccgttcataaaatcattagactagatactactaactactagtacacatacatggaattaagtgagaaccattgttgatattcagttcaattttagaccttccaatgccactttctgaaatctcctcctccgctaccaatgcttgagatat

SEQ ID NO: 37680 - DNA, 573 bp, Arabidopsis thaliana columbia
taaattattaaacactaaccttgtaaatgtcccgcattttgtaacagaaaaacttaaactcgagcaagttttgcaatagtaacttttgggccaattataataaattataaaaagcccattaaggactaaatatttttaagttaggcccatctcagattcgtcacctctcccaaaacctctcatctagggtttttctgtctggagaacttagctcacttttgactctgtatctctctgtgtctctcttccccgttagtcttcgtcgtgacctttttgtagtattaagcaatgaagattaagacgttatcaagatcggttgatgaatacactcgagaaagaagtcaggatcttcaggtaatttttgcatatccaattcgtttcccatatcacaaaatttagctttagactatcaataacattatcaattcgtttccagagggtctttcacaacttcgacccaagtcttcgacctatggagaaggccgtggaataccagagagctcttacagctgccaaattagaaaaggtgtgctcttgagtttcaattttgattgtctgtgttgtttagttatg

SEQ ID NO: 37681 - DNA, 550 bp, Arabidopsis thaliana columbia
aaaaatataatgatttgtgtatgaattgttattcttgataccatatatatataggagactaacttatatttaatctaaataaattagaaaatagtaaatattttaaatttcttaattcttattccaataggaattttgtattcaatcaacttttttaaccaatcaactttttttcagtgcttatttttgtaaaaaccatacttctcttgcaaatacatttttctaatgcataccgtagttacaatactgtatcataaaactcacaatttttatacaaccaaatacattgttaccattcgaacttgtatcacttaatagagaaaacaatgatgtttctatcttattttttgaatattctactagtgaattttttatcatccaagaagatacatatttattttgttaaaaaaatgaaaaagatggtttttcttatccaaacggaaaattcctttgtttgattaggatataaattgcgttatacgtatatattcaaaaaataagatggacgaaatataaggaaaatctcattgatattatctggaaaataaaa

SEQ ID NO: 37682 - DNA, 497 bp, Arabidopsis thaliana columbia
tgtgtgcgagtcgtttttatttatttaaggaaatgttaatgtaagttttcatgagaaataactaatttgatcaagatccttggattcagtaagtaggttatagaatcaaaaagaagaaggcaattccctagtcttgaaataaggtttgaattttactttttatcatacacgtatttttttgcggtatgtagaaaattcccgacgcgaactaaggaaatagtcttaggttctatcgactatgtcatgttgaagttgtaactagttgaaaacattttattgtttgaagaatgcagaataacaacatttgccaaacatcatgaaatcccaagcatgtgtttagtgttttctcatagaaagattacatataaaaagataacatatttatttcaatgtccttaatggtttatggttaacaagtagaaaggagggacattatctcaaatttcacagtcccacaattcgtcaatggtcttatagaagccgtgtgtctcatgcgc

SEQ ID NO: 37683 - DNA, 701 bp, Arabidopsis thaliana columbia
gactccgactcttgtcagggttattatacaatctataaaacaaagattccgctagcttcttcgacttttcacgagcattcctcttcacctgcttcctcatatccgaatctccttctatccttccaccagatgaacctcctccaagctttttcttgctcctcccggccaatgcccgcacgtctcgccggaatccaccatcttctctgagcaaaagctccgaccttttgacactaaacgcataattcctctcggtaattgccggtaaaaccgaaacgatccttcgtaccccggaattgagtggagatttacggaaggaaaagctagggttcagggttttagaaaaggataaatcttgactcagcatttcttctcccgacacagcttagagatgacgtagcaactgtaataatataagccaaacgatacgacggcgttttgctactgcgccattagtaatcagaaaaagttaaaaaccttgtctttttttttttttttttggttcaatagattgattagcgatggcgaagaggatccacctgacggaactaggctgcatcgcgtgtgaggaacttactgagctcggtgcgggtaaagaaggatggctcgtgaacaatccaaaccttttgagtgcacttgattctcactctttagccctagccaatcgatttctcatattgattgtgaattggggtgatctgatg

SEQ ID NO: 37684 - DNA, 1084 bp, Arabidopsis thaliana columbia
ctaaaggtccctgaataaacatggtaagaaattaacttaccatttatccaatcatttttttaattcctagcatcaagacccactccctttttctgtaatgagattttaaaggatctgtaatttatactttaatatttatgccaagatcgtttaagcataacccacgcatgctctttgaagtttcaaatattcaacataaatctaatgaaaacgaaactttcaaatttattaacaatattcaaaaactcattgtacacatatgacgatataacaagtatatgaaatcaacgcaaagacgaccgattccaccggtaacctaacacccttttcttaaatgtcatcaatatgtctatacttatatataacattaacacacacatttcggacactagagattacatcggttataattctagttcttgagtttgacttgttaaacccctaaaaatagtacctataagaggcttctttttcaacttctcattcttcatttccggcgaagttatggaccgatcaacgccggaacataactcatctccctcacacaagcgtctaagcgtgagctttctcgtctcaatgatggttctctgcgccaggcatgcgaatcggctctcgaagaaactaaagctgaagtcaaagaagcgaacttgcagcggcggagagggtggaggagaaagattccgatggaatatgataagctcgtcgatgagttctcctcggccaaaagagttgttcacgactttaagcaacaaggcgatgaccatggtccgccggaaaaacccgccggaggaaaaagcaaccgccatggaggaggagcatggcctttggcagagagagatattgatgggaggcaaatgtgagccgttggatttctcgggtgtgatatattacgactctaacggacggctattaaacgaagtgccaccgagatcaccacgtggcactccattacccagttacccgacccgttcttaagtcgggtcgcagttaaacttaatgggaacgaatgattattaagcaacttcattagatgattgaaacgtcgattaggcagcaaaacaaaattactatgtatataagaatg

SEQ ID NO: 37685 - DNA, 809 bp, Arabidopsis thaliana columbia
atgaagaagaagagggtttgatagagatctgtctggtgagagaagcaaagttggagagtgtgaagaaacgttggctgagtagagaagattattacgaggagatgatgatcatggagatttgggaagaacttgaagcagaagataacttgattgagattgacatcctcaaacagatcaattgtttgactttattagtactgatagttctagatgttttatccgcacattatttcatatgtttcattatcaaaattttggtcatcgcaaaacatattatcttgtattatattattgcgtttcacgttgacaaaaaaaatgttagatggcatagttaattactcgtagcagtttcgacttcaactctattggccaaaaacgcatcaatcaaatccgatgctttgtgagtcacagtgactgtgttctcctctcttgtctcagtctcgcattgtgcgttgggtcttgttcttgatttgacaccaactgtttcagcttggtcagagaacatgacctctgagacgtgtgagctgcaaatctctttgtatgcttcgtagtctgcagctccagtgtttcctccttcaaggatcttggataaagggtgaagaactgagactggaccgtcgcttgattctcagctgccgcttgagtgctaagaagtcccagacaagttctgagttcttaaacaggacaaaaaccgcagagtcgtccacgtggtagacagaggtgacagaagcagagccaaaggctttgcatatgcattctttgatcctctcgccttaagttttcgtgggaagttccagatgaggacaatg

SEQ ID NO: 37686 - DNA, 806 bp, Arabidopsis thaliana columbia
tcgtcgataaagagttgtgacttgtgaatatcatgtacacaatgttgtacagtgccatttgtgttttgtatttacatgcgattgttcaaatttactattgattgaaaaatctaaactgtgtaataaaatacaactacataacatatacttgtaagaagaggctcgttattcactggagaagtctatttgtaatttagtccatggaatatagttgtgtgacataaatgaagcaattactgtaagaaccagagttagacttttttacctccttggtctgattgagaagtattaatgatgaggtttgctatttagagataccttacttgagatggttccttttaatgggttacttcaatagtcatgttgatacactacatctagttatgtttctcaaatcaatattttcataaaattatctttgtaatatttttaaaatgctgtagtaatttttttaaaaaatctaacactattataaaaaaccaataaagtgcttttactagttctataaaaattaataaagttttttttgttgggttaataaaaaaaagaagaagaaaaaaaaacacaaaaaatctctctcgagccctaataaaactgtgagcccctctattttctcagaccctcgtgtttcactctcgcttaacgagtcgtttcctttcctctgatcaattctctcagagagacctatttgacatttatttaccatctcaatcttctttttcctcagattttcttcttcatctctctcacacaaaccccaaaaacgacagcgttttcaaacccaaacaccagtcgacgcttttgga

SEQ ID NO: 37687 - DNA, 1117 bp, Arabidopsis thaliana columbia
cccatttccacatccacacaattagtcctcccttcaatcatatatcacaaaaaagcaagaattcaattctctgaagtagttaatacgaagaaatcaatcataagagacatttaaagttgagaaccagagagagaagttatttatctttacctttcccacaacaattgaaacaatcgactcttccacttccatggcagattacgcatcgtcctttcgccttcgacttcatacacgtcttagctccagactgttaaccattgaattcattcttattaatgatatcaagagtctagagatagaaattgggggtttttggtttcagacctgagttctgactatccatgaaggtttggtgagatagagcctagtttttccctgcgtagattttgaattcggaacgccttcccctggccggacagccatcatctccggcggagatagacacgcgttcaccgccatctccgtcactcttcagtcgtaactcgtaacacaccacaactgttctgttcctcttcctcattccagtttgtgttctctctcgggcctaaggcccatctctcaataaacccgtaagaaaattaaccaaaccggaccgagttagtgtgtttaggtctgatttaattttattcgtttcctatgtaaagtgtaaaccaaataaaacacaaactcaaaagtgattattgaaatcattacggttgttatggagtatggtggaccaatcaattgatgttacttgtccagcaattaaaaataatcacattggtgacttgtatttgctttctcttttgtcaaatactcaaagatgtctctcttccattgaattaaaaatgattttgttacaagcaaccaaaattggattatgaatgaataaagaattagaaaacagaaccaactttgagttcatcatcccatctttgccaaccttttgactaaaattaaagcccacatgatgattcttgtttttccaaaacctccatcttcttcgtcttcatagagtcttttctcttcctgtttcacattagagatttagaatcaaaacctcaaaactaacagaagataaaaaaaagaaaagcctgaatcatggccttacagtcgaaagtagcccagctcgacggtg

SEQ ID NO: 37688 - DNA, 593 bp, Arabidopsis thaliana columbia
ctatgcttctccggaacaaagaagaccaagaagttgtttcaagggagagaaaagatcggcgtgattttgatcatatctctgctttggcaactaggatgggattacacaggtagatttttgttatattaccaagtgtagtatttccttgaggttgatttaactctttggaagattatagagatatgttctgttgtttgcagccgtcagtattcgaagattgttgtcattagtaaagctcctttgccaaattatagacctgatcttgatgataaacgcccacaaagagaggtatttgagtgattcttagtgttctttatatgcttttgagtctaccttttgtttaccgggatagggagcttataagagatacctagtgatgctaagctggctaattaagtttcctaaatagttagggttcttacatgtttttatgctttgttcattttcatggcgtcttggatataaaaggtggttttgccttttggtctacaaagcgaagtagatgcccatctacattctttcctcgatcagaaaaaaacattgattccggagatgcccaggcaaaatagtagtgaaagtttagcaaacggtta

SEQ ID NO: 37689 - DNA, 828 bp, Arabidopsis thaliana columbia
tcccctctagttgtttttaactaacatagaattaaaatactcaatggatgtacagtgatttaaaattttagtcatgacttatctgtgatttaacatatacatgtatttaacgcttcgttatggaatatactaaagattttgcattcatctcctttgtaatttgaaatttaattaaaactcttattcgattactgtatgtggttatgtaactagaagcctagtagatgagttatcctcacaactcttgaaaattttatattcgcaactattaccaatctaaagttttttttttcataccaaacagttttattctttgttccgcaatttgctacacaatacaaagtcaaagctctccccctaagtaaaaaacatgaagacggattaatgttaaagaaggaaatacatacacagcaaaaagcctgtctgtatgtacatcgtcaaacctacagacaaaacccggaaatgtgtatctgaggatttggtgattggttgggaaaactcaagtgggtgaatctcctagtagcaatgtatgccaccatccacacgccacttttctcagtctgcagccatccagctggacttgtgtaggaatgttccggtcattcgtgtcccctagacccagctgttgattaacaacaggagagattgcaaaaatgagatgctatttgtacaaatgcagtgatcatgagacatactcacataacttcttagcaaaccaaatcaggaacaacatcgtacctgtccatatttgttccatcccagcatagcaactgaccatcttctgcagaaacaaaaattgcagtgttaacagaaaaaacagataataca

SEQ ID NO: 37690 - DNA, 459 bp, Arabidopsis thaliana columbia
tgatagattaattcaagttctaaagtaagcccaattatttttgtttcaaaaaaaaaaagaacatgcccaaaactatttttgagttgattttactttttttatccaaaagaaaaattgttttccctaaggcctccaattattgggccggggctgttaacagaagcactaaaaagagctctatactagaatcactgaagcagaactctccctaaagacctcaaattattgagcagaactctagtatacgcacacggcgtgagaatgaagaatcagataaatcttctccataatgtaatcactttgacaagtccttaactttgaagtttgaacttcgacaaatccacaaacaaacaataatcaatgcccactttatcacgtccccaactttgaactttgacaatcaacacaaaataatcaatgccacacatgttattttgtaaagctctaagggctacaaac

SEQ ID NO: 37691 - DNA, 389 bp, Arabidopsis thaliana columbia
cccatctgttgagtcagattatccatatgcttagttttgtcccatccatctttgttcctgctctgtttcattgtccactggtgttgaatccatattatctggaaccgggcttgacatgagtaagcgttcgagtaaaccgtaatcaacagggtctatatcagaatccattggaaagtcgtcaatgtcgaaggacaaagaatcatcgatcaacagatctggatctagtaatggactagaacctcccaggtttggttccatgaaactctctggaggcttctctgaattattttccggtagcatatgagtgaagtcgggaagagttagatcatcaggtgaaggaatacagttctcggttgcttctgatgctgccgaaacattttcaggagttg

SEQ ID NO: 37692 - DNA, 759 bp, Arabidopsis thaliana columbia
tcagatctgatttctttaattctatgttaggcccattaatctttttgtgtcgatctcctcttatcaatggccatggacaccatttgatagagatatcaccatggaggttttggttcttcatttatcatttgcgaatcctggttttagctatatctaggaatgtgtggcctcattccaaagtcttgaagaccttctctctaatttttctgaattgtacttgcctttgtgtcaaatgtggctttgaattatgggttttcatcgctcaatggtcaccaagtagctcatctatcgccttcaagctcatcactatgtccatcatcatgtttcattgtctcatagtgtatgccgctattgatcggagatttgtttgccttttgtgttggatcctaaagctaaccttaaccgactatagaaccatagtccttcgaatccttgctatcctttttccgtgggtattgcagctagccccggtgagatctatagcttcgatgtctttgtcaacgtcactacgtcccttgaccgtgaccaacctgttgtccttcgactatttcgaggatgatccttcgatttactgtgacctcacatgttgcactgtgcttctttgcttatgcctcaaagctctcatggaattcaaatcgatgcactttatctttctttttatggtattggggaatacctgtttgttgtaatgctttaatctttgagttcttaaactgtatttcttgtaattgtgctatgttccattgaatgacagcaagg

SEQ ID NO: 37693 - DNA, 647 bp, Arabidopsis thaliana columbia
ttcatctctttcacctctcaactcattgattcatgtattaaatctctctcacaaaatccaccatactttgaaatccaaaactagtataaattttttctaaagcaactaaagtaaatttgcaaaaatttcaaaatttattcattaaagattgttaagagtcttgatttataactctctattgaggatgatcttaatctctcactcacttctctttctctctgtttctcgctcaattttccgaccatgtttaaaccaacgaaaaagtttctctctgtactttttcacgtagttaagtttaaccttcttggtgcaattttcgggaccggtgccgccgtcaacaagtcctctcaaaacgacagaaaaagctgacgcagccagagaagctctacaaaaaaaggagaagaagaaactccaagctatgacgtagcacattactgttcttgctggactacattccagagaaacaagaacaaaagatctcctaaaaaacgttccggtgaacaaacttgctgaaaagagaggaggaaaggctccggtgaacaaacttgctgaataaggaggaggaacgctccggtggacggtgaaaaggtgaaactttttaatgattttagtttattagtttgattgaagtttctgtcgtaatgatg

SEQ ID NO: 37694 - DNA, 499 bp, Arabidopsis thaliana columbia
acacaaatttatgataaaacagaacagatcttgtgacaatgtttggagttctttttgttcctataaccagaaaggttctctaaacgtggcaatgtacttttcttgccttatgaaatgaactttaaaagtatgtcctttttcaggtcaacatagttctccattaccctaaatgtcaaacattttggcttctacacaatttagatctcaaacccaatcaaaaagttcaaaacttgccaaatttacattgaattcacagtaacgaatcttttccaataaccaaaaaaaagtcacggatctatacactagtgatacatcaatcactttccatgtcagaacacaaaaaacaaaagattccactcactaaaaacatcttaattgaaacaacaacaagtaaagatctgaattacaaatatcatcaaatcaagaatcaatacaacaataagagaaaattaagaagaaagagatacctcattggtgtgagagaaacaggtatggagat

SEQ ID NO: 37695 - DNA, 591 bp, Arabidopsis thaliana columbia
tggatggttgtgatgttgaaaaaaaagattaatactattagttatttttattatatttaatatgtgttatgtgctaaaaaaattcctggatccgccactgttttatatatatataatactgcagtctgcatgtacttttaattcttcagtaatacgacatcatatttatatacgtaaaatcgttagagtactgttaacagatttgtatacgtaaaaaagttagagtttgaggtactgtgtagtcgtcagatttgtatatcctatatttaaccttataagattcggtcgacatcgatttgtatatcctatgtttgagatttcggtcgacatcgatttgtatatcctatgtttagttataaaagattcggtcgacgtcgatttgtttttccttgatattttgcagtgaaccattatcaacacgtgtgacaaaatgatgagtggttctgttaaatcacgctgagtcgtcgataactgaatggcgacacgtcacatggttgtgatgttgtgacaacctacgtcgtcgcgtctacctggtacgtatacgaatgcgtgtttctattattggcatgctttgtcttttttatatattga

SEQ ID NO: 37696 - DNA, 653 bp, Arabidopsis thaliana columbia
tagtaacggccgccagtgtctctaaagagaccgcctccttcaagccggagcatttgttgcttgaggtggtttcgaagcgctctgtcgccctctccgtcctgagcagcctcacgtctccgcgtgacttctgccttccattctgataatgcatcgctagcggtaccgtcggtttgggcattgcttacagacgggtgtgatacagggtggtagcctgtctcttgcttgatttgaggattttgaccattcggcatctgttgcatctgctgcatttgttgcatctgttgcatatgctgcatgctagaagggcgcggtaatcccataggtgattgtgattgtgcttgcatctggctaactgagctggcggccgctgcgccatacctctgctgaatcaggttggttgcgcgttcgcgcatgactgcgcattcggcgggacggccatcatatgactcatggggggtaacgcaggatggccattaacacctggttctgtcttgatttgtggagagtgtccatagggtggccgccgcttacgccgactggagtttgagcttgaaggggcggaccgttgggaggcatagactgtgggtgcgaaacatgttgcggattttgtagttgtgggtgctgagtatgtgactgtatgcggtggaaggtgt

SEQ ID NO: 37697 - DNA, 242 bp, Arabidopsis thaliana columbia
tagttaccttaaatagaaaaatagaaaaatcttatgatatttaagaaaatgttgatttaacattagtagaatgctaaaaaaaatcatatatcatatatatcttataatgtcaaattgacgtcgttaattattttgaatggtgaatattatgaataaataaataaataaagagtaacaaaaaataatttatagaaaagtgattagtgtattagacctgagagagccagtgcaaggcacttaag

SEQ ID NO: 37698 - DNA, 1281 bp, Arabidopsis thaliana columbia
acttgtggagagcttgtgccaaaaaaatccaacggctcagattcaaccaacctcgttataatcccttcgtaacaaatgccacacgaagacacacatacacacactaccgataaagaaaaaccagagaagagagagagataacaacaatggtttcttcgcttcttatgtcatttgctccggccaccgtgagggtttacgccacaagcacaaagggaggttcaggcggcccaaaggaggagaagaatcccatcgactttgttcttgggtttatgacaaaacaagatcagttctatgagactaatccacttctaaagaaggtggatgagaaagaaggcaccaccaccggaggccgaggaaccgttcgcggtggtaaaaactcagctccgacgcctgtgccgaagaagagcgagggtggatttggtggcttaggaagcctcttcaagaaatagaagaaaaaaatgtatagtaatttgcattattcatgcctctgttttcattctctataattcttcggatttcacttatatataagctactctttcttaatcttatttgacatcacatgatctagttatttatttttctgaacattttcaagattaactccactacttcgagaaatctgagaataatagactaatatgagtaatgctaatgcaactttttctggagtacaatgagtgatgctgttgcaaccttttgtgggggtctttaagatctttacacatatcagtctggctttttatacatatgaatcaattatacacttttttgccaagttaaagagactgtatctagcaagaataccaaatcttaaaacacatccaccaaaatctatgagttatcaccaaaagtcatatcccaatatggttcttcaagtttgattcaagtgttctatgcatgctggaaccatggatgctaaagggcaatggtgataaccagatctgacctggagatacagaaggcagcaaggaaagagctgatgatccgtgttagatactgtctttatagctataattgatgatagaacagagtagttgttaactggagctagcttgtgctgggagcaaaagctcttgctttccttcgacaaagactgcgagttcttctggtgcaacaccatgcttaaccacttctgcagttcttcaccttctacttgctctttctctgcacaaaacatgatatttcatcagcagaatcagccagttgtcacatgaaccgaactcaagacaagggatataatctgtctcgcaagcagttatagccctcagtgtccgacat

SEQ ID NO: 37699 - DNA, 1022 bp, Arabidopsis thaliana columbia
catgaatgggccattttctaaagtgtttggattgcttgtccaacaataactatccaacattcacttgtccaattgctttctagcttttgcttttctgcttgccctttcaattaatacacaaatttatgtatatatacattatccacctacatataaagtatatacatgaactttcgttttcttataaaatgaaaactattagcatattcctaaagctctcatttattttcgtatgatcaacttggtttcttagtttttttgttaatgggcttgattttttaataactcaagagatatcttgaattatataaacccaatgaaacaaaacgtgacaataaaatatctcagaccaaaataaacaattttagtcaatatgggctagattataggcccataaaggtcaacaaaattacaaaacctctgttttcttcagacagctttcgagcttcgtttgtcagacagagaacacgtggcacttccttcagcacctctgtgtcaaagcaccgtgagagacaatggtgacgcgtgtgaccagacggcgtttaaacccttttaccaaaatctcatctttcttcttctccgtcgtcgtcatcgtaatatctttaatctgatcgttttgtcgaagcacaagaggctgaatcaacatggaaggcacaaagagaagttctttgggtgcgcgaaagaaactaaagaggaagaagtgcagaagacttgtcagaagcattgtcacctacctcaaatctgatacatacttgtttgctcctctgttttccaattttccaccgctcacgacggagatagatacgcctccgccgtcgaattccaaaccatccactgtggacgatatctccatggaaggtaatgctatgactcgtgttctttacgctcatctgttattgggttttgggtaagtggttgatcaaagggtgtgagttttgctaattttggacatttagggtttgagtcattggggattgagaagcttatcaagaagagaagaatgtctgagaaagtgaaggaat

SEQ ID NO: 37700 - DNA, 520 bp, Arabidopsis thaliana columbia
ctagagccctgctaaactgcaaatatcatatagatgaaaaggtttgtgtttgtatatgtatatctagttacttgtcttcttcgttttgaaagtttaagttatacttgaatttttggtttaaattataagtggatgtcttgtttatacaagtttctagttgaatgttgttttcaaactcttttctcctgtgaatatgttattatatattcgtattccatatgaaagattttgtaaggaaaataatttgttctttttttgtttctctctttttgtagacataacaggccaaaactcacgggtaggatcttgtgttcactcttctttagcgctcttctggggtatgttcattttattagactgttcacttataataaatgtttacaaataagttttgagttgtttattttgatcttgatcgttcatatatttgcaggacaagtttggtgcaatacttctttcttattggactagagtatacatcttcaactttttccttagcgtttacaacatggtccttcgg

SEQ ID NO: 37701 - DNA, 1427 bp, Arabidopsis thaliana columbia
ctctcagctgatctctatgactgtcccttaggttcttatcactctactactaccagcttgttcttagtagcaatactcggtttggtcttgttatgttttggatgatgatgataactagtctgcttgaagaagagattgcttgtccctcacttgctggttttttcccttttgtggttctcctttcatggctttcagaataatttgaaatgcaccgggttggaagtgccggcagtaatggcggttctgttcgcactcgcaaagagaaaaagcttacttatgtgttaaatgatgccaacgatacaaaggttagtttttttacaccaatatggtttattgccatcaggagttgtgttactctttgtttgatttattttctagttccttcgtattatacattaagacatgacttgaaatagtttgaagttataagacatctccttctcaactcaatcctgatgatgttcttcttatgttatttgcaagctgcagcattgtgctggcataaattgcttggatgtgttgaagtcgtctgtttctaatgatcaaagctacctcttcactggaagtcgtgatggtacactcaagagatgggcatttgacgaggatgcgaccttctgctcagctacatttgagtctcatgttgactgggtatatagttttcttgacactgaaatttaattgtatagggatgatcagtgattaggatcctgtgtttcctgaggtggatgctgttctattgtgcatctaataatttcaaaccccatgttgactggtcaggtgaacgacgctgctctggctggtgagagcactcttgtttcttgttcttcagacactacggtcaaggtttgtgaatttgtttcgctagccgaaccaatattttactttgttttgtttttgtaattccatattggtttctaaatgcggcttaattattttgtatctagacatgggacggtttatcagatggagtctgtacgaggactctccgtcagcattctgactatgttacttgtttggcagttgcggcaaaaaatgtaatttctcatttgtcatgcttttttctttatagttcccactgaaaaaaattgattggtatggtggtgcaagttttgaggatatatgtgcttctcattgtcgcattctgattctatcttgatttcacaacttttagaataatgttgttgcatctggtggccttggtggggaggtttttatatgggatattgaagctgctttgtcaccagttaccaaacctaatgacgctaatgaagatagttcttcaaatggtgcaaatggtcctgttacaagtttaagaactgttggttcaagcaacaatatctctgtgcagtcatctccatctcagtgggacacaccaacaattgcgaaaggccataaggagtctgtgtatgctttgcgaatgaatgata

SEQ ID NO: 37702 - DNA, 576 bp, Arabidopsis thaliana columbia
gccgccaaaacggcataccaacagtaacgataacggcagtttgcttccgtttgctcagatgccttgcgtgactagcaccggtaccggtcccgagggcaaaaccgtaaatggttttctataccgttactcaaaatcagagatcagtataatctgcgtctgccatggaacgtctttctcgccggctgagttcatcgttcacgccggtgggactaatgtgtcgcatccgttgaggcatataaccgttgttccctcaactttgtgaactacaaatttacatattttgttactctttttgtctcgtttttgtgtatataagtttcaccgatggacgttttgagttcgaagggactctccatccatgattttcttagagttttgtttttccttgacatttttcaactaattttacacttaatttgttgcattgtctctcttattaacgtatcagtaaaagtgaagaattcgtgtagttgtatatatatttgtctatttatgcaatttcatatggtttgaattcgtcacaaatattctctagtaataaagcagttaaaaagtaacagattttactaacaaaca

SEQ ID NO: 37703 - DNA, 884 bp, Arabidopsis thaliana
gtgtttatattacttttaggaaaatgaatttcttaggtagctaacgaattctcaatctcaaataaatatattagccactagataaacagccataaattaatatacctacaatttctaaatagactaatttgatacaaattaacgaatcatattcatatttaggaaaaaatgtagttaaatcccccaactttcaaaaaatggccaatcaatacgtcaacttagatggaagccatttaaaacatcaacttacagttgactaacaaataaaacatgaactttgcgttgacgaggccacattatacgcgtcgttaagtcgattaacagacccaataaacgacgttttctcccgttagtatctctctgttagtcaagaaacggtgacgtttagaggttaatagaaacccaattagggctttgtcgagaagaaattcccaaatcaaatcaaattcattcttccccaaattgcttttgttcttccccaaatcaaaaaccctaaattatcgacgagtgttagtggatgccattagttagactcaacggcatcatatcgacgattgggtcaccaatggaagacgacgagttagagagttctgtacctgtagttgctccaccggcggaagtcatttcagagtcaggtggaggagatggaggagtagaggcagctgctgttgataacagaagagtttctggacgtcgtcggacaggaagtagagtcagagtcgtagaagatgatgagcctgaaattgatcccgagcttgaaattgatcccgaaccggatttggaagatgattgcgccgtgtatggtgatgacgattgtgatgttgttgatgatgcagtagctggtgaaggcaacgaagataacgttgttgaagaagatgctaacc

SEQ ID NO: 37704 - DNA, 685 bp, Arabidopsis thaliana columbia
gcttttcttctagggtgtttgggtattcaggtcaacgattcgattccaagtcatttcggttcttgagtttaagaaatattagggtatttttaagagattgttgacaaaattaccggtattttgctttgaggctgaactggttgggcttgatattgtcggccttgtccttgatcggcttggtcttgttcccttttttgtcgggcttcgtgctcccgtttttgttcatttagaggattgggctgtttaatctgtttgagcttttttacctataagtggcccatatccttcctcatcttcatcatcaaccaaatttccctgaaattgaaaccataaacaacaaaagattcagctacttcacaataatcctctagtatgttaactaaaccctaaaattttatgaatttctcactttttcagtttagtgtcgacaagcggcgacctgaacgagaaattaccttcttcttattattctccttcttcttccattgttagttttcttctcctttgttcgtcagtccttgcttatatttttcttacgtcttcttcttcttcttcttgttcttcgttcttcttcttctgcaactgttgaagaccaaattcaaccttactaagtagaatctgagaattcatatgccattgaggaagagaagaagctgtaaataatagaagttgtaaataattggat

SEQ ID NO: 37705 - DNA, 1181 bp, Arabidopsis thaliana columbia
atccccggtgtatgcacccttgtccgtcgggttctctacggtggatcaggttattttggttacacgtttcttagtggcagagcagaataattagctatggggtcataattttcttttagatgcttacatagttttatgaccataccaaatagtgtagtagtttatgcatttcattgagctcgaagtaaaatagtttaaccattggaaagacaccgtcgtaggtttcaatgcctcagttttgattgatgtgaccttgcctataaatcacagaacaaatgagataagtttcaatttaatcaagaaaacataaatagaaagtaaacacttttatggatagatcgaaacatttctttaaggtttttgtaaatgtcaaaaagtttagaaacaaaaaccttttatgttggtttttcgttttcgttttggcttttatgaaacaacagaattgaaatctaagtattaagcaaaagaaattttgggtttcaattttactaaaaataaataaaaagggtaatattagtaagtaacctttgactcaaaaacaaaattaagaaaatagcacgagtcggacaacttaagaaacaaatgtatttgagagagtgaaaaaatcaaaacagctcttaaacatgggtaaattgcaggcgacacccgttgaccatgttttattttcatggattgtcaaagtcaaatgtggttttcaccatttgtctttttgcctgcaaaatgacgcttctgcccttgcgcttctctcttagtaactgttgaaatgtacggtttagtttagcaggtttagttaagtacactgttccggttcagttgaagattttttgtttcacgttgacgcgattcggttccgttacaagtgagattatttccattattccgaagtgacatcaacatttaatgccctcaaaaagtttagatgtgactattgtcacaattaatgcaaaatcatcattacatcacataatattacaaaaattattgataatcattaataagaaaattgttgagatagagaagatgaacccaggaacaaagaattattgagaacgtacattgctgctgaagaagtgttgatcttgtttttgtaccaagtttggagccaaaacaagcattgctcgtgtaagtaatgaagttcttttaagacgttttttgttatgcgaattaggatcttgattgtg

SEQ ID NO: 37706 - DNA, 1054 bp, Arabidopsis thaliana columbia
tgaaaaagtatgtatagataataaattctttagcatatgatgtaattcaactttttttaaacgtacgtgtattactcaatctataaagaaaaaaaaatgcgtacaatacccacatctgagaaaagagagctcagaaatgtgacaatttcatctgagaaataagaataatgcgaaggacccaaccatcactactgccaatttcatcacagctcaactacaccgtctgggatcgaacccgggttagatagtggtagagtattaatctaccactgaaccattggtgctacttgttgtgtatgtatttaaatatgtgttaatattgtttgagcgaattcatcaatcatcaatcacctctcttcatgtaatttgttattataagtttggaagtaacaatctacatatacatttttgcagccattttatgaaataaatcctgtagttgggacttatttacaatggctgccactagattttaatgtttgttttttaaattagaaaaaaaaattttgattaaatatttgacatttaacaatcttccctaaatctctccacattaaatatacgattagttactaaaataaaacttccaaaatatttaatatcatttaattactacaaaatgatcatttttgatattgcttttctccatgactataaaaattcgattataatcatcaaaccgcagagatatttgatagcatttaattactacaaaattacaaaatatttagacaataattcataaacatatcataaataaaatcaacattaataaaataaatggtttttttacgggacgggttggcgggacgggtttggcagtacgttacttaataacaattgtaaactataaaataaaaatattttatagatagataaaatttgcaaacttttatgtatactaactttaaaaaataaattgttcccgcagtgtaacgcgggttaaaatctagtggttttgtaaaattatagctaattcagccatgctcaaataaactagattttttttcctgaaatcactagaataaatcatttaaaagtaattagaggtgaa

SEQ ID NO: 37707 - DNA, 792 bp, Arabidopsis thaliana columbia
tatttcttttgcttaggttgctaaagattatagctcaacctttgtttttgttttcttcttcagttttgaatttgaggagtatataaactgtttctctaaggtcaaacattaatatttgactaagcaaacaaacaaatattggtgagaaaaattctggctttaatcctgagatcatttttgtgtcaccatttttagctcatgtttaatcgaaaaaagaaaaaaataaatatgagagagggagaattgaatggtatattttcgtaagctaaatatacggagatactcaattttatcatcggatgattccataaaatatcaactaattcaatctacataaatttactcgtgatctcatttgctatatctcattatcatatatattttgaacaaatcgaatcaattttcttgataagaattcagtaatttaggatgtattaattaaaaataaaatgaaattggtgtgtatgacacgccttacgatgtgacagacagcatcccaattatcaaccgtccgatattaactgtacgaaatgccttcaaagatcaacggtgtaaactcttcgtgtacgtacaaagactaaaaagcagtgtgtacatgagcaaagactgacacccttggtcgatagcctgactctcattacaatgccgcttctctcacagtcagtcttctagtcgcggaacctgtcatgccaagtcgagagcttaattgatggcttccccgacgataagaaccgtcgcaagttacaacactcacctagagtactccgacgattgctatggagacgagttcat

SEQ ID NO: 37708 - DNA, 549 bp, Arabidopsis thaliana columbia
tagtaacgtccgccagtgtgctctaaagagggtccagaccggcggcgctgcgagtttgacagtaggagggccgcagccacggccggaaggttggtcaatcattattcaagattgacgatttcccttatgacaggtgattgttggagacggcggcccggcctccccgcgacgctattccccaccgatcaatggagcttcgaagtgcgcctgccagtagaatcaaccatcgagactgacgcttaccctttgaggactgcaaagctccattcaaagatgtgaagaaagagattgcagccaaagtacagccttttgtcatcgcggggtcgatgcgcgttgctcggacagtctcacgaaccttggtgagttgctgacagcctgttgattcgattccattgtttggcgaacctcaagaaactctcagggtcttttggttaattcgcgctcacgacatatctctaggatccaagctcctgtcagcccgtcacgactatgaggcaggttttggagctatggtgccaacgttcagatctcacgggattggggccggga

SEQ ID NO: 37709 - DNA, 888 bp, Arabidopsis thaliana columbia
aatcgtatgagttactaacttaggttttataaatgtatcttatttaaaatttcaaattgtttagtttccttataattataggtttttataatgatcttatttacatatccatttttttttatttccttataattataattttattgttttaagattatttcaagaaattttcttctaacacgtgtcacaatctaagatcgatcaaatcaacaagtggcataatcttctgagttagtaactttgaaaatcatactttatataataagatatatactacaagaaaatatcctaattttaacctatgattttttgacgaaacctgaactaataggaaatttgtaagaaaattttgaaaaaggttaggaaatatcctacctttttgcaacataaatgttagtaagaaatatggtacgagattgaaagcaattcaaaattttccgttattcgggtaggaattttttagaaaataatcctaccatgttctttgtaaatgtttcatatgaaaagttggatcaattatgagattggcacaaaaaactctatgcctttgtgaatttaggaacatctcaaattactcaccaaattaggtacttatacattctaatcttttacaacttcacccctcaaagttccgctaaattattgttctagtattctttctcctctctgtgagctctctaattttcccatttagagccacctctgactagttcgttgcccatatacccgaccattcactcactcgtttctatatttggagatttctctccaactaatctgatcaggtacaattattttcttccgccgatgcttttctcgccaaagttgcgccgtttaacgccgtctgattcgctgcttttctcgcgcttaacaccgtctgtctgcctc

SEQ ID NO: 37710 - DNA, 584 bp, Arabidopsis thaliana columbia
  unsure (1)..(584): unsure at all n locations
tagtaacgtccgccagtgtgctctaaaggcgcaggagcacattatcggcagcctacatattgcctgtgcttatcattttgctgtcatcatcgtaacacgtccattcatggttcaagtcttgggagtgcgactggcacgactacaccaagaatcgccgggaatcatccaagacagcacattactagaggaccctgcgcacacgagactcgccaacgcctgtgtcgagtccgctttgtacatgatccaaacctgcctcgaagtgcaccaatcccgtctcctcctaggcaacatgtgtattcttaagtaagcaattcccaccatatatcaccagcctagcctaacctgcaagcactagggccctcgtcttcgccgcagccctcatccccggcttctccatgttctcgcagaaggagctagactcgaccctcgaggaggcattcaccggggcgctcgagatcctccgcgtcctttcccaacaatccgcccaggctgcgcactacttcgagatcctgaatctcctccgcaacgcaattgacgagcagcggcagacnnttcgggaaaatcccccccagataagaaatacg

SEQ ID NO: 37711 - DNA, 704 bp, Arabidopsis thaliana columbia
ttaccgtttcaaagtcgagtgagtataagtcatttagtgttttgttcttgcccgaacctccaaacacaaacagaattttgtcgtcgaataacgtggctacatgatgtgaccttgcacacggccgtgttcctctgtttttttaatgagaagaaccgtatcaagaaatcacaagtaggagttcaatgtaaacaatcatcagaaaaatgttaaaaagtaaaaactcacgtgcaattaagaggaagccatgtggatgatttgagatcaaacatatgaagatcgtttagtttcctcttcttagagtcttcaccaccgaatagtatcaataccgaactagccctcaccactgtgtgaccgctgcgactgacctgcattttcatatccaaatcagatttttttctcaagtcacttcacaatccaaaccataaagccacaaacttctaaatgtataatgaggactgagagttaccggtaagtctccttttgcatccattagtgaccagcattccgaatcagtatcaaatgcccacactgccaaaaatatataaactttagaattcaaacaacaatgtgaaaacttttgaatcaaaacaacaatgtttaacctgaaactctatcactgctaggatctgtttttccaccaccaacagcactttttaccccaagagacctaacaacggataaaaacaatcaaaacataaaggtgt

SEQ ID NO: 37712 - DNA, 137 bp, Arabidopsis thaliana columbia
gtgatgtaactattgtctaggctctgcttaaaggggccttgtcacatatccctgcactgatcacccaggtgatgtaactcttccactgtactccagcctgggcgacggagtgagactccctctcaaaaaaaaaaaaa

SEQ ID NO: 37713 - DNA, 617 bp, Arabidopsis thaliana columbia
gatcagtgcagatatatgtcactatgtccctgtggccagagcctagacaagagttacatcacctgggtgatcagtgcagagataagtcacaatgtctatcacaatgtctccagtaggcagagctagacaagagttacatcacctgggtgatcacatcagagatatgtcacaatgccccctgtggcagatcccagacaagagttgcatcacctcggtgatcagtgcagtgatatattaaaatgcccctgtaggcagagcctagacaagagttacatcacctgggtgatcagtgcagagatatgtcacgatgtcccctgtaggcagagctaggcaagagttacatcacctttgccatcagttcagagatatgttaaaatgcccctttaggcagatcctagacaagacttgcatcacctgggtgatcagtgcagagatttttcacattgccccctgtaggcagagggtagaaaaaagtaacatcacctaggtgatcagtgctgagatatttccaataccactgtaggcagatcctagcaagacttggatccctgggtgatcagtcagagattttcgcattgcccctgtaggcacgggtagagagtgtaaatgactaggtg

SEQ ID NO: 37714 - DNA, 544 bp, Arabidopsis thaliana columbia
ttttggcaaagttatcacaggttctccgaaaccatatttcagttgaaaccgagattgttagaaattaaattggttctagctagttagatctgttactaaactttaattgatctccatatctctgtttttttctattcatttcgttcggtttgattttcgattatcattttttgtactcgtggattatacatttaaacacccaaattgtatgttcctgatcattacccaccatttcctgtcctaatctccgaaatgaacaccactactcactgactcgagtttcgatgtgtttagatagatagtactagattattgagtctaatcacttcttgaatcacaaacagaacaagaacccaatacggttcatgtaaaggttaaccggtcaaactatatacacaagtaacaacatttgggagagactttagttaaaagcgagcatttccacttcacagctcagaccaacaacatacatgcatgtgttcaactgaatatcatcaatcagtctctggagttaagctttggtctgaagaatataactacgagc

SEQ ID NO: 37715 - DNA, 545 bp, Arabidopsis thaliana columbia
acaattgtgttagaaaacgaaaaacgcaggatttgtattttcgcgtaaaattacaagtaaaaatttattatgaaaaaagtgggtatatagttgcttatttgcataataaattgttattattctatacatactaaatattagcaattataaaagaaaccaatatacttgtttacacaaaaataatatcattaatagagataagaagacatattcacaaatttttaataaaattttaataatcttctattttttattatcagagattacttaaaatttatttaaaatattataatgtatatcaagtataaatatacatacatgtgtatatccctatctccttaatataatagtttagtccatcattttggcacatatatccattcatcgtatttctctcattctatcattctagtcattgatagtctgctaatttgcattatgcgaattgattctacaactgatatcattatgctattatgcaatgtcaccatcgagagcctcagatctgcttcacttatgtttactcttgtgatgagctgtcaaac

SEQ ID NO: 37716 - DNA, 794 bp, Arabidopsis thaliana columbia
caatcctcgcttctactttaagcaggacagtcttgcacacaatgctttccgtcatacaatcactaaacacaataaaaagcttcataaaggagaaatgactatagaagcctcaatgaactagaaaaactggtcagttgtctgaactcaaagaactgtgtcgaagctgcgacgaaacaacttttaacatagccaaatcaagaaagaatctgcctattacggtaaatgatcgcatcaaagcgagaaaggtgctacaagagagtacaagtgtagatacaaaagtatccaagcccatcaaaactaaatgagctacatcaagattccacaaaaccaaggccacaaactttaccaacatccaaacgcttccatcttagaagaattataggacggagagtaagatggtggcgttggcgagatagtgaacatcactaaaagactctatggtagaagagggcgaccaaagacgagcttcaagatctccaaacttgtcgtgaagtagagtccaacaaaaagggaaattttgcttgattgcgcaggagagatggaggacgagcaagtcaaacgctgggagggaaagggagtttgacagctcatcacaagaaaaaacaaaagtgaagcagatctgaggctctctttggtaacattgcataatagcataataatataagttgtagaatcaattcgcataatgaaaatttgcagaataaaaatttatagaatgatataattttaaaaatatgttgattggatatattttgcaaaatgatagactaaaatattatattaataatatattt

SEQ ID NO: 37717 - DNA, 710 bp, Arabidopsis thaliana
ggaacttatttacaatggctgccactggattttaatgtttgtttttgataattagaaaaaaaatcttcaaattaaatatttgacatttaacaatcttccctaaatctctccacattaactacacggttagttactaaaattaaacttccaaaatatttaatatcatttaattactacacaattatcatttttgatattgtttttctccatgactataacaattcgattataatcatcaaaccgtagagatatttgatagcatttaattactacaaaattataaaatatttagacaataattcataaaaatatcataaataagatcaatattaataaaataaatggtttttttacgggacgggttggcgggacgggtttggcaggacgttacttaataacaattgtaaactataaaataaaaatattttatagataaatacaatttgcaaagttttatgtatagtaactttaaaaaataaattgtttccgcggtgtaccgcgggttaaaatctagtatatatatatagaactaaaaccattacaaaaagaaaactttctgactttcaccgcttattgatctgtctccatagtatttccttagcaagactttcaccactccatctctgtgtcgatggtatatcctgagcaatgcctcgccatatcgccttactcccccctttcaaaactaccttgtcttcaaggtaatgatc

SEQ ID NO: 37718 - DNA, 1095 bp, Arabidopsis thaliana columbia
aaatcgaacacctgggcttcatcaacagtgataactctagtcacacctgataagatcgaatcaactacagatttcacctccttaacgtgtaagtatcgtaagagagtaccgaagagctgaatcgtcttgagagaatcagaatcgcttgggattttgcaggaattgaagatttgggtgtaggagatgagaagagaagcgaggagagagcagagagagggagtagtaggggagagagatattagagatagaagagcgattacatactcagaaacttgtttcgacggagatggtgaagaagagcgagatttgaggtatgagagaagggaatcgtgggaagacggtgagagaaggtaaggtgggagagagaatccggtttgacaatggtggtactgtgctaaacgaatgatatctttgtcggtgagaggtctctgagatggttcttcggctgcggcggcgacggtcattttctctccggcgggattaatctgatttcgaaacttctcggggaagattaattttacgattctttttcctttacgcgggaaactttatatgggccttagtgttatatgggccgaagagatgcggaccaaaatctgcaatcggaaaaaactatcgaaccaaaccaaaattgtaaaacgaaactgtgtcaaattaaaaatttgttatccatgcaaatttagcctttaatgtaggtagctataattattatttcagtccatcttggtctctccatcaagttacactattacgtgaagcatctgtattttaatattatacataatccagtcataatttaagacctgtatattatatcataaagtatgtagccatgtagtcgattaatgaaatagggaaaatagcaagtcaaagataaaataaaattggaaagaaaaatagttcgtaggtagtgtgctctcaaggtggcgtgacacctttcccatatctttcgctaagttctttagaataagacaaaacaaaagatgaaaaatgtgcatgtgacactcctcttattgcaaactgcgtaacaaccaccattggattcttgttcggcccgtatttgtagtgtattgaaacaacaaaacttggttttca

SEQ ID NO: 37719 - DNA, 1151 bp, Arabidopsis thaliana columbia
ttccaaccgtctaagcaaatttcgtttgagcacacggaggttgtgtgttgtgatcaaacccaagctctgattgtaatgaaaagaagaagatagcaaagaattccacctcttcgtcacgcttttgcaaacgatgacatctctgggattacgtagcctcgagaagatctctagcagcaataagctctcaggtaaatcatgtttgcttctgttgttgcattacaaggatcaacatcgttgagttttcctttgacacgtctcctttgtatccaatgcaaagctctgttttttttgcgcaatgatgccatcttttgttagttttttttcttcttaaaatctccaagttaacatgctatatatacaaagcaagtcctaaaccctaaatcttttgggcttatcttttgcaatctttaattattccatctattccctttcgatttatttattttttaaatttctggtagatatcatcgtttcctcttctttttttgtaagttaacatttcttttaacatgtttttagtttaactttttgttcagaaaatttcagattataattatatatatatatatatatatatatatatatgtattcatcggtttaaaagatgaaaaacaaattagcaaatacaaaaaaaataaaaaaagtagtgcaaatattatgaaaagaacgcgggaaaattaatatagaagaaaaaagaaatatgtcaaaatagttgtaaaaaaaaaaaaaagttgttgtaaaacattattatataacctcttgtacgtatgcatgcaatgcaaccctgctctctttgaatggaacgaagtatattgatatgcatagagagaactgttccatcatcatcaaatgttaatgtttttctttatacataaaataaacttcgaatttttcctcttgtaatacaatgttttgtttttgtgatgataaaaagattgagaaagcgacaccattctttgcacaagcccaaacttattgggctcgaagtttctagaaggaacacgtgggcaatttttatttttcttggaacaaacaaacaaagaaaatatatggctactaattattattcgccaaaaatccatatcagaaacagaaaaaagaaaaaaaacgcatgaagaaaaaaaaaaaaggagaataacatgcgaaatcgg

SEQ ID NO: 37720 - DNA, 747 bp, Arabidopsis thaliana columbia
tgtcaaactcacacaaaaatatgtaggcctcaaaataatgggccgataaaccaaggctcaaaaatgggccgataaatcaaaactctttccattgagcccatttacccattcttggaagttcgtttagccattgagcccattcaatactaaaagtgattggcgtttggtccgccattccagtaaattaagcagaaactcacatcaattcgagacatttatatatctcgataattcagtattaaaatcttagatcagatttcaaccaaaatgaaattcttagatccagatggttggttcttgggtttggtactttggttattggaattgagccggtttaaaactgggttgttttgagtgttacaggcttacagccgggcttctcagatgttaaaaatatgggcttgagaattagctgtagacaagctcaagcccattcgattataaaagttgttaaaaaagctcttaagaaagaaaacagaggcgctacggaaaaagttataagcaaaattgtaaggaagtcatataaagctattatcttattttattttgaaaattgattattgttatatgtttatatacatgataatattatcataccatttgtgcaggaaaaggtagggacaaaaaatagtaaatgatgcgaaagctcctgattcacgtttttcaatgttggtgacaactagtcaatatatactaaaatattttattttgtccgataccaaaacgcagaaccaaataatttggtat

SEQ ID NO: 37721 - DNA, 643 bp, Arabidopsis thaliana columbia
cccttctgatttacttacgcagtgctgttaagtatgccgtctcagtaagatgttttcttgacttgtaataacaaccttgaaagtgaaaatcaatatgagtcttcctttttctgcttggagtcaggtatcgagtttttttttttttcctatgtcctttaaaaatgtgtagttgtagatgtagttccctgttttcatgcattctaatattgattgcaagttcaatgaatagcgttgtgttggcggtatagggtgtcaaattatgcttgacgcttatcagtcattaccaatgatgtatgtgactgtctattgcaaatgtggccgacttcatgaacaaatatgaacaatagtatcattggttacatacaccaggcataaaactacatcatcctccaaaggcactgctgatctcagggacgtggaggtctgttctgtagaagctggcgctatattgaatacaaaatgcgtggagtcaacattaaaatagtttttatgattcactcggagatctttacttgatgtggtcggctgtatgatattcgtgaactcggaagtcaaggcttgtcgtgatggttgaatgattcgttaggtggtggtttttttttttttatacactggatatgaatgccatcttttgtttgtttac

SEQ ID NO: 37722 - DNA, 1008 bp, Arabidopsis thaliana columbia
ttttcttattttaagtaattataaatataaatctgtgtttgctatcattgtgtaatcgtgttatggctcaatggttgcaggttttttgggatcatcaataggtcatgggttcgagcatcaggagtttatgcgttttcgtcccaaatttgaaagttgtgttgtaaaccacttgatggatggactccataaccgtggcccatgtcctttaaggttaggtccgtcagcccattggtgtgacggcccatcggccagtcggcccaccagtccgtcggcctgtcggcccgatccatggagagaagccacagtcggtccggcccgtaggtccggcccatggggactagacataggtcggtcatagacttaagtagttatgggccttttgtaaacctagcccattagacatggaacctcctcaagtatgtatatatatgtgatgtaacctcattatgaatcaataagaaacgagttagttcttcacacgttatcagcacgagcttgctcttaacaaaaccctagcagcagcagctcaaccctagctcgtccgccgtcagccgtccgtcgtccgttcgttgctcgtccgacgactgtcaccgttcgctgactgtccatccgctgtccgtctgacgatcgctccttaccaccgtcagataccaaacgatcgttccaccgttccgtcgatccgtcgttccgtcgtccgcctgtcgaccgtttgctgtccgtctgtcaaccgacaatacaaccgtcgaccgccgactgtcaaccatcgaccaccgttcgataacctgaggtctttagctcccggttccagtccgtacaaccccaaaggagaaaggtaattcattaaaccctaaagctaaagaaccctaatcgaacatggatctaacaaacggctaaaaccctaaaacgaatggttgattagtgtttgcgatatgattgcttgtttgctcgattgtttgtcttgtttttaaattttgggagaataggcatctagtctttaaatttgctttg

SEQ ID NO: 37723 - DNA, 478 bp, Arabidopsis thaliana columbia
caactgagttatcattatacatatgacttagttatcgttattttatgcttgagttatctttacgtttatgcagtcaaaggaagttgtagatttggtggtagagaaggatgtggggtcagtaggaatcttgatggcgaatttgttaagaccactgatgtaaaccaagctgatattgatttcattgagaagtctcctggtgcccggactttacgcacttcgacgttggcgaggagaaattctaaagcgaaggcagattcaaagaaagaaagctgtcgttaaagagaaaaccgtaaatgagccaaccgtcaaagagccagccgccaaaaagaaaagaggaagaaaggcagcggcgcttcctcctgctccactcacaaaggtgagactaagaatgttaacacctgatactaatgtgaagatagaagatgttgcttctgtccccaatagagttgagaaagtcaaggaaaaaactgacaagatt

SEQ ID NO: 37724 - DNA, 376 bp, Arabidopsis thaliana columbia
gattatttacttttggaatagttttagcatatagtatgcaaagactaattcaatgttgtttattagaaaaagagagtaattcaatgtagtaaaagaagtgctttaaaaaccgatttaggcggtcgcgtaaacctccattaggcgctaggttctcggaaaacgtctagacaaccatgcactttgaccacctaaaatcatatagattttgtttttagtgtatttgatcaattttcaactaagttttgtttctatacatatagttataaatgttcatataaggtatgatataaatcaaataaatgttttgtttatgtattaacatatttatttatttttctaatagatatttttatatgtttattatatgtaatattat

SEQ ID NO: 37725 - DNA, 795 bp, Arabidopsis thaliana columbia
tcataaaaatatatattaattctattttccactccattttattcaacacataataaattaaaaattcactcccacacttttcaaattataacttcatcacttctcattttgtaaatattcattctctcattctctcatgcccttcaacaatatccaggtatattaaactatatgatctagatttaattctttatttacacagttcctgacaattggatttgttgttagtatttataaatcggtatgaattccttcagtggtatcagagcctatgtgtttaatactgaatttgaatctagtttaatctatattataatatagataaataattgttatttgtttattatgatgaaatttgtgaaatttaatttgttaaacatggtagaaacgaattcgcctaatagaacatgaccgttgtatttttatgggcagcaaacgaaaccaacttcttccttgtagactatagatttttgtttgaaacccctatatttagaaaattttgttgcctgagaataattatttatgtatttgtaggaggtaatttgacatatcagaccactgtaagaagagagctaacggacctaaatgtcccgaaacggcaagcgtattcagggtgtaagtagtctctgattcatatctctctgatttgatttggtacagtataaaattgtctacttttttttatttttgattgactcgtattgattgtgtggaggttattgtattgattgatgcgaatgtagtagttttaaaattttttttttggtcggaaaacgggagaagtccccgctttat

SEQ ID NO: 37726 - DNA, 798 bp, Arabidopsis thaliana columbia
atccccgggttcgcaaggaacggccaatccggaacactacacccggaccgtcccccgaaagtttaaccccgcagaaattcctgttggatccgatgtcaactctacactatattggacgattaaccggaacttaattctttttcatgaaggggtgttagatcggggaaacgagcatatacattcaagacttcttatccctttttaccactctctgttgatcctgaatggtcactcacttttagtggttcctacccttaaaccctatcctctttttaagcctcatgcattctcttttcctttttcctttagcagatatgtgcaaaacgtcagcgagaaaggaacaacacagtttcctgccacaaagactaaagaaggaagtaaaagaagagattgcaaccaaacgtcctaagagcttattcttccttggaaccaattcgaaaggtatgctcattaaactcggtgattaaaagttttgtttccccttccaaaaaacaaaagaatataacaaaagaaaataaagaaaaaaagagaaaataaaagaaaatggaaggaaaggaaacattacaactaagagagtctagtagcatagttccaaggaaagacatggccacctaaaggagagatgagccaattacagaagagaccccctcggaaatacctaagtctggggaaccgaaagtaagacagaagtaaaggagaaggaggtgtttaaaagaagacttggttggaaactgtggacctcaactgatccgttctctcttgcggttatgcacatatcatgcattcgagactatacgg

SEQ ID NO: 37727 - DNA, 839 bp, Arabidopsis thaliana columbia
ttaaatacaaagtaatcaaatcaatgttttaaactcttatactaataggtatcaatagggatactctagaatacagttatgattgttttttagtgattggtatcaatagttttgatctgtaatgcctagaatttttgaaaaaaaaacaatttgtgacttaaacctaacagtcataagacagtaacaatttgccactatattcaaactcattcgatactcgcgatttttggatggtgaattttgggcttttattttggggggtgagttttgcccctttttatatatgtatttttaatggatttgggctttggtttgggcggtgaattttgcctccaattttgtttttgttgtgactcgtttgcgacctattaaggactccttctcgttaattactatgtaaacacttagtcgatttttcattatgcgggacttctctttctggattttgggtttcactctcaaaacctctcaactctcttctcttctcaaatcgatttctctcctcaatctctcctcagtctcttctgaatctctcctcgatctcttctcaatctctcctcgatctaacggcgacaaagggtaattctacacggggtcgcagtggcaaatctcaatcaggttcgagggtcttcactagtccggatacgaagccaagcgctagtaagtcttagagggtgaatcgtccgaatcctctgaatccaaccaatggtaggcgtaaaaggctgatcctttgaacccaagcagaggcttgagtcaaaatcctccgtatccagcggtggtttgattaaccctccattgaatccaagtgtgagtcggactatgaataatagtcgcggagg

SEQ ID NO: 37728 - DNA, 998 bp, Arabidopsis thaliana columbia
tacaagattggctttattaccttatatgacatattcaccctaaggtgaatgaaaattttggtttaggttatgaggacaggtttgtctttctataggagattgtggtgttatttgtttaacattatcttcggaacacagacagacagtacagtacttaataaattataattatcaaataccacgtcgtgttttatggtcccatccaaaatccgatatgtgtacactcattagactcactattcgagataaattcaatctcgtaatcaatactacaatgttattcagatgcaacttcgagaaaataaacttgtaataagaatgtttaatggcattgactcataaaatttatcttttcaagtgcaaaacaatttacttccgtccacacgtaaacattctcatgtatcaacttatcgctgcttatgctcatgcaaaaaaaaaacccttatgagtacatattaaagaaaaatgcacaaaatagatagcgcggctcaacgacgattacgtgatgctgactgctgagagtcatatattttccaacatttcaggtgtctttatttggtttaagtgttaaccactatggcacttttgcgtgtaaacagttaagaattgaagagcttacgaaaaagaaaacagagtccataatatattaagatcacaaatttgggcctattagttcgtctttatgggcttataaagacttcttttcaggtacagaaacggcccattacaaaaaagggaaataaaaataaacgccgttgccggggatcgaacccgggtcacccgcgtgacaggcgggaatacttaccactatactacaacgactttgttgattgttaaaaccaaaataattattattaattcattgaatttctgctaaacctcagttagcaattagtttagtgatagtttatctatgatttagtaatttttaatcactcatttagaacgttggtcctacacaaacccgacctaacacagaataaactgcaatgttaatg

SEQ ID NO: 37729 - DNA, 585 bp, Arabidopsis thaliana columbia
cttttagattgcgccttttgttgattcgctcatcataccacatcaatgcaccacaatatttacactaataggtagggtcaccacgatcaagataagctgagaaacaaataaccataatcaatatccttcttaataagtctatataaaaggcatgtaaattaaaagcaatagtcggattccatacttaaaggtatactctttgtagtcctccgacgtgttttctttatctttagtgattctgattctttgctcttttgacctatggaatcatgtgatgcttgttctgtggaaatagcttcattagataagacagatgggcaagttcccatgtcttgtgcctcatccaaatccattctctgtattctgattggtgacccaacatcttcaccgctacttatgtcatagttttgttctagttcctcttcctcattgagattgataccgttcatctcatcatacatttcctcatccctgctagtgtgatctgcagttgtgcttgatagtttcactggataatgttaagtagatgattagcaaaacacagagttggctaggttttagtacatataggaatacttatagata

SEQ ID NO: 37730 - DNA, 787 bp, Arabidopsis thaliana columbia
gccggagctcgattgctctcttcttcatgttcttctctaagttgccctgcttctggtcaatccccaatttcaaagcgaaaccacccaaagctcccaatatctccaaacttctccgcaaagcctaagtcccaaattgagctgcatctctcagtaacttacaaaacttgaaactccaaaaagtgaccaagtagctaaccttgaaaggctgagagccatgtttcctggcgatgagctccggagagtaaatagaagcatcaatagcacgacccaaagctcgtgcctcggcttgaagatcatccgcgagatcagctcgtcggtactgcacaactgacgccggtctcgacgatggggaaggacttgccgccgctccgtcttccttaggcctagcttgtaccagggccgcacgcgccaatctcctccgatttaccgagaaaaactttgattttccgacatttattttggaattgcgtaacgaaagaccatcaccgactagagttaaacccagagactgaccaaccaccagactcatcgtgtaacaacaagagcccccaaaactcggcgaaaatcagagagacaaggaggaagaaagaattcagattgtgattgcccagccagtaacagccatgaaagaagatgaagaagaagaaagagagagcgagagagagcgagagagagagagatatttgttgtaaacgaaagattagaagcgtttttggttacttacttccggcgaataaacaaggtccacacttttggcgtgccgtgacgttctctattttttttttaa

SEQ ID NO: 37731 - DNA, 710 bp, Arabidopsis thaliana columbia
ggaacgccctcgctgttggggtcggattccacccaggtaagcgagccaaccatgttttaacgcctcgggagacgtcgaagcgttatcccgaaccgggccacaaaacacctcggagatcgtatcaagaatccataccgagacgatatcgagaacgcttcggagcattctcgtgaaatggtcccctgacccgacctcagaatgcctcggacataaaacctggcaattcatcccgaggcgggctccaagatgcctcgggaacgcatcctcgaatatcacggtccgagctgcccgagcacgacccaaggtcagctaaattccggcttggaaaaactttgggttagatgagaaaaccttcaaaaaggacttagccgatataagatcaaacatatcatttccgaaaaccccggaagagataatcttcaaagatatcaccgaatacagaaattcacagaatctttggaagataaggacaatctccttcaccaacttaaagataaagagaaatcttcagagaatatcgcgtggggcgatattgcaaatctctataaaaagcacctcgaaggacaaacaaaggggacacgcacaaaaacgctctcaacttcaggttatcaaaaacgctctgactttgaaggcaaaaacacttattttcatattctagaacacttgtacgatcaaatcattactttctcattaatacaatcaagaacacg

SEQ ID NO: 37732 - DNA, 575 bp, Arabidopsis thaliana columbia
tgaacgtattgtagttagtgtgattgtaaaaatatttctttgtttaatcattcctcaaaaattgtattcggcctttgagagatgcggtgaggtcgtatgcatgttttcccaaatttcgaatacttgcaaactgttctatgaatgtggtttttaggtactcatgaaataattgaaaactttacttgtctatatgttcgtaaaccattggcattgaattgcatggcatggcttactatgcgcgcaccaacaaaatgcacatgcatgcttcacgaacgtataaagaagctgagggtggacaacattcactgcttgtagtgggcaatgcagtcttgtagagcagttgtactttcaaacgaggttctttgtcaacgtctgattggttttctagaataattgaaggagtacttttgtccttatcctcgcaatggactgagtaagtttccccgcggtccctactggccatgagctatgaatttttcaagtggtgggtccaggtgcagggtgggtgcggcgttaggattattcataaagttgaggatcgatatcaggttaagtttttttgctatggagtggtg

SEQ ID NO: 37733 - DNA, 673 bp, Arabidopsis thaliana columbia
gttacttcttgtcaattgttatcctttcttccttgccttagaagaaaccaatataagtattaaatatacactttttctgtttatattcattttactcactttaccttcatttgattcgtaattgtgaatgaatttgtactgaactgatattggttttggccttcaggggtgaccttcttttccttttaaactctcctactttagatgatcataattagcagcagcatgaacaaatattgtcaaataaaggaaaagtaattattttgtgactgacatatttctgtattttttaattaataaaattaaaacactaatactaacgaatgacgtcaacatatttatgataatcaataaatgatagatactttaaaatgataatcaataatttaccgagtagttttctaccgacattcatattaaaagcttgtaagttgataatatctgattttgagggggttacgtgggttcgtggtcgtgaagattataataaaattgtagacagctgctcactgtattattattattttttgttaaagaacagaaaatttggtcagtgtgttataatattcgttcgtctaaataacttctttatgctcttttgattattctatatgctaattatggtctagagtttccaaatgtcaacactcactgcgcactgccgttgttatag

SEQ ID NO: 37734 - DNA, 592 bp, Arabidopsis thaliana columbia
caaggtacataaagatcatcactcatgaaccgtaacgaaattgcatctcacataggaagaaaactaaattgcaaactgcaagtataatcttctgccctttgcttatctctgaagtgtacaattcaactagatatccaacagtctcctcttaatagtaaatgtaaaccttccagacaaaatgaaaggagactcacttgggtctgaggatcaagaacctgccggtggagtatgttggcaacaatggataaacccccaaaactgagaggaatatgcagagagaaaatgtaaagagcaaatgtgctccatatgttatcatcctcccatggaatctctgatgccaaaactgagaacccttctccattccccaactgttcaatctataaagcaccggacttggaattagaatctccgtcaaaactagcgaaaaaataaaacttcatccctaatcaatggaaggagacgcacctgagtagtttcttgggaggatttgcttttgagacaagagcatatgagagaaggtcgacaagtactagcagaggagagacgacgaaactccgtatgtcgtcgtcgttcggaacaattagtcaccggc

SEQ ID NO: 37735 - DNA, 1061 bp, Arabidopsis thaliana columbia
taactgaatagtaatgtctttgttatgttcatctcatggagtcaacagttttgtagtcatgttgtcttcttcgccggcacctgaattgaggtttactatctgagaatttcgtctcaccagacatccccattgttgaatctgtatctgctccaaatccaaaacactcaccaatcactaaacatatcaaaataccaagtacatacatatccatttcagacaatgacctaacatgataagaacccaattccacaatgtacaatcattatttcattccctaacccaaatttgacaactttctgacaattcctatgaggcaatgccataatagacaagcagagcaaaatcagactcattttcatcagaagaaataacactaaagttgtcatctttaatctaatcaatgatgatcaatctccaaatcttcatagcaaaaaccacgaatctcaagatggaacacaattgctataaaccctctctgaatttcatacctccccaaaacaatggcttgacatcttcttcttcatcatcaaattcatcaccatagccaaactcagcatcacctctgtaaccaggctcactcccatacccagattcattccccattggatcaactccattagcaaatccaaatccaccagaagcttccttctctccaccagaatctcgccgctctctccgtgaattcctcgccgcctcactcacatcagaagcccaattcgcttcaccaaaaagctctccacttgaatctgtaccaacagcgaaaggcaaatccgaacaagtcccatgagcaccaatggagcaacatctccgagtcccactccgatcactactccgaccagacaccgatctcgaattacgccgccgccgcttcctcgctactaacctgaaacttcctctattgctgtaattggaagctgataatgtcttccctccattgtcgtcgtcggcgagtgagagacggctcatagcttcgatggtgaaagaagtggatcgatcggagaagcaagggcgtttgggagtaaaggagtgaaacccattggtctgcggtggttggtcagatg

SEQ ID NO: 37736 - DNA, 616 bp, Arabidopsis thaliana columbia
ctcttaaacaatttctcatagaaaaacgagtttgtagttatactcttctctaaactctttgaaacgaaatgaaaaaaaaaatctttaaacttttatgatccgacctaccggattcgaaccaatgacctaaggattatctgcgtcaactacagtcctccgctctaccaactgagctaaggtcggttttgtattataacactttatgcatgttgatgattcaaaaaaagctttttaatcaaatttaaacttatcaagaagaggaatagaaaaaaagttgacttcatatctttcatgctgtcttgttttttaaaagttttttatcaatactaaattttactgaaaacggtaacatgatggaaaaccgttcaaattgaaaaacgatccataaaacacaataagttattttaaaaacttaccaacactcaaaataaaaacgtaaacggcaagattcaaacctgcgcgggcaaagccccatgatttctagtcattcccgataaccactccggcacttccactttttctctaaactaaacttttattcaaaatagactaaaccgtatccattctctacctaaattttgacatgagtgagaagtagagatccaaggatgaatag

SEQ ID NO: 37737 - DNA, 166 bp, Arabidopsis thaliana columbia
atcagaaatgagtgggaaatctcgaaggaattttcactgtattttaaaccgttcaagagtaaaccctcattttcgtatatttacgagatttaggcaagatattatgagtttttctaatataatgtttttataaattcaaactttgttttcaaatttttaatagaga

SEQ ID NO: 37738 - DNA, 714 bp, Arabidopsis thaliana columbia
atactaagctatacacaaattgatcagctttatcaaaaaaaattgatcatgggtagagaaggatacatagaggttttgagctcggcttgacgcgagacctaagactcgtacgaggaatgacagacttgtcagttttgtgtaaccaacaatatcataaatatgttaggatttagtaaagaagaacacaacaattgaagcgggaaaaagaagacaatgccagctcagcttgatacacgtggatatgcaggaccacaagacaaagaatacccgttttgcttgtccgctaaagcaatggtgtacggaggagacaactcttgtcttgtgtgtgaaggcagaagagccgttacgcctgaaccaaagcaggctacaagacaagcttggaggctactgcagaggagcgtgtagaggagaggaaccgagaaggatccagaaggagactaggttaaaatctcttgctctatttaagttgagcattgtagagagagaaaagttaagaaacacagaggcacttaatcgagagtaaacttgtattgggtgttcttggggaaacagagagtgaaagagagtgaatcttagttagctttgtaaggggctgagagggtgagaaatctctttgtaaatctctaaaggttgatatagtggattcagggagagagttccggcccagacgtagcaccgttggtgtgaacctgggttaccatgtgtgtgtgtctg

SEQ ID NO: 37739 - DNA, 922 bp, Arabidopsis thaliana columbia
ttttctatgagaaattgttttagagaattgcatagctattgactgtattatcagaaatgagtgggaaatctagaagtaattttcactgtattttaaaccgttcaaggtttacgagatttatgcaagtatttttctaatataatgtttttataaattcaaactttattttcaaatttttaatagagactcactatgagtatgctaacttaatacaaatcattgtgttcatagaatatttagatcagtacacatgcatgaaatagaatacaatccgaccttagctcagttggtagagcggaggactgtagtagacgcagattatccttaggtcactggttcgaatccggtaggtcggaatttgctcccacatgagagctttttatttttctttcgttgtgacattaaggtttttaaattttataataaacggttatatggtggtcgacaattaaacataccaaaaagttttgctcgaattcttaaacgatccgtatgtttagcttttttcaatattgatacgatgaaaaatgatttaaaagtgactaaaaactatgagttttctaattttctttggtcaaacaaacatttagttttagagttttaaaaatacaaaaaatgtatgcatagttatattcaaatgcttgtgggttgtgcctataagttgtcaacgttcatacaagggtagtgaaataccctttcccactctgttgcacgatttgtttggctttattttcaagaatataaacaatcataagcacaatctcaatattacatgcataaatatatcatcaaagttgctctttagaaataatttattttttgaattgagaaaattttataaaaattcaaaaaaatcaagacagccaaataggtttatggttctaatttttttattttgttcataaactgcatcatccttgga

SEQ ID NO: 37740 - DNA, 1924 bp, Arabidopsis thaliana columbia
atttagtattgataaaaaaaactttaaaaaacaagatagcatgaaagatatgaagtcaactttctttctactcctcttcttgataagtttaaatttgattaaaaagtttctctcgaatcatcaacatgcataaagtgttataatacaaaaccgaccttagctctgttggtatagcggaggactgtagttgacgcagataatccttaggtcactggttcgaattcggtaggtcggatcattaaaattgaaagttttttttttccatttcgtttcaaagtgcttagacaagagtataactacaaactcgtttttctatgagaaattggtttaagagaattgcatagctattgattgtattatcagaaatgagtgggaaatctcgaagtaattttcactgtattttaaaccgtttaagggtaaaccctcattttcgtatatttacgagctttaggcaagatattaagtgtttttctaatataatgtttttataaattcaaactttgtttacaaatttgtaatagagactcactatgagtatgctaacttaatacaaatcattgtgttgatagaatattttgatcagtacacatgcatgaaatagaatacaatccgactttagctcagttggtagagcggaggacagtagaagacgcagattatccttaggtcacaggttcgaatccggtaggtcggaatttgctcccacatgagagctttttatttttcttttgttgtgacattaaggtgtttgaattttataataaacggttatatgcataattatattcaaatgcttgtgggttgtgcctataagttgtcaacgttcatacaagggtagtgaaataccttttcccactctgttgcacgatttgtttggctttattttcaagaatataaacaatcatagcacaatctcaatattacatgcataaatatatcatcaaagttgctctttagaaataatttattttttgaattgagaaaatattataaaaattcaaaaaaatcaagacagccaaataggtttatggttctaatcttttttattgtgttcataaactatttcatccttggaatcttctacttctcactcatgatcaaaatttaggatagagaatggtatacagtttagtctattttgaaataaaagtttagtttagagaaaaagtggacgtgccggagtggttatcgggcatgactagaaatcatgtgggctttgcccgcgcaggttcgaatcctgccgttcacgtttttattttgagtgttggtaagttcttaaaattacttattgtgttttatgtatcgtctttgaatttgaacagttttccatcatgttaccgttttcagtaaactttagtattgataaaaaaccttaaaaaaacaagatagcatgaaagatatgaagtcaactttctttctactcctcttcataagtttaaatttgattaaaaagcttctcttgaatcatcaacatgcttaaagtgttataatacaaaaccgaccttagctcagttggtagagcggaggactgtagttgacgcagataatccttaggtcactggttcgaatccggtaggtcggatcattaaaattgaaattttttttttccatttcgtttcaaagtgcttagacaagagtataactacaaactcgtttttctatgaaaaattggtttaagagaattgcatagctattgatcgtattatcataaatgagtgggaaatctctaagtaattttcactgtaatttaaaccgtttaagggtaaaccctcattttcgtatatttacgagatttaggcaagatattaagtgtttttctaatataatgtttttataaattcaaactttgtttacaaatttgtaatacagactcactatgagtatgctaacttaatacaaatcattttgctgatagaatatttag

SEQ ID NO: 37741 - DNA, 2368 bp, Arabidopsis thaliana columbia
tagaaatcatcgtcgctttgcccgcgcaggttcgaatcctgccgttcacgtttttattttgagtgttggtaagttcttaaaattacttattgtgttttatgtatcgtctttgaatttgaacagttttccatcatgttaccgttttcagtaaactttagtattgataaaaaaccttaaaaaaacaagatagcatgaaagatatgaagtcaactttctttctactcctcttcataagtttaaatttgattaaaaagcttcccttgaatcatcaacatgcttaaagtgttataatacaaaaccgaccttagctcagttggtagagcggaggactgtagttgacgcagataatccttaggtcactggttcgaatccggtaggtcggatcattaaaattgaaagttttttttttccatttcgtttcaaagtgcttagacaagagtataactacaaactctttttctatgagaaattggtttaagagaattgcatagctattgattgtattatcagaaatgagtgggaaatctctaagtaattttcactgtaatttaaaccgtttaagggtaaaccctcattttcgtatatttacgagatttaggcaagatattaagtgtttttctaatataatgtttttataaattcaaactttgtttacaaatttgtaatacagactcactatgagtatgctaacttaatacaaatcattttgctgatagaatatttagatcagtacacatgcatgaaatagaatacaatccgaccttagctcagttggtagagcggaggactgtagtagacgcagattatccttaggtcactggttcgaatccggtaggtcggaatttgctcccacatgagagctttttatttttctttcgatgtgacattaaggtttttaaattttataataaacggttatatggtggtcgacaattaaacataccgaaaagttttgctcgaattcttaaacgatccgtatgtttagcttttttcaatattgatacgatgaaaaatgatttaaaagtgactaaaaactatgagttttctaattttctttggtcaaacaaacatttagttttagagttttaaaaagaacaaaaaatgtatgcataattatattcaaatgcttgtgggttgtgcctataagttgtcaacgttcatacaagggtggtgaaataccctttcccactctgttgcacgatttgtttggctttattttcaagaatataaacaatcataagcacaatctcaatattacatgcataaatatatcatcaaagttgctctttagaaataatttattttttgaattgagaaaattttataaaaattcaaaaaaatcaagacagccaaataggtttatggttctaatttttttattttgttcataaactgcatcatccttggaatcttctacttctcactcatgatcaaaatttaggatagagaatggtatacggtttagtctattttgaaataaaagtttagtttacagaaaaagtggacgtgccggagtggttatcgggcatgactagaaatcatgtgggctttgcccgcgcaggttcgaatcctgccgttcacgtttttattttgagtgttggtaagtttttataattacttattgtgttttatggatcgtctttgaatttgaacggtttttcatcatgttaccgttttcagtaaactttagtattgataaaaaacctctaaaaaaaacaaaacagcatgaaagatatgaagtcaactttctttctactcctcttcttgataagtttaaatttgattaaaaagcttttcttgaatcatcaacatgcataaagtgttatgatacaaaaccgaccttagctcagttggtagagcggaggactgtagttgaagcagataatccttaggtcactggttcgaatccggtaggtcggatcattaaaattgaaagtttttttttttccatttcgtttcaaagtgcttagacaagagtataactacaaactcgtttttctatgagaaattggtttaagagaattgcatagctattgattgtattatcagaaatgagtgggaaatctctaagtaattttcactgtattttaaaccgtttaagagtaaaccctcattttcgtatatttacgagctttaggcaagatattaagtgtttttcaaatataatgtttttataaattcaaactttgtttacaaatttgtaatagagactcactatgactatgctaacttaatacaaatcattgtgttgatagaatatttagatcagtacacatgcatgaaatagaatacaatccgaccttagctcagttggtagagcggaggactgtagtagacgcagattatccttaggtcactggttcgaatc

SEQ ID NO: 37742 - DNA, 583 bp, Arabidopsis thaliana columbia
gaggatgtaacggccgccagtgtgctctaaagcatcgtgaagcgccgggccatagcgtgatgttcccggacgcgtgattgttattgcataaaaccgcgccatgtctgcatatggcgctgtttctcctacctcttgatacgttatatctatacggttaagcccttagtatctattgatgattaccagacaacagataataaaaaagaaaagaactattgcagcccaaaacctacatttgggctgttgcgaatgttcaataagtttagtcttatttaatgtaaatattgctgatcatttgaaatgacgcattattcatgagaaatgtgtatcgtaaatcaactgaaattaacgcaaccatttgttatttaaggtttaattatctgtgtgtgatattttattgaatgttttaaatattgtttttattggcattgctataatattggttatcatttgctgaatggattcagtcttaatgagtgggtttttaagggacaggcatagagtaatgatacgtatgcataaccaacatctttactcattatgtcattgaatgttgacgctatgtgtttatgagggagaggta

SEQ ID NO: 37743 - DNA, 858 bp, Arabidopsis thaliana columbia
ttgcatactaggactgttagaaccaacctactttctgcttgacttgacttagagctttctgatcatatctcatctgtttgcatcacaccggattggattgacatcctaaaatactacaacgacaagatagtgttttagggattaattgacaaaaatcctactatcaacacataaccaacagatttgaccacgggttctacaaccattggcggatctatgtggagaggtagtggggcacgtgccctatatagactttataaatttgtttaatggctgaagttaaaactgtgtatccctgtaaaaacttaaaccaaaatatagagcacaaaaatcgaaatacaaaattgcaggaatgaaaaggggctgctgaataagttgtagaaatctctgtaaaaaaagtctgtccaagtctgtctcagggtaagaaagcgggcttcgaggccacttaacggcccatggacgatgtgatcaagagtgtcgacttaaagtaggcttctttatgggcttcaaagtgggcttcgaatgggcttcgaatgggcctttctcttctcttctctttcctttcctggggttgtctggttgagtgcggattgatcagaaggtcgaggtggtagtcgagtaggttggttaacagaatggtctcggctgtttgttggcctctatgatcgagtatgttggtgagcattcaagatgggctggttcttctcctttgcgatcgagtatactggtggactggcaaagtggactgcctgtcgcctctacaatcgagtataattgtcaggatggactccttcatctttgtgatcgagtatgtctggtagaatggactgcttggtccctctgcaatcgagtaggagt

SEQ ID NO: 37744 - DNA, 379 bp, Arabidopsis thaliana columbia
taacggtaacgtccgccagtcgtaggatcatgcagctcgtatgagggattgagacgctcaagggcgtgccctgtggatggcacttcgcttccaagtgtctctcagcgacgggaacggagtcagtcaaggtctgaatccctaatctctgactcaacaggatccgctgcagcttgttgagcgacttcggcactccctcgtagatgtacaccaatagtgtgggccactttggctgcagaaggctttcacgcagtggctcaagcagctgcctcagatcaggtcgcgcttatgcgagtggtgtgactatgaccgcaccgatggcttccctggaggacatcgtgtggcgttgagaacgcaagtgctcgatgaccgcccgtaaaga

SEQ ID NO: 37745 - DNA, 563 bp, Arabidopsis thaliana columbia
aaaggttaagagagatttgaatgtgccaagctcttagttgatctatttgggaagataaatttgaatttatgcaaagaattaccaagtatatgagtttgattaaactaaactccctagtccagagattcctgctaaccactttctatagtagagtaaccatgtattattacaatgaagtaaatgttatacctctttgatctctggttattatccacttagatggttgttacagtctaaagctgctgattttcattttgggaactcaatacgatctcaaccaactgaatgtttccactaagtacagatgccttttgagagggcaagaatgagaagccatccagaagtttaacacactttagtccccattttaccatcaggaactcgattagatgatgccactgcaaaatcagaactgaacaaatgaaatccggaagaaatggtcaccctaaatctgttgcggatatatataatagacgaccgggaagaatgagtgaagaagaattcgtgtacctcctgttatgataagtggtaataaaagctgcatcaggagaactctggagaag

SEQ ID NO: 37746 - DNA, 637 bp, Arabidopsis thaliana columbia
caagaaatgtaagaaaaaatggcactaatatatcagccagatattatatatagaaaagtctcaatccaaagctcccacatagtcttcttcatcactatcatcatcatcatcatcctcatgaacaatgatgtctcatccaccattttttttcctttcttcaaaaacctttcttaggtaattaataattttttagaaaaaaaaaagaagagaaaacactaagaaaaaaagcagacacaaaagtcataaaacacaacggcacaccattgttcccttttaattgggtaatggcatttgtaattattagctggagagtgatttgtccaaagtagtcaaacattgtccgttgactgatggagtagtggtgttgtgatggacgacttgatggagttgcgagaaacaggtgcacgttcaataccatgctccgcggaggactggatcgctgccttctcaagcgctgcaaatttcctctcttcgctcttaccgtacaatacgaagtaaagtcccgctatgatcaagaccgctccaataatcctgccattagaaatatgacatgtggcacaacaaattttaaaattattcttgtttaggaccttggattttatcaagtatttatataaaccactaatattattatagt

SEQ ID NO: 37747 - DNA, 836 bp, Arabidopsis thaliana columbia
  unsure (1)..(836): unsure at all n locations
atccaatcctctacttccgcaagcctcaaatcctctacctcgagcctatgtatctcatcacagctctcaagctcaaaactcacacgcggaggaagatgaagatgatgatgctgagtttgtggctgatcttgaaagggaatcaactctccctgaagctttgcttgcaaatctacatgacatgcttgcccagccaggccgtgagaagtatacaacggttatctctcccacatttgagcctctaaccgtatggtaagctgagaatattagggagagttgctaagttgattaggtgtgtaatatgtgtgtgttaagtgtgtgaaaccctatggtaagcttagtttattaagttgattaggtgtttaataagttgattagaataagagttaatattgagtaatgtgtgtgtgtatcctcaaagttgattaggtgtgtaatatatttaataagttgattaggttaagcgttaatattgagtaatgtgtgtatatatgctaagttgattaggtttgtatatgctaattggtttatgtaattgaaggtttggtcacgacaatggtaagctgacccggaagatcacaaaggtcttcacaaacaagtttaatgggccattttacagttggagctgtgtacctactgaaagaagacacatatacttcctcgaattcgcaataaattaacttctatctcttattaatctcttacatttggtttggtttggttgtttgatcactaacatcaaactctcctcttgttnttgtagagtacacacacatggcatccatcactgactggtgtagttgaagaaaattctttaaaatatgcaaacgcgtatgaag

SEQ ID NO: 37748 - DNA, 758 bp, Arabidopsis thaliana columbia
tttcaaactgtttctatgtgaacaatcaaaatgtttcttaattatattcttctccttcatctttttcggcaatctcgatgtctctctgatccgtcagtcaaggttctccttggcgatttagtaagtaggtgatggaagtcgttcccttccggtgtaaaattctccttgcgatgtacgacggcattttgtaaattttgcgctgcctaaacacatgatatacattattgtgtcatgttatttgcgaatattttgggtaatggaggaggctcaaactttgatttttaattcacaaaaacttatgacatcaataaataatttaaatatatatacatgtccttctaaatagggaaattttctaatagcacatttaaattaaaaacacttataaatagtttttaattaaacatatttttataagtaggtatgagaaaaaaagataatactttttcaattgtttattagaattatataaacctttaaattaaaattatttaataaaagttacaataaactgaacaaaccttaaaaaatatttattgagattttccttattaattcgacttctagtaaagtgtaattgttactaagtatgatggtaaaattattggaagttgaaaacactagattttaaccattttaagcccttgtttttcatgcatttggcttagtttcatgtctcttttcatacattcttagtccattttccttccttttcacattttgtattgcattgcatagcatacttacatttggagtga

SEQ ID NO: 37749 - DNA, 602 bp, Arabidopsis thaliana
atgtgttcttgttcttcatcgcctcatgtaattacaaataaattattaaaacataattacgtaattattcagattgagacataattgtacctatattatatctcattgataccatttataccaattgtcataatttatctcaataaaacatttgtaccccctgtactattatgtctcagttttaccatttgttccagttcgtcaattctagatttctcaaatcaataatttcgattgaactctccgattcaaaacgatacaacagcccataacgaacaatacaaaaaatttatgttattaacaactaactcaaccaagaaattcacattaatctagaaatcaaaaaaatatcggatttacttttgtcggtgaggaggaagctaactttgggagcagattatcggcttggaagctacggcgtcctcgaaagctaattcgccggtgaaatcggagctcaaatcgccggcgaaatcgaagctcaagtcgccaacgacgaaatcggagaaaatcacgtatcggagaaaagagtcccgcgaagacgtcggttttcttttttactaaataatttctttttttactaaatcatttcttctccacaatta

SEQ ID NO: 37750 - DNA, 583 bp, Arabidopsis thaliana columbia
taactacatattatggatctaattttactaataatacaagaataaacaaatagtaaatataaattagcaaaaagaacaatcaatgtaatttttttttaacaattttcaaaacagatccacgcgtacatcgggtactcatctagtatatatgaaggtaggctatgtgaaaattttggaaggtaggctatgtattgtttaaacaaaatcataagaggatggaaagatacacccgttaaaaaaaagtgtgtgaaattttttttaaaaaacaaattatttctaactcttttttctcgatagataatcaagcctatggcgtcaatgtttttttgctgttgatgtcgatggaagtccatcacgagattaataatattttatactaacatatcttggcccacattaagaagcccaccaagattctcaagcccactataggcccatcagctttttatttcttcaattgagtttgacgtgttaactatatagccggaaggtaccaaaatacttttcgaagctttgacctaacttggagatgagagatttacaacagcgatgtccgatcttccacgagatttggaagaggaag

SEQ ID NO: 37751 - DNA, 550 bp, Arabidopsis thaliana
tgagtaaagcggtgaagttgttgatggtttgaaatcgagtacttggtgagaattggagtgagcgatgatgagagagatacagtgaatcgagtgactcggttatgaagatggaggtgaagagatcgaatgaagcttgtgagaatgacaatggtgatgagaactcgagtgatgttgaactcgcggaagaagagaagacggtggtggctttggtgaagaagtgagctgcggcggtcgagtgatggtcttggggtagaggtcgagttgttcttttggagagagggggcaagcggtgatgatggagaggtgaagagagttgtggccgagcgatgaggcgatgaagaagatgatgataaggagtcgagtgacgttgttgatgttggggaatgacgaattcgagtgaacgaaatgaatgagaggtggtgaggaggagatgacgaggtcgagtaaagaagaaaagggagcgttgatttaagaaggatggggtcgagtttatttggttatggaggagaaacaaggtcgagtgatggaggagaaacgagtgaagatgggg

SEQ ID NO: 37752 - DNA, 1014 bp, Arabidopsis thaliana columbia
ttgtaatgtttcggtccgccaaacaaggccagatgtgttgggcgatctcaatacaaatgctaataagcatctttagactattattataagtttgtttatacaactgattaagctaaaacgagtaatacaagtgcaacagcagcccaggagacacaattatttaactattaatctataataatattttgtagatacgctcaattgatacgcttacgtacttagaattcttatacattcgttttcttgcttgattaagagttcttttatttttggttctttaactctagagttctggtggaacgtaacttttttttaatgaattttttaaaacgatttataccaaacagaagtaacaagaaaaaattacttgttagctaattttatgattattttcagaataaaatatataggaaagccataaaattacgctagtgattaattacaaatgataacacattttttcaaataattgcgaatagaggagctcgtgttattgcgcaaagtgttttagatcgaggagtataagttcgctcttacgtcgcctctagcctactcgtcttggctaaacgatctctttaagcttctaccatgatttttcgtcatgtatcatcacatcagccaaaagttgttatgtcaccatcttcgtcagagcgctgacccaccttaaaggtaattttgtccacgaaattccacgtataattaaatgtggtagattttgtaaggcaactgaaaatatgacatggattataatttttgagtggaatatggcaaattttgcaagattccctataatttattcatttttttcagtttttttggttaaatagttaaaaattgagatgaatagtcatttaacattttcaaccttttattttacagtcacatccaacatctaccgccaaaaatctattgccaaaactataaagcgacaactggaaccaattagcgcagcattttttctttttctttcttttctgaatttatttttaattttcaagtaaaaagaaccacatg

SEQ ID NO: 37753 - DNA, 818 bp, Arabidopsis thaliana columbia
attgtgactaaataaaccaactcattaatgccaattacgggctacaaacgaaagtttagtagttgagtagtcaaatttagtggctagtatctcgagagagagttagtttagaattatgtttatgtttcagaacgattcttcataattgaattctctattttgtttattatgctaatctttgtcttttgaaataccctaacgcccaatgtctttaatccataattttaatcgtttattttcttgcattttaatttataattcaaaaaccaaacaaacaacgtttttgctttagctaagaacgagtctcggaaatccttagagtatctttggtccttgtggatcgacctcgcatatactaccttgcggttaagtttatcgagcaattactcgagcaatcaagttggcgccgttgccggggatcgatcgataccaatgcgtcaacatcatctgctagaacatcatcgatccagtcgttccttcgagcttcaacatcatcagccagaacgggatcgatcgatcccaccagtagatcgatctcaattaatccaaaccgattggatttctgctaaccggaattgaaccaaactccacttaaattgaaccggaacgacgaacagtttatcaccggatcaagttttccttcgccattcaagagctccacttcaacttcttcgttttttgttcatcaagaacaccaaaatcactaaaccctaactctctcaattcttagtcgtttttgtcaaatttggtgcctatttcaatcagacttttcctctttccatatctactgtttgttttctggatctgcaaaggtatgt

SEQ ID NO: 37754 - DNA, 504 bp, Arabidopsis thaliana columbia
aatttaccatgctcttaaaggatgagctatttaagttaggtaagttcttttatctttaactttcataatcttttttgtagaaaatataattgaaatcttttattgagccactatgataaagtatgcatttgaaactctcttatttttggtgggaaactcttttaattaggcagtcttttagtcaacaaaattatgtatttactcttaacttatataattaacaaaacaagagaatgagattcttgattttcatattactatgttgagaattattaggaataattcaatactattttcgcgagttaatatttacataatcaaaattattctaacttcttcatcagagttgcaattgacaccatcgaggaagtagttgatttcattttgacaatataatccgtgaagcaaagcttataatcttcacaataatgtttaacatactgaatctgaagtcattaattaggtcagacagcaatctgaagtctgtactaatgacctgaagcg

SEQ ID NO: 37755 - DNA, 562 bp, Arabidopsis thaliana columbia
gcatctcccaaccaccctcatccttcagatttggatccagtcgcataggaatttcattgaccatctattgagagatcccgaatcaatttgtaaaggtcctctttaatcatcttcatttagaatctgaaaatcatttgttccaaccctcctcctttatggagagaaccatttgtttcaacccctcctcctttatgcagagaaccatttgttccaaccgtcctctgctttcggcttctatgctgtgcaagcaatcgagttccataaacctatcactacttcgtgtagagtgtcttgcgccggcgagtttcaaggtttcagaacttttctcaacgtcactatatctaataccgtgactatcctctcatctcccgacgtgatcgtggtggtgatccggctgaccgtcttctcgtttgtagcaacctcaacaattgtctccgagaattcatggattcatcgtcggtctatccttattttacttatgctgcatacctatatgctttaaatcttattgttgtattctcaaggttgtagagctctgaactttgtatccttagaatgagtg

SEQ ID NO: 37756 - DNA, 483 bp, Arabidopsis thaliana columbia
gataacaacgaagttaccaagggtgtgcaatatatcacaaattgttcggtttgttatagcaataaattttctgtcactaattccctcgttaccggatgcattttagtgatgcagttgtgaacttttgatccattttcagttaaaaaatctctgaaatttggtatgtttgagtgaaggaataaatcctttcattttggtcaaaaccattttgtggaaagtgaaaaggcacgattgcatcaaaaaatagaatttcaacttcggaaatgtattacgagaaccagaaatctaccaaaatagatggtcaagatgattgtccaaaagtatagaaatcatgcagatttagaagatcatcatacagtattttactttagaaatttttacattaaatttatctatagagattaatttatttttcatttctatttaggacatttaatttacatgtcctacacaattgttatttaggaaccgtaaatggacagc

SEQ ID NO: 37757 - DNA, 329 bp, Arabidopsis thaliana columbia
gagtgtgctctaaagtcatttccctagtccagactagctgtgctcgtgctcactctaggagtacacacatccatccttcattagacctttcagactatcacgcacatgcgggacgtacttgtgacactgttaactcaagaacgtgccgttagaatacttgagcaggtccaaatcaggaccactatagatagagatgcaatacagcctggacaaaggtccctagggtgccttttctaccgagacatgcaatcaccggattatggctcaccgcgttctacgagaaatcgccgagacacctgcgtagccatgaggccagatagatggctggt

SEQ ID NO: 37758 - DNA, 665 bp, Arabidopsis thaliana columbia
gcagagaagaatcgagatgaagcaaataaagcggtaaatatttgagagatgagtcaaaggaagtaactcacagacaatgtttgggacttgttttgcttccgtcttctccggtcagcttccttaggtttcttctaaagcaaggcttgattattctttttgatatatatatatatatatatatattatatatatatatatataactcatatagaatatacacaaagagttgaatagagaaacaagatttagagaataatctataggatatttacaaagagtcgaatgcttatatgtaatatcttctttcctaatagaaacaatgtaatctgctattatttgtaaactaaaattgttaacaactttaaaacgatgaaaatgtttatatgaaattaatttgcaatactttcccattttcgtggtttcatagaatctgccgaagaaaatctacgaattctctcattggcatttttacttttctcttggcgtttgggtttgggtttggttttgacatagtatttaatgcaattatagagagatccaaattccaaattctatacaaacgttacaagactattaaaaacaattaatcgcgcgccgacaaaccgggcagaactatgcaacttgagccacgcatcaatacattcggtatggaagcaatgttcaca

SEQ ID NO: 37759 - DNA, 460 bp, Arabidopsis thaliana columbia
attatcgttttccaaaaaattcagggaaccgaaaatcaaataatactattacttacccaaaactgattgatgcaaccgactagaacatttggcctgtcctgtgcagtccgacaaatcacatttcgtggggtcctatacacttcgacttactatgacatttcctctcctctattaatatattagcctatgaagatataacaatttgacgttgaaatattagtctcgattggtgagtggtgacgttgtatcgctagctataacgcaaatgattgttgcgataaaatgaagcggtataaataaggtggtaagaaaattactgttagttttgtactgctatcattttaaagttgatatatgtatctttagtaacgtgttattacttgcaatcttttatatagcatcatttgatcgaatataaaaatcaagtagaaaagccaaaaacgcagactaatttaatatg

SEQ ID NO: 37760 - DNA, 1016 bp, Arabidopsis thaliana columbia
acagtttttcgaaccaggaaacgtagaggatgtagccggactgtctaatccttctggaattcgggacgaattctattaagggggggagaatgtagtgacccgcgtaaggacatcggccacgggcgagagtctgaattttggaaagttgcccgaatgcttggacaattaaccttaagtgcccaaaacacaatagactatcaagggacaaagataggcaagtttgtgcaataatgggcaagtttgggcatgaatgggcaagtttgggcaagaacggtcgtgccgcgggcgaaattctcccgtcgggcgttgaccgaccgttgaccgcgccaaggacgcgtggctcgactgacttggggcccaagcaaagtttcttggagccgaattttagttgcgtggagccgaagtttgggtggccacgtgtcgctcatccgctagagcaacgagcgtgtcatcacgggtctcgaagctgaaaactctgcccgaatcattgcacgcattttgttggttactgagtgagttctggataatggtttaagtttcataatcatattctcatgcatccttgattgatttcgtgagttatatgaatcttgtgaatggttatattggattgcatatgtgatctttagattcttatgctattgtttatggttgagaggttgtgttgaggtattgatgattctatgagtttgatttaaccatatgtttcataatatcttaaactttggggtcttggtacgtggtgcttgtggtaggaggcaaagaccataaacgtgccaagatcgtgatatggctgaccttcttagtgaaccgtgctatcgtgggggtcttgtaacgatgttacatgttgctatgaagtgcgaagaactcggagagacgaggctagctaccgtggctgagtgtctacacgacggtgtcgcatttggtagtgatgctccggttgcatacctttgtggttgtagcacgggagatcacatgattgtgtgtcgatggagtagagtatgtatgaatttcat

SEQ ID NO: 37761 - DNA, 621 bp, Arabidopsis thaliana columbia
gattgctctgaacatgattttgtttttttattattttttttgctgcaagaacattattatgtttgaaattataaatatgtcaagtatgaccttatggccatgtaatgttaatgattcgattttataaatactgtgcattatgggtcaagtcaaatgtatactttttcactagttagaaaataacatacagtatatggtattattccagaaaatatgtattatgactaggattggtgtagtcacatgactcatgagatggtatgtctgaaaaatcccatcgcaactttaagattttccaaatttgattcgacactgttggcaaaatgtttaaagcaatagactcccccatcacaaaacctccaataatttaagttaaacaattgtttgggtccaatttgtagcccattaagtggttagtcatggcccatatctgattaccaacaaaataaaggaaattaattaaattcgcgcaataaaaagaacagaaaaatggtgggacaaattagggttactaatttgggaattttactgtccaaaacgaatcaaaaaaaaaatctaagctttttgttccttttgcggcttttcgtcgtcttccttgcactatcttccttctgtagcatc

SEQ ID NO: 37762 - DNA, 1306 bp, Arabidopsis thaliana columbia
tcgcaggatcgactgccagaagggaccctgtgatcgagtacaacaggatgacaaagagtgaaaatgcagaaatagaccactttactctatcacgcagtctcactgttagtagactggtgtgatcgattagaatggttgaaaacagaaaaatactaaaattcaatggcaagtgaatgaagcaggtaagtaaacagagaaatcatatggatgagaaactcctaaggatggggttatcgaatagtgtggtctccgtaatcaattcagttggttaacaaatctcaattaagctatccctagacaacaggttcaacaacagattaattcactcccgtgatataaatcctcaagcatagctagacactgacctaatttccattagcgatctctaactaagcagacaataagaatcgactgttaaagccaataaccgctctaaacggccaatcccttgggatagagacgattatcactggaattagtagatgcaacgttctataaaacgccttctaagcgctggaacgtctgggatcggattccagttgatcataaaggaataaacagtaaacacaactaatccagaagggattcaataaatctacacttaaccaacagattcgaccaggggttccacagctaccctatcccatccttagaaactctaatcactactcagacaacatgcttaaagacaacaacatagaaacgattgaatattgcatactaaaaatattaaagggaatgacacaaagatgaacaagcaaatgaaatcaaaatctgaataacttagaagaaagatcgaaatacaaagttgcaggaatgaaaagtggctgctgaatactagtgcaaaattcgtgtctctcaaagtgtatgtctcaaggcgaaaccctttgagacttatttatactaagataagaaagcgggctttgagcccacttaacggcccatggatgatgtgatcaagagtgtcgactcaaagtaggcttcctaatgggcttcgaagcgggcttcgaatgggccttctattctcttttcttttgctgctcgggttatcttggttgagtgcggattgatcagagggtcgaggtggtggtcgagtaggttggttgacagaatggtctaggctgcttctcggcctctgtgatccagtatgtgtgtcagctgtcaggatggactggttcttctcctctgccatcgagtagaactggtggactggcaaagtggactgcctggtcgcctctgcaatcgagtagaactgcagaatggactgcctcctctcctctccaatcgagtatatctggcagaatgg

SEQ ID NO: 37763 - DNA, 623 bp, Arabidopsis thaliana columbia
ttgcattcttaacacagttctgatatgaacaagctttaatctctagctagatgttgttttatctgtttctttttggttggtttgtttagtatctttttaggttgagccagaaggatgcttgagtatcaaactaagtccaaaaaggggagattgaggatgcagattctgacatcaacgaactaatggacatcaaggagctgttggacatcagagagctgttggatatcaggacggtgcatcaaatctacatcaaacgtctgagttgctgacatggacgcgtgagctgacatggcggtgctggagtggttgatgtgacgtgccaagaagctttgctgaattggcatggtgatcaaacacgaaagttggttgagaagatttggtgaatattcttctcaacaagttaaggaaagagataggcttgaatatcaaggagtatctcgaacaaggaaaagggataggcttgaagatcaaggaagatcccaacaaggaaagggataggcttgacgattcaagaaagatctcgctcattgattctcagagatcctaggaattagggttagcgagaatagcataaatattctaggattaggcattgagctgcctaagcactctagaatattgca

SEQ ID NO: 37764 - DNA, 564 bp, Arabidopsis thaliana columbia
cgtaattcgtaaactactattttttttgttttgtttgtaaaataacaaaaatatttttatcaggaaggttcttaaactttttgagaacgaccttctaaacacttttgtggtatatttgaaatgatttaaaagttatcgagtattacggtctctgatatctatatatacatttttgcagccattttgtgaaataaatcctgtagttaagacttatttacaatggctgctactggattttaatgtttgtttttgataattagaaaaaaatcttcgaattaaatatttgatatttaacaatcttccctaaatctcttcacattaactacacgattagttactaaaataaaacttccaaaatatttaatatcatttaattactacaaaattatcatttttgatattgcttttctccatgactataacaattcgattataatcatcaaaccgcagagatatttgtatcaaaccgcagagatatttgatagcatttaattattacaaaattacaaaatatttagacaatagatcataaacatatcataaataagatcaacattaataaaa

SEQ ID NO: 37765 - DNA, 894 bp, Arabidopsis thaliana columbia
tagaggatcttagaggatcccctttgtttactccgctattgtttactgcacctcgctgcctgttgtttagtttttgtattttctgcctgttactcgacctgatactcgcccaccaagttgtctggcaacagactgtgcagccgagtatccctgtaacattttctgtctattactcgacctgtcactcgaccacatccagtgcttggcaacaagctgtgttggtcgagtgtttttactgttctgcttgaatttctgtttcctgcttgttcacttaggactgctagaacacccgaaaacctcttattgcttggcttaactctgtgaactctgattgtatcttgattgctagcatcacacccatttggattgacaacctaaaatactacaatgacatgattggtgttttaggataattgactaaaaacctatcatcatttggcatagttattctggtggctgacttgtcaccgcacaaatcgtgtgatggccgagttattctaccataatggctgacttataatagattatttgatgttacggctgagttattctaacgtggtggttgacttgtcatacccaaatgtcgttgtaatcaaagaacccaaacgtcactcgaggactacatatacaccggtttaccttcttataaatataactgaatagtcaagaacctaaacgtcgttagaggactatatatacactggttcactgtagtcttatcttcttgtcgattcttctcttttctcttgtccctttctctaatctctgagcaacaaatctcttccgagatcatggatgcatcaggttccaacaagaggccgtgtgtggatgacggttccaacatcaggctgcttgaaacggagaaaatttcaaaggcatcatctctctcatcag

SEQ ID NO: 37766 - DNA, 795 bp, Arabidopsis thaliana columbia
cacagttagcaaccgaattgaaaattgaaaaagaacttgatctaaacaagtctgaaatctcaaatgtaacaaacaaacacccaattggcaacggtgccaaattgataataggtttttagtcaattatcctaaaacaccaatcatgtcgttgtagtattttacgttgtcaatccaaatgggtgtgatgctaacaatcaagatgtaatcagaagtcactaagtcaagccaagcaataacaggttttggtgtgttctagcagtcctaagtgaacatgcagaaaacagaaattcaagcagaaagagtaaaacactcgaccaacacagctcgatgcagagcattgggtgaggtcgagtgacaggtcgagtaacagacaaaaaacaaaacaaagacattcgactgcacagtctgttgccagacaactgggtggtcgagtatcaggtcgagtaacaggaaagaattgtagaaactaagcaacagatgacaagatgcagtaaacaacagtagagtaaacaaagaattcaatcagataaagaattcccgaggatggggtaattgagtagtttcgtttcctcagtttacaagtgattgacatgctcaataaattatccctagacaacaagttcattaaccaaatctaagtgccaccgcaacagagaccctcaagttaacctagtcccagactcaatcaccattgacgagagctaaactaacaggcattacgaatcaacgagttaaagccaaaacgctccctgcaaccaataccttggtacacggccacgaatcctggaattagtg

SEQ ID NO: 37767 - DNA, 589 bp, Arabidopsis thaliana columbia
tagcgttctatctctataacgacgtctctaagtttggtcggagaaaagtgttcttgctcgttctttcttttctttgtttttggttaaccgaatgcttgtgagtgtgtacttaataatgtaactcgtagtctgataataaatgcaagtcccactgtttcaatgcgactatcgccataaatatcctgaacccgaaactccgaatttttggaatggaacggatcttggagccaagtacgtgtcgtttatgacattgaaacggcatggcgttggaaccattatacaacttacagagaaacttacagagagtgtatataatgtacaagaaaaggtgtttaaaaccattaacctagacatcttgaaatatcatatctatcgcagatgtcatatgattgctgttcccatacaaaatcgtcttgatgtgaatatgatctaaaggttaaccacgaagtaagtaagggcgatcacacacacgtccttcaaatagtagcgggctattaattaacttatgattgtacatttgtactagttttgttaaatgtgtgattaattatgaaggaattcatgtggaagtagagagatgggctaagag

SEQ ID NO: 37768 - DNA, 458 bp, Arabidopsis thaliana columbia
aggtaacaggaagacttactcattggttgctttgctttgagctgccacagcctcttttagtttacaaggattgtgttgttgggtcccaacactagtgaaattgcctcctattttcccacagagagcacaaggattttttcccttgcacgttccaccattcttttactctcacggatgatacaggaaccaatcctttttgcgcttcatctgagtcaaaagcctgaaaaagaccacatataatacatctcagcctaaaaagcaaataccatacctacgactggaaacatatgggataagaggataaataaataaagggaatccttcaagtggtaagtttcaaagtaaaagtgttatggtatgatcttgtctgccttttgtttgaaaaagccaagatttgtgggtgtaactgttatcaagagataaagagattcagtgagatctttctttcttgtgacttt

SEQ ID NO: 37769 - DNA, 591 bp, Arabidopsis thaliana columbia
aaagaatggatctaattgcgttctatacataactctacaacgttataattttgattaatgaagtgtgaagagcctctataattttcaatatctatttttcagttcgtaaaagtatcgtagtagtgttattttcagtttttaattaatgccttaatggggccattttagtataattaaaaaaatacggaacctgcatgtgtgaaaaaatatcagaataatggacatttgaaacaaaagttactgtattagtacaagaagtagaactgtagacgtctagaacaatatgatatatcatatatgtcaagatgatcttcttcttacgtatgggcattccgggtcaattaagcaatcacttatatagtataacatgtgaacacatattacacacaggtttataaacttatagttatatgcaaaggtcagtagaatagtcttctaaaagtagaaatttatcaaacaccaaactcgttaatatattaataaaattggatatatatcaaacaccaacctatggatatatatggttgcattggttggtataggataaaaccgtatacttacgtatggtgtaagtatatcttgagactgatg

SEQ ID NO: 37770 - DNA, 532 bp, Arabidopsis thaliana columbia
cttctccgatgactccgaagactgtgacggttaaggaagatgaaactcatcatccttatgcgtttcatgtttccggtccgagaaatgttgcttctcctaattggagagatctcatcaactccagttggtaacggctctgtttttttttcttttcctaatgacatttagtttctaattttgggtttcttcgttggtctttgagacataaacttgattatcgagaatgggcattgcagcaaaaccctgtttatgttcttggatctgacaggatcgaaagattgattttttgtttaggtgaatctgttgtttagttatattgtcttaattacagagatctattccttttagcttaatctgttatttagttatagtgtcttaatctttctagtatgaaatgttaattggtcttaacaagttttaacctttgggttgattttctgatatatatataggaaggatcctaactacaagagaacagtaatggcctgttttattcaagcagcttacttgcttgaactcgacagacaagaga

SEQ ID NO: 37771 - DNA, 514 bp, Arabidopsis thaliana columbia
tgttttcataaaattatatagattttgtgatcatataggactgtgttgtggatgtaaacattggttttaggcaaaaggaaagcttgagaagtcaatggtggtggctgatgttgattcaggtgagagtgaagacagtgaagtacgcacaagttctggaatgtttctgaccaaaagacaggtgagagcagtggaattttactatgtatttttattgtattcgactagcttaattcactaaatagacagactagttctctgtgtttttttttgtaaagaagtaaacgcttgagtcttgaccaagttactattggttttgtttacttcaacctttaggatgatatagtagctaatgtcgaggctaaacttgctgcatggacctttcttcctgagggtacttccgcgaggcatatacatttttctttgatgttctaattctggttcttactctcatcttatctttatgtgttgtggatcagaaaatggggaagccttacaaatactgcactatgagaat

SEQ ID NO: 37772 - DNA, 585 bp, Arabidopsis thaliana columbia
caagcagcaattcgaatttatggactatttttggcgccactcataaaccatgtaatggcaagctacctgaagcttctaagcaatatggccgaattcttcttattggtcgtcaaaattatcatcaaaattcgaaacctcttcttcaaatagaagaaacaaggactgcatacttttattctaaatcatctttttcctatatttgatgatattattttactaaccgtatatgattatttgtactttcaaaaaaaaaaaacattaacaatcttgaggggttggtaattagagatattaaattaagttttttttcgtgatcctgctcacaaacctaaggttaaagtttcgggctttcgacctactcacaaatctaacgtaaaatttgattagagagcaaaagaagctgaccaaatcagaatttgtttatgaccatgtcaaataactacatcgaatcacaagagcaaatcaaatacaaaaaatgtttaccgttttatgtcttttactatttaaaaccaatttaaaatatccctcccgtaaaaaaagacctcttcccatttacatttacgttgagccaaagtctaagccaag

SEQ ID NO: 37773 - DNA, 492 bp, Arabidopsis thaliana columbia
tctatcaaataaaaaaacaaaaatgtaaaatatgtattcctatgcttaggaagatattaagaattgccgacttctttcagaaaaaaaatacaagtttattgttcgaaccaatgcagagaagcagtattgtctgcttgtgaagaatgaagaattatacaattttcgcttaagcattattgtcttctttctgatagtatcttttttttttttggctaaatcagtaaatatcagtagatgaaagtttaaacataaatgcattctcaacaaaggaagctttgaatctcttattagtggagccaaaaggccatgaggtgtctaaatttcttcatctttcttttattaagttggtcaaagtgggcaactacaaaagtttttgagcatacgtagatttgactaacttttagaaatcacaggagaggatatcataataataattggtctatgtcatcacaccaagaatccaatttgaatttggtttcgttttgagaattt

SEQ ID NO: 37774 - DNA, 1396 bp, Arabidopsis thaliana columbia
ctctttagagacttggtttccttcctcctgagctttatgtataattcactactaatcccataatttctcagttattagttcctctgaaacgtctatctaaatatatgtaatcttcgtttatctgttaagtgtttgataagtgataccttaacgatgctaatggctacgcaagaaattcactctcaaacataattttatatacacaccatttcaatgtaatggcaaggccaaattaattatttgtattacaacattttcacttattacaaaatgaataatcaccacaccattcacagaatcaattagcacatttttaatcccaaaaaaactgggatcaaaaattttataaaaaaggtgaaaaaaaagaggattgagtttgagttagcaagcacttccaccggttgtaacacaatggttaagtgcagaaaaccaagaacgtttcccttcaacctgcgacgttgatcgcctgaatcctacaccggatcttgaatatgatccaccaattaaccggcttcgaggttcatcaacatctgagccaccaaggcagagacttggaggaaaccggcggcacgtaagagaccgaaacgctgatgatctagcggattgtggagttcgagaacccgttcttgacacaaccggtttacaactgtagtgagggttagttaggagagctgtgtctaagacatcagaggagcaagtgcagaaggacaaggagatgcttgttcttgatgatgttgatgttcttgttgttgccgttgtatggggaagtttggtgaaagatacaatgccattgcgacagagaggacacgggacagagcctggtgtgacgtttgaggtctttgacgatgttatgcttgtggtgcttaggtataatgcacagtttgtgcagaactcatgagcacatcctgttatgtcacacacaacaatcaattcaatgttttaagcaaagatcattttcggtagtgaaagtggtacattaccatctgctgccacagtgcattttctttccaaacaaacggcacaagggtcacgacatggagtcagacaatcgttttctcgccagccgcattctctgaaatccacaaacgaaaaaagaccaatcagccacagagatcatgcgatcatatagggtgtttcagttaggtgtaaagtttacatactgagcaatattgacaatgctcattaaaggaaggcagaggaaaggagaggggacatttggcaaatggagttgtggttgttctgttgttgggttcaggatttcttccagccagtttcggtgccatgaacgagctaccatcattggtgtccatctaaaaccaaaacatgaagcgaattaagacattgaggtctatatcaaactggttgattggatttagcatgctgagaaatagagtga

SEQ ID NO: 37775 - DNA, 2286 bp, Arabidopsis thaliana columbia
atcaggacattctaataattttcaagctaattaatttagatagccagtttactgctgcttgatgattgacaacattcggatgaactaaaatacagtaagaaacgccaaagaataactaaccttaagataggacatgtatttagcaccatcagtttgctgaatgctatctttcggcaacacgttcttctttctaacttttccacccacgtttacaccattattttgagttttttctttctctaaaccagagcgcttggacctaagttggataggaagaattagtatgcaggtctggggcaaggaaaagaatactaacagaaattgcgtacacatgtgaagagtaagtgttcagcaccttctctgaacctctccacacctcacaacaggagaaatcatattatcactactgtctggtttatcatcttcattccaggaactcgaccccgaggcagcagtcagaccctggcagctaccgttcacttgtgcattgccccctcttgatctcctgaaaaataaatgtaagcaataggtgattcattgatactagttacaaataatgaactaagatcttgataaaggcatcactagactcaagctcaatataaatccatgtcctgtaagggtcatactataatcaacaacggttatagcttgactagtctgtcttcaccaaactacatgactttgcaataaatctgcttggttacattacacttcaacagttctccttttaaatagaaaattgtaaaggactgacccccacatcattttgacaatatccttctctggatctttgcagctttcccatttctccttcaatgtctgcaaataatctataatactaccagaaacaatggaaagaggagttacaatcatgtggacaaacatttcaagtgctcctataatttaaatagagaaaacagcacatactcttgatgatatttctctaaattcgagtaatatctccttttatcagccctcaggcattcctcccgtgaaacgatttgatctggatgagctttaccggagcagacagctgttcccctgaaaccacaatttagattcaaaacggagtcgaatttctgagcataaattagaccatcactaagtatacggtttataatgaggatgcgaaggcagatcacggatgttggcattaaatcaagctctattttggtataggcaagcaatcacagagtgcattctaggaatccaaaccaaaaagtccagtgtaactaaccaatcaagagaaggatttccaaaatgaaaattctcgccatcaagcaatgcttgtacaacttgctccacatcaactccctcagggagaaattgccgcagataatttctttcaccatcagacagacaagatcgccaaacctgaggaaaaagaaaaataagcggagattaaaatgatgaaaacttatcatttcaaaggtgtacgcagatggtagacaagaatagcactgtactattacctcattagaaagcacctccgacagattttccaactggaaagtttcatgcgggacagggcatacttgtgccaagacattacgcctaggaggaacgacatcaacaaattcacgaagatgcctaaaacttagaccaacttgttccttcttagagactactttacttcggttgcgatcccattcaagagtgatgtgatcaccggaacgcaaagcaccatctggtgaagcattctttttcctttttgctctgtaatgctcccgagaactggtaccaataacattggcactgttcatccgctttctcctctgatcagctgccattctgagtcgtccacagagaagaaaaagaaaaaccaatgtgaaaaattgtaacaagcgatgcaaagaattgaaatttatgcataagggtccaaattgaaaaaaatgaagtaacaacatctgattcaggaatcaaagtacttacttttacggctgattgagaagagagcgacgaatagtttattctttgatcgattgtgtctgaaatatccaatcttttgtttctatctgacaaaccaaaacccgagagagagatcgaggaggaggagatacaatcagggggagtaagcaatgcgataaagtaagaaacccaagtccaatttaatgattgaagaagagagggatgatgaaattggtggcgattggagaaaacctaaagtagagaagcaagggagagtatcctggagacaagacgaccgcagagaagagaagacaagagaagaggagagattttgtctgggaggaggaagataaggcaaaagaggatttttttgtt

SEQ ID NO: 37776 - DNA, 547 bp, Arabidopsis thaliana
taattcaaaatatttcttggttctatttctatatatatttaagaaaaagcagagtactttacttgattaatttagaaaaaataatactactatttggctaagtgcccctaaaaaaatcgttgaactatagagaaaaaaacagaggtctaaaagtctaactggcagacacttttattctcccatgtgtttcaccagacaccatctccatctctccaacatttgcgtttccacatttgtttaaacataactctctctctctctctctctctctctctctctcagtacctcttattcttatgctcttcttcaccaatcctatctcttctatctgtctttattttctctacatgtgaattgacccatttctggtaaacacatagagtaccacttttcttatttagattcttcttcctcttcatagcttccaagtcaactacttcagcttctgtcggctgtctcttcccagatctcgtaagcacagtaccctccaaacttctttatctctctctgtctctctctctctctgatcttcgattcttgtttatat

SEQ ID NO: 37777 - DNA, 603 bp, Arabidopsis thaliana columbia
ttttttatgtctgctccggcctttgattcatcgtagtatatcatcagtgacgtgtgatactactatgtaataatactatatgtactataagatttagtcactacaaataagaattcatatatcacgtgacgattagtgaaattgtgatatactgatatatgtatcatgtttggcaaacgtggaatcttaatcacaataaaacatatagtagaggatgatttgaataatcctgcatgaatatgatcggtaatttcaagatgattaattcacatgatcatattatatatatatatatatatatatatgatgtattttgtccattttcatgatccatccatgtaaagttcttttgtttgtcttgttaaaacacaaaaccatttatagttttatatcagtgtctgatgttttgattaagggctttatatataagagtatatagatacgtgcgtggcagtaatcatgcacatgatggttttctcagtgggtaattcgtatttgtcctagctacagaaacctctagctgtatagctaaagtctaatacaagagactcacagaaaaatccatcaataaatctcattcaaacttatgagttagatataagt

SEQ ID NO: 37778 - DNA, 832 bp, Arabidopsis thaliana
ccaaacccgaataagtatccaaacatatctcaaatataagtatatattagttatatttatacttatatatagaaaatattaggattttttggatattttagatatttttgtgtattttaaaatatattcaagcaaaactactcgtgtcgttttgggaatttttaaaattttcaagtaatttaatagatttgcagacaaaatttgatatttcaatatataaataaactcgaacccgaaccgaacccgacccgaaatcttaaattacccgaacgggttctaaacttctaagcccgaaaacccgaacccgaaatacccgacccgaatacccaaacgcttaggactaataattaataaaaaaatagaaatctacaaaaatatttagaaaccaaacattgttgaaaatatattttttatatatgccgtaatctcgtaagttaattttacatcatacaaattaatattaaatgagttaaaattaataaattaaaatattcttactaaaagttattgaaaagttaaatcctataagctaagttatttctctcaaaatgttctattttcacttatgattacattagttaaagacaaatttgttaattttccttttgttgaataaatgttaaacatcttatcgtttgatttgacacgtgacacgatcttaagagttagtaacttgtaaacatctgatcgtttgacttgacacgtggcacgatcttaagagttagtaacttttaaaaccattttttatataataagatatatatatgattttaatattattttattagaatttccttttctggttttctaatgtaaaaatggaaatatagtt

SEQ ID NO: 37779 - DNA, 473 bp, Arabidopsis thaliana columbia
cctctagctgcattcgccagtgtgctgtaaagcgtggaactgatatgagtcaaattagacctaagcactctctcaaaaaaatatcaattgtagtattttagggtcgatttccacgaagttatagtctcaaaattaagctaaatcaaatagtaataaaagtaaaaagaaacaagaaagcagatagcagatttgatttgtactaaattaagatgattaaagtgtcgtatttaggaaatttctcagaaaatagatgaataatagatctagtagttaattaggattgttatcgaaccattatagaactcaaatcactaacctatgatcaaccaactctcgtcttaataaatagggatccaactctcgtctataaatcagtatatagtaaacatgcattaaaatcaggtttaataagttcatataagtatctaaaccaaacctatccttattttaatattcaagctcatctatgatag

SEQ ID NO: 37780 - DNA, 736 bp, Arabidopsis thaliana columbia
gtaaaagccgccagagaaattaaatgttcaattcacattggtttaggcattctatcaaacacttttgatgcatagaaaaacctagactctaaaacagggtgatacaacctattcaaacattaagaacatgtgaatcaaagaacttaaagataaagaactccaaacaataatcaaacgatcaattcattgaatcccctacttagaacccaaaacccaattaagtgattactcactctaagcaaaataaacaacacaaagagttgaaaagatataatagattaatgaaatataaaagaaaaaaagattagaaatcttttccaaagtgtcaaagaggatggatccttctcccaaagttgcttacaaagaaaagctctcaaaaagttgtagaaaaagaacggtaaaaacaaaattaggtgtttggagttttaatacccaattacagaaaaaagaaaataaatccagttaaggaaaaccgaaatcctgcgttaggaaatcagaccgatcggtccagattttaatcgatcggtcaaccatttttgaccgtctgttgaaagccaaaatggatcatcaccctctactggaccgattggtctacacagtcttctccctgcttcagattttctcgccctttctctactccaaaaagctcaaaaccatccagtcccgtcacaattacctaaaacaggcaaaatacagaaggcacacccaaaagacgcaaaacacggactacgacatg

SEQ ID NO: 37781 - DNA, 299 bp, Arabidopsis thaliana columbia
gaattagcaacaactaggactaagaagaaattatgtgaagacatgttaaggtttgaatgttaataaatgtttgatactgaatgtttactgatcagacgcttcaatttttatcatttcaaccaaagcaataggtgagtatgctagtctcatatcaaaggcagtcgagttaacattgaccacagactggaggctattgttgaacaaatgttggaaaagtatgggatgcccaattgctttaaactggcacaaaaagtgggcttggttacgtcacccaaatcctatggtcggcgcagtaattg

SEQ ID NO: 37782 - DNA, 569 bp, Arabidopsis thaliana columbia
cagtgtgctttaaaggtgaaacttgttccaatggctctcgaaagtagtgccttcagaagcaaatttctggacactgacgaacttctgagttacgttagctggtttgcggtaagaaatttgtcattttcgtcgcctaaggtcaaaccattttttgttcatttcttagtatggtttcatcaggtgatttctttctcttttctgacagacgtttagccatatagtgcccccatggctgcgaaaaactaaagttgcaaagacaatgggcaaaatgcttgtgaatcatcttggacttaacttaaccaaagatgatttggagaatgtggttgatctgatggaaccatatggacaaataagtaatggaatagaacttttgaatcctactgttgattggacgagggagacaaagttcccacatgctgtctgggcggctggtcgtgctctcatcacacttctaataccaaactttgatgttgtggaaaatctttggcttgagcctagttcctgggaaggaattgggtgtacaaaaatcaccaaggtcacaagtggaggctccgcgattgggaacacgg

SEQ ID NO: 37783 - DNA, 600 bp, Arabidopsis thaliana columbia
  unsure (1)..(600): unsure at all n locations
taaaatttgacaattgtcttcgtaaattcgtctgcttgatctcttcttcttcttcttcttcttcttcttcttcctcgtcttctcaatttcctcaagctttcaatgccgtgtcgttgacaaaagattaacttgggcaacgtacaggtgcgcacgataatggagacnggcgccgccgtccttggtctctaaagctagaaccgccttcaattccgccgcggctaaagcggagcngtcttcactgatctcaaatctgatcgaggttttattctatttcctcttatctctccattcccgtagcttccgcttcaatattgacttaattttgttttttttgttcttccaaattttctcatttactaaaatttgactgatgaatagatgcttatcgctcgacctctgattgtatctgttgttgtggattaattcgaattctatatttgggttcttctctcttgtcaaattcaaatctatttctgttgtttctctttgtttctggagtcaaaattcaaatctatttggtgatgttttattgattttttttcttttttaaattggaattttgttggagaggaggagaagcaatcgacgaggaatgtgaat

SEQ ID NO: 37784 - DNA, 530 bp, Arabidopsis thaliana columbia
tgttttgaatattttcagatattttggatatttttggttatttttgaatatttttactataatatatatttttctcaaccatttttaattatttagtctagaaataactaatatttttgaaaatatatttatatttgagatatttttggttacctgaaatatttcaatacataatcattcggtttcggttcttttggttataaaatttagtaaccattcagttatttttcaattttcgatttgattcgattcgattatttttgttttggttttgattcggtacatttggttcgtttatttgaccgggcctaagaccattggaaagaaaaaagaataacagatggtttataagttcaaaggcacctctcgtcacaagctggactttgggagtgtgtaatttcttacaccatatatgatatatattgaattttttggtgtaagtgacggctgtttgttcggtaactcactttcttgcacacaacaaatcttatcttaataccacatcattcatagaaaacttagtggactga

SEQ ID NO: 37785 - DNA, 594 bp, Arabidopsis thaliana
actgtcgtcttcatcatcactttcttccacttcgatcatttttccctttcccttatcctctcgcgaaatccctttacctttcctatcaacaacttcttcttcttcttcttcttcctcgtcgtcttcctcttcatcttcttcatcctcttgctcctcttcagctccaacatcgccgattacgccactctcaacctcttcagctgctttctccgataaaaccgatgattctgctccaatcgtttcctcggtggaagaattcagattctcgatttggccacttccattagtttctccgtctttggactcagaatcagcagaattcaatgaaggattaagcttctgagccttgtttgtcacattatcctggtcttgacaaaacagatccgattttcgcttcacaggaaacgaagaatcctgttgattctcaacatccgccatagatgaatcaatcttcttacttcagagactcgcgattttggtttgaggacgacgattcagagttagggctttgaagctgaatcaaaacactcgagccaatttagtttgtaacctagaagtttttgtagggttttacgctctgttttttatatttgg

SEQ ID NO: 37786 - DNA, 809 bp, Arabidopsis thaliana columbia
ctttaaaaaatcttgtaaatctttttaaaaccttttgtaatggttcacaagagttttaaaatggttcaaaaattattaaagggtttacaagggttttccccaattccattatccagttcattgtttttggtcgaggagggggagagaaaccattcgctattccttttcctttgagatggtacgggattcgcttatccatggtgttgaaaaaggttccaatgttagaggtaacagggagattatgatgtatttggtttagggttattctcttagtagtgaacggtttcagaggtttaacaaggtaacaggaaacactttagcaggtttacaaagcttaacaaagagtagagaaagccataccagtggttagatttcttggagttgcactgtgttgtctcactagggtggtggaggccggaagataagcagaagtgttgccggaggagctcaaaaaaccattggatcttttcatttgtagctaaagaccaacgggtattgctactttcagtaacaagaagtggttgagatttggttttttgaaagttccattctatgtttagctatcatggggactcgggcctgggagagaaaaaaaacctttttcgaccagtatttttgtttccctttatatacttctttgttcaaaatggaattgggaaaaaccaatggttaaaatggagcttatggttacgatttttgaaccatttttgaccaataacacatgtaaaaactaatgtttcaatcaagttcattgttttgccaattatgaattggggaaaacattattttctctttttgtttcaaatgtt

SEQ ID NO: 37787 - DNA, 535 bp, Arabidopsis thaliana columbia
gaaacttgagggtacaataattataatttacaatgtcatcaatctataactttttatgtgtgcattgcacatatatctgtgtgagagcctaataagtgcgctttttctttcgtgcattggtgaattgttggatgttgagtaaaatgtcagtttaaatttgcaatcatttttttaaccttctttctaagaaaacattttagctattgtatctgccactgaaacgtaacatgtggatgtacctgtgagccgaatataaacataggcccgttgataaagagttttaatgctttctcagccttcggactaaagctgtgggatccgatggacgccgattcgcacggtcccgtgatgacacagaaggaatttgacagaggtagaatgtgtttttccaaaaacttagattacatctaaaatatcgaaaccatggaaaatgagattttcatatattttttccctgatctttattcaacctcaaaggcaaaattctactgttagaaacataaatgattgtttttctattgtcattatgtggaca

SEQ ID NO: 37788 - DNA, 580 bp, Arabidopsis thaliana columbia
caaaaagaacaaattacaactccatggtgaagaacatgttgtaaatgacaaaatcagaacaaataagccatcattctaaaaccattggaagtatattgcaaccaaagaatgtgataagtctcaaacaatagctacttgtaacctcgctcacatgattatgaagattcaaaagagagtacaagcaataacactaatgtacaaataactacaaagcaagaagatgaccacacacctacattgaaagcaaaagccgttccaaactaaagtgaactatgcaaccattcactcatagccaaagttagcaaattatataaaaacctaaacttttgcattcccttacttgtatatcagttttcaacacacacttaaactcaatagcccaataaaagggtcacctttgcaatgctcagtgttcagattttgcaacctaacaatccacaaagcctcaggattcagattctcaattacaaaacccatttctcaatttgagtgattatcgcaacaaatcaatctatattccaattgttctcaatctatataggcaacgagagtacgaaccaatcatttcccaatgagtgtg

SEQ ID NO: 37789 - DNA, 528 bp, Arabidopsis thaliana columbia
tgtttaaagatagaccctgagatagcactaaaataatttaacgagtaaaactctataaaaatagaagaaaggccattcaaccaatagttgcatattatatacaaagatgaccaagcccatcaaggaaataactattgtaagaattccaaaggatccccgggtatagacttccaaattattctgaatggtgttggattaggctgaagtatttgatgaagagtgtaaattacatctcatgacaaccatgagtatttattggaatcaatcacactttggtgggtttatagacaatacacttaattaataatgaaaaacagtacttaacaaaataaatacagtgtttgtctgtcgtgtactaaatgtcattttagttttgacgtacataatgctttggtattcaatttaagatttacgtatattatatataaaaaaacgttcattcaaatgtattagaggttttgtttgatatatgtacgtaatgatctgtcataggtcttacaccacactgttttagatttgttttggttt

SEQ ID NO: 37790 - DNA, 326 bp, Arabidopsis thaliana columbia
aaagtttaaaacccataatttgatggggtcaaaaagtagaacatatcaatgaaattttttcacgccagtgatactcgtgaactttgtatactcattccatttctaccacatttgcactcaatacaatcttttagaatcataataacttcttgagaaaagaacttggtccaagctagtgaaatcaaaaaggtacgttaaaaaaacaaatatcttacaaacgggacgcagttttcacagtaagctaaaaacggcacgcaggtttctaaagagtggcgaggatttcaacgttagcttaatttttccgcgctaagagcagctaaaaaacg

SEQ ID NO: 37791 - DNA, 1012 bp, Arabidopsis thaliana columbia
atttgaacacgatttagagcaccaccaacagtgtctttctattctcacaatataagaaaagaaaaataattcaaagttagagataccggagagaagctctaagaccatccttattgatggtttcttaacataactcttatgttaagagatatgtcttatacataactaaaaaaaatgtcttaaagtctcttaaataagagacttttgttagttataagccattataagacctgtctcttaacataagaattgtcttaagagatcatcaataatgatgttctaaaagcccttatttaaggaacagttctacaaacaaatatacctttatcgttttattggtagtctgtattaaaaaaaaatagaatataattataagatttaaatattattatttaatggttttttagagactttcatcgtcccactcgttggaggtggtcttatacatctaccgctagttaaaaaaatgaatctgctggtaaagcctttgatgatttgtttaaccttcaaaaaaaaaaaaaggttaaaggttccttggagaaaaaacaaaccaattctctacgataagttaaggaaacttttgaagacaaaaaatggaaaaaatttgattagaaaaggaagagaaaaaaggacttcctattttaaacagtagcaccaaccaggggttcgattttccaataagcttgatatgtttttccggccgtgtgttcatacggtgggccggtactcgagagctcgggttcctggtttactctcttctcttttcttttaccgaagttgcaataatgtactgaccaattcactgccaacggtaacaacggccggccgagtttccagatacggatatatatgcaggaggagcagcacatcagcagcggagaggggtgtgtttcttccatttgcgttaacttgccgaagaaatatccactcaatacatgaagatgagaagaagctagaacggtggaagaaaatagaagaaagtcatcctcttgatgaattggtgctggattcg

SEQ ID NO: 37792 - DNA, 586 bp, Arabidopsis thaliana columbia
atttttaatttttttaaatggtattattattgttatgtttttagtaaattacgaatacttgaatattgtaaatcaaaattttcattaaattttttattagtttgggagatatatacttataaaacctttggccttatcaacataaacttttgaccaaataaaagtttaaaatattccagttcaattaactttgcccaaaaataagtttaaatgatctaagagttggaaaaaaattggaagtaaaaaacttattaatggtttgctaaaatagtttttaccaaagcgagattaaaaggttaaactcgatctcctacgtttgctaaaactcagcccaataggcccgtacactaattcggtttgggtccaatgataaaatcaatatttcttaaaccataaattgatctaatttggtttaatttagacttaaacaaatctttaacaaatcaaaccgaaactaaacccaaaccgaaactaaacccaaaccgaaactaaacccaaaccaggattaaatgggtcaaagaaaactcagccgaataggccgcacagaacctgaaacgtcatcttcactctcacgagtaaagaaatt

SEQ ID NO: 37793 - DNA, 806 bp, Arabidopsis thaliana columbia
cacaaaagagagagtggaatcagagaccagtttcttgcgctgagctttaggagaagagaacttctgaacggttttgacgaaagcagtgacgaaagtgacgccggcgtaacgtaacggaacggcgagcatccacggcaatttgctacttccaactcgaggaccaggaatcgcctgactcaccgatccagtgaactcgactaggtctaacgccttctcttgaatccacggcatatcttcctctacttcctcttctgtttcctcctccacgctcgaattcttcttcgctgccggtgtcggcgccgtgacagtctccgattttttcttcggcgctgcggcggaaatagagatgtgtttcggtctcaactgacggagagaaggtagtggtgcgaacagtggtgttagagggagaaggaatggttggccattgttttgggttcgagtctggagaaattgagatgaaggaaggagaagagacgtcattgttgaagctcgacgatttgaaaagtcggcttcggatgcggcggggctcaacagtagttagcttgtcggggaactacgacggaaggtgaaggaagaagatataacaatttctatttatttgaaggggtcattaatgggccttttttactcggcccatttattttaactataaacgatcatcaaatggtttttaacaagaagaaaaagtgaattcagcagacagcagacataataacaaatggattaattcccacacaagctagaattttttgttactccatgttaatcggattattacccaaatttagttccaatataaagtgatt

SEQ ID NO: 37794 - DNA, 976 bp, Arabidopsis thaliana columbia
tttcgggtaacgagaaaataaatgagagcagaacgaccatcaaagccacgccggagagtccacacaccaagctgcccacaaccagcacgtgattcatcacgcgatcatcatcctgatcttttgatagcgtcttcattggagacttcaccgcactcggcaatatcgagctagacggtgatgatatcgacgttagatcatttgaagaaggtggtcccaagaaagaacgccatttctgatgactcgcctggttcgtagtagtactcgagaccgtgatcggacggtcgtaattctcttgcattgataatcgttgattctaggacgatgatgaacatgatcagcattgaaatcaacggtggatactcactggttttgtgtgcggccattttcttgttgaagttttctcttaggcttaaagagagttacaacaactttacaagaccttcccgtgaaggaaggctttatacgagaatccaaacaagacgaaacgactccgttttaagctacttcgaatgttgccactacattcgactaaacatgtagtatttctttattccacgttggctaggaacagtgtctctcgactcttgtgctttgtctgaatttggtataaataattctcgtgagtttccttgtcggagattggccctaaattcacggggatctaacacaaattaagaaatataaaacctcccatttttatttttccagtttgaatttaccatatacttctcgggagtatttttgtcagcgatttataatatagctataataagatttgttttaaatagcgtgaaaaaggaaaaataacaagtaaactacagtagcagttatagatttatagttgagtggtatccaaggttctatttcttgaaagcaaagaagaatccttgaaagttgtttttttttcatcaattaaagacataaatttccagagacagaggtgacattgatagatgtatgaaagacgaacaactgc

SEQ ID NO: 37795 - DNA, 382 bp, Arabidopsis thaliana columbia
  unsure (1)..(382): unsure at all n locations
nnnnnnnnnnnnnnnnnnnnnnnnnnctaaaggctgtcaaattgcggttcgtgaactgctaatggatgacgatttcgtcttcttgtactcatgagtatcccagtcgactagacctctggccgtgggacacgcagaccaaaatattgatatgtatccactttgaaggtctccgttgtataacgtccgcttcagatctgctgggctaccatacttgctgtgataagcttcatcactagtcaggataaagagcgcccaagttctcagcggcgcaaagacttgcgccatctcagcagagagcatggtgacccctgcagcagccgacacacgtgcaccatttggcgcactggatatgattaccccattgaatgtatcggaacgtaaa

SEQ ID NO: 37796 - DNA, 635 bp, Arabidopsis thaliana columbia
  unsure (1)..(635): unsure at all n locations
tccaaactagtacaaatatttggtaattcaacgtttttagaatcatatttttttggtcaaaatttctctcttatatatatgaaaatgaaaccaatatatatatatatatatatatagaatcagaataaaaatatctatcagttattatcatcatcatcatcaacaaccagttcttaaaataataattgtaatcacttttcactttttcagatatcctctaatttgtttagagttttaatatttagtcatatcaataaatcgtgtaaaaaaatcnatanagacaacagagaaaagaaagcaaccgtttcgctcccgccttcacagctgtctttcatcattagccagcgaatcctaatcccgctcctctcacatcactgtcacactcttctcataacagtccaacaacataccccatcactactatcacccaacggtcgacacgccacgtgtcctaaactcattcacctatatatagtatcgagtctcttcctttaatcaaaaactcgctgttttgtgttgtattatcatggccactgatagagagaatctgctctccgatgattatgaagaacggctgcgttttgtggatgtgggtactttcgctagtatcagttcacccggtggcggagaggagc

SEQ ID NO: 37797 - DNA, 838 bp, Arabidopsis thaliana columbia
atcccctcttggttggggtctgatacatgcaaaatattgtccgaacagataattttggccccgtaatatagcaaacacaacgaaaaggctcgaaaaaatacattaaaatcaaaatttggagaaggaaaaaaaccaatagaagaattccattttccttcctcattcatcggagagctctctttgggctttccgaaaaggtatcacatgtcaagtttgtcctcacggtcttaaagttatagagtcatacatttttaacaaaacaaaaagagggatgacacacgaggacttttctagaggtcacccatgctagtactactctcgcccaagcacgcttaactgcagagttctgatgggatctggtgcattagtgctggtatgatcgcatccgtaactacatgcaatgcaatcgtatctatactataatgaagactttatgttcgatttgccgtgggtcccaccagctatgtaggaataccctatcttgtttataagagatttgatacatgcaaagtattcgaaaacaatgtccgaacatataattttcgcaccgtaatatagcaaagatcacggaaaggcccgaaaaagtacattaaggtcaaaagttggagtagacaaaaacacaatagaagaattccattttccttcctcattcatcggagagctctctttgggctttccgaaaaggtatcacatgccaagtttggcctcatggtctaaaagtttcagagtcatacattgttaacaaaaaaataaagagagaaaccataaaagagagatgcaacacgaggattttcctagaggtcaccaatcctagtactactctcgcccaagcacgttg

SEQ ID NO: 37798 - DNA, 534 bp, Arabidopsis thaliana columbia
gcacccagggttcaagacgagagtctgtccaacccgctgaaccgctatcgaaacccgagctttcgagtaaggtatcttaaagatttgcttaagaatatcaacaggagcaatcacatcaatctcatctccgtattccactaaaccagatacagcaagtgcttcacatttcttactaaggttggaagtaataacattagcctccttagatatatctgtcaagtgaatttttcaaacaactgagaattgcataatactcagacttgtgaaagctaatcaactaaaatacatacccccggtgatcctagacttgacggcggcgagaggtaaaacgttatcgggaaaatcagttaataaaggaggaagattaagatctgtctccatcggaagcatttggtacctcggagcagtgacgacgctgcaacaaataaaaaaaagcttcaagcaaattgcaagatatgaagaagaggaagaagaagaagaagaagaagaagaagaagtaggagaagtaactaacgtttcctgagaagggaggag

SEQ ID NO: 37799 - DNA, 864 bp, Arabidopsis thaliana columbia
  unsure (1)..(864): unsure at all n locations
tttacactcgaccaacagaaggtacagagtattatagggagtttatcaagtttacagaagatttgctgaagttttcccagtcaacagggaacaatgttcaaagacaagtcaatagagtgtggaccacgcgctttctcccagaagatacgatagcgagagaatctcaaactcaatctccaccactcaatctgaaatcgctctaaccttatccaaacaaggttactcgattcaactctttctcatctctctccgtcaccgcacttcaccacaaatcgccatctcactctcgagtccaacgtgttactcgaccaccggcaaagcaaccacttgaccacggcgaagaaagtcacacaacctcttctcgccgtacttgaccgcttcgccaccgtcaccaagttcacattcatcgctactcgaccacgcgtcttggttcgttccctgctcatcccggttcattgaaggaatactcgaccgtgttaacctactcgacttcatctagtagactcgacctcgactcaaccaacatttcaagattccaggtttcaattccggttcattgagaactcactcaaccgccagtgctagcaaccaccagagccactcggtttctttactcaacctatgatttctgctccactcgattcaatccgtgaaagaggaactcgagaacggttaagtttactcgagtactagattgtactcgaccgacttggtccatttcattgtctgttgatagcgattttggtttcattgttttctttgagactaacctacttacatttgagttttgagtctcaatnttttgtaggagaacatgagtactatagtggagttattaatgatcagcctatacatgatgagcga

SEQ ID NO: 37800 - DNA, 306 bp, Arabidopsis thaliana columbia
caataaacatgggctaaaataaacaaaagccccacaagtataattttacaagaattatttaaaaccaaacatggtccaaaagcacaccgtaatgaagagtattaacattgagtagaacttctaaccgttgattttattttgtggataatttttaaaatcttattttgaaatatataaatttattagccaattattactatataaatatattgatttttaaaagtaaagaactttttttgcaagtattagtaatctatatatatatatatatatatatatatatatatatatctatatatatatata

SEQ ID NO: 37801 - DNA, 346 bp, Arabidopsis thaliana columbia
actcttttgcctgctgctgtcttctcacactttgttgcagaagtttggcaagacaacggtgacacaggtgacatttcttccttctgcttgtaaccgtcaagatgaaaaactggattcagttcatatactatcagtggtgatttcagcgtcttcttgtctttagaaggcttcctgcctactgctttaccgatattttgtattcccactgccgaatctgcactcacacgattgttgcttgttgcagcagcagcatgtggtttctgagaggattgttcattacagctttgggctacttccttgttgagcggtatttccgtcttttttgatccgcttggtagtaacatga

SEQ ID NO: 37802 - DNA, 571 bp, Arabidopsis thaliana columbia
tgtcgccactatactaatttggctttaaatccgataactgtatatagttgaaaaagaaaagaaaccaaactataaatatatgtatttcttagaaaaacaaaaaattgaaagataagtgtatgtttactcgaactttgctgcaaggaaacaaatcttaacataaaacaatattaccttgtataggaaggtaacccttatctataaggagagggaaagctgtataagcacaaaacgttgccgcaccactagtcctcatcaccattgtacacactccaatctctttcgctacaatctccgtgttcctcccccatagagcgtcggagacaaacaacacaccgtccctccttcgcctacttcctctgcaagagacggctcggtgtagtattgtttcagcagactaataaggacgacgaggtccttacccgaagaagtttctgattgagagagagggtcttcttctccttcgtttttgtgagtgatagttcgaaaagtaaactgtggatggcgagaaggatccgggaagttgaaagaagtgtggagtatcgtgacggagaagcacggttgtggaata

SEQ ID NO: 37803 - DNA, 1465 bp, Arabidopsis thaliana columbia
attttattttgttaatacacacaaattactaataacgttacacatgtttttttttggtgataaatactcttagataaggatttttgttcactctctctccctttgttttttacagcttttgattattctataatatattttttttagagtttctgttaatagactaccattaagggtggtctaagtaaatgacatgaaacttatctagataaattgatcaaatagtatcttaatccagtcatttgtaaattgtcaattacacatgtgaacgcgatggagatatttgtacgagcccaaaaaccgaattgagaaacaagtataaattttattaagataacgataacaataataaaactacaacaacaataattaaggacagaaagtaaatcacggaggcaagatatgatttttttttccttaattcaataaatcggccgtaagtgcgttttggacatgacgatttatgaatcccaagatacgaccgatcacgaactaatacccgagcacacaagtattagactcaagcaaacttatctacgatatactctcaaaactactaaactaagaacttacttttaagaagcaagagagaggagagactttagaatttagagtgttttgtgtttgagagcttgaaaaataatgagaggctgggtctctttatatagtagagggagatagaattttgtgagattctcaggatatgcatgatatattttgagactatcatgagaatatgaaatattttaagaatatttcaataagattcaactcaacaagcccaataactcaccagcatgacggtctgcaagcccgacagcccttgagtcgacgacggaacgacccggcaactcgcagcccggctcagcccgatttggttctgttcggtacggaatttggcccaagtgtcccactttacacctttatttctcattcaatacaactccatttttgacgtatgagtataccattttgtagtactctttaccagctttccaatacactaatgacccgacaattctgttcagccgtttggccggaattcggccggaaaatcaccggaaacattttatgtcaaaaaagttccaacaatcccccacatgaatagaaataagtctaaacatatgacgactttactaatcctaaggactgacccaactagctagactagacagaccttcgagagtataaacgaaaactaattgtatatgagttggtggcattttttagctttgaacctactcactattagtacctgtcaagtttactcggccagatggtgaacatgatatcttgaaccatccggagtttgatgcaaagttggacagcaggtataacacaacttcattttcttgtagaacgaggttctctgtttgtgttcattatggccttcaacatgcctggttaatcatgattgaagttggagagtatagcctcacatattctcacattgctatgtctcagg

SEQ ID NO: 37804 - DNA, 613 bp, Arabidopsis thaliana columbia
ctagttgtgacttattactaatctcacgtgtgtgcttctcacgtgagccaatgaaggaagcttgggtcaaaccctctgattgcttcagatacttatcacactttagcatatatcttgagatcggatgacactaaaccttcaattatgaaaaaactctacaagaatagtttaaattctttcatttatttattttctaggatttgattgaagtcatcaatattccttgtaaactaagaaccaataacacccccttaatatttcataatattttgacaaatatagatttataaataacttgattgaaacatatgttatagtacatgacatattttgatttcacacaaaataaacaattaaagtaaatctgaaactacgcccagaatatgttggtaatgtatttggacgtatattaattacttgattctttccaaaatatctccctccttaggaatttggtcctcaatttataattttgtgggtgcagatatgtaattatataagataccattatatattttacgaattttattagatttgtactcgtctagtatgttatataatttttaattttagcaaaaatttatctggcacctaaattttgtatactgttaga

SEQ ID NO: 37805 - DNA, 648 bp, Arabidopsis thaliana columbia
tagagctagaggatccccctcatcataaattaggagtttaattacacctctacacgctaaagcaactcgtggaggctcaggctcacaacaagttctttttttcctattgaatgttgttaccaaaaaagaaattcagaatctaagatggatcctttaaatccaaggagaaagtgtaagtcaagaggagaacgaaaccttcgtcggcagaggaggcgaggaagatcaaaaagcttcttgcattaaataccacaaaaaaactaaaccctattgtacatcccttgaattctaaccaatcaaaatatgcctaaataaatttaaaaactcatttaaatctaaaatttaaattctaaccactttttttttttcataaaaccaacctttatataatctcgtttagtaacaaagtttaaactttaagtattttttctaaactcaaatcgatatttaacataatttaatttttttttgtcaaccgatataaattaaaactcaaaagagccaatcccgagggatattgtttacatacgtgacatgatgcggtacggtacgaatctttcgtgccaacttatccgcttttacatttgcactacgagaaattaaagataaagagaaatttgtgaattcttccctatcactctgcaactcctc

SEQ ID NO: 37806 - DNA, 1296 bp, Arabidopsis thaliana columbia
ctcacagagtaattgtcatgtcttgattagattttgacttttcattgcatgaatcttaagtcactgtccatttatacattgttaaatgaaacagttgatcttatattctctttgattcaattatgcagatgattccttgcactacattaaattatatcacaaacgaacgtattgtgcatccatgaattcaacttaattcaaatgattggtgaccatagatgatagaacaaacaaatatggttagctggatgcttacttattgatgtcatccaagagaatctgtccattcagaagcaaacatggatattgtgctcattctattcactatataagtatatatgtttcttgttatatttaggattagtatacaattttggttataatgatgggagtttccatacacaagtgaataaatggtcaaagaaaaatgaacgatgatgtactttgaattggcgtttgaattggtgattattgttcatgtataaacttgtgtattgaaatgaaacaaccccgtaagtcactagatgaccacatggactagaccgcttggacagtcatcaatggacacttgtgtctctgatttactttaaatgtgttttattgagtcggtaaaattaccattttttgcatgagtttagtggatgcatttacggtttcagatttagtggagaaagatcatgggtgagagggtttgggtttaattttagggtaagtaaataatgatttagtgcaaaccgttaagggtagagggtttacacacttgtatgaaccatttttgaatataatcataagaatatcaccatatgaatgatcctatattttacagctcttagattgaaatgtcttagctgcacaaacagatacatgaaagatgagtaacaccaaatctaaacattgttcaccaaaatcaaatacaagaacacttcattagttggagaacatatattcaaagagtaatggacggattcctatagctgacagtccgcaagtacgtgttcatatatgatattaagaagtagagatgtatccatgtaatatcgaccaaatggatatagtgtaaaacatgactgtgtatccacctagcaccgaacaaatggatatacatttttgtgtgtttctcgtaaatctttctagacatccatgagccaccttaatagatcggtgttgcaatcagatccctacccaagtcccatgcactaaatcgaaaaacaaatccaatcaacaatcaaaaacacatataatcgagatcgattccacaataagaatacaaacatcgtttaattggagttagagatg

SEQ ID NO: 37807 - DNA, 462 bp, Arabidopsis thaliana columbia
actctcatgtgttttatttggattttgtgtttaatattttaaaattatttaatagattaacattcttagtatatatgatttatttatacatactataatatattatagaattatataacacacaattaacaataaactaaaatattttgccttataatactaacagtattacaatataaaactatagttgatatatatattttagtaaagtttatggaatagtttagaacactagatagttttcccctatcttgctcctcatttatcatttaataatttgctctgcacatattgccacgttttcaccattcgatctgcttgatctacatgatctgcacttgtcctacatgatctgcatattctgtatatgtcctacatgatctgcaacgcttgaactacttttaccattccaaactataatttcgtctcaaaacattatagtgtggatttgacttgtatacc

SEQ ID NO: 37808 - DNA, 615 bp, Arabidopsis thaliana columbia
cttgtgaaagtttgagtctttgtcattgttttgtagtgttttgtgagtgagtcactaagtacttcaagattctgcggattaagtttgttgagtgattcaacatccttcatttgtttattgatcgagtgagtcgattaccccactgattgagcgagtcaatcacccttctatccatcaattctccttggatcgatcccacacgagaaaagcgatcgacaacgtgtcagatcaccaccttcatcatcccaccttccgtgtggcaagtttgaaactcttgatcatcaagtgatcaaaggatggattagctccaattcttgcatcatcttggtatcagagcttcaaaagctcatatccccaaggttgtatctcttcaacctatatcttttgatttttttaattttgttatttcatttttagaaatttaaaaaccaaataaaaattttatgttttgcttttggtattgtttatttgcttcagcatctttattataaaaagaaataaaaataatttgctttagtttattatttattttggattaaaaaacaaaaaaaaactcataaaaccattatttgttgctttaattgattttttaacttttacttttataaaccagaa

SEQ ID NO: 37809 - DNA, 370 bp, Arabidopsis thaliana columbia
gaaacaaactcattacaattgtcaattttaatatcttcaagtgtaagacccacaattttaagataaaaatcatgaaacaaattgtccaaatatatataaaaaaaatcaacaaaaagtaattctccataatttcaaatctcaatttaatttcttgtagtactagtacacaatgttaaaattagataaagaaaaaatgagggaagatcatgtaggaattaaattctgactgaatatccaatcgatcttttctcctcagtaggaagcatccatcgttgtgcccatcaatccctttctactcttgaacctttaacctcagtttccttcttcttcttcttcttcttcttcttcttcttcttttcactcttctttg

SEQ ID NO: 37810 - DNA, 616 bp, Arabidopsis thaliana columbia
tttattaaacgaatattgctctaaccataatgtttctggtttatgctctaaccataataatcctagttttaaacgtgaaggtgggaatattcttgctatacaacagtatctcaatattctcggtagaaaaaaattcagatttgtctttcaaggtaaaagagaaagataattgttaatgtatccatatgaatccatccacaatataactgtattaattcgtttgtatgattggataaattattatcattggatgacatttatattaattttttcacgtatttgtaaacataattagttcgaatgatttaccaaatcaacaatagttcaaaatactctaaagtattttttttgttcgcattgttaaccgatatcaactgttagatgcccttaaaaaattggggttatggatggaataaacaaataatatgatacagaccactaaaacattcaacagtaataaaaagataagattatgaatatggttaagaaaagcaaaaatcatatttatagaatccagagttataagtattcaaagaaggaggaagcaatgtatatatacgacatgaatgtagggtgacatccatactagtcagaacatgagatgaatagagtgggt

SEQ ID NO: 37811 - DNA, 312 bp, Arabidopsis thaliana columbia
gatgacgaaacaccgaaaacacacacacaaacccgcagattcgatcaaatgttctcaccataccgacttgcctaatctagagaatggcaaatacatgaaattttgaaccattgggatcattactgctgttaaaacttattcaagattgatataaacgtacacatgaaaacagctttgtgacatacagaaaaataggattgaagaagaagaaaactaacctcttctggatataagatggattcgagaacgaggaccttcgaacatccaactatcttcttccaaagacttaacctctttgtcaagttcagtcat

SEQ ID NO: 37812 - DNA, 503 bp, Arabidopsis thaliana columbia
  unsure (1)..(503): unsure at all n locations
gttgaccatgtagaggttgatgatgatcctgtagatttgctttttctacatcctccacttggtgacatatccgccgtagatctcgctggtgtccatggacaatagatctcgctcgggatcgaatcaaactcgtcgtcttcttcttcttcgtcggaagagatgagtatgtttgttgcggtggttgttgatcgttacgttcacggaggaatagatccttcaacggaattactttctccggagaaacatctccggagattagattcttgttaaatacagggaaaactagtccaccgtcaccggaagaagaagtcgccgccgtcgaaaactcgaattcggcgtctgatttctctttgtaacagactcgttcggcgatttcgacgagtctatcgccggaataagtactgaagctaggtgaaaacgacgccgttgcatcgtctttctcgattggatcagattttttacagttgagacatgannaaagcgtgtgaggaagaagagagaga

SEQ ID NO: 37813 - DNA, 567 bp, Arabidopsis thaliana columbia
gaggattctagaggatcattcctataagatttcaaaattttaaaccatgaatgtataaaccataaagatcataaatctatatgatcgatcgaatcttaaagctagcataaacgagatgcatgcattaaaaaaaatagaaacagtaaaaccttttctggcgagctcagaggatgtgaaggcattagaagtacatagaagtgagaggatctgtcccaagccaagtccaattaaagtcttctttgttttgttcatctcattgaaatcgaaacccattgccattattgcagaagaagctgagatcttcggtgaatctataaattacagacattcaaatacaataagagattcgcagacggcagatcagagaggatttgttgttgctgtcactacctaccgttgacattttttaagcttttctttttctccttctcttttccctccattcaactaagcttagttttaattaaggtaaagtttgtactttttgtatttgatttcaaacatttgtctaatatgaaaatgtaccaaatataattagtttgaattataacagtgttatatagactg

SEQ ID NO: 37814 - DNA, 536 bp, Arabidopsis thaliana columbia
  unsure (1)..(536): unsure at all n locations
tcccccagccatctatatgtacatggaagactcggtaattaggtcgtccatttttcaactgttcccaatgattgttgatgtgtataatgacccctatacccctataaatcatttcgaaaatgaacattaccgctagactagtattgtgtcagacggcaacgtaatctttcgagagattttgtttgttgaacactgttcatttaataaaggcttgcgaggaactttatctgctaaaaatgaagagtcgcgtctcaatggatcttatatttactagtgtttttattctcccaaaaatctgagagtcaccacaactcttgagagcgttcgtttaaagtctcattgagttgcatcttttttggtccgatatccaaacatcatcctcggcggaccgnntgataattagtcttctccggagtaaactcttcggcgctgcgtttctatttctaaggtaatgtttgaattctaattcggctccggttagggttctttcacatggcggttctagtttaatcaattctttttttgttctagatgga

SEQ ID NO: 37815 - DNA, 460 bp, Arabidopsis thaliana columbia
ttcgttaaagcattttaaaagcttttactcttaagaaaatgtgcgtctttctcttagtttatactgattctgtataagcgatcgcatgctatcattccccaccacaaatcattaaaaaagaatcagtattcaagtcttattatatacttcgagattaacttctaaatcacattcataatcccaatatatgcgaatgaaatgccgtgcatttatattagtactgtattaatcctttatgatagttgtatctttcaagaattatgataacgagaccggatcttaaaatccattgaatgcttatgtttttatgtattttatgaatctgattaatgtgaaactgacattggaaactgttatatgggtccataattaaatgattacatagacaattcacattaaacattcatatacataggtatcgtgtatatatcatatctacgtatcaacacattatatatat

SEQ ID NO: 37816 - DNA, 527 bp, Arabidopsis thaliana columbia
acaaaacaaaaacttgatcatcaacaaccaaagagaaatggcctaattctaatcattgtggtttttttttaataaaaagggaatgacagtttaaaaaagatgagctaatatgagtcttaatgagataataaagaagcattagtcttattaaacaaaaggttaatggtagacaaaaacagctggcattttcttttcttttttctataagataaaaaaatcaaaaggcaataagacaaagaataaggaatacaaaataataataagaagaagatatctttgaatagagagaagaagaagatcccaagaataatcccatctggaaatgaatcataataataaaagaagtttcacaaatccacaagcaaagaatttctccaagaacatttgattcaaacaaaagatgagtcttttttttacaaaagcagatgaatctaacaatgcccacatgtctgttcttcccacatcaacagaaagattagatttaagcaagtttaagataaacccagaaacaagaatcaaagctttat

SEQ ID NO: 37817 - DNA, 572 bp, Arabidopsis thaliana columbia
cagactcatcccccaagaagaagtcgtgcaccatctctttatttaaccttcagagaaataaacatctcctatttcccatataaacaaattttataaaaacttttctgaaaaaagataaaatgacaaaggaaaaaaaatatgacactaaaggtcccagagacaatgtacaaaaaatttaaataacagactgcgaaaatcaaatatttcgctataactcaagtaagaaaatctagtggatgtatatgtatatatatgtacaaaagatctaaacaaggaaattttagaaaattacataagaattgtgttttgaattactacattagaacaagtatcaagagataacgtacgaatgaaacagaggttttggaattcacgtgagtttctcgtgaccggcgtacaagacacatacgcacgttaagaaacgatctttacacaatacacacaatttagcacaaaacacaaaatacaagatcatttagaaaaggatttaaccaaacgacaacgtatttatacaagaaccgttgatggattttcttctttgctttcttctctctgataggatcaagcttggt

SEQ ID NO: 37818 - DNA, 540 bp, Arabidopsis thaliana columbia
gtgttgcaattgcaaaaagaaatgctactcttgcagattcataccaaaaccaaatcactagattaaactgaaattctaatgtggattattttaattttacttctatttttcttcacccaaatattttataaccaaacaccaagttgacaccaaaatatacatccaaaaaacttagattgcttctattttacgactatccgaaatcgaatcataaaccgtaggcaatggtccattaataaggggtatacgaggattcaaagtttgagagaacttttttatctttacctttttccttttgtaaagtaaaagcagtggattttgattatagattctacttggtaatgactaatgagaatcaagttctcacctttaagccatatagactttagatatttaatggattctacaaaagtgggcatgaccagaatcgagttcatgaaccaccgtcctcggccccaacgttaaaaaacttttttctctagcataagaagataagagtatctcactgcgctttaggccactcaacattcaacaaaattc

SEQ ID NO: 37819 - DNA, 524 bp, Arabidopsis thaliana columbia
cacttgtgagataagttaatatatgtacgaatattagagtttaaacttaatgtttctgcaaatggacaaaaaatttctactagttattctcttcatttacttctacttttgttaagaaatttttgtctataacttatgcaggtttttatcatcatccacgttgtagctctcgtatactacatcaaaggcattctttctcccaaaatgttcaaagttgctgtgacacttgttgtgtctatcggcatgtacgctttcttatactgtttctctctacatgtctacaattaccacaccttgataagaggagtttatctgcttcttatccaacttcacaaagctagtacagatgggataacctctagattttctggattatgcatcattgggtaaaacgtttatctatgctcgtgtattctttacagggttgtgtgttcatagttgtggcaattcttgtggcattggtggctcaagtccaacaggaggatggagtggtaggagtttaagtttacttgatccgtgagtgg

SEQ ID NO: 37820 - DNA, 579 bp, Arabidopsis thaliana columbia
cagtcaaagaagaatgaatttcgaggaaaagaggaaaaaaagaaagaaaaaaatctctcagcttttctaacttttcttctttttttttctccgtccttaaattattgaaatttcaaaacatgctagtgaaaaaattacttagatattatccattagaattatataaaaaattattttaactttttcttatttatttctaaaattgtcgcttgtatttgtgagagataaataggatagtgtttcactttcagcggtgtctctctcgggttctgtcgttaaaattttgtcgttgtcagagagactttatagaagagtgggacccagtgaagtcaatgtctgaatgtattaatgtaagagagagagagaagtgaaagaccacatggctgcttctggtttgaccaggcgggataggtcgtgggacctgcactagtctctttattggtccatgattagattccaaaatcgtttctttcataacgattcatttttatttaagttagacgtgtatcctctgtgtacatcgtcattatgacgttacattttgcgtcagaaatacatatatggtccaaatgtttttgt

SEQ ID NO: 37821 - DNA, 609 bp, Arabidopsis thaliana columbia
caaacaaacacaatctcactattgaggtaacaggtgttgccgagattccgtaaccctaagggaggaccattcctacgcttttgactcagtagactcggcatccagctcatctgcagtttaaatcccattcaaaatcggttattctccgccggagaaaaccaaccaagcaaccgctcatcgctgactcgccgccgcggccaagccaacagctgcgatcgcatcttttgtcaccacgcgttttcctcgcttttctctttctcttctaattcacgttttgggggcttcctccaatcaatttgtagtcgaaattaaaggaagattttcacgaatttgaaagagttggggaaggaagaagatgaagatcgaattcgatgaaggtaactgccgagggaagagacccgcccagcaacaaaccccacaatcccttcgcgatgtttatttacctcgtcccattttttattttaaaaaaatataatttccaggtaggtaaacaaaaaaggaaatactgttactgggctttttaggccatcttttaaccaataggaaaagtcgatacacgatttactacgtgtagcatatttttttaataataaatttaactgatgatat

SEQ ID NO: 37822 - DNA, 508 bp, Arabidopsis thaliana columbia
agtgtgctctaaagttagcctacatcatttgtctaaactaatcgtaaccctattaccagacccagaatcaacagccacaaaccctgtgcttgaaagtcgccgagatgacgaacgacagcgggcgcatccagggccaaagctgtcagaaaataaaactgctacaaagcctcgtcggtccatacgttccagcggcataagcaataactggttcgcgcgtgtgtttcaattcaagcctgcaacccgggttgttgccctcaacgcttctaaaataaaaggccgcaaggaaatctacaagatgctccgtgactggaagcagtatggtatggaggatatctaccttgataagcccaacagcatcatatacggccgggttggagagtcaaactgtacgtctaattttcttcccctttattctcctccgtcattggagcgaatcaactttactccccaggcataacaccagaccaagcccataatctgtccaactaacaatcacctcgtcttgtag

SEQ ID NO: 37823 - DNA, 453 bp, Arabidopsis thaliana columbia
ttttaataaaatattaacacaaatttttaatgttaacagattttttcatttaactaaataaagcaaagaaaacaaaatttgtttttgaaaagagaaataccatatattagttttattatattattatatacatgattttatttataaatagttgcaccaacctaaaaaacaaaaaaaatatataggtgtaccaacatacagataaactatttaaacaatatatatatatatatatataagccccttatattcctaaaatactcagtaagtataatacttttgttgtaaaaaaaaaaagagagtataaagcgttttctttggaccacacttgtttgcatatggatagaaaattaaaaagtgcatcacacttgtttgcatatggatagaaatttaaaaagtggatttcatttttgtgaggtatagaaaactgtgcgcgtaaatgggaaactgtga

SEQ ID NO: 37824 - DNA, 554 bp, Arabidopsis thaliana columbia
cctattttatcttaataaaacatttgtaccacctgtactattatgtctcagttttaccatttgtcccagttcgtctatcctgggtttctcaaatcgtgaaattcgattgaacactgaaatctccgattcaaaacgatacaacagcccataatgaacaatacaacaattttatgttattaacaaataactcaaacaagaaattcacattaatctacaaatcaaaaggagatcggatttacttttgccggtgaggaggaagctaactttgagagcagattatcggattggaagctacggcgagcctagaagctaactcgccggtgaaatcggagctcaagtcgccggcgaaatcagagctcaagtcgccgacgaaatcggagaaaataaggaaccggagaactcagaagaaggagacgcgagcagtggataggaattaaccgtttttttttttttacaaatcgtttattctcaattactcatctaagggtaattgcacacccttgagtggcactctgaataactaggggtacccagaacgttttttcacttttggt

SEQ ID NO: 37825 - DNA, 821 bp, Arabidopsis thaliana columbia
taaacaaagaaagttcttcttgtctggaaatctaaatgataatgcaaaggaaatgacaattatgccctcgtacctaaccactactaccccagagaaggctcagtgtgttatgaagacaacattctcgagacaacttaaagatagtttttgtctgaaaagactagatagatagatgatatatgacaatggagcaacctaaaaaatgttctcaaaagatgcaagaacatccacacaaaaaaagaagaaggataaaacactcagctcaggggctcgaatccgttttatcctatgttacaacagagattcacacagttcgcaatctgtctagaggagctatgtagatgggtcatagtattagggagattaaagctaaataaaaggcgaagggcaataagaagtaacctggagagatgtttttagagcctttattgtccattagcattgttcttcttgagttcctcgttctcctgacgcagcgcatcgatccttgactggagaatactgatcatagcttctgcactcatcatttcaagcttgaaagtttctctttcaacagacatctggtgaatctccttctggagatcattaaccttctcttcaggagatgcaagtggagtttgaggaggcaaaggttccttgtgaggacgtagcggttgctgcggcttttctttcttgtcggagatcccatgagtgagaactcaagcaatgcagagatggcagtgttggtggcagcggcagatgatgagattaaagtggttgtattgtcgacagttgttgttgtggacgacaatggtcatgtgtgttctgcttgagttgttgtt

SEQ ID NO: 37826 - DNA, 706 bp, Arabidopsis thaliana columbia
gtgttgtgattgcgcttgaaagacgaatactcaagagatttggggaaagattgagtgggctgatgatgttcttagtacagtccttcttttttatgattttgtttgtgcgctcaggcccgattattgggctgtgcaattggaactttgaatagggtccaatataattttgacatttttcttcagtatttaggctaatttgtattgaaacaaattagaaaaaacccaaaaaatttaaattctgtttatatatattttttttcaaactattgagaaatatgtccaataattaactgaatcgggcctctatgctcttactattactactactttgatgaattgacttgtgagaaggcttaatgtggtgaatctctagtgattgtgggttatttggttttgttgtatgattcagtgtgttttgacattaatacaataggcatcatttcacttataacactctgatggttagcttattttgtgctctgctaagaggcctatgaaagtctgttctgcctacgattgaagagtgtgtttagtgtccaagtgatttgcttgttatgccttagttgcagaaaataggttcgtgaatgtgtcttacaaagttacaatctcatgagctacagatgcaaatggtttcgcttttcattggtgtttaagaaaaaaaaccgggacggagtgaatcatgttgaacctgcaagtccggccgtat

SEQ ID NO: 37827 - DNA, 734 bp, Arabidopsis thaliana columbia
attcagaaaactttttactgattcatattcattctatataccatgtccataataacaggagattcgattaaccgtggtttgtaaagaaaccaaagtttcatgtccataaggtcttggaagtggaggtctcttcaaactgaaagaaaaatcaacaaacaattttttggtgtccataataacgagtccatttaaatatatccattcagaaacctttctattgatctatatccattctatataccatgtcaataataacaggagattcgattaactgtgttttgtaaagaaaccaaagttccatgtccataaggttttgaaggtagaggtctctgcaaaccgaaagaaaaatcaacaaacaatgttttgatgtccataataacgagtccatttaaatatatccattcagaaacatttttactgctctatatccattctgtataccatgtccataataacaggaaattcgattaaccggaatctcgatgctacatagatgaaacgagtttgacacatgagagagagcaaaaatcaaatcaagccgccattgttgaagaagaagaagtttcttagataactgaatctcaaatttatgtcaaaacaaatatttaaattgcaaaataaatcacaatcttaaagaaaccaaggcctcgtattctccaattagtccagagagaagagaaagccatcgcgtagagtggatttggagattaattgcagatttggaattgaagata

SEQ ID NO: 37828 - DNA, 448 bp, Arabidopsis thaliana columbia
cacaagaaacatctcggtttcaggaaacatggtggtgcatgaggagagcttgaaaaaataattttgccacttatgttaccaaagtaaacttatctttttggttaaacgtattgagaaaaactctaccgttaaatgtgtttaagcaaaatgtttttaagatggtgacatatcgagaagtgattgtcgattttgtgcgagagaacacaaaacaaaaagaaatctcatatggtgatttagagtcgttaaacaaatctttaactcctccaaaaataacggtcacgccatcggataagagtcgacccatggccgagagacaatgtgggcacaaagttggcattcttagcgttaaaataaattagtgaaaaatccattcaataaattctttgagttatttatatgcacacacatatgtatatatatatatatatatatatatatgtgtatgtat

SEQ ID NO: 37829 - DNA, 500 bp, Arabidopsis thaliana columbia
attgattcgtattcataagagattggtcacagagtttacacacctcaggctcattgacgtcttcaaagtcaggaggaaccctaatagcgaacccactaccaaagtactggaaccaagacttagtgttcgcaatgccgagtcgtaacggtttggtagacttcaaaggatcagctaatgactctggaatttggttttgaaagatgaaggagacgaaacagagtgatgctgttctaagcaccacatctctccgaaaggtagcagaagaagagagaattttgggtttataagggttttgaggtttagggtttggtggatgaagagagagggagtgaagtagaatggccatgagaagaggaagaagaagaagaagaagaagatagaagaaggcttcattgcttcgaatggataagaagtggggagattcctgaagtgtttagaagcaaatgatggtgcaaggcgaagggtacaatagaaatttcgttttttttgaagggttattt

SEQ ID NO: 37830 - DNA, 604 bp, Arabidopsis thaliana columbia
  unsure (1)..(604): unsure at all n locations
gtcagtgtgagctccactgtaagtgaaaaagatgagacgagttacttcactgctaaagtgaaataaaagttcgtcgtagtaaaatgtgaatgagaaaaaaacttaccatccgataacattttcttggtttacacctggataaccaagaatacgcattatccaaaacggatctgtaagcatctttccctcaaactcataaggtgatccaccaagggctaatgagattccccttaagatatttctagaaagatctgtaaaattaagatcatgcatgaaataagattaagaacttaatatttaccctcttggttcaacaaaacatataaaagaaatgtaaaaagggtaaatcacctatgcagagcttaatatactcctccatcaactctttgtattcttgaggattctctggccttcaatggaaattcaccacaaaaaacaaaacaaaaccaaaaatttaagagagaaatagtatgaaggtgaaatctcatttgtccctttctttttgatatttttactcaaactcttaccactggtttgcccttccataacctttccaatgtccccatgcttcccttgcttaaactctttgtnacactataagaga

SEQ ID NO: 37831 - DNA, 598 bp, Arabidopsis thaliana columbia
  unsure (1)..(598): unsure at all n locations
ctaacaaaactcattgaccttaaatattatgtatgaaatagggttttttattccaaatattttaggttcaagtaaaagtatttaattttgacaagtaacaaggtgggtcaagtaacttgcaagtaattaaaatttagacaaatacttggtagaccaagtactcgttttaacaaggcaaataacaagccaaaaatccaattactttgacaaggcaagtcaagtcacaagtacctccaaatcggcaagtacttgccttgtgcccagccctaaacaatcttagttaaacgggagagattacgcgggtctatgtatatcttctcgtgttctctcaacaaatgcaagtatttttcacataaaggtacatattaatagaacagaaaacaaaaatcaaatacatatcctaatttctttttatatacagacattaattgtatatatgctaacaatctaaaaacaaaataaatttgtttctattccctttataatagacaacaatacccttcttagaacgaaccagttatgtggaaaatgtgaacatgttgaccaaattcgcatggagtccanaggagataatgaagagaatctttatttcgtgaag

SEQ ID NO: 37832 - DNA, 514 bp, Arabidopsis thaliana columbia
aaattactaaactaagaaaggttaagtagcaaacagataagttgcaatacacgaaaatttctaaccgttatcaagtaaagactattaaaaaaatagcaaaataagaaaagtaaaatgaaagtagtgtttgatacattaacaagatttttttatattttttcttttaaataaagatatttaattaagagtgagattgacggatgattcaatgcaatgtgaaattttaattttttatcactaagttttgtataaaaaaaaaaaaatatttagttggccaactttcatatatatatgattttattgatgatatctctgctttttttttttttttaactgcaactgaattttatttatgagtgtaaatttttacaaagcaagtttgcaagccatggtggctggtttcttgtatcagcttgaaatattgagttcgtgaactctgaggaagctagataatgagctactttattataatggcgtttgatgaatctaaagacaacagatgagaactttgatg

SEQ ID NO: 37833 - DNA, 941 bp, Arabidopsis thaliana columbia
ttgttatttttggtcaaaaagatttttaaattattttctcattaaaacactaataaaaaggctaaactaaaaataaaaatcctacacatatggtgaaattaaaattttatttttgatatattgtcctagcacaaatgttaatatattttctaaaaaatataatctaacttttggataattaactttttaattcatccaaaaattgttttggattgggatatcttgattttaatgatcacatattcaatatagatctacaaatatatcaaaaaaaaaatttccatgttttgttaatttattaatagaattcatataaactagatgataacgtaatcaacacgttttattgatatagttaagtatctctttttgatggtttcatgccaaatttctagttcatctaactgttgatcttgcatttaattcacaagttatttatcattgttagtctaaaagaagtctaactaacctcgatgtaatgtcaaaatcaaatatgagaaccaaaatcttttttttgttgttgctgtgtgtttcaaatttgctctgaaatttcaaatttgcgaaatatttgaaaactatgatgtattcaattgttattttcatggattattatgaaattcttttacctcaaaagtggacttgtttctttttcgcttgttgttgagattgctcccattctttatgttgctaatgagcttgaatctagtaacgctaggttgacttattggtataagtttttctataaactcttttctaacattttttattattttgatatttaatttgttgtttatctgtcaatataaaaaatacttacatcgacaataacaaaaaagtttacttaggcaatactcattagtacaatttgtacacattcaatcacgtcatctttcataatattgatattatccaatgatacaaaaacatatgagaacattagt

SEQ ID NO: 37834 - DNA, 531 bp, Arabidopsis thaliana columbia
actcgatccccgagctcgaattcctactaattatctaagacctaaatctttatcacttctattcttcataagatcctcttctcttgaaatgaaagtcttctctttccgaggtttaagaagtcggctgggcaatctcagctgtcgaattaggtcttatggcgaactcataacttaggcccattaacaggctaaccggggtatcccggttaaatctaattctcgattttatttacattttccctcggtttaaaccggtattgtcagaggtgccaatttctgcaccaacaaaaccttacaactaaaaactataccgtaaatatacatagtgaacccaaatatataaaaaattctataacttcaaaaatcaattatagttttttttgcatatttttttcctataataacatttacagtagtgacaggttttttcttcttgtaataacagacttattatagcaattaccatatttacctctaaaacattaaatatcgatatctagagtcaattggtcttttaacaccaaatttgtg

SEQ ID NO: 37835 - DNA, 739 bp, Arabidopsis thaliana columbia
cattcggttagtcaccacaaccaaggtgacattgttcttaacctatctttctcacaaattcatccatatgcttatttccccaccgagggtggtgtgatttgagattgggggtggggtgggggatggtggaaaaaaatgaatctgttactactaatgatactctctatttcgttgacttgaaacctttttccactttttacaccaatacgttctaacaaagcaaaaagtttttattttgtttcttttcaaagtatcactgggcaaggacgatgtagggaacgatgaacctactatatgttgaataagaccattaaaatgtgctaactcatttcctaagtgacaagttttgcaggattcacaaggacggacaatacctagaaaccaactaccggatctttcccgtgaagtctcactacggagactctgtttgacctgacaactctattttatttggacgatttaacctgaccttaattctttctcatgaaggggtgttagatcggggaaaccagcatatacattcaggacttcttatccctttttaccactctctcctgatcctgaatggccactcacttttagtggttcctacccttaaaccctatccctctttttttaagcctcatgcattctcttttcatttttcatttagcagatatgtgcaaaaacgtcggagagaaaggacaacacaattttccgcacaaagaccgaagaaggaagtcaagagagattcaaaaaa

SEQ ID NO: 37836 - DNA, 371 bp, Arabidopsis thaliana columbia
ccttttcccaaattttaacaagaaaaacaaaccacgtaatctacctatttataccttcatcggaaaaatgcgaataatacagcccaacacgaatactatttctagacactaaaacaatcctatctttggaaattacatgtcacagaaacatttgcttccagaagatttttccagttctacaagccatcaccgttttatagtcaagttccttttcggtttgttttttaattggtttacaaattaaatgttaacagtaataaaacgcactagtggaatatgaacaacacatttgtaaaatctctttagaagctttgctgtataaactttcacctttgtcctcaagtaattacaagttcaacatttcgttaaaa

SEQ ID NO: 37837 - DNA, 806 bp, Arabidopsis thaliana columbia
tatcttgtagtattcagtttacattaaagagcttcttaaccctgaggagaggatcctcatccctttgttgctttctcgatcattatcatcgagataagtaagatccaagctcgagtttgttgtttcctggagatctcaaacccctgcttgttactttgcttccgcctctctatcagttggtatcagattctagtttttcttggcttgaaatttgaatcaacaatgcctccaaagaacgaaaacgttggcgacaagtttccggacccaaccatcaattggatcgagtttcgcgatactcttctcgcctctcagactgcgttgcaggcttcaattcgtgagcttagtcaagcgttaatcagacatcttgatgcagctaacccgcctccagcagcagtcgccgtggctccacgacaacaagacgctgttcagatcgtcgcagagcacaaccaacctcgtgaccagctgcctaatcaattagtgttagccaatccaaaccaacacgattttctgccggctagacaccaggaacagatgtttcaagacacacgttgggaaacaaggttcaaagtcgacattccagaatttcaaggctgtatccggggagatgcactacttgattggcttgtggctgtagaggaaacattggatttcaagtgtgtacctgctgagagacgagtatcgttggtggctacacgattccgtggacatgcagcttcttggtggcagcaattcaagacgtttagggcacgtacgagtaaagcacctattcgctcttgggaaaaattgaagaagaactcagagacact

SEQ ID NO: 37838 - DNA, 491 bp, Arabidopsis thaliana columbia
caatatatcattcacaaatgtatattcaccttatcaataaaaatgctttttacttttttatatattttacttcattttcttttgccgtgaataaaatattagatagcttgaaacaaataaaacaaagattcctgatcatgaagcagttatatgataaggtcagaagtctagttgagtaaaaaggaagtcgaaaggagatgaaggagaattcttaatcgatagtggttctaaaagtagaagaacaatttaaatacaaactcaattcataagcacgccaaattagattagtttgagcatttatccaataaactcaatagaagctcaataagaagaaatcgatcattcaataccttcctgttgagattgactatgtcctcatcgtcgaaggtattgaaactatgtcctcatcgtcgaaggtattgaaactcctcgatcaatatcttgtttctttgtccccatcatttgttatagattcaaagttgcaggtacga

SEQ ID NO: 37839 - DNA, 615 bp, Arabidopsis thaliana columbia
  unsure (1)..(615): unsure at all n locations
attttttatcaaggggttttagtttgtttgttttttcctagagaccccactatatattgagacgggacggaccggtctcatcccccgaatagcttggcacggccatgccttcacgaggtcatcggaaaatcaaattattgtatagctcgaaatattctttggtttgtctaaagtttgagaaatcttcatcttatagatggaagtggtagtagcctcggattgtaagggtgccaagcaaatccaatttacttgccaaaaacgtcattttcactcttacctagctatatatgggtggtccagcttggctgcacaatagattccatgctgagacgacggttggtttttagttgtcatgtttggctctgttttcaattgccttgtccgactctgtttttaaatttcggtactctgttcttagtctctttggctttatccgctttttacacaaatgacaaaataaagtttctaacaagaacaaatccaagagagtagttgccaatggcaatgtatcggatctttgtttgtacaaaacaaagaaatgttaaaagttaaattcattcaaaatccanacaagaaaataaagaaaaagaaagggagatactatgtaccataatg

SEQ ID NO: 37840 - DNA, 590 bp, Arabidopsis thaliana columbia
  unsure (1)..(590): unsure at all n locations
catatggtcaggctggtgatttggctacaatgaaagaattatacatacaaatggaagagagaaaatgtaagcctgataaaatcacttttgctactatgatcaaaacctatactgctcatgggatattcgatgcagtccaggaactcgagaaacaaatgatttcctctggtgagaatttagatatcctctaagaaatataataactgagataagagatatatcttgagtattgcagctctatttggtggttgaatttgtttctgaactattcttcctttactgggttttaagatataggcaagaagaggcttacggagtgatgctttagtttgtgaatgagcaaatctaatgcagaaggaatttagaagttgtgaattgttccaactaagagaatcacttgaggtaacctttttgttataaactgttatttttactctaaacttcaagataaaatggagacacatgcttgtaagtttaagtgtttgttcaggtgtttggagcgttggttagcaagatcccaagagaggcatggccattactaatgagaatttgggtcggttctgaaataaccanatcagcattggggagaa

SEQ ID NO: 37841 - DNA, 843 bp, Arabidopsis thaliana columbia
cccgttagtagtgaagaaaattcaagaaagggatattaaacatatgtaatgttaaagaagaaatgcttgtccatagttctcttttcctctcttatctctctaacatcctttagagagaaaaatcttttcagcgtcgttttttgatttccgatttcagtcggatctgtttatactcttgcttatatgcaagcttaataatttccggtcttggatcggacttttgtttccggttatgtccggtctcctttctcgcttatagcgagtttagatcttcttatcctctttggctttaatcatcgaagtcttcgattgtcttccaacttctctccgatatctccaattgctcgaggaataatatcttcgtcactctccttttgctcaaaatcgatgagcaacgaaggatcttagtctacatcaaattgggtgtagctggtggtggagcctccccggagttggtgcttcccggagaaattttgaagcgatttcatctaaacccggtagatttcgatgctatcttatacaggattgaagatcggcagaaggaatgaagaccccagcgttctagggctgacacgcgacggctaatcagcgcttgggagatgagcggcgaattatagacggtggtgcttcatgaaaagacgcgtggtttccaagggaaatacgtcttctcaacgtgtcatatgctaactcataattatcatgatatgttaatgttaattatgtttttagtttgggccgtttaattcgcttgtactcttcttggaccttctgtatgttgcctttgggcatataaatgaatttggtcgacaaaaaaaaaaaaagaaagcacactggcggctgtta

SEQ ID NO: 37842 - DNA, 476 bp, Arabidopsis thaliana columbia
ggaacgtcccttaaatgaggactttcagagactctctttcatccctcttttactttttaaatatttttgttatttttaagtgaatgagcctgtataaagagacccacgttggacgtgctcttaggccgtaactaggcatatgataagggtttaacgcctatgtcgattaatcggagcataaggtgttagtgcattacttacttgttttctaatattttcataattttataataaatattgtttataaaatatggaatgttgaaaacggtacacattcaaacttgtttatatatatatatatatatacacgtttagtttatatgacaacttaataacttactccaaataactaagacaattgaatgtgaagaaatattttacattggaaaaatgagaaaggacttgaatataatgggaatggagcatttgactaatgaccaattaattttgagtaagatgaaaaaggacttgaatat

SEQ ID NO: 37843 - DNA, 556 bp, Arabidopsis thaliana columbia
ggtatactttgattcaaatttagtgaaaaatggttcttcgtgtatcatcattatgtgttctgtgtttgtatatataaataactgccaatctttacttttggttttgttattcagggaacaatcgtcgcttttatcaagatcaatcgttggtaacatattagaggatcatttaaaaagaagcaagtagagaagcctaaagtttgtgctagctccactatatgtttttttgtcagttttgtaagaggttgtgaaaagggaagagacaaccaaaagccaaactcaatgtcaatcgttggtgctttttttagaggtcatttaaaaaatgcaagtagagaataaacaaatgcttatgcttagtacaagtattctccattttggatcatagaggcattatgattttctctctacgtggagatgattaccgaaatttcttcaatcatttttctccatttccgctgaatactgaatctgagcatgtgtacccaacgattttaaggttgatattcatgaaatcaaaggtttgaggaactatggaattatgagtcctgctccatgg

SEQ ID NO: 37844 - DNA, 507 bp, Arabidopsis thaliana columbia
gtgtttacttttgctggggtttttttttcttgcttttgtgggtagtgtcaaattagtttcttacttgtattcgttgatgaattattggtctcttcatgaataaaagaagttgtatgtgattttggtactatataaaagtatattcgtcgtaataagtgtagattaataaatctaaagaaaaggaagaggactcgtagtttgggtaaatttcattgggagagggaagagacgacgacaggttttcacggggacagctgaaaagtcttagctgcgtcatcaattacaccagtcaccaacaccgttttttctactttactagtatgaaaataaaatgttagtttttttatttttcttttcaacaccaataaaatgttgtgtactttcaacagacaacaagcaataagtttaagattttaaagtggtatcaatttatgtttagtgtgatatcatagtaattagtttgataatacagaaattttaaacgctttacaatattctttttttttg

SEQ ID NO: 37845 - DNA, 579 bp, Arabidopsis thaliana columbia
gtagtagatatgtacaaatgtacaatagattgacttgactaatagatttttttttttccaagacttgactaatagattgttgagtaactccttaactatattaacaaattataaccatagtattaaatcattatgtttgaaaatactaatatatataagtttgttgctgcaacaaaagtctctaactttaggagattgctttgtatgaagaaagctttagctttaatatttgttttatgtatcgataataatgttaaggggaatatctgtttatgatagttcgtaattagtcatgaaataatcgtagtagaatttactactcaatagtttacaatttcgatggagacatgtcaaataaaaattgataaagtgggtcgttggctgccgccgtcgctcgcacctccagttacatctaatttttcttttctcttctgaatgactcatgtgatataacaatcaaaatgttcgcaataaagacaagagggcaatcaactacatgaaaacattacatctatgtaatgcatttatcattttcaaacacattcgtagctaaaaacggtagttttgtgattcatataa

SEQ ID NO: 37846 - DNA, 538 bp, Arabidopsis thaliana columbia
atgtctagaacctcttgagtaattcaaaaaataatataaacttacccctcccaaacaagaatctaagtaaggacctcagtaatagttggaaagagtaggtaattaacgctctcatatagtacaaatatgctttgattaggaatttcattataaaaaaaagaatggaatgcctaggtggtgtgaggcgaactggcaaagaacgagccttgttggtttgctgatacgcttatatcttcttctagatgggccaaatcctaaatattgggaaatgtgccaaacattgtgtatttttcattggaaaaaagctgaaaaaacagtcatccaatttttacttgacggtttaatatttttttattaaatttgaaaaaaatacttcaattaattttggttgtctattaaaatcttcatttttttataaagttggtaaaattgtatttttaagttgacaaccgttaactttgctaacgtaatgctacctgcagttaaaactttagttaataacttttaaatttccatcaactaaaaaacaaaaatcaca

SEQ ID NO: 37847 - DNA, 405 bp, Arabidopsis thaliana columbia
gagattttagaataatgcaggccgagacgttcgtcccagtatcatgtgttgtgggagagcatgtccatcggatgtcgtacatgcataaccatccatcgtggatccaaggttcaggagaaaactacattgtagaatcgttgtttgtggaagctattcatcgtcactgcatatattgcaggtaatctacatcataataggattaaatcaaatatttttaatgatgatatcacagatgcaaacaacaacaaaccttctataatttgaatctccttgccatatcttcgatcaaggcaaccatgcataggaattaagttacatgtagcatcactcgaacgccatcaagagtttcctgtatcacaaaccgtatgcgtgagggtttgtttctgaaaattgttgctgaggcta

SEQ ID NO: 37848 - DNA, 509 bp, Arabidopsis thaliana columbia
cgccagtgtgctctaaagttatcgaagttctcttggtagtgggcgagattcttttccgatgcagagaataggcgttctttgattttttgtaactcatccctgctgaaaacaatgcccatattgcggcactttttgacatcatcaatgctcaggccgttaccattgagtttttccagggcaatgcgcttaacacactgcctggcttcttcaatagtcttgtagaactcaaccgtatcgcttccaccactgccatctgaatagcaatttactcgtaaagctatatctccattagtgctgcccaaaagagataagcacttgataccttcaaatttcttacgcccatagtagttgtcaattgaagacataaaatcttcatatctttcaatggacggcacaccgtaatcacgacgaatggcaaattgaacctgcccggtcattacatctgcgaaatggtccaggtcagcatcattgatatgatctgagaacggttttacctgcttaaccatttc

SEQ ID NO: 37849 - DNA, 579 bp, Arabidopsis thaliana columbia
gtatgcatgcgacgctaattctgaaacaggtccttgcagataaagcatctcctgttcaggtccttgaataatacttttctttgaagctatcaagtagctggaagtaaattgggagatattcttatctttgtcatgtaacatttctttcaggataaatggagaggaataccgacgagattgaataacattccacattcgagggatatcagggcttatttttatgaagatgtgctgcaagccacaattagatctatcaaggatggtaacacccgtcttcgggtgaggctaatccacacaatctatttgcaatgtcgcatgttatgtcatctttattttgcaattcctaaagcagctgcttgacgggactgatactgttacaaatgaataggtggacattaatatccctgagctaaatccggaaatggtcagttattcatttcactaactgttttatacgatttctaaagcttcataagttgtaccaaaaagcaagctattgtgataaataggatgtttacggataggaccttgatggacttgtcaagctttactttatcatcgctgcgatggaagagagtg

SEQ ID NO: 37850 - DNA, 621 bp, Arabidopsis thaliana columbia
tggatcttaattttagttctagttgtgacatgatgaataagatatttatagatgactgtcctggtcacattactctgatcgctttatccttttatcatttatgtacgaatgcttaatttaattcgaccgatcttataggtcgccggagaaaacgggggagatgggtttatgaggaggagccacggtggaggaagaggtggtggtgggtggaggccagctttacacagcattccggaatttggatcctcatgagagctcttgatcaaaagcgtagatattcttaaagcaactatcatccgacaacattgaaagttttatgtaaagcgatgttactgttttctgtggctttaatgagatttcagtcttcgacaaatgttttcaagaactctaatcgtttttaacctattagatacaaatataaggcacatccacaatacgaatttcttcgaattttcgcatccaaatgcaaaacgaaatagttggttgaagtataattttcaggtatgcataatttatttatcaaccgataattgaattaggctcatctttaatggaaatttaaagtggaaaaaagaaagaaaaagaattaggcccattcaaacttcatgttttgtgacatga

SEQ ID NO: 37851 - DNA, 568 bp, Arabidopsis thaliana columbia
tgtacaagatataaaaatctatgaaagaaaaaatgacataatacttggccattaatacatttaacaccaaaaccaaatcctttatctcatcatttgcacaaaacacacagaatttgaagacgaaactattgtcagctcaagtgaaggtattgctattagcacgcaacaagtgatactagtatttaggggctgaagactgaagacaatctttcataatctcctgaatccttctctgcaacaccttgtccttaactctaccaatcatgtcttcatagaaagcttgaagcctcatcagctgactcttatcagcactctccagcatctctccccactcttttcccatatcgaaatacccagaaacccgtaatgaatatgggatatcttcctcttcattaaaaggttttccgaatatggatccatgaagtatgcttgcatatctttccatcaccattagttttgattctagccgtttaatctcctcagttgatgcgctttttccatcatcgggtacttcttctttctcaggtttcagctcattcggccagaagacgagagtagggacataaca

SEQ ID NO: 37852 - DNA, 509 bp, Arabidopsis thaliana
  unsure (1)..(509): unsure at all n locations
nnnnnnnnnnnnnnnnnnnnnnntaaagactacattgagagatcctttctcaaaaaaaaaaaaaaaaaaaaaaaaaaaaaaaaaaaaaaaaaaaaaaaaaacaggaaaaaaaaaacccaacaacccttacctggtttaaaatttctcccatttttaaaggaaaggtgttttgagtcggggtggccagaaggggaaaaaaaattgcgaacgaggtttattggcctgggtcggggtgtgtagacccaatttggaaatctggggaaaatcccaaagtgtttggtacgcttgttggggaaatttggggggttacggataagggcagggacccttccagagggaaaattcggggacttaaatttattggccccaggatagcatcaaattttgggccctttaccaggttcgaactctaggcgggggggtttttatggtggaacccttgggacaaatgtttaggggggacttcaatagtcctttgtggaaccttgggaattctttgggagggtaac

SEQ ID NO: 37853 - DNA, 793 bp, Arabidopsis thaliana
taatgagaactattacctttttaatctctttgacacctttcacattagtggaacaagtttcattcatatggtcaacaaaattgttgattgtgaatgaagaagcagcacctttccctacatatgcagcttccactcgactcgtatcctcaggtccccgtgactgtcccaagttaaaatcccatatctgtatacaagttcacaacacaggttaagaaacctttcatttttttatcttcttgagaaaccataaaaccacacagagtgactatatttgaccttacacaaaaacatttcaccacttaatctcacttgctcattaacagaaaaaactaaactgttcttagccaaaaaaatcaaaagagagataagcaaaacctgagaactctggccaccactaggattagtagtagtagcattccactgctggttaactcctcctcctccgccaccattgatctcctcaacatctcttgaccatttcaatctctctgacatctccggaaccataagcccctctcctgcttctccatctccatctccatcacaagcaccctcacggtcacaatcacggtcacgatcaccatcatcgccatcaccaccgacaacaccactcttaagcaactcctcaagctgcttacacaatacctgcttatacctcccacaactagatccacaagatccacgcttcttaaacgtcgtatcgctgggaacaatcaattcattagatcccaaaacccaagaatccaactgcatcccgaaattatccatcatcatcgccatcatcggaacttga

SEQ ID NO: 37854 - DNA, 528 bp, Arabidopsis thaliana columbia
tataaaaaataagatttaagagatttgtttccaaaatattttgaattctccatttattttcatattctatcatatattttttaaagaaaataatcaagatatacacattttataacttcataaatcgtttgacacagaagagaatcgataaactataaatctgcaatgtttaatattattacgaaatgcttttaggtaaaagatgatatgatagcaagtgtgttttttggacttataaaagtgagtagcacctagtggggggagagagagagaaagagaaacaaagagagcgataaagagatgggtggagaagagagatcaggagatggagaaaaaagaggggaagaagtagttgatgctggttctctcttcgtccttaaatccaaaggtacgttttattaattatgaaatctatgaaacttaacgtatactattataacccatttgaagaagatatgatgatgatgatgatggaaaatagggacatggtggcactgcggattccacttgacgacgtctatagtggcg

SEQ ID NO: 37855 - DNA, 598 bp, Arabidopsis thaliana columbia
ttttgttatatatatatatatatatatatatatatatatatatatatatatatcttgttgtgttgactaattatgagcacacacacaacacagatcgctacactcacacgtcgctcgagattataacatattgttgagatgatagtgaatttatatatgaatatcatttaaaaattaaagtaagacaaagattgagaagaaatattgtaacgtcccgaccgtctttatcagtaggctccacgttctctttcgtgttcgtgggtctactcctatcagacggtcggtttgctacatctgggtaggtttaaagatttttattttactgatccaagaaatcaccacatgatctttttccatgctttgtttgcattcgcatggttctgacaatcacttctcggaagttcacacatccttcagttacttcagcccgagcacgcttaactgtgtagttctcttagaacatttgaccaaaaaatataagtgttctttggtgacataggtggtcaaatcaattatgttacactctctatatgcacatcatatttaagaaatcgaggtgtacaaatacatatataaaatgttatgagttaagatatag

SEQ ID NO: 37856 - DNA, 526 bp, Arabidopsis thaliana columbia
aggattcttgtctgtttccccaagtcacatttcatgttttgcattgcattatatagcatatttgcatatggagtgatttgcaggtaaaacatgtgcttttggacctgttttgggagtttctagcacaaggagaggatttgctcaaatttgcacatgaagggaaggacaaggagctatgctcggggattttgctcggcctgttgatcgagtaccaagccgaagagttgtcgtctgaagaagtgaagctgctcgacctaaccttcacgagaagaagtcgagttcacctactcggtatttctactcggcttcttgtcgagtggtgcttcaccgccttagttatttgtcgttttactttttaggggttccttgtatttactataaacagacctcttaggttattgtacaaaagcatatttgctttgtccgctggattatagattttctttgtttgtagttcatttcctattgatctattgagtttttgagttttatttttctgcaaagttgtcatccttgttagatgata

SEQ ID NO: 37857 - DNA, 248 bp, Arabidopsis thaliana columbia
cagacagagaggcagagacagacatagagacagagagagagaacagcgatctggtcacagtgcgagaatgcgacgtacagtgctaataaatcccttgtggctccgtatagtgtggaggatgtctgatatgcgagatagtaatatagatccgggtcgatccaataacagtagtagagggctcaagctacattcatggatctcatgatgacctgaccagtgaacgctcagaccatgagctgactctgtcc

SEQ ID NO: 37858 - DNA, 828 bp, Arabidopsis thaliana columbia
cggatccccggatttgtgcatcagaggagtagagggacaaagattcacggaatcaggctttggagttaatatcggaggatggtatatggagaatgatcaaagtaagtaaagaaattggcaaagttaaagtgatgcggacaaatcaaggtattagagaaggaacaatagaagagttggttatggtaagaatggtcggaatagttaaggaagttattgagaatttatgaatgggtcaagtcgtttcgttgagaaagttgaaggagccgtcagcggtctgtcaccccggccagtccatcgattgggaagtggtaaaggtatcaagttagtgagtgagagttaaaccatagaaatagatttaccctaagccttcttgaccttaagggtctcaaataaggtacgtatgggttctatctattctcttgattgtaattgtgtgattgtgtgaatagttggtagattagttgcttaatttaaattatgcatgcatccgtgttgagtggggtcgactccggagtgttgagtgatcccgagtttttgtgtgcggttgttgagggtgccttcctagttggagtactcattaaattgatctattctctaaatgcgaacccttgttgtggagaagcgagtagttgattatatgtgtaaaacattgaagaatctctttaccagtcagataaatgttcaagtagtgagaattcagttgggaaaaggcttgagtcatggtacattaaggaagtaaccttggtaccccaagaagttagaaaatataagagagtcagaagatgctagagatgaagaagctttcctaatcactccaacttaagcttt

SEQ ID NO: 37859 - DNA, 682 bp, Arabidopsis thaliana columbia
  unsure (1)..(682): unsure at all n locations
tttattcattatcttcactaaacatttcaaaacgagaacactcaaacaaaacaaaatgaaaatgcatctgttcacaagagttgatgatctctatccttatatcagaaacatttgtgttaaggttttgcttttttggtacgagaattttagaaggattaacgaaacattggagatgatttatatgagtcaaattgccttaaaacctctctctcaaataagagatcgattgcagtatctaagggttggattccgtaaaattcttttgttcacacaatgagctaagtatcaagactaagttagaagagtataagaaaaataaaacaaagtaaataaggaaattgcataaatggttggttgtaaatcaaggtattaaaaagccattttccgggtattctcaggaaacgaatggagattttctttactctttcctaaatggagattttctttattctttgggagcttcgggaaaacttccagatttgataatatcctcggagattctttagtatcattctcggattttccggaaatgatatcttgatccttcatcggatttatacaagtattctcctcggacggatatacgatcttgggctcgggtgtgttttctggtataactgcgccttccaatccgagcccaagcgatccccnaaggtgtacttaagcttggctcgggtgtgtt

SEQ ID NO: 37860 - DNA, 945 bp, Arabidopsis thaliana columbia
tgcaaaatattcgaaaacaatgtccaaacatataatgttcgccccataatatagcaaagataacgaaaaggcccaaaaaagtacattaaggtcaaaattaatagtagaaaaaaaaccaataaaagaattccattgtctttcctctttcattggagagctctctttggggtttccgaaaaggtatcatatgccaagtttggcctcatagtctaaaattaatagagtcatacatttttaacaaaacaatagagaaaaaccggaaaaaaaaagaggaatgccacacgagaacgtttcgagaatcacccatcctagtactactctcgcccaagcacgcttaactgcagagttctgatgggatctggtgcattaatgctggtatgatcgcatctgttactacatgcaatgcaatcgtatctattcttttttgaagactttatgatccatttggcgtgggtcccacagctatgtaggaatccctatctgtttgtaagagccttgatacatgcaaaatattggaaaccaatgtccgaacatataattttcaccccgtaatatagcaaagatcacgaaaaggcccgaaaaagtacatttgggtcaaaatttggagtaaaaaaaaaaccaatagaagtattccattttccttcctcattcatcggagagctctctttgggctttccgaaaaggtatcacattccaagtttggcctgacggtctaaaagttatagtatcatacaattttaacaaaacaaaatagagaaaaaccgaaaaagaaaagagggatgcaacacgaggacttttcgggaggtcaccatccttctactactctcgcacaagcacccttaactgcggagttctgatgggatccggtgcattagtgttggtatgatcgcatctgttactacatgcaatgtaatcgtatctattctttcttaaacactttatgat

SEQ ID NO: 37861 - DNA, 494 bp, Arabidopsis thaliana columbia
tgtgtttgttatactaaagccagtaaggtggcaaggaaaaaacaaaaaaaaatatccaatgcagggctatgtccctacatatataactattttgtggagatccagaaatttaaggtttgtattgagtgtttgccaaagaaataaaggttgtaatgagtgcaacagccaacaggcaagaaatgtcttgtctccgtgaacttcacgtgcatggtgcatcccctacccgttgccatttcgtgaagatcgtaattaagtttgattactttctcaattatgattaaaaaagatgtgatggattcgacctttcacttccttacgttgaaaatatataacccatgtgatttcccactttttatggaaaatgatatataccacttaaattgactcttctctttgtttcctacgtaagagatagttgaatcttaaaaggttttgtgttttagttacaaattttagatcctgagtgtacaatagatttaacctgatttttttgt

SEQ ID NO: 37862 - DNA, 485 bp, Arabidopsis thaliana columbia
cattcatgccaccagtctcttcgtttagtgatagccaatgtcgttcaacactgtacttctttatcacattttgaacacggccataaaagtaatcagccatccctgttgccatctttaaagcttgagtattcccagccaacttgtattgatccaccaggccggccaaaatctgtcaaaattaagacagagatgttactctcttgcaaaacataagcatatcaatcttcaactcagtcaaagggtctgactattcaccttgtgaatggtatagtaaggagcccaaacatgtgttatagcttcaaaccggtcgaaaaaactggaagggaaagctgagagatatcctgtgccatatttctgctggcattccgctagagctgagacaagagctgtcattttcgccttgagagtttcgttatgagtacttgcccacatataagctgttgcactcaaatagtgaccttcaaaacaaacagacagatttttga

SEQ ID NO: 37863 - DNA, 510 bp, Arabidopsis thaliana columbia
aaatgtacctcagataatccattgaacaaagatagaaacacttcaaaacagatcattcaatcagcagagcttgtataaaaaaggattagccatacctgaagggtatttttcatctccatttagtggaacatcaaataatccattggatgagtcatcctttgccaaaactgatatgttcgagacttcactctctttccccttgtcattgatcacttcaacaatattttcagaaacattctcagagaaaacctcattgctgtccgagttattatcgctttcagaaacccctggaagagacaaacaatcagaattgacaagtttgtcacaggtaccagggatagacaccgtagctgtactctctaacacttttgtcagtgtccgtcgtcggtttttccttttagagtagtcattcgcaatgacgacaggcgacctttttcttttcattgacggcgagcaatccatgctactgccattggaaagactccatttgacacagaatcattgatgttg

SEQ ID NO: 37864 - DNA, 568 bp, Arabidopsis thaliana columbia
taaatagggtccaattttgtttagagaaattagtaatgacttttaattagaaaaatatgaaagattaagtttttaaaaaagaaattttgatatcaatagtttaatattcagtaactttaatatttggtaactaacacatatcaatcttgtgttaatgattttgaaaaaacatagattttataaattcttgggatttagttttctttttttataatataaataagacaattttagctaaaccatagttatttgaaaatcctcataatcataattattttgatatggatttccatgataactagggattaacttaaattgtcttgattgacataaataaataaattaaattgtcttatttatataaaaactaaatccacaagaatttataaatcattaacacaagattgataagagaaaaacgactctattttagaatagacaaaatttttaacggtaactaacggagttaaacggtttggtcaacggaaagttttgttttttttaacggaaaaaaatggaacaaaagtgatttaaatgatgttttttctcttctgatagttacgagatt

SEQ ID NO: 37865 - DNA, 350 bp, Arabidopsis thaliana columbia
gtatctttcttctccccactccgatccttcattaatctcgatgatctaaaatatccctttcttaacatttattatcttcttggaaaagccatcaatgtcttcatcatctatgccattatacccattttccctttataattgtatatacgaatcactaactattacaagtatatctttcacgttgaagaagatgaagatcaaagcatccatgcgaagctccaaatttgcccatctctctctggtactttcattgtccatttgcagatgtcttctcactctctctctctctttttggagcattttcacattgtcaaattttcagatcacgtagcatgctatagaaacagtgg

SEQ ID NO: 37866 - DNA, 454 bp, Arabidopsis thaliana columbia
atatagtatgtacctgtcatataaaaatgaaaccccctactgctctctcttttggatgagatcaaccgtattttaaaccggccaaacttgaaagttttattttgcttctaatgctctttcaagtagagtcccttttgtgattcacgtattgtagctagtcgattctctctccttggactggtgtttttgttcttcggtttttccgatcagagttgaatcgagaagaagttcgctgtatcttgtggttgcatgttgggcttctgtgccaatttgattcattccaattagggcctgtgtgccatgtttacggcatatctgcttagttgggcctacgtgcttttcgaggcttgtagtgatcatggtctaaagcgctcaataattgtctgttgacggatcactaaactcagataggcccgacttaagccattagtttaagggcccaaaattaaggact

SEQ ID NO: 37867 - DNA, 535 bp, Arabidopsis thaliana columbia
gaggatcccctgcaattaattcatccaaagccagaaactttcaattgagattgatactatgattgaaattagcatctgtggaacagaatctggattcaaaaaaaaaaaactcgagaaacaaaaaaagttctgttttttttttaataacaccgacacagtaaagagagatctcagacttcatcacagaacaagagaacagtggttttatccacaaaatcgtagcatgtaactcctttctgattagatctaaaaatagcaaaaaatatctaaaagcaaagccgaatctaagaacacaccagcaaaaatggccgagaatcgagaatgcttaccgttaccgacattgtcgaagtgattctctcaagagcgaaaaatctcgagtacgcgtaaagaatagggatttcaatatttcaagtccttttgagtctcaaaactgacaaggtacgtttttaattttaaagtgatttacatttcaacctcacgagtctagagaatatgggtcatgtggacgaaattgtgaagttcctattattgtatt

SEQ ID NO: 37868 - DNA, 332 bp, Arabidopsis thaliana columbia
tagaggatccctggacatttattttcaaatttttgtttttattaaagtactgtatatagtatattattgtgtttatcttgccgtttgtattatctatactattaattgggaagtatcgtgtgaactacaacattgtaggggtagtctaaaattgactaaatggattgtttgcatgggtaatttaagacattatcaactactgcatctaaatacatagagaatgttaccttcgaagacacttgtctcaaacaatttccgagatacgacactttcaaaacacgaggcacttctaatataaaaattgtccattgtgtctgcaaaccaatttcggt

SEQ ID NO: 37869 - DNA, 546 bp, Arabidopsis thaliana columbia
cagctggtacttgcttttatgattgtatcaatgcagaccgacagacttttgatcgatgctgctatggagcttgtcaccccctgggttaaagaaatctcagtggatgaacgtagggaagcactatttagagctagcaaatatgctttgactagaggcgtgacaactgttattgatcttggaagatactttcctggcaccacagatgagctctcctggaaagactttcaaggtgcaataaattgttctattgaccctgagtgggatgagttgtcatatccacacttgcatactgctagagagaaattgatgactctttagctgatagacataggatagaatttgttttagtccaaattttttttgagttgaatacttctttttatggtacagatgtctatctatatgctgattcctcgaagaagatgatgatacggacttgcttgtttttcccatcacaacgtggtcacgtttattggtatgatttcttgagaaccaactcttgttttctgatagatagaattgagtatttttacaagcagttttgtg

SEQ ID NO: 37870 - DNA, 420 bp, Arabidopsis thaliana columbia
gattccttaaaatttaagactctttactggtttgtcttaatttcttgtaggcaagctcaggcttgaacctcaaagttgatcataaccatcgccgagcccacttcggtggaacagggggtgtgaagagctgcacaaattatgcaccagtaagtaattaataaagagacaccagagatatatagatggccaggttaatgatcatatctaaatcatggttttttattgtataaaatttggaaggttgtaaaatcgttgatcgaagcaaagacttcgggtttctctgaagtcttgttcctggatgcggcaacgtggtatcaacatcgaagaggtgtctacttgtaacatcatcattctacaggtgaagagcatagaaacgattataatataaagtttcatccataagattgcatttgcaagaac

SEQ ID NO: 37871 - DNA, 488 bp, Arabidopsis thaliana columbia
atttttttcttcgcaagcaattttatataggttctttacgatttaggcttggttgttgttcaaatttatggcgtgtaaagttttatttttatcttttggttttgattccatgtttagcaatatatatcttcaaatcaaggaatattcaaacagtaatcaatttcagatgtctcatttactcgtcactatagtttaattgacccatggtaatgacaaagagattaggcatgcgaaaataaaaatctgaactgatatagctaaatgatgcatacttcaagggaaggatataggaaaaggggtttgggatcaaaaggtcttcaacgagatcaagattgctgtaggaggcagtgattcagtgcgagctcaatcataagatcataagagcgaccctaatggatgaccgcttacaagggctcgttccaaatgttgagagcagaaatattgagaaattagatgtcaagagtttttgttgggccttaaaatttttt

SEQ ID NO: 37872 - DNA, 1300 bp, Arabidopsis thaliana columbia
gattggagagagttctaacttttggatcatatatatttgcaggaactttaggcaactcacgtcagccgacaacaaccatgagtttattcccttgtgaagcttctaacatggattccatggttcaagatgttaaaccgacgaatctgtttcctaggcaaccaagcttttcttcctcatcttcctctcttccaaaggaagatgttttgaaaatgacacagactaccagatctgtgaaaccagagtctcaaactgcaccattgactatattctacgccgggcaagtgattgtattcaatgacttttctgctgagaaagccaaagaagtgatcaacttggcgagcaaaggcaccgctaatagcttagccaagaatcaaaccgatatcagaagcaacatcgctactatcgcaaaccaagtcctcatccaagaaaaaccacaacacaagagccaatccaatcctccccaacaccattgacagaacttcctattgctagaagagcttcacttcaccggttcttggagaagagaaaggacagagttacgtcaaaggcaccataccaattatgcgatccagccaaagcgtcttcaaaccctcaaaccacaggcaacatgtcgtggctcggtttagcagctgaaatatgaatgctaaccaccctcaagccgtaccaagaaattcttttgacgacgttgcttcaagacaagatataaaagctcctatcttcatgctttttgatttaagatacaaactactcaatgattaggaaacttcatatatttgtatgtattgattagtgatcaattattgttagtattcgttatagtctgtttttctactagttattgtcgcctgtctaaatccccttgctatgggttatctcaaaattagtttcgtatgtaactaattttgtaagaacaataatttttgttgacgaaccatactatcaaatactctaaattatatcttgataaatctacctatcaggtaagtaggtgtgttttgttttcatttgtttacttgttacctactaatctcatattttatgattcaaattcaaacccgtgaattatgagttagtaggtaggtttaacaacatgtcaacaactaaagaacaacgtgacatctaaaccaaaccaaaactatagagagttcagagtagtcgtagtctcgtagagatcattcatataaataaatcgcataaacaccaaaatcaactcttaattctttcctaatcatcattaatctctaatggattccgaaatcgcattcgactattctccgaggtttcgtatattcaagaacgg

SEQ ID NO: 37873 - DNA, 484 bp, Arabidopsis thaliana columbia
tgatggatcgcaaccttttgattttcgaaaagtgtgttggagtttcattaaagagatgatagccaaacaagaagatcaaattagaccgaagacgaagacgatcaaggaaaataacagattgataaccctgttagcgtgtaaggcttacctacgaaaggaagcaatgtgtaatttcactttttcgattatttcgttcaacttaagtattggttgtatggattgtagagctctcacttatatgcttattggtatatttgtaatctctttttaagtttaataaataagacgttaaaaaaaaaaaaaaaaactcccataagttttacgccgttaaagagagacggagcgacgtttgctacgaccgtcaagattcaaatggaatcttttttaaggaaaaacaaaaattcctccaacggctatatctgatcagacatctctgtcttcttcttggatgcggaaacggaaaaaccttattacttgtttgaga

SEQ ID NO: 37874 - DNA, 496 bp, Arabidopsis thaliana columbia
ctgcaactacagttggataagcaaagtaggaagctgaagctactaatgctcatcttagggtttaacagatcgttaagttttcttgcagagaaaggttgaattcgatgaatttgatgctgtacatgtctccaatagccgtcattgctcttctgcctgtcacaatttttatggagccggacgtgatgagtgtgacactaacactcggaagacaacataagtacatgtatatacttctgctggttaactctgtaatggcttattcagccaacttgttaaactttctggttaccaagcacacaagcgcacttaccctgcaggtaaaaatactgaaaagattttgaacttaaacaaaactagaggagtgcctaattggatcaaacatgtgtatgtttaatgtttcaggtccttggaaatgctaaaggagcggttgcagttgtgatatcgatcctgcttttccgaaacccggtaacggtgatgggaattggcgggtacagta

SEQ ID NO: 37875 - DNA, 505 bp, Arabidopsis thaliana columbia
gtcaacattgattgggactaaaatccagtgtgattaaattgttgatcgaagactcaatcatagacgatcctttagtgaagaagcaaaatcacggagaacggcgagaagaatgtgaaatcgagagcatcgttagaggagctttatgatttatagaggcagaggatggagaagcgtcggccggaaacaatgtgcataggtacgaccttgaggttagtttattccttttaaacctaatcaaaacaaaatatagtattcatgggattaggtttattgtaatggatttgaggatttggtagataaaagcagtaaattgtggattgaagaattttcttgtaagagatgtttcatgtaagggaaggatcatattctggaacatttgttagctttggttacttctcactatctacatatacatttttgcagtcattttatgaaataaatcctcgagttggaacttatttacacggaatgccattagcattaatattcctaattagtagcattt

SEQ ID NO: 37876 - DNA, 534 bp, Arabidopsis thaliana columbia
gtatacttgaacaacaggagatgtgcatcaacatttgcctgcatttctcagatgaatcataattcaagctcaagctaagctttcttctctcccttcccatggctcagaaaatcatatcctcaatttagaaaatcacaatgaaatcaagccgatgggagaaagcacagtgtcgccatgagccgcctctgagaaagaaaactgcgaaatcatctcggccgacagatcttgcgacggagatcagatggtaatgcccataaaggaatcgttatcgacgtaaagcgacgccgttttggaagtacacgttttactctttatttcaatttgttttttggttcaactctcgtgttattttattattaccttaattaatctaccagtttacttttcatctaattatactaaatcaacagtcacttttcccaaaactgcaagtctctccttttgccatgtatgcttaagtctaaaattttggtcttcacattcgtaaaacaattcactgccttctactattatattcaatcgcacttgatgata

SEQ ID NO: 37877 - DNA, 281 bp, Arabidopsis thaliana columbia
agcgtcgttaggtgtcaccttcataggcactttgttcttggtgtagactaggatatctgtgtagggcgatatcctaccaggggtatggcgcgatccatccataaaagcggtcttcttccttgcgtagaggacgtcagtgattgctttctggaagtaccgtatgcagtggtttccgatatcgctgctcttcgccctaactcatatgccccctttgtcgcttgggactcgtaagcctctagtttcctattacagtggcttgaacttgggtttaacatcagtcc

SEQ ID NO: 37878 - DNA, 709 bp, Arabidopsis thaliana columbia
tttgccccagaagacttctctatttttattattagtccctacatgttttttaggtcatatatatagttttaaaggtcattgtttagacctatcaagtttcctagcaaccaagttattttccagagtactttcataagctattcatcccctgttttcagagttttatcagagatttcattactagtgaagagatcttttctaactcttgtctctattgatttgtttatactttcttattcatacatgttgtttgtttcatctatcatgtctaagttgttgcttgttagagttaagatttctcactagggattcatatgatttagtagattgctccttttctaggttatctgtagaattcttcatctttagttgttcttaatactagttctagagtaattaactagaacttgattcgagataatagatatacccaccataggtatctgttactagaactactatttgatgagcctggtttataggtgtgtaataagaatcggcttatctactaaggtgaacttatcgaactcgtttagcatgcgtgttaaggtataggatttcacggcacaacaccgggaattttagctctaggcatagtgagtttcacggaacatcaccagttattctgatattagaatttgagtttaagaacggtttgataacaacctagctatatctagatctactaatcaattgtttaatgagaata

SEQ ID NO: 37879 - DNA, 288 bp, Arabidopsis thaliana columbia
tagtaacgtgcgccagtgtgctctaaagaagtagtacattgcccagtaagtattgttggtggttcatgttctgtcagattgatagtagtgagacgcagctatctgacaagttagtgttaccaattcatgtcatcagacctggctatggcttttctatctaacttgcaagtctctgcatatacgggtcagagtaactgtctgaagagatactagttggagtacataagggaagcatctagtgaagtatatagatgcgcattgtgcacaaagcacagggaatgtatacat

SEQ ID NO: 37880 - DNA, 955 bp, Arabidopsis thaliana columbia
tcaaaaagcaacgtcgctatgaacgctagatattttggaccaccaattctgcttgatacacttttgttccgctagaaccgcttaatcatcatttattctacttgattcaccaggaccgcttgatctgctccactcgattcaccaggaccgcttgatctgctctactcgataccctctctccatttgaagcctaaaagacaaaaaataaatctgcatgtagtcagtggcggatctagagaaatatttagtgtagggcactattcatttacttatacatatatatttatccaaattattatatatattagtcattattaaaatataaatccgtgataaaatatgtagtattttaacacaaaaaatgtttatcttaatacttattatttatatctcacatatagatgcccaaaaatatgtatgaaggtatatatatattattttgttattcattttcatatatatcaaacttattaaaaatatataagcagacatattttaagtaattattaaagtaatttaaacgaaattttaaagtgactgttcaaaagttaaatgaaaaaaaaaattacaataatgtttctggtggaagaaaatgaaggtaattagaaggagaatatgcctttgacaagtctcaaacctgggtaaggaagaagtaatagtagaagcactaaaccatttgtgctaaatcattcttataagatgtcttcacgaacgaaaatctataaagtagtgtaggcacatgccccacctccctccaacctagatccgcccttgcatgtagttagtccactttttattttattttgtcgattggtaagtcaaagacagttcatttgtcccacactttgaactgtcaaatatctgacgcaacattcaaagcctaggaaatgtgatgttacatttgtgcaatgaatatttgtaaagtgttgcatattaaaaaaaaagttttttcttg

SEQ ID NO: 37881 - DNA, 550 bp, Arabidopsis thaliana columbia
  unsure (1)..(550): unsure at all n locations
tgtcacgttcatcgccgccggccggatccctccaccggagaaacagaatcattattctcgtaaaactgtggtctatcagcaagagaacacaacaaacgccgacggtgactgagaattccaccagctacgataccaacttgatgacgatggttgagaaatccgttgcggagaagcggaacgtntctgagaagaagtagcgaggtcatcgaccacaatcaaggagtaatatagacaataataacgaataaaaccctaatctgtactaatcactcgaagaagatgaaaaattggggaaatctcagagaatcagaaatttgagaagaagataacgtttcgtcagtttgtgaagttggggcatcgaacccgtgacgttgaagaagctaaacagagtaactaaacctctctgagcctttccacaataattattttcattttcttaaaagttaggtgccagccaatctgtgccgttagattgatctttatatgcttctataaatatctaaaacaacaatccaacggtggaaagatccattgcgtgcagtactgtaga

SEQ ID NO: 37882 - DNA, 1016 bp, Arabidopsis thaliana columbia
  unsure (1)..(1016): unsure at all n locations
tatttcctcaaaaattgaatataacgatgtacctggagaagtggagaatctggggaagattatctgggaacgattcttgcaaataatccggagatttggcgatcgatttgcttctagattgcttgcgaaagtctcttccctaaatttacaatctgataaaacaaaaaaaagttggaggttttcgatagagaagaagagatcgggtttaaattattaggatgttgacgaaccgtcgatgaataatccggtttaaattattaagggaaccggtttgtttttggatttggttctttatataccggatagtattatgtaactcatttccaaatgattttaatacccaaagatttttaaactattttacctttgaagaacaaaatttcgatttaaaatcataatttttttttatttttttttttaaatcttggaggttgtgggtcaaagtccgtaatcccccaggcctgaaaccacagcataaaatattagtttcgtcccaagcgtcactcgaaccggcgacctctaagctttgcataaggtctttaccaattgagctaacgacacttggttaaaatcataattaaataagactgatgttaaaaatctctatattatttggaatttgatacacaatttaaaaccaataactgatactctattatactctattaaaatcaactattaggtaacaaatatgtgacataaacattttgcagtccgatgcaaaatatatctttcaatctcaacaatatgttttttcttggtcaacaatctaacaatatgtttaattgcatcttcaaactaaagtcccaaaacatgttttgttctttgcacatggttgtttgtgtggaacacaataagacaaaggatcgattgcagaatttgaggtcttctagctagttgaccgactaagaatcaatggaccacttattctttaatattattttcccaactggtttggaaggacttagtgaagaagttcactanaacttctcgagtcaatcccatatggttctttt

SEQ ID NO: 37883 - DNA, 388 bp, Arabidopsis thaliana columbia
  unsure (1)..(388): unsure at all n locations
ccttctctgatctcccttcatcgtctagattaaacaaaccatcctcttccatccaccactgagatgactgatgtttaccagtgctctaaaaaactaatgcctcaacagcaaaaaaaccaatcccggaaatactaggccaaatattaacaacacttaggttctaattctacatataagcaacnatcgttttaaaacatgtaatcaacgcagtatcgcaattagctcacccagggggttgaatagaggctagagcatcatactcattgccaaatcccgtccctctcgcctttgtccctctcgtcctcactctcgttcctcttgtccggtcctttgggagagctatgtcacgccactcatctctctgccacagttttcgcatcatgttggt

SEQ ID NO: 37884 - DNA, 803 bp, Arabidopsis thaliana columbia
gcatgccacaatactgattggatttccgcaactgaaacaacaaatttggattcaattccttttggcaagagaattatttgtaattgtgttttctagataaagatggttgatgatgcaaagttatataccttcgttttctcgcaatcttgtgtgaacagcaactgcatgtggtgcgataactgcgttagggtgggaaatatctggctgtccggtccaagacttgaggttgagaatacctattatagaggtttcatgtgaaatttgtatgagacacaggagaatgattcaaagaggagaagtaaaggaacataacagtaatgaagatttgaagttacctgaggatgaagattctttatggtgtttgaggtcaaatatggctccacaagctgcacttgcgtttttctgcaacttatgagatccaatcagattgtagtcccagcttccatctttgtagccttcactaaggaagagttcaatgtgcctagcatcaagagtttgcattgttcctacatagtaaaacagaaacactcttagttgcaatttagttattgcaagagatcaatacaaaagtttcagcaacagattagagttgattagtgtcttttacctcacaggtactgaggtcacaaacaggtcgcacaagctgtaaatctggaaaatgagataagccatatgttacagtttttcctgcagttgacaaagtttctgaagatcatgaataagacatttttgtaacatccgttctatggttccttcctttgggactttcaggcgaccactcaaactctcagtcaggagtgaag

SEQ ID NO: 37885 - DNA, 438 bp, Arabidopsis thaliana columbia
caaaatatatttctggccaacaggttaatggggaaggttgcttctgacaaatgccataaatgggttttcaaggaacaaactgaatctgaatctaatgcctctagttactggcaaagctcattcgatgctgtaagtttgtttataatataatgaagcatttacgtataataagattttaatctgcaaatttgtaagccggctgagatctatctctaaaaaaaaatgcagattccttcagagtggaatgatcagttcgaatctgggattcgggtaaaataaagaacactaatcatatatgagaatgttcttgactttcttgtttctcaagtcacctttgtaatcctttcttattggtactacagaccatagctgttattcaagccggacatgggcttttacaacttggttcctgcaagaatgtaagtcctttttaatttg

SEQ ID NO: 37886 - DNA, 905 bp, Arabidopsis thaliana columbia
cgtttttcaggatccgattacgtcgatgtgcctaatttgagcgactaactttccgggagatttgtggtgtgttggtgcttcagaggggtggatttgacgaagaaaaccggtctctttcatcggagaatcccgatctctggttgctacctcgaatcggtctttaatatgacttaggtacggtaagcacaccatcaaaccgattaagactaaaactttgaaaatttctcttcaaccaaaaacaatatgatctttcacattcttcagcctgtttctaactttaatctatgtatgaattgatttatgcatattattcaatatatagttgtatcatatacatgatctcagaacacttggtcttgcccacccgtgcaaggcagaatgagggtttggtattttgtgttttttttaggaacccacggcgcgggtcaacccctagtgacagtatactctttgacaaaatattcttggattcacccctagggatgaacctatcatattcacccttcttatttagtcgatcaaattacaacaatatgtcatgtaatactatatttaaaaatcaatcaaaataaaaatcacaaaataaaaatattaagaaaacaaaatctatatgcttttaattaaacaagattaattatatggcggtttgagtttataaatatgaattaggatttagatttacaattaattaaaattatatgttggtttgggttaatagaaaaatgattagggtttaaacgaaattatatgttgatttgggtttacaaatattgattagggtttagcttttacaattaaatcaaattatatgtcagtttggatttacaatgaggtttagggtttagattttcaattaagcaaaattatcagtcgggtttggtttatataaaatagtaaagtttaga

SEQ ID NO: 37887 - DNA, 631 bp, Arabidopsis thaliana columbia
gtatagaggcaatccggaaaatccacgagttcaacgttatttacagtttattacactacttgatgcaatttttggtgatgtaccaaatgcataaagtactaagctttttcttacaaaatttatttatttttgaatttaatgttttatttatggttttaattattaagcatgtttaatttttctaatattatcaatttatcataataatatattatattttttcttttaaaattaatatattatatttattttggttattttttatttaattactatcgcactcgctggtttaccagtcatagaactcccgcaaacgcacccattatcaaacgctcaaccagtcgttcaaaacatttgataacgcttgaaaccgcaaccgtttgtttccgtaaactcccgcaaccgcaaccgcatccgctgcgtttaaaccagtcaggccctatattacactttttgttataatttatactttcagaaaatcatgtatcattgattcattgggtgctaatgatttggtcgtatgatataaaaggaggtggcgcgattcatgaaccgtgtggttaggtatatttgcatagaccttgaaagtcatttcaagttttaaacttaatgtgtatggttctaacacaaa

SEQ ID NO: 37888 - DNA, 557 bp, Arabidopsis thaliana columbia
cgtatgactgttttcgatcttttgatgatatatattttcaaaggaagttgtcattgtcaacttgcaattcaacagtttctaattttgggtgctgttgaaacccaactaccacattttgatgtatttaaaacattatactatgcatctttctgatacaaaaatgtatatcattaatatgtattagaattcttagaacatgcctatatatccaatatagctcatcaaacactaacgagtataaagaccatccactccaccaccacattaagtttttgacttaatgatcatcggctatgttgttgtggtccaacataaagagtctgccgagtttggtttcactgtctaaattggaaccgtttttggttcaacaactagttcacgcagtaaagtatcacttaaatacagttagttcaaccggccataaaaaagtttgttctcgtacatatggatattattgatttacacattgagaatatctacccatctattattaacaattaagcttgacctagagaaattctgatgtagatttttctgattatcttctcatggttagg

SEQ ID NO: 37889 - DNA, 610 bp, Arabidopsis thaliana columbia
tgcatgaggttattgtgtctaagtggtattcaaggtttacccgataccatcatgcttagagtaagctgctgccttcattttttttttgtgattgtgtcagtaagtcttgatcttgcgtggtcacttacatgatggcacaagactcagagtgtatgttgggtaatgcatgacgatgcaataaagtgatgttccggttataagcctttgtggctatagctcgggtgttcatagttgtgtacgtacgtgtggtgtgggtgtgcatgtacgtgtgtgtggtagcatacgcgtggagaacatgtatacacgtatgcgggaggttttgctgatgttgtggtgcacctttttggtaaggttggcagtatgctgagcccaagattcattcatgtgtctagtttgactgcatattcttgtattattataactatatgataatacgtttattaggtgttttgtgatctctgatggctaagtttacttattaagttgattaaaccctagcaatttatttgtgcatagacccagctcactaagggatgctagattactcatgattctacttgtcttataggtaatcatagtgggatgagcatagcgggaagacgaacactag

SEQ ID NO: 37890 - DNA, 556 bp, Arabidopsis thaliana columbia
  unsure (1)..(556): unsure at all n locations
tattccttttcgtcttcctcctccttgcttgctccttcctcgttgcgtgattccttggtatataaaaaaggcagctgaatctgcaagttagggttcttccgacatgaatcttgccccaatcttcaggtactctcttctattttgtttcccttctcctcttgtgcgttttgctgcaatttccgatcctcataaaccctagctttctgacgcatattcagcaactaaaacgatgaagagactaagatccagcgacgaccttgatttctgtaatgataagaatgttgacggagaacctcccaactcggaccgtccggcctcttcctcccaccggggcttcttctcgggcaacaaccgtgaccgcggggaagatgctgccggcttctccagggctttttcncgtaggcgatccaatcgtgacttggataatcatcggccagatgcccggtaccatcgatctgagagcgcatgtttctcaaggagggcttttcaaagggatttcgttctgagagggagaggccaatagggatgctagtgtctctcctgggagaggtttggt

SEQ ID NO: 37891 - DNA, 559 bp, Arabidopsis thaliana columbia
agaacgcgtggaagaagaagtcagcttcggcgtttcttcgtcaacggtctctagaacgtcaatcaactgctcccacttttagatctcatgatttcgtcaaaattactaatataccccgaataattgattaatgtaatggccttattaacactttaaatttaataacacattacatatttatcattacatattacatagtaattttttcgtcaaaaaaatcatcactactaacttccatactaacatcatgcaacaagcgataacgttaagccaaaattttatcaacttacttatcagagacgaaatcaatcacaacttcatataattaattacctagcaaactgagaaaatcgggcccaattgttgcctcgtaaaccgtgtatttctctctcgcttgtaggcgatttctggtttttagatctagaattttctgttcagttctgctcttaacgtcgacaaagtcttctcgcaagtgatcgaggagtgagtcgtcgtcctctccgtcaacaagggtgtggtgttcccgctaatgtggttgtggcctagattggcggaggag

SEQ ID NO: 37892 - DNA, 555 bp, Arabidopsis thaliana columbia
  unsure (1)..(555): unsure at all n locations
cccttcccactcccgtctatctccgctcatatctcacacccagagacacacaacacaaccacttcctcaagccattctcgagaacaacgttatctcacatcacacgccactctctagacacatgaagaagactttccccaatttcccattccgaatctcaaatttgtagactagagccttccccaatacctgacctctttcaaaattcacaaacgggttactgggcttatggcgcaatatctattgtacatactactttgcatgtttgtagtcgtagatgataaatctggatttctggttcgttttcggtttgtgttttgggatttagttaaagttataattcaattctaggcatgtcgatttcggatcggttgcgttntgtatctgtaggtaaaacatcttgttctataacagttnttgtttgaaaatatttattttagtcgaacaggtaagagacttaatagtcgatttctatttttgtgatgggaatgattgcagcatattttgattgagttaacttatatagtttgtggttaagtattgaattgaatatga

SEQ ID NO: 37893 - DNA, 379 bp, Arabidopsis thaliana columbia
gactacggttatacctctccaagtttatagcacataggattctaactcggtccggcgggtaactctaaaacatcatttttctaatcggttgagccagtcacatttttgtagacatattttatttagaaaatgttcttacaagctcatttaacgaaatgtggattagttcaaataacgaacaattttcttacacgaaattgttccagtgaatcaaaacctgagcagcgtgaggtaaaattctaaacaaatgaaagataaaataaattaaggaaaagtcggagtatctttaaccgcccttccactatttatcttttgtttgttttttgaaaacatggaccgcacgttgtctctctagccctagaaaactacttcaacattt

SEQ ID NO: 37894 - DNA, 645 bp, Arabidopsis thaliana columbia
ccttatatatacatatgtcaatcatcctctggagttttttcctgttctttaccattatcttaagttccctcacaaatataacaacattggcttctttttcatctcttcacgcagatgaatgtatcatttctaaaaattttataaatcataatcagaatccgtatatattttatatacttattttcaatatgtttttttgctatattaatgcagtgaatgcactaaaggagatagctactacacttggtataaagagattgaacctaagggatgaagatccttgcagttcaaaaactctaaagatcatacaagaagttgattttgttccgaatctagatatcaacaacaccattggttgtgattgtagcttcaacaacaacacgatatgtcgtattacagaactgtgagtgttagtttttttgtcttctcttcgtttaatccttttactttctcttcttttctaataatgttttgcattattatatataaatacagagctctcaagaccatgagtcttcgagggaaacttccacctgaattgaccaagcttccatatctcaaatcgatgtaagttctgaattatataattagttggatgtgtggtttttcaatttgcaagacatggttatcaataagaagcatata

SEQ ID NO: 37895 - DNA, 503 bp, Arabidopsis thaliana columbia
gggctatcggttaaaattaaataattgtggtcctcttggcccattagtgctgtccaaactggcccaatatgacccagtggatggtcccaacaaacgccgcgacaaaactccgtcgctggctgaggcaatgttcaccggtggtggtagcttttcttctactccgacccggctgaaaatgcaaatccctaaccctagacacggccatggtttataaacctcatcaatttcttctacttatctcttctcaaagctaaaccctccaagatattcctctattaggtgcaaaaatcaggtaaatctctatctgtccgatttgaaaccctagatctgcctttcttctctcttcttttgcttttctgggttttgctcaaagatgggtgacagcgaagatgaaacaggatacccaaaaaagttttactctttgaatcggcaaaaccatccaatgtatagtagaccaatacctaagcgtcacgcgtattacaatgaagaagaagacgaagatg

SEQ ID NO: 37896 - DNA, 530 bp, Arabidopsis thaliana columbia
ggtcaacaaagtatgaaagtaatcagaaatggtcttcaccttcaccatcttttagcgttttaaaggatgaaaagcgagtttatgaaatggaatggaacaaaagcatatctaaaattaagaatcattgtaggtagaggccgaaactcctgcaatgacatagtgattcttagatggtactcgtaattggttaacaccaattttggaaaccggtgcattagtgttggtacaaacctaaacccctaattccgattaaaccgtgagtcgtcgttctctgtttcctcctcttttcaaatccttctccaccggtcatctcctcttgcaatcactacgactccgtctgtttcccggacaaccgcagctctcctctcatcctataaagtgtttcagcttctatgtttaaaattcacacagagaagcctaatttttgaaacactactctgggaaatctttctttgggaaattgggtttagggatttagaccaacattgattggcttggtaaaccttgaaagctatgctgagtaggttgtc

SEQ ID NO: 37897 - DNA, 504 bp, Arabidopsis thaliana columbia
ttcaatgattcaaactttaacgctatctaaactgtaacgcatttctattttataatagaagtcttcaaatgctcattcaatgatccaaactttaacttctagttttatactccatatttgtgcaaaatgtatatgatataatattacaagtagtagaagttttttgttttagtagctagtagtagaagattaagcagagtaagttctcattagatgacttaagcatacaaatatagtattacaagtaggggttatacacatgactaaaaatgtttatagttctttttaaataatttatgtttagcactaacaaattcttataaaaactaaagtttattttcgggaaattatgtaagtaacaaatgactaatttggatcatgattcgctccatatgggtaggttatgggtcctttctttttgctccaagccctttttcgtaattttctcttagcacttttagttaaaatgatgacattgaaaaagggaatggcttgcggtgttag

SEQ ID NO: 37898 - DNA, 485 bp, Arabidopsis thaliana columbia
caataaattggaagaaacgcctaattccggtctgttgagcttgaaatttccgagtcatcactgccaatctccctctctcgattagagaattataaagaaacttaaaaactatcaatcatccaaaaagactcataaaaacgacgattgaataacagaagaagagaaccctagatgctattgaatactgataatgatgaaacctccggcgattggtgtctaatttatagggaacgtaattagggttttgctttgatcttcggtgaaggcccattctcggcccgttaatggtttccgaattgtgctgctttgtcttcgcggatggttcggtttatattcggttcgctttaatttggttatattagaatcattttggtttaatctggtttatgcttgaaaatgaaatctggtttaaatagtttctctgtttggtttttctgttttaattaatttacgggcaatggaagcattgagagcgcctacggcga

SEQ ID NO: 37899 - DNA, 414 bp, Arabidopsis thaliana columbia
ataataatttaggcattaaaaataacaactagcaataatcatcacgcgataagattaaactattagatatcctaaagaaattttagttgtatggagagcttagtagatgatgaatccacatcaactactggttgtcacatatattttcaagaacttcatatacgcacttcgatagagatcactacaattcataaaccaaataatgagacaagaaaaacaacacgagaaccagacatcgaaagcttcgcctaaggagccatggctatattaacgatagaactacctattcacatacatcctttgtccctttcctttcgatatcatgatcggtgtgaaggctgcagttttcgcacacaaggtgaatactatggaggctatcgatgtaatgattctgactgcaatcgtgtactgttt

SEQ ID NO: 37900 - DNA, 868 bp, Arabidopsis thaliana columbia
cacaataagcaaagcaccacatgaagcaagaaaacaacttacctgtcaagcgacgtcgtatgcgcttccctatctcaagaagatcattaatgtcttcaagaaggagtttatgacccatcggaggtggtgcttgggtaggctgcgtgggtggcggatcgttgacaaagacacccggttcgtcagagagagtatcacgaggacgagagcgcacatcacgctgaaaggtgagcagctggtagatcagatttgggtaagccagacgatgtgaagaaaggggtcccaaacgtgccaaactcatggtatgagttaccaccaatttgcccaggttgaaactcttaccatgagtccccatgtcaatcaaccggagacggtcaacccgaagagtgctggtattggtcgttggaaaccaatttccacagcaaaccttgtgcagcatcttcatggtatctagatgatcagcaggttgcaagcggacgcaacgtcgtgtagtcccacctgtcatcatgagagcaagatcatcacgagaagctgtagagagggtaaccggagcctctggatctaaagcggagtcatcaatcgagaacatgtgattgataagagcaggcgagaactcatacatcttgccccgaacatacaccagatcaagaccacattctcgatattccatctctggcagattcgcatagaattcacgaacaacttctgggacaaactgttccaccgcaacgacagtctgagccatacccgagtgttccagaaaatacttggtggcggtcaggacctcaggatctaagggcagagttttctggaatatgaaatcgcgtttagcgatgtgtttgtacctttcagcagccaccgccggccaaaa

SEQ ID NO: 37901 - DNA, 903 bp, Arabidopsis thaliana columbia
ttggttaaaaaagaaattagggttcgcattcaaaacaaaacgccgttatggaacttacaaacaataggagaaatccggctatggagatttggaacggccgcggaaaacgacggattctaagggcgatgataatggcgactggtgaagaagaagagaggagagagatccggcgatagagatttggagagatacggcgacgggagggagatttactcgacgagaaaggtttttcgatcgaaattgtcggtcgaagaagaatacggtagtcgattcgattttttacaaaatttcatttgatagttagggtaaatatttcgattttaggggaaaccaattagaacttgggcggatccggttctaaccgcggatatgcggttggatcttgtaaatttcctaaagacacaaggttctttagtaattcatcatggttttctatttaaaattaaatgaaaacaaaattagataaatatgggtggcaaagtagaattatttttgtgaaaaaatggcataatagataattttccgtgcggtccatctttttctttatttctttttaattccaaaaaatcagaaagtttttacacaaataaagataatcagtttaaattcttttattcaaaaaaaaatgttttgagaattttaagatgttaaaataaattaatcaaatttaataattattacatctgtaccataattgtaatattcatcattcacatattattgtaaaccgctcttatgcaacaatcgcatgtgttccgcataatgcgtttctctcgtgtaaaccgcagttaaaccgcatcgcactacttaatccgcttgttccgcaccacctagtccgcttaaaccattcggagtaagggagtgaatgtgcagcgcggaacactgtggttcccagtgtggtaa

SEQ ID NO: 37902 - DNA, 471 bp, Arabidopsis thaliana columbia
tgagtaggtcgaataagaaagtgacacgtgtaattttagtctgttacgttaatcttgttacatcaaagcgataaatatttctgttggattgataaccataaatgtgttttttgttcttttctttgttagtgtttcagacttcagagtatttatccttttgctatttttttcaactaaaattttgtaacggtcgtttaatactatttttgtttgttgggctcatgtttagtattgggctgggccttgctattaatatacattggatgaaattgttgaattccttacaagttgtgaatgttgttacctaaaataatgttcatgaggtttaaatctagtaataaattatgaatatagtggtccatgatattgtcaaactttaattttgttgatatcatttttgtgagatctctaaggcaatgtcaattgttaattgcacttatgtatactagagtccaaataatccgaatgatg

SEQ ID NO: 37903 - DNA, 561 bp, Arabidopsis thaliana columbia
tgctatacagacacttcaaatctgaatctagcttatttttttcacttcaacgtcaagaccgtatttgcttttctagatcaaaagtgattgttgtttggtattcactgaatactattcagagtgaagattgcacgctgttttgcgtttttactagtctaaatggttcgggttgaatttgataatcggaaactaagaaaaagtaatcgttttaaaaacgggactattacaaaagatgccaacgaacaatatgggcctctaaacttaggatatggcccaattaatattgatttaccctcctaaactacagactagtctaatttttttaaccgttaatagtgttttatttactacaaaaacaacgttgcaccccaaaaacaaaaaaaattaactgcacaaaacgacaagaaacgtaaaatccaaattcgaaatgtagtcgttttaaagtctgtgaaatagatcaaattttgcttgcgttctaaggtactcatttcttgggcttttcattttgttctttctcctccgtcaaatcgagagagagatttggaaaggtgatcaagaata

SEQ ID NO: 37904 - DNA, 579 bp, Arabidopsis thaliana columbia
gaaaaggtccatagaagaaggagactgaatcttcgatggactactctgaaggatagagttaaagtcattaaagaacgacgaaaaaccttgtggatcggttggtccaatagtggaaaagaagtccggtgataccgacggcagagaattaggtcccggcgataaaaatcccagcatggtggaaacttggccgctcgaacccttgattttgatgttgttgttcttgatgatgatgatgatgatgataatgataatattgatccatagtcccttcgcctccaacaaatgtccctagttcgtttgagatattagccttctctgtaacagcaaaccgagccgccggagatatcaacccatgagatgtatcaaccattgttgacgcgtcttttggtgctgacgtagatgaagaataggaggaggatgttgtggaggtggaggttttacctgtgagacgttggaccaatgtcatgaagttattagggtgtgtatggataatcctgggagatactgtgtatataatcacgggaccaggtggcggcagcgattgtgacggtcttgctgatgggtttgtagtggttgtgg

SEQ ID NO: 37905 - DNA, 569 bp, Arabidopsis thaliana columbia
attattgacgctaatgggttatataatcactagaatatgtttttgatataaggggaggccaccaatttgtcagacggaaaatgtttcagagttgggccaaccgaggtatcttcaaattcagtgatccaatttgttttactattgagcccaaaaattgaaggtgttgtagttttgtcggatgtcaggatgtgtactgagttaagtcagaagttccaaaaatatatgaaccaacttaaagtgacgtggacataacgagaaaatgttgtaacaatatgcagtatatacttataagattgtgataattactaatggtgatttaaaggtatttctaatctgtgaaatatacttataaggttgtgggattgaatgggagagtttaataagtctctttttgtgttgcaaaataatcagcttttaaaatacttattacattcgaggcacatgaactatttgtctatgcattggccgattctaaatataaatagatgttggataatagagtttaaagaattttgagttgtctaatatacagattgagaggccaagtgctagattcaatatgtaacaat

SEQ ID NO: 37906 - DNA, 493 bp, Arabidopsis thaliana columbia
ctttcacatcttcttcacccaggaaggctcttgtttctggaccgacgagacggtttggtcagagtagccatgatgatgtggtgaaaagcgaaggaagtaatggatctcctagtacaagtccagcagctacacttttcaatgggattaagaagagcacttctaaatggcagctaaaagggaaaaggaattcaaggcagatgagtaaaaaacaagtagaaagaagaaatgcgtacgccgaagaagccaacaacaatgctttacctcattggtctgtctctgatcaaaagccacgcagtcttttcagcgttggcactcaagctatgggaagaaattctgaactgtatgacgtgaagatcgaggtaaaagctaactataaaccccgtaatgttccgctgatttcccttaggagtaaactgaatggtgaagaaattgtcgggcatccttcagtggttgaagtgcttgaagatggatcatgtggccacattgtgagtag

SEQ ID NO: 37907 - DNA, 617 bp, Arabidopsis thaliana columbia
tctaacggccgccagtgtgctctaaagatagccccaatgaaatcaccggcttccatgatagcaagcagccgatctgcccaatttgatagattgccgatcaataattcgttaaagccgagcataaacaaccgacccttgtaggatcggaagctcatatagaaggcgtcggccacaacaccatgcatggaagtatcctcttcattaaattgctcaattaatgagtgaagttgagcagaaaacaggtccacatggtaaatatgtcggttcaacaaatcaacagcattagtcacgcgcatcgtgtggtcctctagaattagcatttgctgtgtgatagtcagaacggccaacaccgagcgactcaaccattgtacggccacgatagcctcgtctgctctccatctgcttcggggccggaattctaagctcggagggcgatctcttgatgaatcatgtgattccacctccagcacatccagtattgttagtaagtttgaccagcagtacacgagtttagtcctggatatctgcgaatcgcttcccttcagtctaattgccggaaaccaggcaagagcgcctgtcattgcgccatgagcggcgacctctttcggacgaggtga

SEQ ID NO: 37908 - DNA, 769 bp, Arabidopsis thaliana columbia
cacaatacgtattgaaccagcccctgccttcgtatgccataatggaacggagttacacgcgatgcacaacatacggatgggatcctcatgatttggctaatcctagttatctaacaatcaaagtataatagtcgggcagcataacgtcaataccaacatcctgccggcataaaagttatacgaccacgactttatactattaagcaaatataaaccaaggggtttgaacctcacatggtttataaatcatatatatgaaagttggccaactctctccatatgattgacacatcatcactttaccatttgccatgtgtctattaaataattaatgtaagctcttcaacttctaatttataggttaatgatatatttattattttattttacatatttaattgtattatcactaaattcattttaatattacatgatttttcaataaaaccattttaatagttttcttatacccgaagtttgtttttttcttgtaatccaaactcaaagtatgagtgtataatagttgtggattacttaatgatttgagtaagttattctcttaaattgatatttatattctcttaaattgatatttatataataaaccactgagtgtgaagaatacgtaaagagctccatcatcaaattcttaggtttttagaatccaacactaccctctgttaaattggtttaagatcaatgttgtttctgaattatgtgtatgatgcattgttgagaatgttgttagaattttttttaattaaaattg

SEQ ID NO: 37909 - DNA, 365 bp, Arabidopsis thaliana columbia
tgatataaattatttgcataaattatttgcatcaccaattattaagttacttatttaaatgatgcaaaattatttaaaattatttaacatcatttataactaatgtcaatatttataataaaagatgtaaaataacgttattgttgtagtgtgtgttcatgccatttcatgtagcccgagaagatactatcctctcgggtaaaactcgatcatatagaagacttgtcgctccgtgcatatatgtcagactttcagggttgatgcgtttgaactaacgatttcccccttttcctcgatcttggcccccctcccttcgctctattcccttgtcagtgtcccgctctctcgtcctgcttccctttccc

SEQ ID NO: 37910 - DNA, 318 bp, Arabidopsis thaliana columbia
gaggattagaggatcccctctcaatccttgacaagtaatacctcttcatgatttctctttaccaaacttgcgtttctcaaatctattgaattaaataaatagagatacgtctctaatcatttaaaaattcttccagttcctatcgtttcggatccaattatctccctcactggtttaagctttgattcccgggaaagggacatgggttctgacggctggctcgcgttccctctatcacctactctctcttctttgccgcctctcattcactcttcgcctctttctcatttcgctctcggtttggtcagcggcagtgtc

SEQ ID NO: 37911 - DNA, 510 bp, Arabidopsis thaliana columbia
cgactctaccccttttataaactcacgagcaaagaagttaaggcttaagggggaaagaaaatctgactatttatccgatgaaaccaaccaaatatacaataataaaaataaatatacgcaaatcatatactcgaatgacaaaagaacaatgtatcaaaataaataacgtaaataaatccgcacgatcctcttcttctctatatccatttcaatgccctgttggaaactcgcatttcccatactctacaaacacataaccaacaaaaaataattaatttagtttacgtttccgtctatacgtcacaatttaattataaatctgtatacgtaagtgaagcccaaaaaaataacatttgttgttaaaccacccaactcccataattattatctaaccatcttccaactattaagaacgtgaaaataactatactgtatatgcaaaatacttactaatcaaaataaaattttggagaggaaagatagggtacttactaggaggttgcgagacac

SEQ ID NO: 37912 - DNA, 448 bp, Arabidopsis thaliana columbia
  unsure (1)..(448): unsure at all n locations
ctaaatttacctaaattcctcgatattgtacaactatgagtaaaaatgtgcaattgagcacaactgtacaactatgagcaaatttgtgatgttatttaattatcatccctcaaaataacgaggccacatcagatatttgtagatattcttgatatttcatttttctatatttccatcaaaacacttagattcatattaaaaactttatttttcaaaacacttttttttaacaacattcttagattcatagttttgtggtaaattttttgataaaaatatttagattgataaaaaaattcggtgattttttggatattgcataattaggacaccatgtgattaaataaattgaatttcgtttttttggccaatgacatagttgtcacgagtgtacagttgtactaaaaattagattcatcatgcacaaactctanaataataaatatgt

SEQ ID NO: 37913 - DNA, 719 bp, Arabidopsis thaliana columbia
ttttagttctgatgatttgagttgttcatgtgtagacttcctttcacaatgctggtcctacggaaagcgctgaaattagtctggggacttcctaaggtgataatggtggcacatgctttcacagtagtcatgcttttgtggatgtctctatggtcttttggagcagctggtgttgtggcatcgagcatgggcgatgagggacgatggtggcttcttgtggtgagctggcaagttttgcatttttactcacggtttctgttttctgctttaagtgtctgaaagtaaacatgtttagaattcactcaatcattggaacatataatatatatgcaggttctttcggttagcttattctggacaggcgctgtgctatgtaacactgtccatgttatagtttctgggatggtgtttcatgttctctttcactgtggtcaagaagagtcatcatcgttgcctcctagctctttggtagactcacttaggtatgccgtgacaacatcttttgggagcatatgttacggttcactcttcactgctgccattagaacacttcgctgggaggtagtctccagcatcctttgctgttcgtaaaacattatcattgctcctcttgttaataacattagtctgcaactttcttttgcagataaggggattccggtccaagatttgtggaaacgaatgtttactttgctgcgttgatttcctgtttcatctag

SEQ ID NO: 37914 - DNA, 521 bp, Arabidopsis thaliana columbia
gctttaggtctaatatatatgttttatgtaaatgcacatgctaatcaggtttaaattccataacctggtttataatttccctcttagttaacacgcagttccatctacatatagtaccttctaataaattgttacgtcccgagaatattatgtgtaatagacagataattcgaatatatatactcaatacttaaaggtaatttgatgttcccttaatatgatccatgatgacgataaatcttaaagttaaacgaattggagtttttttatttctgaacttttatctctctggtaatattatagacagtggaacagttattggcttcattctaattgattcttagatcagaatatcggctttgtattatattttctatttagaacatttggacacaaggatcaaccaacaaaaaacaaacttatagtaatgttacatactatgaagaaataaattaataagtctatcattaacaataccgatgcatcaaatattcagtttcaaaccacaaaagaaaaaaacg

SEQ ID NO: 37915 - DNA, 396 bp, Arabidopsis thaliana columbia
gcgtaactacatctagttcaaatttggtaatctctaatatgaggttctaaattagcaaaatcatattttaaagaatttataacatttagccatatttgtcttaggttccaaataatacatagttccaaaggcaaataaactgtcttttatggtttagaaagatttctgccttgagagtaaacttcttacaataaggttaattccaagagatttgattccagtttatttctaggaataacacaaagaaataatcatttttggtaaacaagataatcagaactcaaacggaaagaaatatgtcagtctgtcaaatccattaagaaaattgatattcacttctactctatttagaaggcacgtcaataattcagagaaatagaccaagtgcatgcgata

SEQ ID NO: 37916 - DNA, 456 bp, Arabidopsis thaliana columbia
gtgatctcatcagactaaatctaataacacatccactaacaaattcgcgtatgaccgtagataatttgagccgaagcacatttgcttagtaaaaattgaatgaaccacaacctaatttatgtatttttaatgtcgttttcgtttgtagaaaaaataattttgacccccaaaaattatattctttatcaattgcaaatttcaactcaaaatgatacaaaacttccacacaaaaaaaatgttagttatttacttttccaccaaactattattgtgtttaaagtagaaacattatttagcttaaagttgaaactatttatactacccttgaaaagacaagaagaaatctactattccataaaaaccaataaaaaaattatctataaacaaatccgtgactgttgtggcggcagggatgctttccacgtgtacataaaccattggctacactatcccact

SEQ ID NO: 37917 - DNA, 545 bp, Arabidopsis thaliana columbia
gactctagagaaggcaaaacgtcgtcgtataagcttttcatcgtcaaacaaaacggcttcgtttcaaggctcacacttgtctttatttatcacttcatcttctccaaagccataccacttgaaacctctctctctggttgacccgataatttctctctcgcagacgcacagatctctcttcgaatctgctagatctgttccttttcttacatctgtattgcgaaacctctggtaatttcatactttcatgtctctccgtttcatttcgattttcgtttcacagctagggtttgctttttgttacatcgatttctgattttcctggtgttgttgcctcttcctcagatcggaaggtttcgtttacagatctaccgatacgagtttcgcagtatttccgagttccgacgtatgctttgttttcagatctgggtttgttgtatatctagaaatggcggagactttgaaagaagattcgattatgattcgagaggtttgggattacaatttggttgaagaattcgcgttgatcagtgagattgttgaca

SEQ ID NO: 37918 - DNA, 345 bp, Arabidopsis thaliana columbia
gctctagatctggaccatcaccaatggcacaaacagtttgtactcaccgaatttcgttgatggcaagagtatctcttggaccgtctgttgcacctattccggtgagttcgtcgacggcgcacgacgtctctcaaagctgtctagttgctccccttgctttcctcaggtctgtgtcgttcatcaacttgccaaattcaattctaaagatgtcctgctcaattatgactggtagtggacgccacgttagggtagtagtgatatctttaggctggatttgtcactatcaatcacgaaacctgttgaatctagaagttttcttgctatccgatgaaaaattatctttga

SEQ ID NO: 37919 - DNA, 447 bp, Arabidopsis thaliana
gagataagaaggcattccatctgcttcggtctcgtttcccatgtcagcttcaagagcatcaagctctgaaatatatcaaaagaatgtaaatgatatgagagacgcatagcgagcaagcgattgatcttaaacttccaattacaaaacaagcactttacctcccatgaggtcatcctcgtcaaggccatcaggaatattgtagctcctaccaagtgattcttgaatttcagaactaacatccatcagatccatcatctcgtcttgtaaattctgtaccatcaatagatcgtagtatcaggcaaatcaaataccagagaaaagcttgggacaagataaaaccaagatgttgttaagtaacttagcaacgtacatcaatatcttgaatcttgacggttttcatcattcgctttcaactccgttgttcgcagattttagtgctgtcatcgt

SEQ ID NO: 37920 - DNA, 442 bp, Arabidopsis thaliana columbia
tgagctttctcgtgattgatgttaaattagtgtgttgcaagcggagtttgtgtaatggtcggaccttagtcattgtatatgcagagagagctggttatgtaaaagtaagaatcagtttgaagttattcaagtgccattttcattttatcctaaacaaaaatgaagagtcaaggcatgtatgtagtaatgtcttgttgtcatgaacaccagagaaaaaagctcatgggctgacctggcccatccttgttagggacgtgccggtttttatatgcatttgtatattaagggcagatttggtctatttagtactaaaatgaatctgctagtcctggtacgagactggtttaatgtcaagtccgagccatgttcattgttatttggtacaagagtatgttatacgagtgcgcggactaaacgacacgtgaccgaatgagcgagtcca

SEQ ID NO: 37921 - DNA, 546 bp, Arabidopsis thaliana columbia
atttcttcaaaaccagaatctgtttcttctcatcatcaaaccatgaacaacaacacaagctctctactacaagtacgcattgaagcaaccccaacagaaaaaaaaaaactcttgtctttgagatctttgtggatgaaaaaatgaaagaaacaagacaaaagaacaaatctttcttcttcaacaacttgacttctctcgtgggtaaaaaattaaatctcttgaagcagttccatcactgtccaagagagacactttggctttcaaaaacagaagagagagagagacagaaatggttagtgagagaaaaagatatgtgtcagagagagaaaagaagagtgcgtgggggtgaaagagagagagaaaagaagaagaaagtgagtaagtggtttcctcctcttataagagacccgacccgactccacccgacccggatttgacccggatccgatacagtggagagaaggaagaagaagagaggtcctactaacgagaattatgagaggtggtgtcagtccagagtcacttctttttgaccgttggatttga

SEQ ID NO: 37922 - DNA, 596 bp, Arabidopsis thaliana columbia
ttttgtcattttacgaatgtggtggtgcgatgaagccaggtttggtcactaaatgagcggaacggagaatagccagcaggactatctggaaatgaaaccaaacctaatcatttaacaaagtataatcaactctagccttgcaattatatggctaagaaggaaaaatttagaccataataagagtttagaacaaacaggtagaagtagtagatgtattaccttgatgaaagaatcagagggcgtaaaagcttatacagaatctcattctttaaatctgtcactaacttatctaaattcttaaactgttcacggacattgctgctagtgctctcagtagtataattcctaactctgtattagtgctctcagacgtggttattacgaaatgcaggcataaaccaacccgatcatacccatcacattatcagaagtcgccatcaaagagatcaccagaaatcttgggaagcaaggaacctaagttggtctgtcaattttgagataatgggcctatctcaaaacagtatcgggctcgtctgcaaaataagaaaaaggcctagaaagtcggttattacacgtggcatccttttattgtatat

SEQ ID NO: 37923 - DNA, 819 bp, Arabidopsis thaliana columbia
ctctggttcgaatacgctccactcatttcctccttatacactgaaggattcactcctccatcaatcgaagaactcaccggaatctccggtgtcgaacagaacagtctcatcgtcggcgcgcaagttcgagactctttagttcaatccggtgccaaaccggagcttatagctgcgtttgacacaaatggagccgagcttctctacgagattcgtcttttaaacacaactcaacgtgtagctgctgctgaatacattgttgatcacggtttcgatacgaaaggagctggagatcttgcgagacgagttaaagattttccgcatcgtcgtggcgacgttggtttgggagactttgattataacttacctggagattgtttgtcttttatgctttataggaaaagtagagagcatcggagtccgtcggagattcgaactacattactcgaacaagctcttgaaaccgcggtaacagagaaggcgaaaaaggcggtgttgagggagttacatggagagagtgaagaagagagagttaaagaagaggagataaaatcattcgtgttcctgtagtgagattaaggtttggagaagtagcgggagcgagttcggttgttgttttaccggtttgtaaagcagaagaaggagaagagaagcttcttgaagcaccaatggagtttgaaagtggaggagagtttggtgtagtggaagctgagaaagattggagtagatgggtggttttaccgggttgggatcccgtggttgcggttaggacaggagatcgggaagggtcgcgtattcctattcttgttatgggagactgtc

SEQ ID NO: 37924 - DNA, 455 bp, Arabidopsis thaliana columbia
ctaaagggtcgatgaaagaaatccatgggtgcgctaaaataagagtccgatccgcgaccagtaccagacccccggatgtgcgcttgctggggggattggggggctgacatatggacagtttcagcaacaacggcctgataatctggcagatcgctgtcatgtggacgaacagatgaacggacagcggtggaatagcttggcacgcgactgagcgtctccaactcagcagagtgggggatgaacggtgttgccattcccgagggtatgttgtcgtggacatcttcgtctgaggctctgcgcgaaagttctgggcttccgggtgcgtgggtgttggagccgtgtgtgttagagcccgaagggggcccgttgtctgaaggaacaccgagatgatcatgttctgatgcctgatacccgaccatgtccgcgcaaatcaaggtttaccaagtgatggtgca

SEQ ID NO: 37925 - DNA, 628 bp, Arabidopsis thaliana columbia
gactctagatgtagaggatcccctaataaagtacttgatgatgtatatgtcgctatcaatgagaatgaccagaggtttgatgatgattatattgctatcaatgagaatgaccagaggttagctttggctgatatcctaagaatgaggatactttgtgaagacagttatgcaaatgagaagccatttgcaacaactcaaattttgactgttacgataacacgtacatccgtacgactataagatttcatgaagtgattgcattgttttgaagcttcttaaatctcagaagctacataaagcagaagaacgtaagctagaatttcttctgctgtaagaatacactccaatacgcaaattaagttgaaagaatgattacaataacggaactcagacttcaaagttgaaagaatggtccaattgtcaacatggaagctcccaatagccgagatttgaatcaaggtgatgccgtctactcgagttagtagaaggagaaaaaccaacgaacagtagtgaagctttctaatcgtctattgcacacagacgctctggaaaaaaaaccatgaaagagtgaacatgtcagaggagcagctagcatttcaaaagaagaatcttggttggttttgagagt

SEQ ID NO: 37926 - DNA, 1100 bp, Arabidopsis thaliana columbia
tttataaatctaatatacaattaaataaataattcaaaattttgtttaaattggttttctatttactctatagtttttaagacaaaaatattttgttttcgtaatttaaatggggccccggatttcattggtccgggactatcacaagaacagaatataaggtgataaaaagaaataagattgtaaataacttttccttttggtaatattttttttttttgttcaatccttttggtaatgtgtaaaaattcacaaattatcaaaagaaaaagagtggatattgattttactctttacttttggtgaatgcacttttggaaattgattttactctttactgtatttgggaatatatgcattgcaagttacaagtcaatttgttaataaaagtgttgaatgttttgtttcatctacattattattcttcacctttgttctaccgggtttaggagtagaaaacaatcaaatggattctcagattgttaatcttctgaggtctaaacagtattgtgggcctaggccaatacattatttcagtatgcttggcccaaattagtttcgtataaaataagttttaccgtgaggaactaaattgtaaaacagagacggatacggcaattgtatcctttagaatgtcttcgtcgtcttcttcccctttccctcaggctatgaagaacggagagtatagaaactgggcggactaccgccggaactgacgtcatcgatcctgctccgactcggtgcgattgagatacttcaaaacgctcagagagtgtgcaaatcgtggcgacgcgtctgtcaagacccatcgatgtggcgtaaaatcgacatcagaatcaaggaaaacttggtaaactcggtagaattgttttacgttatcgagcccctgtgctgtcgcgccgttgatctcagccagggaggcttgcttgagatcaacattgattacttggtgaacacttcgttcctcaattacattgccgacaagttctttctaaacctaaaactcacaaacacgcaaattttgtatgaattctgatatgtttaatgtttacatagtattcaataatgtttatcggtatatatctgcgagtactcgagac

SEQ ID NO: 37927 - DNA, 258 bp, Arabidopsis thaliana columbia
ttatacttaatgcaactaaattgattttttttttttttttgtcaaagatgcaactaaattgaataaaagaacaaaaccaacagattaacttttcatacaaccattcccactagtagttagttcctgtcaacgtaattctagaagcaggaaacatagagtaagagagaatagaggctactgttatgcgcgtaagtaacaattttctggagtgagcttcttcttcttctttcaacggctttcttccgaacgcgtgttcct

SEQ ID NO: 37928 - DNA, 574 bp, Arabidopsis thaliana columbia
gtacaagtgttagaatattagaaattaagtgttttagccttcaaagtcagagcgtttttgatagcctaaagttgagagcgtttttgtgcgtgtcctgtttgtttgtcctttgaggtgctttatataaggctttggcgaatctcctcccgcgatattctcgaaagatttccaattatcttagagtcggtgatggagattaactttatccttagagaatttcgcgggatcttccatattcggcaatatctttagagattctccagtatcacttccgcgttttccggggagaaacgtttcgactttacatcggttctaagtcttctcgtcggaaacgaagtttctcccgagccaggtcaagttggtcctttggctgtggttgggcggctcgtctcctggatgcatctcgagccgagtgaaagttgtccgaggcgtttcgagatctgcttcgggatggctctggaatgactcccaaccacgttttaaggctggctcggacggctccgtggtgatatctgaggcgttcaacgccagctcgggatggctctttgaagtgatatccgaggtgttttagggc

SEQ ID NO: 37929 - DNA, 554 bp, Arabidopsis thaliana columbia
gatttgaattgttattgtacttggcggatcttttgtgattctaggtgcaaaaggatgagttagagcacatgctaaaagagcttgatgcacatatcagtgtggctccattaaagaagatggctggaggaagtgtgaccaatacagttcgaggcttgagtgttgggttcggtgtagccactgggattattggtgcttatggagacgatgaacaaggccaattgtttgttagcaatatgggttttagtggtgtgagtatctcaaggctcaggaagaagaaaggttccactgctcaggtctgttttgtcaaactgttaaattttgcttcttccttattgggaagagttggttttgattggtgttgtttcttttagtgtgtttgcttggttgatgactctggtaatcgaacaatgcgaccatgtctctcgagtgctgtgaagattcaggtttgtgtttctaatttttttgggatatatagttatattgaattggtttgtcagtgagaaaggatggtaaaaactatttctctttcaggcagatgaattaagcaaagaaga

SEQ ID NO: 37930 - DNA, 660 bp, Arabidopsis thaliana columbia
atttaggttgacagtctcttggcgggcacccactcgttattccatcattagagtttgagtttaagaatggtttgataacaacctagctttcattagatctactaaccaatagtttcctgagaataccctgttcctagctctttattaaatcgtttacacccaatcaatctgctgttttcttaatttcattttcttactatttcactcataccctgctagcttaatcttgacatttaactcactgtttgaaagaagaactccgtgaattcgatcctaaaataatgcaattgatctcttatttgagagagtagttctaggtaatttgaaccatatcagcgagtcaccaatatcatggggaaagttacaaagacctttaagagcgatgctatcgtggttttgatcatgggcctaaagcaggtccaatagacccaatttttatcatgcttaatcaagtattgttatctttcttttttttgttcactaatgatttggtgttcacttctcactgatataattcactttgaaatacaaaacactggcaagggccgagggaaagtacatggagactcccaaaaaactataccaaattaaggtgaaacaaacaaataatgttatttatcatatgttatgttattaaagaaaatacaatgatactatgtt

SEQ ID NO: 37931 - DNA, 644 bp, Arabidopsis thaliana columbia
aggttttcagtcaaactttttttgttatttctttgcttgtgctacaagtttcaagtggggtgatgctatgctattcctttaaaagcttatgtttcgtctgattatccacaaagctctgttcctttgatttaattcactgtttttgaatccttcatatttcaatttcagggggcgatttgccaaaacgatgcaattgtttctcaaggatatagttccagcggcgcagaaccaacattggcacgcgtttcatcatcctcgacaagccaaatcgtctgcggcaaacgggaagaattattgtattgcgttggcggcggatgaaacggctgcggttcacatacagctgtggggagatgagtgcgacgcgttcgaggcaggagatatcgtgaagctcaccaatgggattttctcatacgtgcgtaacagtggacttattctcagagctgggaagcgtgggaagatggagaagatgggagagttccggttgcgtttgtcgaaacccaaacattagtgagatcaatggatcctgatctgagaatccaaacgctatatcagagcggcgtcgttcagcttatcccgtacttcctcctttgccttgattaagattttggagttgatcactgataaagttttgttgcgattgatgt

SEQ ID NO: 37932 - DNA, 635 bp, Arabidopsis thaliana columbia
cttgcaaaaagatagggagagtgatagctctctgtaaaaaattgtgaagacagaaattcatatatatattgaaaaaaatgtgagaaaaatatgagttgttaaaagaaagtgtagataagcttatgaatatacttctatataatatcttatttctagaagagctatactaactaatgttgcgaagataaacgaaaaacaatagtaaatttacgggtaccaaaatgagaaagtcgtcgaagttatttcctatacgacaattaatttcatacgtaaaacgacgtcattttcctaaacatctaaagataaagagagagtcatgaaccaaaaaaatgttcttttgctaaatattgtaaaatctaagagttgtataaaggttacttttagttatgtatttagattgttactatttgtcatgataattttaaaattcaaagagtttataatattaacaacaaatagatatgtaaaatcatattttcaaaattttcaataaaatattttagtcacacaaaaaactgttaaattttttacaaataaatccacgcatgagttcatagcgagtagataaatagagaaacaagaatgttaccagaaaaaaactggttaacgtattttctagaattaacatgtgatgt

SEQ ID NO: 37933 - DNA, 431 bp, Arabidopsis thaliana columbia
gaattgttaccagtgtttggtgatggtgctggagccgtgtcctgtggatctgttagacttggaggagatggagggcttgggggaattggtgctggagctggggcatggtgatgccttttgtgtttgtgctgtctcttgtgcttggtaggagccggtgctggagctggtggtaaacttattggtgatggcgcttgtacagggggtggggaaactggtgcaggtggcggtgaagctggtgcaggaggtggagaagctggtgcaggtggtggtgaagctggtgtgggtgggggagacgtcggtgctggtggtggtgatacaggtggtgttgagacggttggagctgaagcgggcgggctttgtggtggttgtggatgcggagttgcggggcttattactggtgcaacttttggagctggtggtgaagttggagt

SEQ ID NO: 37934 - DNA, 439 bp, Arabidopsis thaliana columbia
gtttgaccaaatttgctaattttctctcttaatcataattaggggttggaattatgctttagtttcgagtcaaatttgatttggttagatgaggaaaaatactactaaataccaaagtggaaaatattcaactaacaacgcaaagacaaaaacaaattcatgaaggtctaagaaacttttagttttaaataacaggttaaccctcctatttagcaggaaaaagaaaaatgtaaaggttttaaattcgaaagtagtgtattatgtataaatagtcattaaatataatactagacccccgatacttgacatatcataatgattagttattgagatatcaaacacagagctcaatgacttacgagcgcattgctatttggatcatctatctctgcgggggacataatctttaatctcatgtatgatctttgcctcaaaattt

SEQ ID NO: 37935 - DNA, 548 bp, Arabidopsis thaliana columbia
caattagattatgatacgtgtacaaataaatttttattttcacacgtgttagcaatcagaattatgatacgtgttacagccaattagattataacacgtgtataaacaaatttatgttttcacacgtgttaaaaattaaaaatttaacatacaaaagattatagacctaataccacacaaataaaataaatagtcaaaactttagaaattaagagctttcattaacatgaaagaaacaaaaaattgtttattttttcaaactctcttctcacgaaaaggaaaataatcaatcataattattcaccaagttgtgaatattgcgacggattgcaacgatcccggttactggttggtcactctgatacttaaaagagtaacatttttatccatgttcgttggttgcattcgttaaacaaacaagttgtgattattatcgaccattgtccaaggaaaaataagcattcattatttatactaggaattaaatatttgccgtctaaactcaaataataaaaattgggagacgaacagattatagaatatttgtg

SEQ ID NO: 37936 - DNA, 509 bp, Arabidopsis thaliana columbia
ccttgaagatgcacaaaacattcttaaaaaacctctaatcctaggagaattctgggaaaccaacgaacacaccaggctacactcaggctcagagagacgcagtgttcaacgcaacgttctgacaccatttacgagtctgctgaaaaaggcggtccagctgcaggagcattgttttggcacgttattagcgatggcatgaacaactttaaagaccccctctccattgtacttagtgaaaattcgactacgggtaatattataactgaggcatcacgaaagctgggtttgattcgtggaaaaggaaagttatcctgaactaaaatttaaagagtcttctgtaataattttgcaacgatcataagacactcagttatacattcaccgaagtgtaatcctaaagtttagccaatgccagactaaactcagttatacattttataaagtctcagcattataaaagcattcaatgagaaaacatgtagaagatgatgatgcaacatgtgtttaga

SEQ ID NO: 37937 - DNA, 395 bp, Arabidopsis thaliana columbia
tttaaaaaggtcataaaatagttcattttgtggtagtctttactctttgtggataatgatttgaaccatacctgtgtctttgctccttgatctttatactaatttattgttctatcctctcactaacttttgaaacttatgtcctgggaccttttctcatgtcagtgtaggcgctctccgtcttctgcggagaataatccggtgaggtcgaggagcaatcgcaatcagttgattcatcaagaacaaaccggaaactcgtcattcccctatgcacatgaagtagctgaaattctggaagctactagaagaaagtcttcggctgtagcacgttctgataaaccccttggagatgagcccatattgtctcaatatgactctcaaaggtagacagcatg

SEQ ID NO: 37938 - DNA, 965 bp, Arabidopsis thaliana
tcagtcgaatacttttagtttatgtttcagactttcagattttaagacctctttgagttcgagtattacgtttgagttttaatatgattctgtttaaactctattttggttttagcatgtaatttgacaaacaccaagcaacaggtttgttgaagacttcctctgtgacatcctcaacattgaacacttgtttaagaaacttgattttgtagaagctaaaggtagagacttgtcgttctcttcatcgtaagctattgaaatgttgaaaagtttataaattttgaatccttgttatgtttatgtagttgatctaacttgtttgttttttcattttttagattttttagataagcaatgatgctaagatgaagagaacgatgctaaggtcatagccttcaggacgtatcagtgtttcacacgctgttgctggtgcttctagtgcttgtttgttggctcggtgattgagagattatgaatttaatcttctgcttccacgacaaggttataacagccaatctgctggacttgcatctgatgaagccaaaaccctgttgcaagcgacatgattcatgaaccacaagaaaacaaatagacagaggaagttgaaggtcatggtctgtgggccggcccgttagaccaatgggcaatgcggggcgggtatgggcttcgttttgtcgcccgcggtccttggcggaccggaccgctgcagaatgaagagaagcgaggtctgccacggacgcccgtttgggcgcgggctcgaccgtctgacactcctactagtcttcttgatatgtagtattagccgataaaatatccactcactattgaactgatcttaaactccttatgtaacatttctatgattgatgatcatttgggtaatgttgatttaccaacctactccgtataatttttcttttcgaaattttttctaagttaaatattttaactaacccggtagagtc

SEQ ID NO: 37939 - DNA, 523 bp, Arabidopsis thaliana columbia
tatttattatcgttactatagtattatagtgaattaaaattttaagcatcaaaactcaggggggatgaacttcactaaaatgatgtcaatatctcacgtggaccctttatccattccatggcccacacatgggtcccacttccccatgcacacagcccacaacatattcatttctatatttgttcctatactctcttttctctttttcttacataaataaaatactaacttattataaggattattattgcttcgtgtgttttcttctataagttacatcaacagttcatgaaatagaccctaatatagtaacctaaattaaatgccgtatatttcattatgtttccacgaagcttcctttgtgttctttgagttgacccatacacacccatcttacttcccatgcacctgcacatatactataattactcccctcaaacacgcattcttacaaatatattttttgttattccaaatacaaagtgacacataaaatcataatatcagaagtgacacttgctgt

SEQ ID NO: 37940 - DNA, 754 bp, Arabidopsis thaliana columbia
tttgagacgtgtatccaactctaatgattctgattttttttatgaaaaagaaggttgaaaaccacccaattttcaaaaaaaaattttaaaaaagagaagttagaaaaaagatgatgatagttcacttgttccaactagagaggcaatctcccaaatggagatcaagatctatggatgcggtgtttggttacacggcaagaatactccatttagactctaaccacactggtcagacgtattagaaaatatgcaatccttgaacaacgtttaaaaaaataattgaattaatgctaacatttgatttagttctataaaaacagaggaattttcacacatgcagtttaaaattcctatatgataacaattaaatgtatcttttacttgcaatatacaatattttatttcatgatttggttttcgtctaggaagttttaaaacaaaaacaacatactattaattaatctctaatatattatgtaacatattaacgacactatgacaaagccctacaagccaggtttgcatcgtgtggctaatgaatctctttcagaagtcagctacactcaaaaatctgtttttatttcaaatgctatgctaaattataaaaacagcttatatatatacaaaaagctatattttttttaatacaatttagtaacattttatttttaaaatatactacagaattatatttaatcgataaataacttaagtctaaactactcggttctttcggtttctttatggggaaatg

SEQ ID NO: 37941 - DNA, 628 bp, Arabidopsis thaliana columbia
aatggctgcgattgcttgcatttctccatcaggctaaccgttagatcgtcctgtaaccataatatatataaacctattacttatcactgtcctgtcaatttcactttaagcacatatatccaaggaaacaataatgtaaaccaggagatactcataactcaatccatattccatagacatttgttaaggaaaatgacaaaagttagatgagcagacaacgtagcaactacctctgtgtgatttggctttccttcagtattcaacatgctagagagcaattcgaggctgttccgtgtaatctcaatctgttctttcttatcctttatcgataagttcccaaagttatagtcaagaccatcatcgtccccaagagcctgttcttgattaggaaccggatagctaccaggtggaggcactggaacaggccgttgcataagagactccagagaactttgtcccggcattgaattctcttcacctcgagcgtgtaatccattttcgccttccaagctctatgaaacaaaagacaagccggagattataggcatatgaacaatccatctttgcataataagcaaataagattcagagagatttacgatataagtctggtggaaacaggaagata

SEQ ID NO: 37942 - DNA, 504 bp, Arabidopsis thaliana columbia
tatgcagaatgaacaagttttccgtgaattgtcattgtcattgccaattgatgtcgcatttttttctgtatagtccaatttcttcttaatttctagctaaaagatgaaaatggctactaactaccacacaagcgtatattggaccaaatatctataagcgttaatatcatcaaatcgttatcaacgacccattattaattgtggtacataagaaatgttaatattggtggtgtttgatattattggtaagatggataatttcaaacaagttttgtttgataccaacataagaacgaaatttcttggtaccaaccgataataagttggaagccgaaatttcttctttttctctctcctttttctccctgacctagttttctcgccccctcttctccccccgacgccggcctcacgctggtggtcggaaatttcttcctgctctcatgccgaagaagaaaaagaagcccattagaggggctgtcctggttcgtctaaatttgctgc

SEQ ID NO: 37943 - DNA, 533 bp, Arabidopsis thaliana columbia
ttttaataaaagttatgatcttttttctaattagagtttcaattcgatgaaaagaggagactttgacaagatcatttttcacagcacccagtaaacaaaaaaaaaaagagagaactttgaaatcaacagagaaaacccagagatttcaacacaaagaccaccagatcaaataagaaagtagccttatttacctgattatctggggaaaatcgacaagaaaagaagagacgtgaagcagagaggtttacttgagaagagagaagagatcagagataaatgggggaataaaaaaaagaagaagatttttgcatagggaatcgcaacgagataagacaggctcgatctgataatggtgacacggacgcagagtcagactcagactcggccgagaaatggccgatcatgacggcttctttttttcttttcttttttcgattagcgtgacgacttgcacaaatacaacaaaaccaaaataagttcgttggataagattttacgctattcccacgtggatttctaaaacatcaagatgt

SEQ ID NO: 37944 - DNA, 945 bp, Arabidopsis thaliana columbia
tcttctttttctttctatataaaatcctcacttcaccatttccgttgacaaagccaaactctttactctatctttatctctatctctctttctttctttctccattactctctttctctctttctaaatggaagctcttacctttatgaaattctggttaaccaacaacacaaccatcaaacctcgccgtgaaatcagaatctcagaaatccgccgtcgatttccaccaccggatcagaagatcccgaccttgacctctgcgaaggagaggattccttcttcgagctcaagatctctctctcggatttcaaaacacctaaagaaaaacagagactcgaaacaacaacaacaacaacaacgtactctgtttctaacaaaagcaaagtccttcctttcgttgatatctcttcaaaaccccaacaatctccgaccactcttttgaaatccggtcaaaagtttcgtgctttctcattcaagaagtcagaaaagtcaacgacgactgagaagaagaaagaagaaaacaaccgaactagtctcaacgtaagattcagagtcgacgatgaaacaacaacaacaagtttcagaaaaacagcaagcattgcgagatcacaacaaacagacgacacgatgttcgacgactctgtttcaaagagattcttcagtctcattaaacctttgtacactaaatcaacgaagaagcagtcatcgtcgacgattacatctccgacgtcttcaccggcgacgagagagaaacagaggagtaatattccgtcggggatgagaagtgtgaggagacaacttgggaagagtcggtcagcttctgcggcgatcggaggaatgtctccggcgaacagaatcgatgagtctttacaagttcaacaagatgggattcaaagtgcgattcttcattgcaagaaatcgtttcatggctcgagaggtatgttc

SEQ ID NO: 37945 - DNA, 751 bp, Arabidopsis thaliana columbia
ccacaatctgttgcttctaagtaaagacagataaatgtttcttcgtttagtttttaaagtcatgtcaaagatttgtaactctttcttcactgtatagcttttattattcgtgggttggtgataaggattaaaaaaaaacacatattctttatgatcatattcgctcttttagttaggtatgtgatgttattcatttcaatattaaaggctgataggttgacgttaaggttgagaatatgcaaaggttgacacagattcctgtcaaagaaagacatttaagaatttacgaaaaatgatgaaaatgtttctcttaagaaagtagagcataatgtcgaataagactagtttatatggttttgtatttttactaagtcatgtcagaaagaagaagaaaaatatatgtactgtgttatagccttataagtaataggtttttgcatttggtgagtacttggtaacagtaaaaaaaagaaagttatacgttacgttgtgaaatatgatcagattataatgtatattctttactttagttgaattgttgttgttgtaattcatctccacgcgtttgcgattagggcgcgtttgcgtttttatcaattttaaatgaattgacagtattacccttgagaaatgaacaagacaaatagcgatgtccactctattcattagctctgtctaatctctctcgatcgacgactgctctctctctgaactggagacggtgtcacgggacgaatctaacgccgggaaa

SEQ ID NO: 37946 - DNA, 908 bp, Arabidopsis thaliana columbia
cttccactgcctcataaatgtacagaccggtctcgtttcatctggccgcccttctgttttattgccttatctggcccttttatgtaccttggaatcttatctagtttaaaaaagattgtaaccttctagaaaaccatattctgttgacagtatatacatgtctatccaagcattttgaagtctcacaagctaatacgccttgatactctttgttttaaaaaccctgacttatggctgttaatcaaagttttccaagtccagttcgcagatggcgagcggatctgcggctgtggttcttcgttgctgtttctttggtggttctggctgtgttggccaattcagaaggtataaatctccctacttaaagagttactcacaggcgaaattccacaatcagtttattctagtgtataatacatgtagtggatgttgtataatgtttatgcttgaatgtcatatagctctgcagacgtgggatccgatgcaggtgacaattcttcttaaaagacaactaattctctgactttcctcttagtgactataagaatagaccaattctctattaaatttttcgtttaacaattccctcaatcaagaattctcttctctgtatttctcctctccatctttatcttacctctccgaaacgccttgaaccctcaaaaatgtccttcatcctactcggattcatatcttaataaatgtgaaccacttggaatccccattcgttttcctttctgcggcaatccaggattcaatctccactgcaacaacctcgataagacagtcctagagcttcctatgtccggaacatttcttgtcgatgaaatcaactaccaaaagcagcagatttctatcagcgaccctgaaaactgtatggttaaaaggcttttaacttcaatacttca

SEQ ID NO: 37947 - DNA, 485 bp, Arabidopsis thaliana columbia
atgtcgatctttcgccggtggtttcttcacaacgactgatggttgttgttcgattaaagctccgtttgatgagatcataagaccatcgttgttattgttgttgttgttgttgttgttgttaatagacatggttttcgatctgggtttagtgttttctttttctcacttggcttgtgattactctctctgtgagagaagagaagagaagaagctaatgattgagaaggagggagctggtggagacaggaaggagaagcacatgggtgtggtggggtccttttcacacagctcaccatctctggttttttttctctttttttttttgcttttttgagaggacattagttttgtcccgacgcggtggagctcacgcgcgttattactccggtgaagaagaaggtcgcgtggggacaaactccggcacgagaatttaacactaggtaggtgggtcctcctccggctgctacgtgcatttaaagagacat

SEQ ID NO: 37948 - DNA, 515 bp, Arabidopsis thaliana columbia
aatgatacaggactgctcagaaacttaatggtatgtactaaggattaatccttcattaacataaataaacattaaacattaacgataataaaagtgtgattaaagtgagatatatatagataggggcaaaagacagtaattaaaattcgaatctcgaacacaccgacacgcttctttgaagtggcattttaagtaaataactccaaaaacgaggggtattttaatttgaaactcatcactttaagtcatccccttaacaatgtcgtctaaacaaatggtccgttaacgaaacacctttctccattgttcttaaaaagtcatcttcttttttttttttcttcatacatctctctctctctcaaccctaaaaccactcgtcacgcgccacgaactctacaccacattccccactactagtgaccatccacctctccgtctatggcgtcagacgccgttaagtatatgccaatccacggcggaggaacaacagcaacaaccgccgccgacatcaagag

SEQ ID NO: 37949 - DNA, 689 bp, Arabidopsis thaliana columbia
tacctaatcttaaccacctgactaaacaagagattacctctagtgacccgcataagggcatcggacacggccaaaggaccgaatgagaaaatgttgcccgaatgcatggctagttgaccgtatgtgcccaaaaggtgccaaaccatcaaagggcaaagatgggcaggaatggaggcaggaatgggcacgaatgggcgaagatgggaaaagttgggcatgttgtagtgaagtttgccccgtcgcccgcggaaccgacatgagtggacacctcactcgcagtgccttacagctcaagtcaccaaccttagagccaaagttggctgagtcttgtagccgaagctgatagggcggtggagtgacacccgtcgccaactgtcgccacgccattgttcgagacacctgtcgcatgggggcgcagcagttgtccggaaatgtggcaggggacaatgctgcatagctgaccttgggtggactataaatgatgctcttctccaccaattttattttttgaaggcaagagagagagtgtaaggctgcccaacaaataactcgtccacaaccgagaaaacttgcccaaattcagtaaatcttgcccgtggtcgaggaaactctgtccaaatactggagaatcatcgcttgtgggcgagacaacttgaccatgagtacgggatcgtcgaccgtgatcgagg

SEQ ID NO: 37950 - DNA, 527 bp, Arabidopsis thaliana columbia
gtatttagagcaagagagagatacaatgtagaaagcaagcaagagagagagatagccattaaaaaggtgtaatctttggtttttctcttgagagtgtaacagagaagagatctcaagtgtgagactctttctctgtggaattccctcttgtaacttgcttattctagtggattccgagatgtgactcggcccagactttagcataaatattatgtgtgttctctcttcctttctcacctttctcctatcaaagtctctgttcttttctctgcatatattatgtttcatttccatgtgttggactctgttttgcatcaaactacttcagtcttggtttgctaaggtttaagctcaagaaagtcaataagtctttgagcctctgaaaccaaacaatatggaacaaaacatccttggaaaagtttatttaaatgacatagagaagaaattgcttggccatatatgaatagaccatatagtataaataaaatgctgtacaactggactccaagaaacaatacataggaatg

SEQ ID NO: 37951 - DNA, 741 bp, Arabidopsis thaliana columbia
taattaattaaaataactgtggcttacacccaaaccctaatcactataattaaaataatctaatcttttatatatcttatttttattagaaaaccctaatcaatatattgtaactctattctctcaattatggcatccgatgaaaataaaaatcaagaatcaaacataagtatcatctatccttttattcactcattagctagtgtaattttttaactatttcatggcatcgttgtttttattttattttgtattcttttgagttttttgattgaatacatgtttcgatttgttttctcgattagaaaatcatttggtcggacgagatgatatattctatttttatttggtcaaaaaatcaattttctaatatattatatttttatttatatcaatagtaatacattagaggggcgttggttatcccgtatataattactatcgcacccgctggtttaccagtcataaaacttccgcaaacgcacccattatcaaacgctcaatcagtcgttcaaaacgcttgataaagcttgaaaccgcaatcgcccatttctgcaaactcccgcaaccgcaacctgcaccccgctgcgtttaaaccagtcaggcccttaataacaattgtaaactataaaatatttattttatagatagatacaatttccaaacttttatgtacactagctttaaaaaataaattgttctcgcggtgtaccgcaggttaaaatctagtttaatttgata

SEQ ID NO: 37952 - DNA, 494 bp, Arabidopsis thaliana columbia
aacatcactgtcaccaaaagaatcaccgtcgttcggtcgtgacgtgtctggacctatttcatctctttgctcgtgactcgtgagtcaaatactcttggacctttgctgttatctgtacctctaattttgtgattttcagattccttctcgtttatcgagttggattctctgtatttgaatgtatttttgatagggtttcgtttggaaaccaatttgattctcatatttaaagtgtagttacgtggttcgtgttctctcttggggatgttcaccacctgttcgatgaaatgcttctacgtattagtttgatgcaatttctgtatagtttcgacgctctccgagcttgcatctagatattgatggttacgtgactctagattctgaaacgaacatttcaaggctccagaaacttattctggactaagtttatcacataaacaaggggatgcttagagccttaagcttgatacgtgtatgctcgcattgcagtaatg

SEQ ID NO: 37953 - DNA, 609 bp, Arabidopsis thaliana
atctgaaggtcattggggtaggcctaactggccaaactggcatagcaaactcaaaattaaactctagaggggttattagagatatgtttttaaccaaagagcagcaaggcaaccctaaaccccaaactcaacagacaccaaaaggtccaaggaaacctacaaataaccaatctgttactagtcctcctccggtaagctaatggctgagttgttactttttatttagctgagttatcgtcatattatacggctgagttatagtttttatttagttactgctgcgttatattgatatataggtctgagttttcgttatttaacgcttgagttttctttacgtttatgtagtcgaaagaagttgtagattccgtggtagagaaggatgctgatattgctgaggttggtaaacaattctgatattgatttcattgagaagtctcctcgttcccgccgtttacgctctacgacggcggcgaggagaatttccaaagcgatgacatcacccaagaagaaaggtaatgttcaggagaaaatcttacatgagctaatcgtgaaagagcctagctctagtcgaagataggctgctacaaaggtgcctcccaagttgac

SEQ ID NO: 37954 - DNA, 500 bp, Arabidopsis thaliana columbia
cagaaaaataaaaaatattgttggttgggaaatagtagaacaaacgagagagagagtgtgtgtggttacgatgaggagaagagacatagaggcatacactcacttaaaagcaaaaccattttggctaaaccgaaagactcggtcggagtctagagcctgtctctcccgacatcctctgccacacctcacgtgcatgctgcacccacactcacgtgcacatacatttttcttgtgttttagttattttagtaaaaacgatatatttattgactctttctgtaatggtggtagaaattgaggaattcacaaaagtcccaagtttttgttatatatggtgcatgcgtatgtatttgaggaaacttttgcaggatgcgtggatcaaatccaattataatttaattttatatagatataaaagtcaatagtgggaggtgaaaaaatatcaacaatgattgagtgttactctactagaatggttaattcgttttgatgaggagtga

SEQ ID NO: 37955 - DNA, 618 bp, Arabidopsis thaliana columbia
taatttaaaaatactcaaaccttttccacgggttcggcttttgtgttttgcttgagggcaagcaaaagctaaacctaggggatttgatatacctctatttgtactgtttttagctatgatttaggtataggtttaagagtctttttgttatttttatagttcttttttgagtcttttcagatacttagacgaatgggacaagaaaggagataaggaggcattatggagaaaaaactgaataaactaatctgaaggacgaatttagttcgagatcaatcgagtgtcgatcgacacaaaactaagattcgggaaaatcttatctccaccacgaaatagagcagcctccctttgtcgccaccttcgacaagactctcaagtccattggatttccacctcgtcgatccaagctaccaagtcatcgtcccttgaagatcctcatttttgtcttcattgctttctcttttctcttcttctcttctctattctctacttgttaaaggaagaagaatcataacctttggatttccaaagaagatctctaaccccttttacaaacccatattcttatatgcaatctcttattcatatgatgttgtgtctttgagtatgtgtgagtag

SEQ ID NO: 37956 - DNA, 554 bp, Arabidopsis thaliana columbia
tgttcctgtcaaaaactacaaatgtgagacactcatgatgagaaaaggtacaaaaaaaattccaaggtagagtttggaatattcatgcaccgttaaagattctctttacaagcagtaagaaagcaaccaaaatataaatgatcttgtagagacttatgcaatccatctacctatgtgactaacttcagccacaactggtgatcgaagcaaatgtaaatgataacaaaattgtaatgcaaatcttattaagctaacgtcactttcaacatcatatagtcgaactatccgttcacaagggaacgacgaaacgaaaaatctaaacaacctagcagcctaatatcatatcaacgagcatcccatttctactgatcagtacacagaatcgtcatcaacatctcgcgaaattgaagtcccaatgaatttttataaaagaagaagaaattacttgagggtggaagaggaagatccaggatcgatggaggacatctcaacaaccgctctatcgtgcgccaccaccggtctgtatttgctccgccgagacgtggcctgaccgg

SEQ ID NO: 37957 - DNA, 555 bp, Arabidopsis thaliana columbia
caaaatggtttcaaattagacatattaaaaatataaagatgatcaatcaatgtcgactagatgtctcaggcaaaactcccagacacctatttatacaaaacgaaattaaatgataatagacgggccagtaacctaatcgcccgacccatagagtgataatgggccgagatgggcttcgtgatccgatggagctccaggccgtttccaaacacttcttcttctcctcttctcttcattgttctcagcttgtctggttgagtgcggatttgagtcgactctgaatatgtggtcgagtgcttgatcgagtgatggcgatgattggtgaaggatatactcgaccagggggtcgagtgatgtcatcgagtggcctgagctgctgttactcgaccagggggtcgagtagatggaagaatggctccaatgtcactcgacctgggggtcgagtatggtgctggatgtactcgacctggggtcgagtatgtcctctagttccggctcgcttcttccagtttgctcgccaacagctctaaatcacctgaaaacaactcaaaaatg

SEQ ID NO: 37958 - DNA, 508 bp, Arabidopsis thaliana columbia
tgaagcagataacaaacaaccacagaccaagtttttttatatgtaaaagcagtacatagttagtccgatgcagacttgttctattgtctcaatccatactactacggattatagcttatgactggtaaactaaaaacggttaaaatcgtcaaaggatatgtacgtcctaaacatcgcaactattcgaaacttctcactctttgaattctaattttaactagttaacccttaactgtgaaattacattcgagatatattctttataggttctatacttccaatatagttagctaatatcatcagaagaagaagtcgacgtgcgtggcatccactcgcggactacttttccttcaaacttttacatctcgcaaaacctagatctacgccgcctttgattctccggtcatcggtgctcttcgccgtgattgggagaggcccccagtggctcactcagtggtttggcaccttctcgtcggcgatttgacgagttagcgtttcggatctagag

SEQ ID NO: 37959 - DNA, 532 bp, Arabidopsis thaliana columbia
tatgattatttggtttggtttcgggtccgatacaggttttttgggttttatgccagactgaagataagaagaagattcattgaaattgtcaaattgacatctgaattacaaaataaaccaaacaaaggaaacaacaatagacaaacaaaacaacaatttctccatattaaaccgcaacaacacgagtttctgttatcgctaaaagtgaatctccctagtcacgtaacattgttgctaccagatgattcctccaacgaaccaccacctctcttcacagtcacatacttctcaaaactcggttccataagatcggctttcttcaccgtcgatgtgaatctaaaccggctcgaatcagacctcaaacaagttctgttcgtcatagagttaagatcagccactgcttcaacaattgaacaagctttactaacacacaatggcagcgaaatcacgctatcatcaacactcttcccatgaaaactctgaatatctttcaacaacaatgcagtgtaattgttacctcgtttgatccaaa

SEQ ID NO: 37960 - DNA, 557 bp, Arabidopsis thaliana columbia
aaacgaaaatttgttttctaaatactaaattaagtatagaaaagtgtgtagattactattttagaatgcaaatatcatcaatgagattgaatgtgttgtattgaaatgtataatataatataatgcataatactgaaattttgtttaaaacaaaaattaataaattaaatagaaaaacaacgagtagattactattttattatccaaaatttaaatactatcaataaaaatttacatttatacaccgactaaataggtgaatcttatctagtatatttatattcccataccatttttacagttaatccttggtctacctttaattcaaattttgatttttttcgcaaccgcatgagatccaaagatgattgttgattgatcatttgactagatacttgatcaaatttagagtgggacagtaatatctcgtcatatttctaactagatgtttcatcgaattgtatccaaattggatcaacgtctacgtttatcaattccaccaacttacatcttcttttgagagattatttcacaccatttccattatggagagacat

SEQ ID NO: 37961 - DNA, 430 bp, Arabidopsis thaliana columbia
cgcttgctatttctcatcctctaggaccgcacctaactcgtatgtcattatatgagactccctgcctgcaacagttatatgtcagatgatttggctgaaaaaagcattagacagatcgagacaatgggatgttgatgggacatccccgatagataccattgcacgtggctcctggtcacaacatcttcatagtaccatataaagtctacctgctcccgtacattgcagagaaacccactcacgttctgttgacccaggtacttgggtccaactagccagtgtggtcgcagtacgccaaccttctgcgacataaaactccaagcatgttcagcaagttactatttactaaagcgttgcaggttcatacaggaccacatctaagtgaacttgctactatgagaacgaaaaaccgagccttagtaaacatgtg

SEQ ID NO: 37962 - DNA, 459 bp, Arabidopsis thaliana columbia
cttttgatcaaaacccggtttctgttttcggagtatccaaagttcttttgcctaaagaactatttccaaaatcgggtcaacccgttgccacagctcctccacaggagatttctttgtcgccggagagttctagtgaacagccgtcacgactagtatcaccaccgcgtgagatagtttcttccggcgcggttaaaagaccacttggtttcttggtcttgtggtgttggtgtatagcattttgttatgttttggtatgatttttttttctttctttcttttatcacataatgttttgccttcgattagggctttatttatttttactggattttttttttcacaagggtttatatttattcacgataatgttattgtatttgagtcgaggaaaaaacaaattcactttcccatgtaaatttggattgaatgggcgattttgggtaaacccatgactatata

SEQ ID NO: 37963 - DNA, 485 bp, Arabidopsis thaliana columbia
cagaatagaatgaaccaaaatccaaaacacttattattgcttttttaataggaagctacctaaaaatatatctaaacattttgctgaacttaaaaggccatatttgagcttgacttatactttggtgaacttcactcttttccatcagccgcgcggagtgagcctagctgaaccggtgcttgagttccaaccacctttgatgacccgtaaagcgacacatcgcttccctttgctttctctttctcgatctgttcctttatccagaagtaggttattctaagcccctcctgtttaacgattatggtcaaaacaatatcagtaataaaagaattagattattatcttgtctttgagctacttaagtaaataatgttggtaccttcaatctcatattaggagcccaaccaagcttttctttgatcagattgttgtctgagttacgaccacgaacaccttccgggccaggaatgtggtgaattggaagc

SEQ ID NO: 37964 - DNA, 216 bp, Arabidopsis thaliana columbia
tccacgaccaaactgatcctctctgtggccgtcgagggcgactactacggtggatcatcagccgccgttcccttcaaatgggaatctcagcccggaactccaagacgactctccaaacgatcctcctcttccggtttcaattctgattctgatttcaattttccggtttcagcaccactaacacctcctccttcttacttctacgcttctccatcc

SEQ ID NO: 37965 - DNA, 600 bp, Arabidopsis thaliana columbia
ccactgtaggttatatatttgctatatcagatacttataaactctcatctgtagttgatggttttgtttgtttgaagatttgctggttgattgttttttcttaatgtggttaatcagatgggaaaagcaaagacatgttaacaatgaagttaaatgaagatgagtggttagaatacgagagtgtgatgcaagatgttgtgaagagaagtgggcttaataagagcatattttatgatcttaggggtaaccatgacaactttggtgttccgtctgttggttcatctgttgatttcttctcaaagtatagcatcaatggacagatgggaaggaaaggaaatgttaacaccataactgttgaggttggttatgctctcccagcctggtctatagtttgttctcttgattattttggttgtgatgaaaagttatatgttacagtgtgctaacggttctgtgttttgttatacagactagcgaacgtaaacatctgtttgtcggtattgacccacaatgcatattggattcgcggcccacaaatctctttgggcaccaactgatgaacttttgacgcactcgactcacactctcgcaatgggatac

SEQ ID NO: 37966 - DNA, 1116 bp, Arabidopsis thaliana columbia
aggctcatggcgaaaagcgccaccagttgtttcaagtaagacatcttcatattgattcgtttttggtttattctagtagattcagtgacaatgtgttaaatcataacttttttaaccgcatcagatgtatatgctctttggagttatatctgcaaccacagtcacagctacaattctctgcgtcaccatccagagaagacatctgatggtaaacacagcaagattcactcaagccaaaggttcttgttttgtatctgtgactaaaacattgctctcatgttcttgcaggtttggggtttgtttgctccaaagttcgtctttgacgttgttgatctcatccttactgatctcctcatctgtttggcttcagcttactatctttgattcatacttgcaattgatgaaagatgtaacagtagattttagcaggtaattgttttttttacttctctatgaatgtaaaaaagaatgatcagaaatccttttttgagcattgatagattaagaaggatcggtttcgattcaagttacaaatctctaagcctatcttgggtacctaagagattattcattttctcattacaataagagatgcaatctgctagagttctcttgtagcttagcctccactgcacagaccatctccatttgctcagcatcctgctagttttcctggaaaattctataggtttcccagataatacagtgacatcccacaaacaatttgcatcaagaaaagcacgtacttcgctgccaaaagcttctgtttctttctgctccaaacgcaattctggatcttggagtttgtcaatgttatgaagaagcacagtgtcctctgtgacagaagttggcagatcccttaaaacacttccacatttctctgacatctacttcatgacaagaatctcattcttcacagatatctgagatccagcgtaaacaaggcgcataactgacttgtcacgctggctctgtgggatcagccacagtctcaacgtggatatcagcgcaaaagacagcttaccgtcttgatgaatgtataaagaatctttaggccatgaagaagctagagaaaataggctggtttctagaggaatgaagactttgtcatttgag

SEQ ID NO: 37967 - DNA, 341 bp, Arabidopsis thaliana columbia
gtataataaaataagagaaatattgccttaaaagatttttgcattgcaatatctttgtttgtaactgacagaatgaaaaggagatgcttcaaagtgagagatattcttctgttcttgtgtatgtctttagagatccttgtttatataagtagcattaagtgcaagaattggcatttaggttaacctgtggccaaatctaacctgcattagtgtttaaaaatcagtccttcgctttaagtttcttgagtaacactagtgttactatttcgtcttgaggaaatcatctgtagagtgagtttcaaggcagaacgtgtgtcgtgtggatctagtgactcagtggt

SEQ ID NO: 37968 - DNA, 579 bp, Arabidopsis thaliana columbia
tgtcaaaaaaaagggaaattctacaagtgaaattagagaaattatctagaaggattttagaggaaagactccaaggcattagtctttgagctggatttggatttcattttaataaaacataaattaatctttaaacgctattatgtgcttggattatgtaccacataatgcgaaggaaacatctttgtagttttgcgttcttcatataataatattttgccgtcgtgtatgtgtagtatacatatattcatcactttagtatacaagttgccacaaagttctgttgtttataataaaaccaaaaaaaaagaacaagttctgttgtttataataaaaccaaaaaaaaaaaaaacaagttctgttgtttggaattaggagatcgatttaaatttttacaaagcaaaagggtgtgtgtggtccgattaatattttagtatatgagaaaaagaaagggtgtgatctaaattatagattcagaaggtccattcaaaaagtacagtcttttatgtgtaggttttaagttttttcattattcttaaacgaacaaatgatagattaattttattctgttttttgttg

SEQ ID NO: 37969 - DNA, 616 bp, Arabidopsis thaliana columbia
ctgtatactactctctttttccgcatatataaataccataagatttatgtggccattcaaagacatgaaaaattatcacgattttaaaatgtttcgagtgaagtgtttcgatttgattctaaaattcttgaacaaatcaaccaccgccctagaatatagtgaaataattcttcgaatatccttatttacgctaactgattcgcataatgaacaaaaataaccccaagttttttcaagaatataggtcccattgtttcagacttttacattttacaccttaagtttctgcatttaggtaaagtcagctctctggctctctctcttgtctcgccaataaatagtcgcttaacaaacaaacaatttttctttaaacctaaaactcaccaaagagaaaacactgggctgaagtaggaaatggccggccttcaatatagtttcttcccgaccgacttcttctacccacgagcttctcctccggctacgacaagccttgtcgccaccaatccaaaactggagaaaaccaaaagagagatggtttagtagtgattgatgaactcgtgcttctctgtctctgtttatacgtgaaaagaagactaatcagtcacaaacatggaag

SEQ ID NO: 37970 - DNA, 520 bp, Arabidopsis thaliana columbia
aaatttaggctatgaatagtgacatgcgaatatgcattggagtgtggtttatctacattatccgcattttgtaattattctgtactttttatttatttgtgaagcggtattcaacggtgatgtgcggttcaattataatcaactgccattttttaaaaactattgtatgaattgtttttttcaatgaatacaactttgtttggaggaaaaatcaatcatccaaaatgataagtaaaaaatattcattataatcgtcatttaacttttgtcttgttcgatctgctgacgcaattttcacatttaattcacttgatctatttgacctcgtgttttgaccgtctattctgttgtctcattcgagttttttcgatgatcaaattttttttcaattttgatgagactataagaaaataatctaaagtcataagtttattcaaaaaattaacaatcacgaacataaatgtcaaactcacagttgtttacagtaatgttttgaagaaaacggatatttcaggacata

SEQ ID NO: 37971 - DNA, 545 bp, Arabidopsis thaliana columbia
caacttttagatttatcatccgatatctttaatcacaaaaaataataaacgttatcacaggttactcaaatcacatggacgttccaaacgaacacatgggctttgcatattaccacaaagaagaaaagaacaaaaatcgaattgcattacacgtatagtcccaaaaatgcattatttgcttacggtttaaattaagttagggataagcttgtctttctccacttaattaatattttttgcatgttgtgcaaactgatgtttcttaacaggttgtaagatcaatcaatacataataattataataataatcattcatcatgaattatttcatctaatatttaattcatttggttgcctctcgtcagtttgtaatgaaaacatacaacaccaatatcacaatctttgccctataaaaaccctaagaccatctccacattcttcacacaacacacctcaagctttataacttctaaaacaaactcttataactttttacttcctcctccatggcttattctaagattgctcttctcctcatcttcaat

SEQ ID NO: 37972 - DNA, 704 bp, Arabidopsis thaliana columbia
ctagaggatttttctctcaacgaaacataaatcctctgcttgcgtatgatgcacgagttctcttgctcttttttctctattgcgcttgaagacactgtcttatccgtactgacatgaattggaagcaagagatcccaagttttcatctctgccacaatgcattctcctgaggataagactgcaacgatccatgaatacccaaacgaatccgacatatgcacaaaacccaacaaaggagatacagcggattcttcttggcatgtacttaggacagtgtgaacagatggcgttttgagagcttcatcttttccactggcctgacttgtgaagggaagagagtgtaagactgttgaatcaatgccaccgtcgtgaagggagtatattcgttctggcaaaagggagtcagcaaacaaggtaacaagagagccaccttcacgcattttggggagagccaaatcaaccattgcaagtcttaacagtggtggtggatgccctaaccaaacagtgtgatcgagcggcaggtttgaagttgcaactggaagctcacttatgtttgactcacaaatcattgcaactccttgtattttgttgtgggagttcatgcgaagacgagatgagttaccagatatccaaacaggctggatttcatcaaccagggcatcaacctgtaattgtccagcactccaggcagttaccagaatcga

SEQ ID NO: 37973 - DNA, 605 bp, Arabidopsis thaliana columbia
cttataccaatgattttaaagctgaataatccggtcggatttgtccatgatttgaaagtacgcagatcaattcagctctatattgaacgtatctcacatgttgttggattgctttgcgaatttaaatacttcaaacatgcttttgtaatttaattttagtctattggtagactttgtacataactcataaccgccttaaggtccactggtttaattacattgaattttttttcggttaagtgggctccatgattccccacaggacataaaaaagtgatcattattggagaccacgtctctgcaacatggtaccaaccaaatcacaatgtcagtaattttacattccatcttctttacaaagtcttccttggtcttgaaactcttgactggttctaaacacagctcattatatgtctatttagtattttacacattggtttcagacggctcttaaaggtctctctagcttcatgtcaaccatctaaaccaaccaccattaatgttcctctgcccattttcaagaaattagaaatcatttttctctaagttcttgatcgtcgccatgaacgatcttatctcaagctcattcaagagatacacagact

SEQ ID NO: 37974 - DNA, 511 bp, Arabidopsis thaliana columbia
tttaacgtttctaaataaataaataaaaagatgtccaaaaaaattgtgttataaagtcaaaattagaagaaaaaaaaattacattttatgttctgatctttagacccatagctagtttcttgattaaaaatttgtaataattattatttatagtgcaacattagtataggtactttctgagtgtatagcacacaatgcttaatcaaatttggctaagatgatacacgccgttgaaaatagaatttactcttatttacacaaaccttatcaaatccaaagtaagatatgatgtacccagtagtagtaccctatcttcttaatgacatatagtattggacaaaataatatgacgtatatatgcgaagaacaagaataaaatatatatacattaaaaatatggaacgtaaactggaattgaaataatatgacatattatgtaaattatgtttttgaaaaatagagaaaagacaatagatatagctagtaaagctgttatattttcatctttttg

SEQ ID NO: 37975 - DNA, 573 bp, Arabidopsis thaliana columbia
cctctctgctacatacctgaactcaaaacatgaacaaaagatcttaaagtttgaaactttaccagtaatttgtaatgttatataatccctaccatggatggatcccaaagcaaggaacaacagaagggtatttagctcccatctctttgaccaaactccaatctttctagaccaaaccaaaccacagattcaattaaaaacgtagctaaactcgtaaatttggaagctatcaatctgacaaaatcgaaacctcggagactccattgacggcgaaacagagacgccggaagcaacggcggaggagattatctgaggagctttggtgataatcctcgggtcttgaaggtgacagtgcgcgtcgaacagtttcatcttcttccaaccgcttcgttatgtattttctgagttcttcttccaaatatttttctctgctgaacaatttagagtaaattgtataatcaccccagaactatatatatttcaaggaaatacccagaaatttttgataggtgcttaatagacccgccttactattgttaggttgttgcctacaagttattaggaatgcagggt

SEQ ID NO: 37976 - DNA, 588 bp, Arabidopsis thaliana columbia
catagaaatttaaaaacaaattgttattttatcttcttcgtctcttttagacacttcaacatgctttgtttcagatctccaagatcttcatatttaaaaaatgacgacattactttcgtaaggaagtaggttttagaatttcggactcctttcggtttattattcattttgtcggtcctaaagagcgaatactatgtttacgcgatcctgttttggttgcttttttatttgtatcatgccccatttcattctctgagactatttccaaaagtaactagctcatcatccttaccgagatcagactcaatggattcaccttcttctcgagggtcttgaatggaaagggacatgtggtcatcaatcaaagtctcctcctcatccttattgcttaatagactgaaatcagttgatgagactacatcagtgacttgcttctctggtttattctttcatgtgggagatcaatgtggatttttacgagtgaccgcagtttactggttctttccactttcctctacccccggtctactatttcacctcctctgtcttgtctctgttgtggacaagactcatgatacgacttgaatt

SEQ ID NO: 37977 - DNA, 403 bp, Arabidopsis thaliana columbia
aatacttcgggcctcaagaaaacacctctttaatccctcaaacggttcgagtgttattccaggaaacacgcccgagccaagcttaagcatgcctcggggatcgtctaggatcggctcggtgaacgtcctatcaagcagtattcgtcccaagccaaaatccagcgttccccagaccatatacttacttgaggaaaagacttgtacaaattctgtgaaggtcccaaaaatcatttcctaaaaacccggaagtgatattggagaatctctgagggtattgtcaaatctgaaagtttttctgaagctcccgaagaataaggaaaatctctttattgcaaagatcctttttagccgacttaaagataaatggaaatcttccgagaatattgcaggaggcggtcacttg

SEQ ID NO: 37978 - DNA, 115 bp, Arabidopsis thaliana columbia
tagcttcgttataaataaaaggaacagagtttgcttttaaacaaagagagacagaatataaagctcacagaactcagaagacgacgatcgatgtatcatcaagaacaacatcctg

SEQ ID NO: 37979 - DNA, 598 bp, Arabidopsis thaliana columbia
tagtttttatacatatataatgaagtatatttttactatcatactatttaatataaaacatgttactgcacatatatattaaatcacccaattgctatttcactaaataacaaattattttacaagatgcaagtttattttataaatcgaacaaaatttacgaaaaatgtagaatagtaattttgtcgatatgcataaaatttattggtttccttgttttttttttcctcaatccagtgttttccttatttattatgttgtcatcatagtaatttagtcaatttatgattaaggctaaatttattcgattaatgacactttgatttcgattttcatggcttaaacttatataatcaatgatctcttggagagtaagagtgacgcgccgtaagtgcgagtagggttagaaacgaggggatataaaatgagtacagatgtagataagtaaatctacagacacaaggcaccacacacacagcaaaaaccaaatcctttacttaaaaaaaacaaaaagagagcattttttatgaagatcatcactttggaatgttgttggaatcaccagagtcaatatccatagccacgagaagaaagattg

SEQ ID NO: 37980 - DNA, 510 bp, Arabidopsis thaliana columbia
tcgttaatccatatgaataattttaattaatattagttttttccttcacatgagtttctattctctcgtatttatcaatttcacgtgtgtatgcatcctattaaagcaactatcatattaccacatttgtcgaacataagaaaatttctagaaccaaaacaaattcaaagcaaccaaaaccatacaaaaaatagataaattacaaaaatagaaaagaataaacgaaaaacaaccacacgtacatataaggaaatgaaaaccatcctttacgtagcctcttcttagtaacctcctaagccatgaaatagtcgcaaaggccctttcttcgtcttcgtttctaattgctttcgacgacaatcgatcgtagagaagtctacctcgtagacatctctctcacaaatccaattcaattaccattgtttgttattatctgatgtcgaatatgcaattctctcgtggttttaatccctttgttatcctcttctgtctcgccgtggttgcccaattata

SEQ ID NO: 37981 - DNA, 513 bp, Arabidopsis thaliana columbia
tgatatgattgggtagagaaataatgtggttactattgtttgaggaattgaagatctcattatcttgtctcgtgttgtgacaatgatgtttgtccataatacaatgttcattataaatttggttgaatgtttccaaacacaaagtggatattttaagaatgactaaatgatatataatgatgtgagtgcccatacacaagtaaatattagtcaaagaaaaatgtaccttttacttttaattaatgattgtcattcatatataaacttgttgctaaacttcaaccggtcaacatgagatggtcaagaaacacatgttgctaaacttcgagtctaaacacaattttgtaaatatgaatcagatctttacatattctgataaaaacattaatcgttcataaatttagggcacgaactttcttattctgttttcacatttgaattttggtggcgacgaacctcattctacttccacatcagatccaaaagacaaaaacaaattccaagatggcggag

SEQ ID NO: 37982 - DNA, 626 bp, Arabidopsis thaliana columbia
ttttgaatttcaaatctaaattgcaatttctaataagaaatacagaatactttagataattattaatgtgcaaaatcctcagacaatattttttatcaaaacaagcgaatatcaaatttgaataaaataacatagacgatatttatgagaaacgggtgataatttcttaaaatttcgattagaacacatgtgtcgctgaaaacgtgtcatacaagaccaaaaactgtgatactatcatgagtgactgatgattctatttttgggaaggccaagtggagcagcttgtgttatggagcaagagtgactcactaaaagcgagaaccgtcccgctgaaatcgaactcgagcatatgatcttgaagctgatgtgtcccaatcaccatcaaatccttcggtgtctttccacgtcgataaacgccaaacacatcaccgtttccttcactttcaccaccgtattcgcaccgtagaacccccactttacctcccctatcctccccggcagaccaatctctatcacgggcacgttaggccccgcgtcaaattctttccagcggtgcgtgaatcaaaacaatgtttaaacggcgccaccgatggaaccttagctattcgcatagcctgtatatatag

SEQ ID NO: 37983 - DNA, 665 bp, Arabidopsis thaliana
  unsure (1)..(665): unsure at all n locations
cgttggtagtagtcctactcagagtagcaccgtcgtcgactctcccacggcggcacggtttataacacctccgcacctcgagctcagcttaggcggcggcggcgcgtagtcgtcgtaagatcccgcttgtgcatccggtttactactataacatggcgacgtatccaaagatcgacgacgtgtgcgtgtccagagcgagtctgaaacgtcgtcggtcgttgatttcgaaggtggagctgggaagatatctccgccgttagatctggatcttaacttagctcctccggcggacataggcgtgagtctctcccttcttatgtcgtttctttagacaaaacacaataacgtttccttttcccttctgcctaagacaaaaatattatcagtttttcagaagaaagtgtagaacagcgtgaatataattctcagctgnagtgaaaaaaaagtcgttatgtatatattattatgacacgctattataaatcgaggtaagataagaggcatttaaggctttccctcttctttagtatttgcgaaggaaatgcatcatngtaaatctgtaattgaaaagataaagtattatagagctttttgggggttgtgtgtagaagaaatagataaagaatggtaatggtattattataagataaatatagtgatgagta

SEQ ID NO: 37984 - DNA, 834 bp, Arabidopsis thaliana columbia
caggcacaaaatcaagaaaacctaaacgaagacaccctaccttaaaagaccgttaacatttgatatttgttttattatgtgaattgattaattgatattagaaagttctttccttttttttgatatttgttttctagcatatcatgatatcgcctcgagaatacctttgaaaattattttgttattgtcaactgtcatgatatctcgctgaaccaacatataaaacacgattataatttggttgacagatcctgaacaacagtaaaacgtacttagttttcgaggttaaaaaataattacttgtcatgatttcgaattaaaaataataatgggctcaatttgagattaaagaaagcccacgctaaaagaggcctactaaatgcccatattggatccgttattgtagcctttctatatatgaatcgagtttgcatttctgctataacgttctctgcattcacatgatcacatcaactcagtaacggactcgacatacccggacctggacccgacaccgaatccgaatcataatgcgacggagacgcagctcgcttctcggtctagcttacaacggaaaatatttacggtaccgtttgttttccctctgtcgtagaatttctgtcttcgacaccggattgatataatcgattgaaaagacaagagataatgtctaaaattgattcgatgaagagaaaaagatcaatatggggaacgataaaagtctcgatcttactgattttggttaattttcatattacctgcaaaaacaagtattgtcaattctggggaattttgttgtcaggtgaaagatgaagaagaccgactctgtgtgtt

SEQ ID NO: 37985 - DNA, 463 bp, Arabidopsis thaliana columbia
ggaaacagaaaacacaatgcccatcgctaaaaccatacgtcatcttgtaaccagttagacacatggtgttttcctatacacccgttttttaaaaacaaccaaaattaatatcattttcctctctttttattatccctcaaaaataaataaaaagcatggtttaatagtgtaatgggtaatgcgataaaagattttcatataaaagcagggaataacatttattcagatgatatataatatgccaaaattttagaccccaaaaatcatacaaatcatactcgaaaaaaagagaaagaaagacttaacacgtatccccaattgcccataattattaactttagaataaacaattattggaaaaaaaacggtgagaaaaaggatgctatatcaatattaatctaatgctagaaccgtactaatgtaatagctatagattagggctagtttactccaaagacgaagc

SEQ ID NO: 37986 - DNA, 580 bp, Arabidopsis thaliana columbia
aagagtgtaaactaacctctgaagtgttaggatttacggtgacaacagacagagagagtggagaacgcttcttcggctaggacgacaagcttcgagttgatggcggttttcttctgaccattctctgaaactgtaatttgtcttcactgtttcgccgatttaggggttttcttactcgcatttcggaaacaaatattattcgtatctgttattttgcctacaatttcgctaattctctgtcgtttacgttttcgttttcgtttagatcatgatagtgagaatttagatctgattggtttatctacaaaatgttggtgttcgataagtctagctaaatcttacagtagaatttcatggtgtccgattaatacagagaaattttccggggcttaattcttgtcagttttatttcagaatcttctcttatgctgaaaactatatatgggaggtgttctctcggagtcaataccgagtgagaaagtgtgaagaagctgatcaagatatagtcagactttgtgggttacgattagttctcttgttatgctgtggtaaacctttggagggtcttttgtagcgtatc

SEQ ID NO: 37987 - DNA, 486 bp, Arabidopsis thaliana columbia
ctaaaggatatcggagcgttgattggtcaatgttgtagggaccgcccccagggagaggcgtaatattggccgaggcgcgtaacgcctgtatgagcgctaagaagcagtaatttaggatcatctctagttcttcttcaacaggtcctcaactttcagatctgtacaaactcaggtttttcctcattcaagcctcccccatcctctcctcctcgtttggccgagtcctgcactcgtgtgctgtcgctggttgtgtttccctgtctttcctccttctatactccgtctttcatcaggtgcttctcttcttttcgtcctaccaccccgtcaattccatacttctcgtcaagtccctttccgactcctgcaccagacaggtcattagcacagccgcaatctttcgatcggtctgtcaactagtttcaagcacttttgatcgagcgcagatctactctgctcagtgtttggggtgtggttgggacgcataga

SEQ ID NO: 37988 - DNA, 348 bp, Arabidopsis thaliana columbia
tgcaaattaccctaatttttaatgcagactttatcatttacacagttgacttgaatatattcatggaaattttgtgagagtcagaaaatgaccagcagttctttttctatctttataattgctggacaggtttctttaaatacattttataagaggaaagactttctttaccgcagatagtacgcgcatggaatataagcctattatgtgaacagaaccacttgagatccacagcgcaaatcgacacatgcactatcattaacgcgttaataaggattggacttcatcagaaagctacttaaaaatataatctgagaatagagctatctaatggtaattcgatttggt

SEQ ID NO: 37989 - DNA, 301 bp, Arabidopsis thaliana columbia
ctctagtgtgggccgccagtgtgctctaaagcttgatgagagattgaatccaggactgtggtaccataagatggtgcccttctgtaaatgtgggactggtgcggaggtgaggccgagggttcccccgtagaaggcctcggcgtgctcgagggagtctgcaggggacgaggaggttaatatgtgcgagaccagtgatcatgctggtcgttttgtggtgtgatactggaatggctgagggagcctggaggaagcttgagaggggtttatttattccccgcatttcaccattgcaccatcttcg

SEQ ID NO: 37990 - DNA, 747 bp, Arabidopsis thaliana columbia
tctctcagttgtttctcgttcgtcttcgggttgttgttgtacagtgctagtttcgtttgtgctggagacatagttcaccacgacgattccgttccgcagagacctggttcaacaacaatttcgttctggtttgatttttgatctatttcactttgatctgtcgttcttactctttctcttatctccttgtccctcttgtctatctcttggtgactttcaggaatttggaatttagtttaggctttggattgtaatactagggtttagtggaatgagtctgttgattgctttctcactgtcctcctccttctatatctgttgttgccagcagattgagaaattgggtttttacagactctagaggaacttttggattccagatttgatgtcattcagaatagagggagagtaggtatagccatgagttacctaactaaaccctcgttttagtcgcatggactttcaatttgttgcaagcttcttgttagctataataaggagtcatttggtgtgagtgaagaaattgggatatagatctggtttgcgtttaggaccctgccatgtcatcttccaacatatataactacaacatataatttcatggacaggtgaaagtcccaactcgagtcaatgggtcggagtacacggagtatgttggtgttggtgctaggtttggcccaaccttggaatctaaggagaaacatgctaccctcatcaaacttgctattgctgacctcctgattgttg

SEQ ID NO: 37991 - DNA, 302 bp, Arabidopsis thaliana columbia
caatccctatgttgatgtatgtgcaatagttatgttgttgttactgagaatattgaacaaaaaaatagtaaaccggtgaccaaatgttttctcttccatagaacttgaacaccaaacagttgttcatcattttggtagtactgtatcgaactccggttaaacgaaatgtagcagaaattgaatcaaaaccctagaaccaaaactattagaatgaaaacagaattacattgtataatgagaaaacgtatagaagagacttgaattttgatcatttacagagtcagaggatcgtatcattatca

SEQ ID NO: 37992 - DNA, 695 bp, Arabidopsis thaliana columbia
catcaccattcggtagaaatgtctatgaagagcctcatatatcagaatccgagtggtcaggaagttctgatcaaggaatcagcactgatgactccatgaatagttcaaatgatacaatcccgagagatacaacgaggacttcctcggataacgaggtagacaagcttaaagctgagctcggtgctttggcaaggcgaacggatctttcagaactagagctacaaagcctgcggaaacaaattgttaaagagaccaaaagaagtcaggatctcctgagggaagtaactagcctaaagcaggagagggacttgctgaaggcagataatgaaagtaataaagcatctgacaagcgaaaggaagaggcaaaaattaggaacaagttgcagcttgaaggaagggatccacatgttcttttagaagaaacccgtgaagaactggattatgagaaggatctgaattcgaatctacggttacagcttcagaagacacaagaatcaaacactgagttgatccttgctgtgcaagatctagaagcaatggaggggcaaagaactaggaagacagttgatcttcctggaccaagaacctgcgagaggaacaccgaagaatcaaggagaatgtcctgcacaagtgagacagatgactgatgaggatcaaaaggcactagatgaagcttgtgaagggacacatggatg

SEQ ID NO: 37993 - DNA, 583 bp, Arabidopsis thaliana columbia
cctcaaaaaaatcatttggcagtaaatcacaataattgtatcatttatacaaatgatatacataaatttaagtttatgattaataacttcaactatagtagactattggaatgaacatgatgcataccaaaaagttgaaaatttgcaaaaaaataatggctaattgtattacgaagttataaacgatatactatcataggatagtttaaaaacacaacataattcaattaaatttagagacaaaacaattggttgattcaataaaagtttgagaaatactctaacgaaaattcaatacttaaaaaaaattaaaaccatagattatatattaacttaaatatagatctaattatgtgattattaatttatgatgttattgataccatacttttatctagaattttgttaattttacactaatccgactcgagaccggtataatttattattttctgcatagttttaatttatagtggtttaccgtagttgctttatctaattcacaatcatcatcacactgaaacgagaaacaaaacattattggttgacaaactaaagagatgaatcatattatgaagaatat

SEQ ID NO: 37994 - DNA, 513 bp, Arabidopsis thaliana columbia
taccgaaagtgttgaaatcttaaatttgtaggccccacagttcccggactttgctacttgttaaaccaacaagccactattggagcgtgagcacactttctcagatacgcatgtgatatacaacgaatatcgcttcaacaattaaacggcgcgttgaaagtgtttgccaatttggtgtcggtgaagagccaactggattcgccgaaccaacaaagccaggctctagactggacccttcgtacttgggatacgagcgtgatcggtggatctctcttttttctagtattttgcatcttttgaatattttgagtacttgagcaaattaaacgaaatttgtgaaactgatatatctgaagtttctttacatgtgacactaagatttatgaaacctgtatatttcattcaatttgtgtattgtatcatttcaatataatgtattgtttgggttataaaacacccccaattacccaaaaaccatttttaaaaacataatcttcaggagaattgagattg

SEQ ID NO: 37995 - DNA, 522 bp, Arabidopsis thaliana columbia
ggatgattgcatgtgttgtggtgtcgagaagttcatggatattattgaatcaattgtattttgttctgaattttgttttgatgaatgaaaaattaatagataagattgatatatagtacaaatgttacattcgttaatttatttactgccatcgttaatgaggtttgaaatattacagcgacttttggcatatgcaaattcatacatgtaagttattagattgtaatacggcgacatactaattaccatccatcctacaagccgtggttggtgatacttcaaagctatttctcaatattattcccaaaaagtattaaagtatgtgcgaacgtaaaaaaaaatttgtgggagtggaaaagagaaaagggagtgtcttaccactctacaccaacccaccgagagaaagtgtccactcaatgattgactatagatttgtgtgcattgtgacagttggcgcaggctaatgaagctctttgaagaagctacgagaccaatggcgtcatctatgacgtagttggcttg

SEQ ID NO: 37996 - DNA, 455 bp, Arabidopsis thaliana columbia
agtgtgtggagatatatccccagtgtcggcactgcaatttttaaaacattattacatcatctctaccaacctgccgttgatgctatttctcaattaaaataagttttctaaactgatgataatcaatgactataaccgagatagcaccactaacaagaaaatacaatagtttacataaaaaaggttcatctttttgaagaacaggaaattgagcagacgccacagaatataacatggaaaaaaaaaatgatattctagagaagcgaaggaagaattcaagctagaggacttactcagaagaagaagacaagctcatggaatcctcaatcgtcatggctggtgtaacttgatagtaaaataaataggttagcatcaatgcgcaggtagctactttgcaaaggagtgccaagacattttttgttttgctggaagaaggatagaaaacagaaaactgg

SEQ ID NO: 37997 - DNA, 524 bp, Arabidopsis thaliana columbia
gtataacaagaaatttatccaaatgttggtgaataaaaaaacttgatcttcttctctgttttcttcaaattagtttagccccattagttttaaactagatattagattggatcattgacttaaaaggttagtgtttttttactgaaaatgattaacacaagatccttttttcttggtatgaagattcagtaccgttttgctcaaaaaaaataaaaaataaaaaaaaaaagaagattcagtaccgttcagggtgacagaaacattttcgaaaagagaggctataagcgggatgatgaatccgaccatgatggtgttgcagaaatttatgtatgatgtagttattgtccagggatcgaaacaccatcatggtcagatccgtcatccccgttatgttttcttaggtcaacaaatatgggcaattgaaaagtgaagctctatttattacggtatgtttatgtactcttagaagtatattgtaaattaaacccctttatttgaattttaggttgatattagcagtttga

SEQ ID NO: 37998 - DNA, 781 bp, Arabidopsis thaliana columbia
  unsure (1)..(781): unsure at all n locations
tagaggatcgatccccgctactagatggttgttaccgagtcaatgttaagttatagtcaaccattttggccgtcaaagaaggcctcttcctcaattagtcgcgtatgttttaagcaaaaaacgattattactaatttactataactatgaaattaaaaataaacttataccattttgggtttgacgctagtcaataagcaaaattaaatgattagagggtgaatttaacgattccatttattttcttccatctgtatagacctaaagaaatacgttaaaccaatatatacacatagatataaattttttttgatcaaaacacatagataaaaaacttgttttggttacagaaagtttcaaaagttattttaggtttcagttcaaaaattctagactatagaaaaaacttaagaaagagacaaggccacatgtcgcgtgaccatgaaacaaaacatattggtgtcacttttagtttggtccattcattaatgcgatggtttgtagcgttcctaaaatcaaagctataaaccaattcgaacggtttcaaattaactccatatttcccattatgtaacgtatctatatgtaaacaaactttaagctataacgcagaactttgaaatggggaaatttaaactgaaaaaattaacgcgaaagagtacaatacaaacgagtttttgactaatcagttctaagacttacggatcacctagcatgaaaaatcaactactgtaacaaaaaaaagtaatgctanaataatgaaagtaatatcaaagaacaa

SEQ ID NO: 37999 - DNA, 516 bp, Arabidopsis thaliana columbia
tttttgttgtctaaaattttagatttagacttctttttgtcttctaattttcttactctatcaaagggaactgctagttcgaatacacgggtgaagcggcaagacgagaaccaaatgaggtacatgtttgaacgcgattgaggaaccggatgtgcaatacacatgacaaagagcaagccggtaagaaaacacaaacaagtggcaaaccaaatatatatgtctataaccaagttgagtacatgaccactgatataacatggactataagaccgtttaaaatatttccaaatctactaaaatgtaagataaaattctaagtaattcaattataaagtatatttttaattgaattttccaatcaattaaaatctacaactaacatagaaattccttctttaatttaaaatgtatatagtatttgatatatataaatatatagagaattaatggacagtaaataatttttgaaagaagtaaatatatgccggtaaccagttgttattcattaaagcaaaa

SEQ ID NO: 38000 - DNA, 548 bp, Arabidopsis thaliana columbia
cttaggaaaagtcaaaaacacttttatcttcattcctttttatagtaatggtcaggtaatacaatacaattatacaaatgcaaacgaaagaaacacgatcaaacttcttggttgatatctcttcttcaataggtatatccacacaaagtttgtatattgatataaaccatctttaattttatttttaacgaaccaaatattttactcatcgtactgacatctgcagtcagttaataaattaatgtttctatataaatattttactcgtaaatcttgagaaaccaaattctgtaacgtattttatgatccaatatctttgaatctgacgacaatttaatctacagtaattttgatcatctcaccaattaaattacagcaatattcggtatttcggtgcagcatgaataacgttctcgttttaaaaatatacattttcttcgaacacctatctgactttacgatggtgacatattcagacaaatactactataaaatgaattttaatctaataccagtgagaaaatggaaattaataatttgacgttaac

SEQ ID NO: 38001 - DNA, 527 bp, Arabidopsis thaliana columbia
aaaaagcataaagcaaaaatcgcatgatctgatgttacggtttccacgaggcttatcttacgctgtgttgagtgatgtctaatcgtgaccgttcatctcccctaagagtttgtgggcaccaacttcttcttttcattttatcaaattttcactattttatcaaattttcaccatgaaacaaaaacaacatttttaaagagatgatatcttcaatattattgatgatgctaaaatttaaagtttagttattatgtgaaatagtacctaaacttccccaaggtttttatgatctttaatgtcgggctaatatgatactcgaattatatgaaagtagtaaaaaagtattcgtctaatgagctctaaaatgaaatgggataaaacgaaattgatggcgtaaaagattttacgtcggctaaaaaattgaatacaaaagatacagatttgaagatatgtgatatttcattccttgtgaataggctgcctgcttttgaagctaatgcaatcaacaatccaaatgaagcttctac

SEQ ID NO: 38002 - DNA, 611 bp, Arabidopsis thaliana columbia
cgccagtgtgctctaaagctattccatgacgaggcctagccaccagtggatctttgtctcgagctcatctacgaaacattacgatagcacgaaaaactattgtagctgggtctgaacagggtctgctcaagccacaaagctaattgccacgattcaccgagttagcacatggtatttgcggtcgaactgacaatgtagaatacccaaacactgtatggccgggactcatgaatatagaaactcgtggctgcccagcacgtctaagcaatcacgatccacagccccaactctatattaatcttttatttcttgacaactgccgacatgaaaacaatcgcgttattgggggaatgtggagtgaatgccacacggccctggagcttgccagtgctggacatcagattattctcatcgagaagggctcggagttattcaatggggtctctggtcagtttggcattcgtattcataaaggcccccactatcccaggtctgggagaccagggatagctgctgacggacatttgagagcttctaccagaagtacccggagctcgttgtcccgtcaaacagcaatctatgcccttgctgacagggacgcaaggggaaga

SEQ ID NO: 38003 - DNA, 754 bp, Arabidopsis thaliana columbia
  unsure (1)..(754): unsure at all n locations
tatgtaataatatcacaaatggaaaaaaataaaataatggctacaagtattgatactgtgatacatgtgccaacggatatatggaaggcaaccaggctagggtgggcataatatccgaatccgatcacccgtccaaaacccgattgaatctaaatcgaatccaaactcaaacccaaacttgtatccaaacatacccacaatttaaatacatagtaataatataataatctaagtgtccaaaatattttgatttttggaatacaaaacaataataaacgactaacaaatgtgtcgattttgatttgataatcaatgcaagaagccaagaacgttcgaatttgaattcacttcggatctcttatagactttctctctcagggtttataatgggcctcaattgtctttcctcgataagcagccttctgcgagttctagactgaactttcgggttcccttgtctagagggggaatatggtattttgtacaatttacagagtgtatttttgacctgaaaaaatttgtagagtaaattccaacacatactcaaacttgatatttagtgttatttcaatatcgtaattaatgggctgatgagtcagctaacacgtgtttaatgacgtagagttggtttgtaggtgtaagtaacagtttttaactaaacacataaatcttaactaaaactttggcacatatcaatcttagtaagatgagaagcttgataggangtcaagacatgactaaggccaagttatag

SEQ ID NO: 38004 - DNA, 590 bp, Arabidopsis thaliana columbia
caactgaaactatacattgcatctaggatcgaaatgtgacgacgtactagtaaaaacgaatagtaacaattagtcacatcaacaatttcaatcacaaaatgttgttatttcaaaaataaacagagggatttttaagtttgagttttcaattaaaacctctttcacgccttcacagtgctggaatattatttcaaatttcattgtattttttcgttagttgtcaaatagtaatcaatgtaatttatagagttattcgtcacttcaaaactattttactcgtcataacacttaagtttatgaaatgtaacttcaaactaacatgtgtgttccaaacacaaagttaatgacacgcttataacgtttgtttatttttcatttctcgcttatataacgtcacattgcaacgaaaacaaaatatggaatttgttatgtcattcttaccgagttatagggaaaataaattataactggtcgatcagaaattcagaactcttgttactgcaaaagcatttaattggccaacgtcactgtcgatcgttggaagtacttgagctaggttatatagacgttgactatatatgacctaggtg

SEQ ID NO: 38005 - DNA, 449 bp, Arabidopsis thaliana columbia
gaaaagaacaagtctagttaattgacgttattgatgtttgtttgatcactagttgttgagtaagagagattttgcttttctgctttgttttgtattgtgaaaactgtgttttaactatttatcaaatggaaatacaattttggtaacattaattgtccaagaaatgaactcttcaagactctttagattatgaaagaacaatataacagaatccaaccaaagtcatcagctggattaaaataccagcagttctttggtttatgctgcttcagaggtgttgtttcgttttaagagtgacgccgcttcagtgagccggaatcgatgaaactgcttccacgaatatgccgtcgtagaagacgaagacactttcttggctctttctgagctatcagtaactaacttacctagttgttgttgtgaagtagaggatctgcggctgcttttgttga

SEQ ID NO: 38006 - DNA, 455 bp, Arabidopsis thaliana columbia
aagatataattaaatggattagacatataaactgaaaaagatctaaagatattgatagtgtaatgataatttaaggtcaaacaagcatatattgcatatattaactatgatagatatattatatgtgacgcgtgtgctcacactctatttcataaatacatattatatgatttgctcatatatagaatagatacctagggttggaacaaaaaaacatttagtagtcaataatacataatatcaagataataggaaatctaaccataatacatatgtttttaattgaaaataacctatttttcgaattcgacaaaaacctaattaatcaacctttatagggatttaacttaatagagatttgttgagaaaataaaatattatatttgtccatcgcgtgaagttcactcgtgttattattggtgcatcgaaattttttgtcataaaactttattttg

SEQ ID NO: 38007 - DNA, 472 bp, Arabidopsis thaliana columbia
ataataaacacaaatcttactttataatatgaggcgtggatagatccttaattttcgaggattaaaatgactttatgagtttaccatcacctaaggcgtggagaaaaaaaaaagagttatcacccgaagcattaaaatcaaccacctttccgtgagacaaacccaagtgaaatgtttagtacttgtctatctcaaaacgccaaagtccaaactcaattcattacattgaaactccattagtaacagttaggttttgtttctcagacgtatatagtccatacgcaaaagaaaattcttatatatactacttatagttttcatggtaacatcattaagtaaattacaaatataataatctacaatgactcggttttctacttataaagtttgttgtctgaagtaaactagttctagtaatttagaactagataaaaaccaacgatcgcagtgtaagtagggaagaattaatgtg

SEQ ID NO: 38008 - DNA, 554 bp, Arabidopsis thaliana columbia
aaaaaaaaaaaaatcataatcatttgcaaagtggaaaaaattattaatttttatttcaaatgttttattaatagtaaatttcaggatattaatttatgtcgtgggccaacggacctaacagccgttacttacctccgtcatttgtggcggcaataaagaagaataccaacgttaccggtttgagtttatcggtttggttcaattggttataacaaaaattaatttatattcctaaaaacagagaaacactcataaaagtagtattttcactaaaatacaaccaattaaatcataagaaataaaatgcattcgaatttaacaataaaaaaatgtattgtgaataactgaaaattcaatagttgatttttctggttaagtatggtacggttcacgtaaaccagtacagttagaaccggcaaaacaacccaaatgaaaaatcccgtctccgttatctatttagtataaaaccaaccacttcgtcttcttcatttcttcacaagtcataaccgtttcaaattctctctctctttctctttcttctcaatttttgtagt

SEQ ID NO: 38009 - DNA, 660 bp, Arabidopsis thaliana columbia
aatttccggaaacttaacactaaactgggtacaagagaagaaacaatgtattgatcataaatttgaaatcaaacttggtaaacactcagaaagctcgagattgaatctggcatctaatcaaaaatgcatcaaccaggtccacacaaactaagagagtctagattagtaagttcagaatcgattcaactttttctctttttgatggaaagtaagtttctctcgaatgtgaagaggcacctcaatcatgaattcgtaaaaccctaagcccagaaatgaagagagaggtgctaaataccaaaaatgaaacaaaagacagaggtgccgaaacttaaattgatacaatggagactgaaattaaaagaggaatagagtgaataccaacagcgagagagagagacatagataacattcaaatgatcaaacgatacaatcgaacaagtagcacacgcatagagagatacatataatggagaaacacgacgatgagaaagcaatagataagaagaatacaagcgtgtcgtaccttacgaccggaggagaagcaatgagtgacgatggtggaagaaagatttgaatctggccgggggataacggcgacggcggcggcagaaacagaccaagagagagagagagacaggagcggataagagagagaaagaa

SEQ ID NO: 38010 - DNA, 741 bp, Arabidopsis thaliana columbia
tacagacattttaaaatccaatatcttcgtttaaaataacatttaatttttaaaagacgttattaaaagtaattgcattttcaacggccgaatgaaattaaaaaattcatcacaattaaacaattaataataaaaataatccaaaatctgtaacctcagtcgctatttatagctaagccacaagcttctctcaccacagacaaacaaaaaaaggtttggttccaaaagctaaaaagcttccatctacattagagtctctctatttagcatttacacacaatcacacacacacacacacacacacaccaaaatgatagcttacatagaaccatacttcttggaaaacgacgccgaggctgcctctgccgccaccgccgccggaaaatctacggatggtgtttctgagtcacttaacatccaaggagaaatcttatgtggtggagctgcggcggatatcgccgggagagattttggcggcatgaactgtgtgaagcctcttgctgtggtgagaccagtgggaccggaagatatcgccggagcggtgaaagcggctctgaggtcagataaactaacggtggcggcgcgtggaaacggccattctatcaacggtcaagccatggcggaaggaggactcgttgtcgatatgagtacacggcggagaatcatttcgaggttggttatttaccggcggtgatgcacggcgtttgttgatgtctcggagggcattatgggaagatgtat

SEQ ID NO: 38011 - DNA, 554 bp, Arabidopsis thaliana columbia
gttatttgtatttaattttcttgaatttccattcttgtatcatcttctaccatcttctagaaggagatatcttgctcttaaaggaattatccaacatcacttgtcgatggacttgctactgaagctacaagaacatggcatgctcggttatgtcatattggagttgattcacagagaagatgttggagaagtacatgaagaagatgatgtcatggaggatatcactaaaaaaaccacgagaatgaggttggtgaagtaatccaaggagtaccacaactgagaaggtcgggtcgacaagtaagtcagtcgcggtaccttgaagactatgttatgcagtcccaaacaacttatagattgttcaaacaagcttatgttaaaagtaagagacgtcaactttcgacaagtaatgagccaagaggctaaagatgtgctttaatggtggaaagcatgtgaagaggagtttgaatcagtcaacaagaacgagatggttctttgttgacatattgattcaagtttctaatcggtttaaaagcttttcaagagtttgtagagaa

SEQ ID NO: 38012 - DNA, 692 bp, Arabidopsis thaliana columbia
ttttgatattttttgtttgttaatcgagaaaattattattaattcactaaacatcacaatttattagaatctatgtaattcgacatatttatttgaaataccatatctcgttaaccgataaccatgttttattgaaatgtgattactggtttttgattagaatttaaatttaatttgatctaatccgaatactctaaaatttaatttgatttgatttgtttcggaaaggtctttgaaattttttgaggtttttgtcaattttaaaaatttccaaatcttgtagaccattgttgaattttagataactgttaagcaactaaccgattcgagaaatttttagttaccacccaacaataacacattatatatttttactaaaaccactttccaagtatataagcgattttatcccagagagaccgttggaatattttatagttatatgaaagaaattgaaacaaaaattatataatttattttcttgtgtaaaaaagcttcgagagactcctttgctcacaacaccaattacattgtcttactaaattagtgcctgatttcggtcatgagctagatattcataagggaattttaaattgaaaaaatctctttaaaatggtaaaataattggaactttgttttctactatcgacatcctttaattaatttatattataacgaaagataataaataa

SEQ ID NO: 38013 - DNA, 359 bp, Arabidopsis thaliana columbia
gggtaccagctcttcaacataatttataattataatgttcgatggaaactgtccactttctgttctggctgatgcctgactggggcctttgatggattaactcactagtcccactttcgccatttcatcacttgttgaccattaaggactgaatgaattccctttggagctatatacttagcaaactttgaatctttctgtacatggcgataatccgcttttgaatcaaaaaagttctcatcttagccatttattggttccagatgctgatgtgaggcttgctcgcagaatcaggcgtgacacggttgataggcgtagggatgttgactctgtgcatgaacaggttagtcagcgtttca

SEQ ID NO: 38014 - DNA, 542 bp, Arabidopsis thaliana columbia
gctaggtctcattgtctttttgcacaaatagtctctgttttttgaaactcgacgaatataaaaccgttgaattcaaacatctctggttcgtattaaataagttcggtattatccgagataatcatctctagacccagcgacagacaacaaaggactgagttctcgtaatcaggcccattttttggtcagggctaaggcccgtttgttgaaagttaaaaacccgtaacttttaatactgatttaggtctattattatcctcgttgccaaacagacaaacagacagacaagaagggcaaagaccaaaaacagagagagagaccacagtcatataactaaagggagaatctgcttagaactgaaactaaccttacaaaaacataaaatctggtaacgtaagcgagacgtagaatacaagcataaaatgccttttgtctcactttgttccagagtagatagataccgcaaaatcaaaagagttcaaaacttaaaaagcaccataacgcaaacccatctcattcctcatcatcctcactgtctttgt

SEQ ID NO: 38015 - DNA, 517 bp, Arabidopsis thaliana columbia
ggatccccacatatatacataatcatatatatgaatacttatatctgtaattattgtctatttctatatacgtattgcagagaccacagtttaaccgatattgatttttagtattttgatttgcttcgtgtagtcacatctatccgaaattttctaatcgaatcaaagcaaataacagatcaaagaaattctaatgaatattttgcctatgtcctatagttactcatatagttttgatctctgaacaaaaacttggctttagtagttgaaagacaataagagaaccagagtcttttccaattccaaaattttcgaaaattcgtagtaaattaaatggtgaatgggagagatgatttcaagaaacataaagatgatgcttagaagttttagatgatgatgtagcatatgtcaaagtatctctaccaaacttacttgtataaaagagattagaaatgcggaaacaaaactagagatgagaaattgaagtcatacatacccgcaaatgaatccggagata

SEQ ID NO: 38016 - DNA, 296 bp, Arabidopsis thaliana columbia
agaggatccccggaaagaaacatcgagccgcgctgatcatcgcaatcaagcgaattctcgaggatcttgagatcgattacactctccttcctcaagatgtcaatctcactggtcacaaatgatcgtgttttccttctcttcttttgcattttattccactagtactagtttccttcatttgcttcgggtttaaatttgatttgtttcggtttaattgcactcagaaactcgggtttactttaattgcttcggtttaatcgaaccataattggcctattcgatttctagatttggtg

SEQ ID NO: 38017 - DNA, 1080 bp, Arabidopsis thaliana columbia
actacttctgaccttttattgcgttttatccctgcaaatgttttgtactgatctttctgctactatgcttcaggttggacaagaaaaacttgtgctggatattggccgggctgctctcaggaaccttgattcaaagccatatattcatgatatattcttatctatggcacttgctgaggtaaaatcaaatgaactaagaatgggaactagttatctactttcactatcctctgcttcttctatctctaatatgtttgttttccatttagtgtgcaattgccaaggctgctttcgaggttaacaaggtctctcaaggatttgaagctcttgctcgtgctcaaagttttctgaagagtaaagttactcttgggaaacttgcattgttaactcaggtaacaggttctactgtcttgcattagtatatataaagcttctctgagtttacttttagccctgttactggcttgaattattaaaagtgcatgatcatgccttactgtaaatcgcatcatgtttaggagcttcacatataagtacgtattgtccaaaagcataatttaccagcatattgggttttaaggggttaaaattgatatttatagattgaggagtcactagaggagcttgcaccaccttgcacattggatctactgggcctgccacgcacgccagaaaatgcagagaggaggcgaggtgcaattgccgcgctacgcgaactgctcagacagggccttagtgttgaagcttcatgtcaaattcaagactggccatgctttttgagccaggcaattagcaggttattggccacagagattgtcgatcttcttccatgggatgatttagccattacacggaaaaataaaaaatcactggaatcccacaatcaaagagttgttattgattttaattgtttctacatggtgttacttggtcacatcgctgttggattttcaggcaagcaaaatgaaacggtatatctcgttttctttccttttgttaaatttagactgattggtccatttcttctctactctatctgcttataaagcataacattcagtatgcttgtgtagattaata

SEQ ID NO: 38018 - DNA, 558 bp, Arabidopsis thaliana columbia
  unsure (1)..(558): unsure at all n locations
ttccacaaaagagaattttcaagaccagagtaaagcaggcacatagcaggacaaagaaccaaaatagaaagataactagatccaattactaactatcacatggtttataagaaaaccatgaaagacacgtccaacaactcacattgttgtataactagactagtcgatcaaaattctagaactacatgcattagttcgaatgagaatcactctgacaaaaatggatccaatattaaccaagatgattcttaagtcacggtacagtcagattcagttctactaagactccaatcaagaaactttggatcatctcgagcatttccccactaatctttccactacttagctagaatctaagcattaacaaatgaaacatgacaagcagaaattgaggacttcatctaagaaacctcacccgcggttgcagaaattgaggacttgctctaatgggacccacccaacaggagacccaatccaaggcgtggtaatggacgaatctgaggattcnctcccttataaactgctgcaacaaggattccatttgacgctgctcatatg

SEQ ID NO: 38019 - DNA, 505 bp, Arabidopsis thaliana columbia
ttccgggtaccgagcattatcttactacatttcttcaactgcaaaaagcttcaaggcaatcaatttgagatcaatatcagtctcagacaagtgtttgcggaccaagaagaagaagaaacgtagttgaagttcataaatcataatgcatggatcaacttaataaaaaggcccacatttagcctcgtatcagtctaaatgggccacacaagtcaataggcccatttatcaatgctttgactgttttcaatcttcaattttggtatgacttcttcttacgaggttgagtgccatacaagattagacagacacgtaaaatagattccattttacctttagttaaaacagatatggattagccaagtttcgttagtatattgtcatattattttattgaaacagaatataacaagtaaagattacttaatcattcttaatcaggcctgttcttaattatcaagaaccaaaaaagattacttcatcatgtcgtaataatatcactaatcaa

SEQ ID NO: 38020 - DNA, 906 bp, Arabidopsis thaliana columbia
atgtcatgtatctttaacatttaagcatttgcaataattagtcagttttatgaagtgaaatattcctaatctttattttaataataataaaacgtatacttaaggctcttccattggacacagaaatatttaaggacccatccaaaactctaatatttgaattttctaaaatttttgattaaaaattttggaagagccccataaagggcctaccattggggtttctctaagaacctctattggaggtggtctaagtaactatgaaagaaaaagaagtacaaaccaaaaaaaatcttcttcttttgattaactataaaattatcattgaattaaaaattatttggtaacttcagtatcttgtcgatagttttttcttttttccactaacaaacttaattaattctattcaaagagtcattacaaagacatatacagaattactataacacagttattacatacatagatgtatgtctcatatactaataaaaatatagtataaaggagtttaacgatgctttcctattggtgtcttactcgctaaccgatcataagaacggttactatccaactttatatttgatttttctttgttacaatttgtatgcaataacttttggctgaaacttcttttcacaaaacataatattcaaccaaatgtgcccatatctaattctgaaatgtagacacaatggcaccaacgcttttgtaccaggtctttctgaaatattttgacgactgtgtaattctcttcaacataactacacatagttttattgtatcatcccatgtagccctcttgaatcaataggtttccatctaactgtcactaatgcatttcgcacctaccaaatctgcgcaataccaatcaaatcttgtcaccagtatttgacaaagcccacgtgt

SEQ ID NO: 38021 - DNA, 586 bp, Arabidopsis thaliana columbia
attaagcaagaagtgtattggaactgagaggcttattaaggtacaagatactggaacatacttgaatttggagatccatctgctggtgttattgtgatatatcatgcaagtgttctcaaaattggcgccgcttagaacaccaatgtagttgtcaaggctacaaggaaaacaaaacaaaacaagagttcagcaaaccccagagatgcacatagggacctacattatacatcagtttcactctctctacacatgtttactcttgtctacgttgctaaaagtttatgagatgtatttatttcccgtctcaaaaccatcaaggcacaaagttttctagctaagtaaagttcccagacataattgcttcaaggcagtggtgttttttcaaatatgtgcaacttttaaaccgaaatgcacagactttatgacctcaacaaaactagaacatatattacttaatctctccaatataatgacaaacaacatttgatgtgacttaaatcaaggagattatacttgtagttcttaatgaagtgtattgaataggctgtggaaaaaatgacaagataccttgtagttgcaagtgaaa

SEQ ID NO: 38022 - DNA, 805 bp, Arabidopsis thaliana columbia
  unsure (1)..(805): unsure at all n locations
gaggtcagagtcaggacatgaatgaggtttatgacacaatcaacagggttgcttctcgcctaggaatttttaaagatcgagctactgctttacttttgagatacaaatggtctgtatcatctacttttcttatttctaatttgttcatacttgttttgttttcgtcactgattatgatatctgaaatttggttagggatggagaaaaacttgtctcagcttacaaaaaatctcctgataatggcggaatgtcctattcctttgaacccaatcctacgaatcactttcattctggtagggtatgttccttattctctatgtcttttttaaaggattgtgacaaattttagtttctgaatttatacttaactcttcttttatacgtttctagagaaaatgctgtctttgcaatgatatcacttcctgcataaacattggatgcggtgactatgtttgtgacgacaaatgctttaaaggtaacacatttcagcttgtgtgtgttgatatttttttgtgagctaaattaatgctctactcatttctgcatgtagaacacatcgagtccaaaatacataaagaattggacatgcggtgtccaaagtgtcgcaaattcctctcatattcttggatatataggaaaatgtctaaggaaggacgagagagatacgaggcttcgctgctcgagaattttcgccatgccaccaaacaaccacccanctgtaactgtaattaagtattattttcaatactacataactatttttgtcatgtgttacatttacaattatttttattttaggaggagg

SEQ ID NO: 38023 - DNA, 654 bp, Arabidopsis thaliana columbia
cggagacatcaccggatacaagtgctcgtatttggaaccagggggaggagagagatcgtgaaatgtgaagagatggaggacgtaattggaatcgagtacacagaagttggggttttgctcgatctctaagactacctggagaagcgattcctctgacataaggaagaaccctaacctcgatggatccgggatcggatcagacgaagaagatactactgctacagaggaaatagagacgctaacatggccggactgagtgaatccgaacttttcgaagagaatcatcggcctagaatcgtcggagattgtgagagatttgatctccgccgccgtgcgagtgatgcaacttgcggagaagaggaggaggacgacgaagaggggtagtctcgtcatattcgcgccgtaactgtagaggtgagaaacaacgatgcttctcgtgatttctggtttcgttttaagcttaagcttgaaggaagaaacgagaatggcgttttgaccagatttaatgctgaggaacgaaacgacgccgtctctcatacggaaaattctggcagcccgtaatggttgatttgactcgaatttaacaaagcccattggcgtaatttgatagagttggaagtcaaacttaatatgaaagagacaggtttggtacag

SEQ ID NO: 38024 - DNA, 634 bp, Arabidopsis thaliana columbia
tcaatagatttttatatgggtgatataatttattatttttggtatttgattaaacatccaaaaatttcttcggtattaattttgaagagattttttttctgtgaagattgtttaacttttttgaacatttttcagtggtttagaatatttgttaaagtctaaaaaaacatttttttggtttaattaatatcgaactaaatgtttaaagatttgttttggagtaattattaatatttacgaaccaaatatttggtcgatagagttgtgttgggagagcctatgtcactaacccctttgtctgcccctctttcggagcgattcttttctcattctttcgtcggactctctgtctccttttgacggcggcaccaacgacaaagcaagcaagcagtgataacatctatctatctctccgtctaaaccaattgattaggctagatcccaattcttcgagtatcgattcttcttcaatcctttttatgtgaatattctcctaaagcagcaacctcttgggttcttcttcttctgggtagaattctctggattctgcttttgctttgatacgattgttttgagctacttgttttttttggttctgattgcgttaagggtcaggagcttagtagactaagat

SEQ ID NO: 38025 - DNA, 602 bp, Arabidopsis thaliana columbia
ttgtgcaagaggcaatccatcttcaaccctaccaactattgttagtttcaccattatcgtttcttgaactattcagaaaattgatgtcttatataaacaagaagaggttgagaaggattgaggatgaagatattctatttgggtatgcaaagaaacatagcgtggtggtggaaagttaatgaatgaaaaactttgggggcgaaaaaattgaaatgaagaagtaaagatttgggatatcttgttcataaagacaactttaaggaaaggagaaagcatattagttttccatgtgtaattgatattttcattctgtaaagtgcaaatgtttaatccaaattttggtttgttcttcatttcgaattgaatcggttttacggatcaaaataataaatcatcaaaactatattttcttggagttattttgggacaaattgtattgcatcaaatcgaattacaaggaaaaataattagtgaaataaatcaaactttcaacaccattattagcaaacttagttatcacggatggaaatgcgattaaaaagtgggaaaattagggaagtatagagactttaattacatggaagaagattgaagaagtaata

SEQ ID NO: 38026 - DNA, 983 bp, Arabidopsis thaliana columbia
ttttgtgcaaatgagcaggtggatgtgaagctcagcgaagacaaggagctttcccagcagctgaagcagcggattaagttggatatgaagcagttcttggagcctatacgcctcaaactcggcctgttcgaacaggaactcaaagatagataaggatttgttccctatatttttccaatttcagccattttcagttagcagtaacaagaacttcgtaaaacattgcatcttacgcttttctgtatccatgcttgttgactgtcaaagttcagttgatcaatcagattttatctaatgagatatacttttatagaagtgtagattattacaagtatatatatatgactactatattttggttatatgcttatacattttggatatatgttcgggtactcattcggttcgagtttggttatggttctcgggtcttgaggttttgatcccgttcatgtatttttgccagttcgagttggggttggttctgtttactttttctagtccatgtattttgcagacctattaaaaccattctgttttttttttggaccaacaaaacccatccgtttttagatacgaaaataaaattttattaaaaccattatttttcttggaccatcaaaacccatccgtttaaagatacgaaatgaaattcgattgataaatacaaaataaagttcaccaaacttaaataaaaaggcatagatgggaccaatgagaaagaaatttcttttctcctcaatttccccaaaaatatataaaccttaagtttacttttttgttgcaaggaaaaacattaatctgtttcaactttctaaaaacaatcatttcaaacgttaaaggaatcatgctctttctttacgcgtttgcaatataaccctagaagaccgcttgtttgtacaactttccaaaaaccaaacagtagtgtaataaacctctgatctctgttttctgctctatattttgtgggtgataatcaattc

SEQ ID NO: 38027 - DNA, 554 bp, Arabidopsis thaliana columbia
tttaagcaaaacaaaaagaatgtcactagccagtattattcatagagatatccgaatttttttttagtttcataagaagaggcatggatttaaagaactccaaagaaagggttgttgatggcggagttgagttctgttccagctgagtttatgatggctgaatcgatcttgtctctaggtaagaacaagaactctcctccttcaattttctcaaatccacatagctccatgaactctatgccccctcttagcgaaccaaccctttcctgtttacattttcatcccaaaaaccatgacaagtaagaaactggacccatcatcatcatcatcatcatcagtgtagatccttcaagtagatctagatgcgtatttttatgcccgattgtttacatgaaatgtttggttggtgagtctaattttccggaatttttcctcatctggattcttagcgacatttcccatgtaagtcagcagagtctggaacgctctcttcactttagcatcatcctcctgaacaaacaagcaaaattactgttatctcaaactttacttga

SEQ ID NO: 38028 - DNA, 950 bp, Arabidopsis thaliana columbia
ctgagacatggaaagaaatagtgtaacagatggccaagaggactttagcttaaagaagcacaatcatttcaaaaagcaaatcatttgtcactttcttcttcttcacctatccatccacaaaaacactttccttttcctctcatcaagaaactccctaatccgacgtcgttcgttttaattcagtgacacaatctcccacatcttcaaaccctttgaaaccagcgattacagagatgcaagatcctcatgtcccatcttctccaactatctcctccgtctcttcctccgatcttgatactgaggtcagttcctgcaatcttatacttaatagataatctaattaaagatcaagctcttcatgtgttttctaagctacccataaagctttatgctataaagtatcaacctttaattagaaaactagtttaaagttccaaaggttatgttttcagaactgcccagaaacatatatatgtacttgttagaacttgatttggtttttttattggtgatgtgaggatttagtcaacaggatcgttcttccatgacagaagcatcacacttggaacgcttatgggatttagtttcactgcaactatgccgatgccatttagagcctcttcacgccgccacgtgtcaccttccgtcgcaatctcacgagcttctagctccaatgcaagacgcaaccaccagagaaagcgtcctccttcaaattcggctgagcctgagccgcatcgccgccgtaaatggtggcggttttgccgagatgacgatgacgacgccgccggaaatggaatccaccgtggaacaggagattcaaagcggtcatcgctcggggagtatctagaggtggaacggaggtttggagatgaagccgtttacaactccgccgaggcagagctagaggatgcggtggtggcacggtaccaagatcagcagccggtgatggg

SEQ ID NO: 38029 - DNA, 963 bp, Arabidopsis thaliana columbia
ctgtaaaataagatcgacattcacgagatgagatacataataaacaaacacaaaaaccttaaaattaggcaatttcatcttccattccatataatattcacatgtcttagattgccaaaaacaaggcttattggtgataaccaatgtatacatgaaaaaggagagggtacttggaataggaagcacagtttcagaaccagaattggaaggtccaaggaaaaagcctttgtggtgaccagaatgtacatatgtggatactcgcagtatgaaccgttagtttccaaacccacccacatttacttctttttttctatagagtatcaaaataaacttagaggagtccttaaacttaatctccaagttcaggttttttttcttattttcctgagcttagctaatcacatcacaaattcagcaaatgatggtagatgaaataagagcataagagtgtaaaatataccttaaaccccgtcaaggtgccttgtcaaattccaaggttttgcaaaattgcaaattctgaatttgtactttatgtcttaaatgggctgaagactgacgcccatctctatttgggccgccaacataatgaaatataaatatgtattagaaaaaacaggctttactcttctgtcaaaaaatttaattgcatgcaagacgcgagtctcgactctggcggctttccgttgctgcaaggctgccacgtatcatagtctatgaccttagctggcgcacgagggaatataaccggtcgtgcttgtgccacacgcatagtttgattgtgcgatcggggaagcgaaggtagctgttatgggcccttaagggacaactgaattggagaattgggccttggttttacgtacaggtacaggtacttcttcgttgcttgcgatccaaacaactaaacgaatcggtcatcagaatcaattttctgatctgatttctgaaaatctggagacagctata

SEQ ID NO: 38030 - DNA, 1188 bp, Arabidopsis thaliana columbia
ttcttttgtaatggaatatgaggatggaagtgtcgggcgcattagccgtttttcaacgagagagggttgttgctgtcacaccgagtcgctgactcgctatttttgtacagacggtgagagcctggactggaccagtaatgggccctactgagtcacggcctttctttttactttttttaccgcaaaacgcgactaaggtgacgtggaaaggccggccctatccaggcaagttgatgaggcattaaattacataaaactcatatgattacagaaaaaaaagaaaggaggaaaaagtcaaaaaggcacagagaaggcatccccttgtgactctgttacgtccgttaatttcggctccccaaccaaaaaaaaaaaaaaaagaaacaaaaactacatatacaacggtaccatgtcacccaccatgtgactagacttataatgtaaggttgtgtggggttgttagaacacgcgccgtcaacaacaacacaaaagagaccaaaattgttccagctaatccacactgggcccaaaacagggcctgtctgctggctcccataggaactcctctttcccatttcagaatgtttcttctcacttttaatttaaggcgccatctcttccagctgttgcttccagtacttgggatctaactccgcctgttcccacatcatttacatttccatatgtcagactccttcgctctaagattttcatttgtaatcataaaaagctacaccaaccttttgcggctatttagtgtagtaagtagtaatctacatatacttgtatatatattcacctgaagggtattgtctttccagaggaacgcacaaccacgagcttccaagtggtggattagagaaagaggaagcagtgatcttagggacgcatgtagtttcgctttccttaatcctccacaccccagcaatgctgctgctactccgctcggtcttaaaccactcgagttcacaaccgctatgttctgtaaacaccctatgttggctagggagagaagtcccacttcagtcacagctgtgtctgacacgtttatctgcaacatggggatcgcaatcagataacagattcaaccagtatattgtagttttttcagctgtcagtgaaggattcaacggtttattacctgtttgagattctgagagaagtgagccagagcgagacttcaatctgagt

SEQ ID NO: 38031 - DNA, 770 bp, Arabidopsis thaliana columbia
aacatcgattcaagagttgtgaagcgccgccgattttcgtagaagataatctgattccaaatttctcttttttgggcaccgtcgctacttctgattccatttcacctcggcaaaaatctggaatctgtaccgtcacagccgaaaattctcttccttcaccgtttcgtttcgctgcttatgtaagattcaatcttcctttgcttatgtatttgttatttatggatactccgatccttggttactactgtgcgtgaatacccacttggagtttaacatacgatactttattgatgaatactttgggaaatctggtgaatttgattgttgttttgagtgatatatgttgaattgttttagaattacgagcaatgtccctggctgatacattttagggtttaggacataactgtttagttcttgtccaattttcatgatattcagacgagtgttagatttctggcaatttaattattagggtttcgttttttatattaatgaattctacaatgcaacatttttgtagatcaaatgattagggtttctggcaatgaaatgttagatttcttgcaatttaattattagggtttcctttttatattaatgaattctgcaatgcagcattttttgtgagtcaagaataaatgtgttgatggagtttaatgacttgttcataagtagtgccattcttgacgtttaggaatcttgagtttatatatcatcttggatgagatttatgcattgattggttaatagtggctttattttggatt

SEQ ID NO: 38032 - DNA, 511 bp, Arabidopsis thaliana columbia
tttttattattctactcagcatcaaatttgtatttatcattatgaaaagaaaagaaaaaaaaaatgattaaagatgtccattacatgtattcgattcgaatttaattatgaacatcatatttattttttgaacattgtttttacaacaagtgcaacatttgtttgatctaacaaaaagattaaaacttttcagtttaaaactattgattcaaaccagatttgaaggccctttgtcgtatcttttatctccacttattttgattgccaagatttggttccgaacatgttttcgacaaagtcaaataaaagctccgccagatagtttcattatcgtctgtttcttataagttagggtcttctaccaaatagtatttctgatgtcactttaaaatcatgtttttaaaaaataaaatttgcagcaaaacatgcgaatgttgaagctgatagtactgaaaataaatagctgaagaaaagcacaagggtaatctagtttctataactgtgaatatat

SEQ ID NO: 38033 - DNA, 1325 bp, Arabidopsis thaliana columbia
aaaaaaaacaacgagaaacggaaagcatgaagaatccaaatcaaagaaattgaaaatggcagggccaatttcgagggttttcaactgcggaaagccacctaaattagggttttttcacgtcaaagatacgcaaccaaaaaatttatacataattccgatctaattcgaaaagggagaaaattgatgattagaaatgatatcgccgaaattgacaattaggatgcgaaaacaagtttggtctaatagaagaagcttgcctctgagaattaatcgagagatcgaggaagaggaaaccaatggagttgaagcttttttgttttccgccgacggtgcaggcagcgttaaccacggtggcgaagaagtcgtcagtattttgattgtgagtgtaaaaaagataaaccctaaaacctctcatgtcttcaaacattaaaacgacaccgcattcgcaatttggccaaaaaaattataagtcactaactaattaggtattaacgattttaattaattgggatgagacgatatatgctctgttttcttttctttactagagatgcactgttgatgtattattagagaccaaattttttgtattccgatgtgttagaagttcacatttttatatggtttgaacttggaaggtaactacgggattaaatatgcctggattatatcgtgtatctaaatcatgatggtgtaaattcgttcttgttttgctttttgctttgaaatggatgttgtagttagtgcggactaatccgtagcggtttagtccataccatttttgggtcggacaacaaaccgatgcggacttagtttaaagactgtccgcagttagtccgatgcggttgtcttctattttttttaagtatgtactattacggattataatttatgaatggtaaataaaaagcggtccggtctataaacggttttgtctgtttggaccgctgtaatcattcaaagtttgtttttacaaatttacccatgaccactgttgaatctaacatagagaagaattgaatgagattgaaaattagttgatgcaggtttctgacattagaaattacttgcctcctgcaacatgtacattgattgaatctacttgctcttatgtgactccattgcgttggccatgtgacatgacttcatcgacattcaacactgtagtagaagaaaactagtgacttaaaccttaagccaaatccaaaatatttgagatttttttctatttttacgtttacgtgtttccttgaaacgattattttcattagttgttctaactataaacgtcaataaaaccatagaaaattacagctggcagaata

SEQ ID NO: 38034 - DNA, 406 bp, Arabidopsis thaliana columbia
catcactgttagattcaacaaactacagtgccacatattgtaagcctgacctgttccccaagatgtgtcttcaaggcaccaactggttctggctctaatgcctccagttactggcacagctcattcgatgacagtaacatgttgattacactattagccaccttagagatgtaaaggctaaaactctaaatagcattagcgcatggctatttatccatcctggagatgagagtgtgcattaagctcgtttgctggcatcatgtcagcctcacctccaccatcacgctgtccaggcgtagacctgtacagagacaagtatgtgagggctcgagtgaacgctgagcactaaactatccagatgaagttatgatgactctaatactgtacggaggactcgcacagctga

SEQ ID NO: 38035 - DNA, 573 bp, Arabidopsis thaliana columbia
ctcgttccgctggtgtactaaggataatttcaccagagagaaaaatcgactgaattagtagagtcatgaggcatttatattaagagtgaggtgtgtatgctatcactttcacgtgctcatgggggaacatacttgagaacaattgaggatggcccgaggctttgatgtaacctgtcattatcatgcataaaggctagacccttcattgcaccctgaaggatcttaataacaaagtttctccttcgttttatcatctgctctttttcataaggattccatactccttgggagcgagctctggttgttttttcactcgcagtttgcgcgtagtcagctgcactatctttcccaccatcacgaaaagccagccactgtaagaatgaattgactcagcctatgttccataaggtatgccaaaatatccacaaactagtgcagcttagattcaacaaactacagtgccacatattgtaagcctgacctggttcccaagttgtgtctcaaagccccaacaagtagaagcagattagcaggcatgcttttgctctgtatagacaagcagaataacaagtt

SEQ ID NO: 38036 - DNA, 1007 bp, Arabidopsis thaliana columbia
tatttcttatgataataaagattataatcatagtcttgtaaaaactataataattgttataagtacaataaataaattatttgatttgcaatctttgaacaaagtttatactactaataatatgataatattattgaagattaattgtttatagctaaacaacatgaagatgtgaagatagaaaccacataaccttattattattagtatgaatttgatctaagaataataataactcaaatatattcgatctataacaattttgtgtcaaaagctttagattgattgttatttggaagcatcttctaatttttcaaaaggatgaaattttatcattttcactctctataaagtactataaactcaattaaacgacataatgaatcttggttcactttctattattgaatcttggatcaacttaattctaactagattacatacgtaaatctctttcttccatcacctatgtttctcaaaaaattcgacaactctttttaattttgattttgatttgaggatcatgaaatcttttagtagtattcctctacatatttgtcttcttgaaagattatatcgagaaacaaaattggtataagctttatatatttcactcaatttaaaacatgaaacgcttctagacactaatatcgagagacttcttctgccaacggtttccggtgccggaggagctctagctcaccggcgccgtcaattctccgattcgcatgttcagtttcttctttgtatgtctagcctcattgcttatctttctcttttcagtaatttttcccctcttttaaaactatctcgaatcctttcaaacctttggcttctggtgagaacttcaaccaacatcaaaaggaaaagatggtgtctggcgatacccatctatcaccttcatcatgcaacacctctgtggaagtcatctataacgatgctcttgcgttttcaatctatggtagaacaccaacttatcgctttgagatctcgttatccgagcattt

SEQ ID NO: 38037 - DNA, 561 bp, Arabidopsis thaliana columbia
ttgttagaacagaggatttggatttaggtgtctgatcatcagaacatgatggttttgtctctactaatgaagtagtgttgttgtctatattctgattattagaagagtccaccttcacaccaacattttccgcgacagtcatgatcaaaccaaaagatcaatgaatctttagatgttggtaataaaatataaaaaaacaactcatgcactggagaaaggttagaggatttaaggagatgattaaaatagaggaaaaattattatgctctttatagctaaaacaattagattttctagtcaagatttttatttcatttttttttgacattagtcaagaaaataagcaaatacaataaattataattatttaaattttctttgtgtcagcacaatttctgcatttttttcttactacatataaagttattattacattaataggattctgtttatttttttaattatcgctatcttatttatctagttttggtaagagagaaaaaaaaaatcgaacccggttaatcaattcaataccgtggcggcaagtgtctctcagaattt

SEQ ID NO: 38038 - DNA, 872 bp, Arabidopsis thaliana columbia
ggatttcgagcgaatgaaatagtttggttatgccgtttaagtgataaaccagagcgaatttagatttgattttaattgaggagacatcagaaaataactgggtctactaaaagcccattaagaaaaatcttatccaatagcaaaagtccatgtgcgtcttcctttcatatggcgaccgcgtcctctccgcagcgtttcgattcccgatagttacccgccgactctctgctccggcgccgcgaattaggttttatcattctacgatccgatttgctcatttccgaagattcacaacggcttctccttcaatgagccagcagactggcgaaatcgatgccgtcgtcgatgcttcgtcggcggagaaacccgacgacgtcgtggtgcaatacgttgtgcttcgacgagatctaatcgattcgtggccacttgggagcgttgtaacacaaggatgtcatgcgtcagtggcagcgatctggtcgttcaaagacgatccggtcacgcttcagtactgtgatccgcagcacattgattctatgcataaggttagtcaacatgaccctaattttagagttctctggccggaatcaatggtggattaattaaaacactttattttttggggattaggtgactctggaagttaaaggggaaacgcagatgatgaatttgtcagagaagctgaaattaggaggaatctctcataagctatggatggagcagccggagaatattccgacgtgtattgctacaaagccttatcctaaatcccaagtctcttctttcttcaaaaagctcaagctttgcaagtgatcattcttgttctccaaaatcccaatttcttaaaattctcattttcataatcatccgaatcg

SEQ ID NO: 38039 - DNA, 832 bp, Arabidopsis thaliana columbia
tgaggcttgagctaatcgaaatagataacgttggagagaatctgaaatcacagcaacaacaatcagtcaagttattcttcaccttggcgggtcgaacaaatgttacacagtgtggagatttaacaaatttgggccttgagctttgaacattaaagcccaatatacttatattcaacgttgacgtgagttttgacttttcgttcccctaatccaaaattgcttctagattaagctatatctctccagaactaattttcgacactgcaacttttttgacgcggaaacaaaatatgaaatatcctaaattccatggagtctcaatctcatccttataaatatcatcaaaactacaaccctttttaacgcggaaacaaaaaactaagaacggttccatttgttttcattgtctagaagagaagaagaagaaggatgtgtttggtgttcgtgtgtgatcaggacgagagggtgatcggaaggtacgcagctcctggagcgtgtccgtactgcggaggagcggttcaagtggttgacgtaaatagccagtggagattctgcttcgttcctctctctaataaatccaaacgtcgtcatctctgttcaacttgcggcaaacgactcatcgtccatggctgaaaacaaaactcccacctcatacgagatcatttctatatgtacatatatccaaatctctgacttgctttgtgtatcgtgtttctaaacgtttgtaagaaaaagaaaagaacatgtcttctcttttatgatttctctgtatatgtatgaatcatgattatgaaaatgagaattttaagaaattgggattttggagaacaag

SEQ ID NO: 38040 - DNA, 431 bp, Arabidopsis thaliana columbia
cccatccaaaatgtgataaagtaagagtttcgataaaatcaagcgtgataaaaaaaacctgggacgtatcgcccaaatcattggtccggtactggatgtagccatgtaagctcatggtcatcaagaatgttttcaggaaaatataaaaagatttccaaaaggtatatatatatataacctcatggtcatcaagaatgtaagaagaagccaagcatagttccatttccctccatagaatctcattctctgaagtctcgccatcatcctcctcctcctcactcaacctttcttcggcttcgatcgaaaagcttgcggggttctttaacccttgccactgctcaacaacattggttgctttgtccttggctgcaattgtagaatcaattctactcatgtacgagtctatcaacttgttatacgcacctgcgctc

SEQ ID NO: 38041 - DNA, 454 bp, Arabidopsis thaliana columbia
tccagtaccggaccaatgatttgggcgatacaataagttcaaacacttgttctacttccccttaaacaagagtttaccaaagacaattgggaatcgtttttaaacaataaaatggttgacaggcgatctatctatggtaaaattaaatgtccaactgtttactttatttaaatgattgttttgttccttatcacatttgctaattaatactatatagactctatgcttaaagccttcaatctagtaaatacagtttaatgttattatagtcatgacactgatcatatcaattagttctactgtactagagatcacaagtgaaattatcaccgcttcacattgataaaagactaacctggatttcagtctaaaaatatcatttaagaaaaccatatagaattaaataaaatattgaaaaagtcatacttattttttaatcatgcatgcaattggg

SEQ ID NO: 38042 - DNA, 633 bp, Arabidopsis thaliana columbia
acatcagtttttcctcgaaatgttagttatatagtgatctttatgcaagggaaaacgaaaatcttaatagatttattttctcaattttcatttaatcgattaattgcctatgaacaactatttgtgagatccgtttactgaattttgtttttcgtgaactaaaccattgatcataatgaatctcgagatctaggttacaaaataaaacaacagacaatatgtacatattgttttatttagtcaatcggtcaaattgtatgtattataaaagaaaagtcatgtttcacgtgggtataatgaccacgtgtaacgtgttcacacatgagacacgtgcctaaataaacatttagaccaaacggccatgtgtgtacgtttatgcaagttgtacttccacataattcagatgcttgaactcctaaaatttaaaaacacacacacgcaacgtgtccccatgcaaaacattcacttagtaaaaaaacttcttttagtaaacggttccgttataagtataacttataaacatttacactcaggaatataatacatagacctaaaccatatgtatggacaaaaaagttacaagaatttatatgcatgtacctgatctttaggagctgagatggcacttggaag

SEQ ID NO: 38043 - DNA, 1172 bp, Arabidopsis thaliana columbia
gtcactcgagatttatattcttttattcaggctacagatgaaactttggttttggtacttgaaactcttcaacaagcaattaaagctggtaagtatacatatttttactctttgcaaaaaactttcagaatctagttatgcagtagttcccacctatatcttattttctttatcatctgctaggccatgaagcatcagcttcaatagagtcgattatctctccagtgattcttaatgtgtgggtggcacatatttcagatccctttatgagtatcgatgtaattgacgtcctggaggtaattaaagtgaatgtggttatcattcattttgttgttagaaatgcaatttgcctagtttgtttatgctaacacttagcactgcttatatcattcttaactgaacaataaaaaatactttgtttgcggctaatttctttcctatggctgtcacacaggcaataaagaattcgcctggctgccttcatccattgacatcaaggattttaccattcattggaccaattttaaataaggtgctgtgcggaatcattatttcaagcttgtgtttcctctagttttactatctttcttccctggtttccttttaatgacatctcggtggtgaatggtgagaatcagccacatcagcagcctgaaggactagcgagtggatccttggatcttttaactatgcttcttaaggcaagttatactagctagattttcgtagtacgcaattattttttatgctaaatggacagtatttgtgttttgctgactatttttctagtcatatatagggtgccccaagtgatatagtgaaaactgcatatgacttttgctttgctgctgtcattcgtatcgtactccacagtgaggatcatggtgaactacaggtgataaaatattccatttctagtttgcttcacctttatatcgacgaaggtcacttatcactagccttttaattggtcagaatgctacagaatgcctggcagcttttatatctagtggtagacaagagttgctcacatggagtggtgatcccggttttactatgagaagtttgcttgatgcgacttctaggtatagttcttcacttactttttcgattagtttatttcacgtccaccaaaagctgaggcctactgttttttgttttcttgttgcatt

SEQ ID NO: 38044 - DNA, 978 bp, Arabidopsis thaliana columbia
ggagactccaaattcgtcactccctttaacctcctccaccttcgtgacctttgagattataataacctttcactaaaaaaattgtaatttctacttttggtggcttagagtggttagcgttaaaaatcatatatgtagtagatttgttctctttttttatatatatattattgtagatttggagtttgtggttgggtttcatttctgttaaagccatggttttacgcttaagttgatattgagatttttgtttgtttgtcttggaatctacaagtgtcggatactaagaatcatactcgtctaaataagaaagtattaactcagtcacatttattaaagtaaataacaatggacaactttgaaaagctaaagggaataatcagttgtatacttgtttatatttggtaactgaggataaaatattggaccgttgggcttaagccataacagaaaagacgaaagtagctctcttccacgcacattcaaagacaaaaaaaaaaacatccttcggatcaataggaatcagaaaacagagaggattaaggaagaaaaagacaagaagaaagagagggaaggaataagggaagggtgtcagtggtttgatctgataggaccggtccggagttcggacccgaatatccgacaacgaaaggacggctgcaaaaacaaataagacacatcgttccatggcacacacacaacacacaaaccacacctctcttgtttctctctctctctctttctatgagtttcttcattgttttgggtgtgaaagcgactagagataagagagagagaacgttgttgaagtgggaagaggtggctcaggcctcagtgtgggtcatatctttcctccggctgcgcgtgcttatccacctccttcgactcgaccccgacagcttcactcttgtctccttgaccagttttttattttatttttaagactctctccccttttttgctacgtaacgtacgtat

SEQ ID NO: 38045 - DNA, 910 bp, Arabidopsis thaliana columbia
tactaaaacgtgacctacagctaacttccatcttctccctgagaatcatctttcgcattgtttagtaataataacgttcaccaatcaaaaacacaaaaaaggaagcttaaaactagattcgttggattaagtaaattttattaccacgacatgatctgtgacaagtaatttacaacgtaagatccctttcccgacatggatgagttctaagcctttcaagattaaaatctcgaactcggtttgcccgtttccttttgctatctcttcgagatacgtcgtcgtgttatggatcgttggatctaccatactgtcccttcttcttcgtctttttacgttctcgttacaaaacaaacttgcgtgtgggaatatatggttatcggatcatcatagttaattaccattatacccttttggaatgattactgatttagcatcaaagagtcaaagactatggtcaactttccttctttcacactatacaattttgttgttcttcacactaaacaaagaaatagtatataacaaagatttacttctcaaatagttaatttggtattgattcttgacattattgagtcaaagtacatgatacaggaaagaaggaaattacattttatgcatacgtgtcatataatcaaaagaacaaggagtagcaatgaaatccatggttgtctttattcttgattttccagagatttctttagctcttttttgttcacctgcaactcgaaaaaaatactcatacactgagaatgattcttattggttacaacaaaacaactatctctgatatcattcaagaaaaaagaaaaaattttgagagagatatagctacctttcccatgggcgttgcgaggcaagctctcccatatcagcaatcttgttggtagctgaaagacagaatattatg

SEQ ID NO: 38046 - DNA, 643 bp, Arabidopsis thaliana columbia
cctgatgtgaaagggagtatatattcccaagtgaaatgattaactctcttcccaagaggtacgcttgaataatattatattgtagcaacgagtactaacaaaatgacacttatacagacgatccatgatagcgaacatgtggttaaaatatatattaattatgaacgcatatcatgatggacaagaattatcaacaacactttaacggaattatgatttataaatcagtataagtagttttgactagttcggttaagggaacaaaagagtaagaaaaatgtctgacagtagttcttctagatctgtggataggccaaacttcggccgtaataacagtgagtatggaattccaaaaaaaaatgctactgtggagcaccaacgattatcaaacattcatctggaagaaattactcaggaagaaggtattatgcatgcgagttggtggaggtaaagaatattaaagagctagttgtataaaaatatttagcaaaattgtatatatgtatatagaaccaaacttttaaagtaagatggagaggtcacatcggaaaatgatgggatgaggcaatgatggaggaggcacagtgttaaggtgtgaaatggaggacgagacagagaggatgcgagaagtaagatggaaaaa

SEQ ID NO: 38047 - DNA, 1195 bp, Arabidopsis thaliana
aaaatccactttagcacacaaccaaaaaaaaattaaaaactgtatagaggtaacagtgactagtaggccgatattgggccaagaagtaggaaattccattaagccaggcccattataaaatgcccatttaaaatttgttttgttataggatcacacgaaaggcggtctattattttgttcgttcttcgtttattcacagcaatcgatttgtgtgtgtttcaatttctaatagcttcacaatggcatcgtctggatcagccgacgaagatttccagtctcgcgttgcgaagatcttcggatctctacccttctctcgtccttcgtcttccaagttttccacgtcgtcttctgctccggcgtcgcggcagcaatcggggtcggtgtggactctctccgacacagaggtagagaagcgggagtggaagcgagattcgtacgatagagacgagattccttgtgcttcatcctttgacgagctcttaaaacagcagaagccttccgaggatgatctcaaagatattgattgcggcgaggattttgatggtgtgtggagtatcagagcctccatgggccttgatcgcactctcgatgacgaggtaaatcaattttggtctcttaacgattgtttctcattgcttagctaattgaaattagggaacagtgttggtcttttctcttggatttggtagattcatatgagaagagcattgaatttttaatgtagtatcatattggtttgtgtgacttatagagtttttgtacgtgaatcatcaacctatgtaaccagctttaagattcttgaatttgagtttttcttgctataactatatgtagcacataccgtattatgaataggatgtcactttctttgatgctgagtgttgtttccatgaattatgcttcttaacacaggcagaggaagatgagtatgataaagttgcactaggggaagagaatgacggtgaaggctgtgggcggattcgggatcctcgtgctaactatgttgctgcaagaattaggctgaaggaagatgaaattgaggctaacaagtttaatacttctgcaagtcaaccttcggaaagcaaagagccacacgcagaagaatcatccgaagctatgccgcgaaaacctatactcaaaaggaaggagaatagttcagattcagaagcaaggacaagtaagcgagtcaggtttg

SEQ ID NO: 38048 - DNA, 1232 bp, Arabidopsis thaliana columbia
ggtgttttgcgttcaccccataccacaggaactaagagaacacctcgtcttaggagctcggttctgaacctatctgctttttgcatcgcaagtgtaacagtctcttttttcccagctagaataacctaacgacagtgtcaatcactactcagaaactcaaaggctaattcacactccaggcagtaaaaagtagaaaaagaaactcacaggtcgaactgtatcccttagctgcacaagttcaacaacgcggttggttgacaggcgtagaggcaaccgggaaagagtttcgtctcgagttatttgaaccatttgttcttcctctttcttgttttcccaaaggaacaatgaaaccataacaacaatacctgcacattgctgttccgaaagcttactcacataacagagaaaaaaaggaatttaagattcaagtggtgtctatgactcacctccaatgttaattgcagcatttcccgtagtttccagaagatttggagcaccatcaccgcctctaattgcctgaaccagtcttggtacggtaaagaacattgagatacccgctgctgctgcaaatgcaaaataaaagaattttctaacgccacgaaacggtgctcgtacttcactgataagtttcagatctctccggaaattatcgccaatatcttccccgcctaacctagcctgaaacaattggaagaaattttcaccaatgagaaagttttccttgggatatgaaaaagatatacaaaaggagagtgcaagacctcttcttgcagctccttaaactcgggtaatgcgcgaaaggatgctaaatcaggatcgttaagaatcgtggcaaacttcagattataatctctcaacgcaattcgcaagcaatccacagctttttttccttcgcccctacctcaaatcgataaacaataggatgaaatgaaagaaaacataatctcatcaggatctttcaaatcagtagatataagacagtttcattagtacatggttcgaggttcttaccggtaagcatgacaacatgctttgttatagtaagcagcttgtgactcaataggatttggagccaaactcagtgcagtttcaaactgaacaagagcatctttcacctgaaagaatccaacatgacaaatcaactaaatctgtaccaagcaaagactcttttgctagctccaagtgtcaacattataactagtacaagcgtatgcagagaattgctaattttg

SEQ ID NO: 38049 - DNA, 526 bp, Arabidopsis thaliana columbia
ataatcaatttcttgcattaaaatttaaagtgggttttgcatttaaacttactcggtttgtattaatagactttcaaagattaaaagaaaactactgcattcagagaataaagctatcttactaaacactacttttaaagtttcttttttcacttattaatcttcttttacaaatggatctgtctctctgcatggcaaaatatcttacactaattttattttctttgtttgataacaaatttatcggctaagcatcacttaaatttaatacacgttatgaagacttaaaccacgtcacactataagaaccttacaggctgtcaaacacccttccctacccactcacatctctccacgtggcaatctttgatattgacaccttagccactacagctgtcacactcctctctcggtttcaaaacaacatctctggtataaatacctctgtatatctttataaaccccaaatcaaaacctctcctatatctcttcaatctgatataactacccttctcaatggcttcta

SEQ ID NO: 38050 - DNA, 557 bp, Arabidopsis thaliana columbia
gacaagagtcattagcatcttttgaccagaaacatgtgtatatatagataaagatagtgaatacttgtaaatcctcaactgtttgttaattgaatatgttgacgcaaacaacgaatcaaggataaggattgttcacatcagaaggacaaacctgagactgaagatttggattgttcacaccataaggattctgctgtccatcatcctgggatgagtcgataaagccagcttgggtgaaaagaccttgacctccatgtgccatatactcctacatatgcaaagaaaacggctcaggtgaaggtgttagtataaaaactgtgttaataggaacggtaagtccagtgaaacacacctgagacatgaaatcattaattccgctgaaacgagaataaccgccttgagaattctgattcataaagtttccaggaaacgccccatgtgctccttgtgtggcataatcaacagcaaatccacccggtgaggcctaccaacaacaattatggtccaaaacttttgaaatacagccatcgccacaaaaaagatagacatttatccta

SEQ ID NO: 38051 - DNA, 562 bp, Arabidopsis thaliana columbia
ttttttttttttttttgctaagaatgtaaatattttatagaaatgaaaacaatttaggtttacaatcgatgattataaacctacagaaatggtttcataacaaaaaaagtaaaaacataaaagcataaaccataactaaaattcggttcatccactcaaccaaagcagtgaggctaatggagttagatgacgcgatccacataaactacatgaaagtcctttttaatcaatctgcaacgcaacagtcctaaatttggaggcactatgtaaccttgtttcgtttaattgaaggtaaatttaaggaaaaacacaaaagagaacaaaggagctctatgataaatacagaatagtacgtgaagttacaaaaatcatattacttactgtatatactataaatgtaaggaatcaatttagaatttaaagccataccactttttcgaaaaaggcatgtattcatatttttggtgtgtggaggtgggtagtgggcatcaactcacacaagaatctcttatcgaatacataattcttctcatagatatttttatatcagaattgttaattt

SEQ ID NO: 38052 - DNA, 568 bp, Arabidopsis thaliana
caatatcgttttctatctagcttaataatgctcattttctatgcatttgattttgtcaaaaacccaattacatgcatttgtctatatggatctatattttgcgtctatgagaatttgtgaacacattcttttctctcacaatgcgatgatttagacccaaccacatgcatttgtctatatggatatatattgtgtgtctatgagaagttgagaactcaataattctttttcgcaatgcatttgattttgtcaaaaacctaaccacacatacatatgtctatctcgatccatattttacgtcaatgagagcacaataaaagcgaaatacaaagtgagttaggaaacaaaatcaataacaagaaaatgtctatcttcctttgtttcctcttactcttgccgctctctttaatcctttttaaaaagcttttaccatcgaaaggaaagcttcctccgggacctattggacttccgatcatcggaaacttacaccagcttggaaaattgctttacaaatctttcacaaaatccccaagaatatggaccggtggtacttctccgtttaggggta

SEQ ID NO: 38053 - DNA, 505 bp, Arabidopsis thaliana columbia
cagcaacaatatcgtaaagaacaactaaaatcgtcatcgcttcatctaacgcctttagccttactgctttggttgagtggatggaccgaattttagttattgtttatgcttccatgcttttacttttttttgccatggaaccatttctataggtctataatcatcgattgtaacttaaattgttttcatttttatgaaatatttatattcttagcaaaaaaagaaagttgtatatatgctaagtcgtgggcaaataaaaaagtagtccaatatgtgagatatgacctcacatctacatgccttcaatttgagtcattttcaagaatatatgtttataacaattgattttagatgtggatgtgatgcctaacataaataaagtagaaaatatacaatcctaaactacaaccaaaatttggaatggtgaaacgtaaacggttttttagggaaattcaggatggtcatctaacgaccatctatctttaattcattttacaagtttgta

SEQ ID NO: 38054 - DNA, 1042 bp, Arabidopsis thaliana columbia
tgccaacatttctctggatgggtgaaataagcataattactaatttagaacaaagatatttaatatacgataaaaaaaactactacctatgttcctaaatcctaacagaacgatgttttagttttttcgcacatgaataagtaatcttacttttttgctaagtttttgtaaatttaataatattaattatgtttttctctttctatattgataacatatgaaagtaataatgatgttgaaacaaaacattaatcaattatgaaacaaaaaattccaaaatatcaatctattagactaagaggcaatacttaataggggacaaaaatctggtcttaaagtgtgctacaaaattttcatgcacacgaataaaaaaaattgtattaccaaattaaaatgtaaacccatgcatactttacgtacatacagtatattttttttgctaagaatgtaaatatttcattaaaaatgaaaacaatttaggtttacaatccaaagattatactcctaaagaaatggtcccatgacaaaaaaagcaaaaaacatggaagcatagatcttagaaacattttcagtccatccactcaaacataagcacaaatgctaatggagtaagacgaagtgatgacgattttgatattatttcaaactcgaatcttcgactagaagggcgaatgcaaattgaagagccgaattaccaagatacaagacactagaagcctttcacaggaggtccgagactgtgccgtcaacggcccgtcaaaggattccatgagctctcacagaacgaaaccccacaaaccaaagaatgtgaacaatgtgagctcaccctaccaagttccttcccgaagtcgcatagtacagagctagatttttgagagctagatttttcaactcaacgccacactgaacaccaatagtcttactaactcctctagtgcctagtgaaaaagcaaccatagcaaaacgcattgcaacgcaagaactacgactctaggcaacatcaatggcaagacacaacaaaaccagggcttattagcaaata

SEQ ID NO: 38055 - DNA, 689 bp, Arabidopsis thaliana columbia
gtcaatacatttgaagaaagaattgctcagaatatacagcaaggaaaaaacctggagagagcagctctggaaaagtggtattttgagatcttctcctatgtttgtgcctgaatgcgctgattctgtgggcatcgaagaggtttttctttctgcaatcagatattgttggttgcattgttacaagttttccctactctatcattctagcttgcataagataatactctgatgtttggactctctatttgtaggatccaacatgcatcatatgccagcagtttcttcatctttctgctatcgtctgcaattgcaggccatctgtttttgcatgcttagaggtaaatatctatatctagctttttagaattcgatccacttcaggcaggctagcctttttttataaaagagaaactgttgagggctctagaggtgcattacagtagacatattttttctgaagattcttgtttcttgatgttgttatttacctaagtgtttataatctttaatttagcactggaagcatctttgtgaatgtgaacctacgaagttgcgacttgaatatcgttatacccttgccgagttagatatgatggtacaagaagttgaaaagtttggtgggtgcaaaacacaagaaaccaaaatctcacaacggccgagttcactctggaatttcaccaaatcatgct

SEQ ID NO: 38056 - DNA, 509 bp, Arabidopsis thaliana columbia
caaaagaaacatttctatccataaatttagaatatatgtttccttaagattatttttacagtcaatgctaatctgcaacaaacaaaaaagtcttattttgttgtgtatccgtagtatacttccttctataaaaactatcaataaagatttgataccaaaattaacaaaagaagattcattgaaatactctactatatttcttcacccaaatgtctcaaattataattcaatctggtttcattcaggatctcaacacacacaactagaggaagcaaaaacttttctctgtgagtatatattttgttatttcctctgttttgtttcatatttttaattgcaaatcttaagaacggttacataaacacacgatcacacaaacacataacaatccgttttttatttcatgcatatcatagagacaaaaacagaacaccaatcctctgtttctgaagaccgatgaaagactttacagatacaatatcggagtcggagtgcgacgatgagataag

SEQ ID NO: 38057 - DNA, 438 bp, Arabidopsis thaliana columbia
gtttgtactttgtaatgtcttttcttatcttattatatacaattttactttctaacagttctttattatctatttggtttgttctttgaaatgataattacttggtggtagtctaaaattcacatttaagtttattatcaaatgtactacacaattacaatcctctctaaattacagaaaaacattctcaacagatccagatttgttaagataaaatattggatctacaatttaatatgtttccagaaaaagttcataaattgataatgcacaatctagtgaaaaagaggtaggaaatccaaccccaatttatgcaaaaacatttccaaattgaatgtgagtactaaacgatttcttggacgagattgaaatctgaaaaagagataagaaaagtgtggcaagtttggattggaattgggagataatcgtgcaagtaag

SEQ ID NO: 38058 - DNA, 541 bp, Arabidopsis thaliana
ctgaaactgcagtactttttttttgatatactgatattgcagttcttaataacgaaacaaacttgtttacttcaaaatatcaaaaagtcattcctatttagaggtctaaaacatttatcagctgagaaacatccactacttaaacaccaacacagaaagaacccataaacgagtctttattttccataatataaacagaaaaaggtttctcgtagaccaaaacattagagtatccttcaggtgtgtatgattttaaaaagtactagcagcttcggtccacacaccacaaaatgaataatttaccccaagagaaagaggctcttctatatgtatattgccccaatctggtttagattccaatgacttatctatttttcatcatcatcgcctcatgaaagctgcgaggcggagatgaagtggacggtggacctcctctgaatctctcaggactacggcttctctctcttccccatcctgagctgccactgcttcaaccaccaaaaaccgatttaaagttaataatgagaaaaagaatcaagag

SEQ ID NO: 38059 - DNA, 402 bp, Arabidopsis thaliana columbia
gttaataagaactgcaatatcagtatatcaaagtgtaagtactgcagtttcagcttacaagtcactgactactcttaatcgactccttaacatagtgtctatacaaataccccagacatatttctccattaacccttcgcatgaaggaatgatcgaagattatatgatgatacatatgtctggttgaatacattactgaagatcagtgttaaggcaggcagtagactagtgcaaatgcagttgcagatatcttgtcgcaacaagcagtagagagttaggttgacttatattatctcagaaatgtaccttcatggccatattacgttacagatcttgatttataaagttcaactagatttcatggagtcatatctacttcaatctgcttcaggtaatgtgaat

SEQ ID NO: 38060 - DNA, 497 bp, Arabidopsis thaliana columbia
aatgaacggttgcaggaacaagaagaatacgacgaagatgaagatggataccaggaggaggataaaatacacggggttgatgagaacatagatctcgcccaagagttagaagaaatgcatctcgatgataaagactctaatctagtcttaggctttaatgaaggagtggaggttgaaatacccagcgatgactttgaaaaatgtcaacggaactccgaatctacatttccacttcatcagcatactgtcgattctttagatgatgaaagaccttctattgagacaagccgtggtgaacaagccgcccaacctgctgtcgtttctgatcccttgggcatgcataatgcgtctaggaccttccagggtgctgaaaccacgatgcagaacttgacagttcacccaaatattggtcgccagtcatttgaggtggccagtaaagtagactccacaagtaactctaccgtttctactcatcctgtcataccacttcacagcgc

SEQ ID NO: 38061 - DNA, 1048 bp, Arabidopsis thaliana columbia
gtctcgctctgtatggaccactgtgatgcagcaggacttacaggtgacgatagttggttcaagactgtagtactaactggggggaagcgcgtgtttgcctggactctcaggttcaattactattagcgtctttcttttgcaaatgccatcaatttactcggagatacgtgaatggcgagcttatgggttctgttttattttgtgtgatctgtatccagagaggctagagagagaactgcaagatcaccttccttcatctataagtaacggaatcagagtaatacctcctccttacggcgtggacacatcatggcatggggcaaagcttattagtaatgtaagtgatattatttttcattcatactcatgaaccattagtaaatgatacaacagattatttctggagttctactatctgagatctacctttcatattatatacacgttgggcgcatttggtgaaataagcatagtgtgcaaataatgatgcataaactcacctttacgtacttcatttctataccggacatttatctgaagcttgttctctagattaatttaacatagtgaagtctcatgaacttagttagcctcacgcaattgcggttgtcctgattactatgcgcagttgagcatctttcctggtccttggtgtatcacaaggaagcagttccgtcgcaagtcaagactcatgtggtgaatctttcctaccatcgcacagaccgagtgagaggcaggttacagctgttataaggtactttgcaagtctttagataagtatgtatatgtatagagtcatacttgattgtactcaaaagccataaagaacaaacagaaaacctttttatatacatacagtatttacgagagattgttgaaactcttggtgatttatatatcctaaccatttcactatcttctagttactatttacttcattggtcaattttatataagacgagacatgtagacacacaaaggccattacaaattatcatttagaattttttgaactccctagtaacaaaagaatgagacagtacaacag

SEQ ID NO: 38062 - DNA, 661 bp, Arabidopsis thaliana columbia
tctctagtaacgtgtgctatagagcaccatagtgtggttatgaagtggagtcaccttatggtatctgcttccgcatcttctgggttatcagctgaatgttatggttctgaagtttagacccagctagacctgaaatatatatagtctccttcaggcaatagaataagactacacaaagaatttcttacccagactcggacaccaatgttaagctgagttgatattaaagataaatccaaccatcaagcttccaatctttaaggagcttatcctaagatctatgatttatcgaagttggcttgtcaacaatagacggggacctgctggacccacacgaggctcgacgaaggcggggaaaagtgaatgccttaggccatgtgttgctgataggcccgagagctccagttcagtgtttccgaacagcaactgagcccttatcaatatagccaggctacatttctattcagatcaacaggcggggcgctggaaattatcgacagctgattataacgttatctcttaccactcaagactgccgcacataatgtcagacgacgatgatttcatgcacgactccgctgatgaagagtaagtacaacacctctagagctctggccaaagagtcggctcacatttgcggacgttaggtatgactttgaat

SEQ ID NO: 38063 - DNA, 580 bp, Arabidopsis thaliana columbia
tatatgttagttatatttcacacagttatggtgcaaacagccaaacacacttgggaagtatgtttctcatcgaacattttggcattactattcgtaaatgtgtttttacttttcaggaacaacaaccttcaaaactcactcacatgacaacaaattgagtcattgacaaaaaaaagaattaaaaataaaataaaaaatatcaccatgtttctctaaagtataaaccaagaccgatttgaaaccccaaatcggcaaatatatattaatattttttcgttagatgcagtttaaaaaaaacgaaatatacacatgctctttttgccagggacagaagggaaagataaaggttacatattgtactatttcatttttgcttataattaaatttgatttttttgggtttgtctggtgggacatctctgtgcgtgtacgatcctgctagactttgggaacttggtgtgtgtttctctgttgcagtaaagatcatacaatataatcttttgcatatctcattgcagctttgcttatataaccccctcttccccccttgttggtctatttatgatgcataaatagtttg

SEQ ID NO: 38064 - DNA, 605 bp, Arabidopsis thaliana columbia
  unsure (1)..(605): unsure at all n locations
acacaagaacacacctgctggatgtttgcacagactcattgggaaacaacataagtgctttcagtaactgaactgcaggagctacagaatgaacccctgtatcctttccttgagatgccaaacactctgcatagctatagattagttcaacggaggacatcacgacattgttcatagtaggtgtgtcgagtggctctgactccaaaattccccatagcacttgcatcagattatcaaccacttcagagcctacataacaaacatatctcatataaacaaaactatatgaaaggcagattatatttgtatgacaaacagccgctcctattacataatacaaggataataaacaaaattgtgtttgaattttgaactacacatgcaaatagacacactgtagataataactgaaacagcatataccattcatctccagaaagacggagaaatttgatttacgggtcaaagctactttagacaccgcccgcatctgagcattgaactcttcaacaatcgaacctccagtacccaaaatccccaacctcgaagaaagaatggaggtcaccttgaccactccaaggagtcgcatggtntcttngacctat

SEQ ID NO: 38065 - DNA, 784 bp, Arabidopsis thaliana columbia
cctgggtcaggtttaaccatattgcctctcccactgaccacttcttcaaagatttttctacaagatgatgataaatcttgaggagaagtaacagaattgtatcactttttgactaattgatgtatctccagagatcttagagtggatctggttttggacccaccattgctttcatgatctgctagaaccatgtgcttgtgcctatcaagataggaacaatggcatctgatttgttttccaaagttgggaaaacgaaacaggttttttcaagtagtcacaggcaacccgtagttctgaaatgttcttatctgtccatcccaaccacctgtgactatgaccataccccaagatagagagctggatgctctctggtaagaggacttgagaaacttgtaatgagatgcattcatcgcggatgtggacagaggatttgcgggtaggttttcctctggccatgtcgcactccctttggatattgatccggggacaaatccttcgttgtgagataagcatgatggagaagaaaacgggagagttgtgttgtgatctgagaatccacaccatgttgctgcaactgatgcattggcggagaaacgttcaaaagatcgaatctttttggtttctgattcctcatcattgctccatatatatacattggagtcctcacaagctgaaacaatgtgttttccatcagatgtgagagatgctgatgtgaggcttctcgtcttgcaaacgcctaaagattgaaaaaacagagatgggattagtttagaatcaataatag

SEQ ID NO: 38066 - DNA, 518 bp, Arabidopsis thaliana columbia
gtccagtcaattgggaacaaatgtcaaggttttttattatttagacctttgagcatgatcaaactaatttcttcacgcacaagttcatcgatttctttacgaatctcagggttctcacccctcaaatatcaactatgactctacttcagtattggtaatcctctcctttccatcaattaaactaagacttaaaaaccatgaagtgatcaatatgttttgtttaagcactttctgatctctggaaacattaatatgcatactctagagtctagaattagatgtgtagttaaaaatcgaacaattcttggttcaccttttcattcacctctttcagccaattagaatatgtcacctaataaataaataaactcatttaattataaaatctataatcttaaccactatttcataaactcaaaccgatatataattttgtttaattacaaaatttaaactctaattctattttgtaaaccaaaccgacatttaaactcgattaattgtaaaatctaaactta

SEQ ID NO: 38067 - DNA, 594 bp, Arabidopsis thaliana columbia
tttaaaactgtattagttcaagataacaacaatttgtttgttgaaggaccaacagtcgttttccgttttgtgatatgaactctgttttgttatatttgtagtacccgctcttacaagccggggaggaagagtttgtgtatgagagttgttccagttttccgacaactgctggatccattgatggctctttcacctttgtacctggaaggtatatgatgatgtgaagaatcttagaccacatgtcttgtagttttgaaactaaactggaatcttgaccttatgattattttttcttagtttgagagatccaaaagggagtcaattcgaagtcaaagtcgtagagtttcctctggagttaccggactacatcttctgaactctttctggcacaaggttcgttactctttcaagataatttgttgtatcgtttgctttgtccgtacagcatgcaatgtcctaataaaataaaggtgttggatcaactggtttacaagttcatgagaacagattattcttaacagttttacataatagcaatagagtgaatgatgagtacatataagtaacgacatagatcgaattagagttgagatt

SEQ ID NO: 38068 - DNA, 745 bp, Arabidopsis thaliana columbia
tccaacgatactgtagacttaagccaggcttagaatcatatcaaaacgacattaacataaacaagtcgatagaagcacaaacctgagtttcggcatttcttctgtcacggcctcgctaacaccaaataaaacaactaaagcaacaacctgaatacacagtcactggaaatgttacatataaacctagaagggcgttttccaaaaaaatgttttttgatcctctgttttttactctatgaaaacagaatcgtttataatgatgaattattgccagcatacaaatcacaaaattttctgttttttggtgacatacaaatgatttcaaaataacccaaaacctttattagaatcaactgtatgttaaaaaaaactgaactttgatcagattgatagaagaaacaaaaaactaaataataacaataggagctagcaacatgtatactatttcactttttttagagtttctaagccaatcagaaggctctatttcacacccactcgcacaaagtgagcgttgagcgcgtgagagcatttctgtgggtataccctttccaaatcatgcctttttcaatcgacgcactagtctccaaaattcccatcgcgtgaaaatttgtgttttcttctctaaaccagtataaaccaaaccacaaatcaattctaatttcaataccaatgtataccgaacctaaaaatcaattttaatttcaaaaccgatgtaaacctagtaaatatcatctacaaatat

SEQ ID NO: 38069 - DNA, 1313 bp, Arabidopsis thaliana columbia
atctttgagtcctccaacttttcttgatcctaacattttgtttgcaaactgaaaaactataaatgaaaagaaaactacaaaaatcaggtttgcttaaagaggaagaagctaaacacatcacgtgtagaaatgctgacatgtgtagattttcttacataattaaactttcacttatatatttttttcatttttatggtttatttataggggcattagatcggttagagaaagcacgaggtggtctggacgaatcaaatcgtggtaagtgtcattccacgggagctccgaacactaattagcctccgattggttccttcctttttttagttaaacatcatccaaaagtggataagcacgaccttaaataatgaacggaatgtggataacctttggccctaacctacgatctgtcaccggaccgcaagaacattgagacggcattctccgtcaccaatatctcaagaggtcgtgacacaacttaaggctttctaaggactataatatatttcgcgccagaataaatcgagcaggccaattatcattacttatccgcattgtccgattaatccacgatctacacgatccattctcatatcggactgttccaaatggatttccctcaaccttctaagtttttcccgaccttctaaggtttcctagaccaacactaaagtttcattaagctacactagttcttagagctaacctaatggttttggggtttaccggcagtcgcatcgtacataagctcggcccgactgatggagagtcattcctttacatgtggacttgatcatatctaatgctccttacccatgatttaccacactaattggccggactgatcttgccttgcattggcttgatcttgcattttatccgacagaatgcacgtccggccgtccaggtcatagtcaaggtcaggggcattacattcttccccccttaaaattattcgtccttgaattctaaggattaagggagtaattagccttaagagaaactgatttcttcgttggcttcataaagcttcttatactaaggatctcgttttgggtaacaggtctttttgtaggtatggtctccaccattatttcttgcaacctcttcctctacttttaggaagttgatacaagcctttaaactaacagactccacctctctcttttctttgtatgtaaattttttttagcgtcacctcatacggttagctaacgactttaaattctcggcttcctagtactactaggcttggtctatgatcctaaggttccatcctaacttttatggttcttcctaactcttttgaaatg

SEQ ID NO: 38070 - DNA, 513 bp, Arabidopsis thaliana
ctccattagcaactggtggtggtgatgtagtcaccggaggaggaggaggaggagctctatttggtggaggtgctgacggaggtagcggcgatgttactggtggtggtgtagccggagaagtagcattattcagtggcggcggcggcgaagtcaccggtggagaatttgaaaccggaggttgaaccggtgttgttgccatctcaattccgatcaacaaatcaacttctcattcaaaaatttggaatctttcctccaagtaacgatcagagacgatgatcaatcaccaaatgaacaatcaaaaacacctaaaagtcccagactttgagtatgacagtatcctgaaagtaccaaactttaccaactaagaacactaaacgtgaagaagtagcaaactttcgaaatcacaacacagctaatttcaagacaaagcagagaagacgatgtaatagatcaaacccagatcggccgagcaaaaaaaacacaaattttgctttgcttccaccaaaattccag

SEQ ID NO: 38071 - DNA, 501 bp, Arabidopsis thaliana
cctacaaatctttaaaaataattatataaaagcacacaaactgtgaaaataaaggagatgaaagagagataatagagagattcatttcatttttgtaatctaaaaattcattcacaacaactataaaaataaaataaaacaaacatccaaaaaaaatagtcacagaattttggtttccgatcttctgaatatccacaacaatgctctgctatgtcggcaaagccaccaagattttcattttcatcgtcaccgtcgtcttcgtcattggcctcgtcgtagccttcggtgttctccgccgtcactctcaccactgctccggcgactattgctcatcttccaccgatccctcttcttcttcttcttcttcctcttcttctacttctcctttcataactccattcccaaacccaaacccgaatccaaacccgaacccgcctgttctcggatcttctcctccatctccaactgattcatcatcatctacttcaatttcccaaatcc

SEQ ID NO: 38072 - DNA, 804 bp, Arabidopsis thaliana columbia
tagtggatcccatttacttatcgtttattctttttgtgtagggaaatgcaactctgttctcaaatacatagttgatacgttctgggaccagttggccccatttcagtgcttgacctccatccaggctttcaaggttaagtatgaacaggtactgtttctgggtcttgaattatacttaggaaaattctgtctgtatctttttgtaacaatgtgtccacagtgtttagaaagtgccggaccaaaaagcacttctgatgcggttgatccaagaagaagagttgacgagcgggcattggagaaagaggaagaagattatttcaatgaagacaggtttaccactgggtgttaaaacaatgatttttattgtattttctttactcttcaccttttctcacttttttaaatactgacagcgatgaagaagattcagcctctgcttctaatacacaaaaggaaaaacctgcttctaatatacagaaagaacaacctaagcctcatctctccaatggagtggctgcaagccctacttcttcaaggtatagtagtttgtgaaatgtatataatgcaacatctatgttttaatggatttattgcttctatagtccgaggtctggaggcttggttgattatgaggacgatgaagatgatgaagactataaacctcctccgcggaaacagccagaagcctctgaggatgaggaaggcgagctcctgaggctgaaacgaaaatccgctcttgtagaaagagaacaagagccgtccaagaaaccacggctggggaaaagttcgaaaagggaaaatgta

SEQ ID NO: 38073 - DNA, 569 bp, Arabidopsis thaliana columbia
cattctgtctcccaaaattatctttaaaaccaggtaaactataaccattgtccaaaaaaattactagtgggcctcaagagaggatatgttaaataacttaatttcaaatttgatttaagagtggcattgtattagtttctgttatttcatattcttttcatctacttcttgtattttccttgacatatttgatcatctcatgcttagttaccatttaacaatactcagtatattaaaaccaatatgcaaaagatatatatacctagcttatttaaaaaaaaaaaaagatacataatctctttatttttttcggggctagttgtattaaacgcaatttttttttttttttttttttttttggacacagattaatttcatttataaaattaaggaggtacacgggagagacagagagcctctttggcgagacatcggcataccgattcttatctcgcgaaatgaaattgaaagcaccattacagaaggaagctgataggtgaaggatatcctagcatatcccatggatctccacatgagggagatcgaattaagggctttgctagtaatac

SEQ ID NO: 38074 - DNA, 613 bp, Arabidopsis thaliana columbia
attgagcatgtcaatcacctgtaaactgaggaaacgaaactactcaattaccccatctttgggaattctttatctgattgaattctttgtttactctattgttgtttactgcatcttgttatctgtcgcttaatttctgcaattctttcttgttactcgacctcatactcgaccacccagttgtttggcaacagactgtgcagtcgagtatctgtgttttattttctgtctgttactcgacctgtcactcgacctcacccagtgctctgcaaagagctgtgttggtcgagtgttttactgtttctttttgattttctgttttctgcatgttcacttaggactgctagaacaaaccaaaacctgttattgcttggcttgacttagtgacttctgatcacatcttgattgttagcatcacactcatttggattgacaaccttcagtactacaacgacatgatagtgctttaggtttaattgacttaaaaacctattatcaaataccaccgctgagtatgtatttcccgcctcggaatatgtgaagaaaatcaagcaatgaactcggtgctatatcacgaatgttgactacattcgataagttggagccggagatg

SEQ ID NO: 38075 - DNA, 963 bp, Arabidopsis thaliana columbia
tttttttattcttaggcggctagggtttactcagctaggtaggactcgtgctgataacgtgttataaacagagaaagagatagaggaaataagtgtgttattccattgagataaaggattctttatataggagtacaaggaaagggtaaaaccctacaaacatctagatgatgggcttagatgatgggccttataatggacatccatctttattcataacaaatttactattcacaatttacaaataggcattttttattatttgcttacactaaaattcatacaacacatttagtttacagacaaaaatacctataaatcttgtatatttatatattaaactagattttaaccgcagtacaccacggggacaatttattttttaaagttagtatacataaaagtttgcaaattgtatttatctataaaatatttttattttatagtttataattgttattaagtaacgtcctgccaaactcgtcccgccaactcgtcccataaaaaaaacatttattttattaatgttaatcttatttctgatatgtttatgaattattgtctaattattttgtaattttgtagtaattatatgctatcaaatatctctgcagtttgatgattataactgaattgttatagtcatggagaaaagcaatatcaaaaatgataattttgtagtaattaaatgatattaatattttggaaggtttattttagtaactaatcgtgtagttaatgtggagagatttagagaagattgttaaatattaaatatttaatttaaagatttttttttaatgatcaaaaacaaacaataaaatttaatggcagccattgtaaataaatctcaattctattaatttattttgcaaaataatcgtaaaaatgtatatatagattaatccgtgacaaataataaatagtctgtttttatgtttttgacagcaaaatcttatttga

SEQ ID NO: 38076 - DNA, 603 bp, Arabidopsis thaliana columbia
catgaacctttttatttgtattatcagttcatcatatataatactataataggttgagttttagaaaacaactgaaattctgtcacaaatgtctagatgaagctgatattagttagatttttttatttttgttgttgttgttaatttccctagaacattggatgaaagaatttcgataaagatttaaactccctctgtttcatattagttgtagtttaaggtttttttcacacaaattaagaagtcataaaaatctcatttaatctacctcttttatataaaaacatcatttattataaccaattcaaccaataaaaaaatagatgattaaatataattggttaaagaatactaaatatatttattatttgcatagaaagttgaaaacaacacttaaattgaaaaaaaataaaaacccttaagctacatttatatagaaacagagggagtattgagttgcaatagagtatggggtgaattaaagttgaaaatttaagcgtatgcaaaatttgctttcacctatggaaataaattgaaactactctactctttaacagaagacaattaatattaatgatttttttttgttacatctaatattga

SEQ ID NO: 38077 - DNA, 1405 bp, Arabidopsis thaliana columbia
gtttcatgatgagcgcaactgttgatttagaaaagagcaggatgcagaaaaagagaatggatgtatgatcatgccaacttacgaaaccatcttctagagccttgacatccaaatcttcatctgtgtgttcttgttctttagcaagaaactgcaaaatatatacaagtcggaatcttaaacacaatggtacacattgaatatccaaaggatttgtgaagagaatggttccaagtttttctttacctctagacgaaagaatttcttaacacgggtatcagttttaccagcaacaccaactgattcaatttctacaatactcttcttctgagtggtaaaacgacgagccgccccctgaaattgccagatatcttaaaatcagagtcgaatttacaaatcttgcaccttctgaaccaaactaatataaaaacagaaaagtctaggtatgagactcctgaataaggaataaactcacagccgctgaagcatccctgccaagctgggcaagctgagcccctaaactttgttggttggacatgaaattcccagcaccagggtgacgattagctgaaacagcttgccaactaggatactgcctccacatgctttgctttgttaccttgaaaccctgttcatatgtagacgaagcatcaatttccctaattcattgaccttttcacaacatcaaagaatatagtaaccattgcaagcatagatcatgttcttagcatacaaaaatcgaaccaaatatctgtttctgagacgagttatgttaagaatacaaaccttgtttgatgagggtgatgttggaatttctatgttgagagagcagtctttagggaaaactcctttcgcaatgtctctgatagttgcgtttatcaaaggtaagcagacaccaacagcatccttaaagtgactttcttggctttcatttttcttcctataatcgatacgaaaaattattgccaacaaatccaaacatgtagcagcaggcatttccacgatatactcaccaattcaacgatattgacaaagagggtaccccagaaatcaaagcctccctgcctccagcaactgcacctgaatagaacctggaggattctcaaatcaggaaacacagaggaaacgaccagacaaggaataaccacttatttacaagataaatgcacttacatttgatggccacagcttgatccctgattaattccactaattacctgaagataataagcaaaggcacagatacaaaaattaaaaaataccaaattgtcatacagtcaaatgataagattgtcaaaatgctaaccagtataggttttgaccaagcaaaaagcgctccagataatcctaatgagatgcagtcccaggagtcctgagacaaaagaataattcacagccaatgaacaaa

SEQ ID NO: 38078 - DNA, 732 bp, Arabidopsis thaliana columbia
gaattcatgaaaccattgactgtttctgtggtagaggtcgataccgtgagagattggctaagcgatttcgaagatccagaagaaacctccgagcagaccctagttgtgcccatcaacaatacagagatcccaaaaaacaaaaaaaagatctttgctttggagaaatcttagaaggaatcagatcaaagtcttgaaatttggggaacacaaaaaatccagatcgaagaaaggaagaaaatttaggggttttgagagaaaacaaaaaaggaacgaaattggaatccggaatcggaaggagagaagaagaacggtgtgagaatcggcggaagtctccggtagagattgatgacgtcggtgggagccaaaatggaaagagaaaagagagaatgaatataacgaaagcgatcatgaatgataacttgtttggtttgggattttgtaaaacagagtttgggcagctagagaagctgtagccaatcataatattttataaattaaaaaattgttaatattatttatttatttacaaattttatttattctttttatctcaaaatttctacattctctcaatttttttttttaagtgctttcacaaattatttgtttttctaatcatatctttttaaattaaaattttttttttttacagacatttcttaaatctattatttcaattttattaacttttcaacgcttttttttctactttttatttcccacattagttag

SEQ ID NO: 38079 - DNA, 734 bp, Arabidopsis thaliana columbia
catctgcggcggcggatcgaagattccggtcaacacagattggagttccgaggcaagatctagtagggttagagattctaaagatgatgatcgatctgctgtgtttgattcttccgtcgtcgtgtgctctggtcccgcatcatccaagcaaagaacttggtagaaggatttgaatcccacggtgaggggtcaggaggtgctggattagtcatcgaggggagccgacaagtaggacgaacgacaagaatcgcgaaggtttttggtgtaaaagatctaaaggtagatgtgagcaagatctcgaccgaaaaaatagagataattttggatgtatgatagagtttacgaagagcagaagaaaaccggagccaaaccacagtattcttgaacagatagcgagaaggaagagagaaatctcgatgtcggcgagcaaaggctctaccggcgccggagaaagttaacggcgattcgacctcgataatggtgtttgggagcttttgcgagagatggtttacgaaatcatgagaatagatcaacttacttaatccattaatccaacaattcagatgagttatagtttcatccaaaccatttgttaaatgaattggattgacccattatccattagacactaaatccatatggatatagattggtttaaccaacttaaatcccctacctatatattaatagagaataactttctaccttgatatttacagagatgtcatgctaac

SEQ ID NO: 38080 - DNA, 1176 bp, Arabidopsis thaliana columbia
  unsure (1)..(1176): unsure at all n locations
aggtcagatatcccctaaaattgagtaataataaatgataaataagcattaaacaaaaactaaaattgagtaataataaatagtaatagttaaactaaaacatttccacagcttcgtccacttttccatgaaactaaagacaattatctgttatttgtttttaagtatatttattactattactcaattttaggataaaactagattttaaaaataaatgttaaaataaaaggttgaaaggaatgggaaaaaggtggtccacactccagacagtaatggtattaagttttgagaatgtggcaacaaaagagggagaaaaggtagggagggcctaatggcaaaaacataaaaatgaaagagacaaagcaatcaatattcaaaaaaaaaaaacacctgatgcatagtactccttaatgagtatatcattatccctttaacgaaacctctcagacaccattatcgaggtcgcatcgaaatttaacttctccgcgccggtagagcctttgctcgccggcgtcgggactcctctcttcctttacgctatcgtttcaaaaaaactgttgttgggctctatttttctcctgttctccgtaaactctcccacatatccaaagttatctcgggtttttcggtcgagatcttgctcacgttttccttaagatccgttaccccgaaaaccttcgcgattctcgtcgttcgtcctacttgtcgtctcccctcgaagtcaaaaccagcacctcctgactcctcgccgtgggttcaaatcccaccactaagttctttgcttggatgttgcgggaccagagctctgcattgacgctggagtcgaaaaagcaaaagacggcggaagaatcattcacagcagctcgatcatcatctttagaagctccaaccctactagatcttgccacagaatttcaatctatgttgaccggaattgtttcgccgcctcagattgggaggaagacaaaggtaaagctgcttaacctaatcatgctgaatgtctctcagntttggccaggcccaagagtgctctacatcccctgcagcccattagacattctgtctcagcccaacaggaaagtcttcggcagaagcccaactttcataaggcccaggtctgttctttttttcttattggcaagacaacgtttgacgatctcttactcggtaaca

SEQ ID NO: 38081 - DNA, 776 bp, Arabidopsis thaliana columbia
aaatcagttatgtcaatggtccatgtatgtttcgaacttgcgacctatggtacttcttacaaagttttgtaagaacttatgttgtatatatttacactatcacttatgttgtataaatctatttaataataaactacaccatcaagatatatatggtattaaaatgaaataaatttccttaacaatgtaatagatttcttaacgataaaactatgttgactacgttgtcttgtaatgaccatgaaccgccacaaacttactataacgaccattattaaccgccaaaaatttctctttctctcttctatctccctctctctcgcgcctctcactacaaaaactttgccgatcgaaccgtaacaagtctcttccctcacgctttgttcttcaactctcaagcatatcgcattgtgcttgagagagactttctcctcttctttttgtttgtttgtttcatccttgagaaaagagagagaaagcaattcgaagaagagtgataaacagatatggcgggtgatgatccaaaatcatccgctcctaaagacgatgggtatgaagatccctacattaatgatccatttgatgggttcgggccctttacggacgaagatctaattaatgtaatggccgacataaacccaaacttaatggacatgtctttcacggaacacacgcctccgtctgtgttacctacattaccatcggacgtggacgaaactcatttgtttcatgaactcgatctttcgatcagtaactacgactccaaagatgagttc

SEQ ID NO: 38082 - DNA, 777 bp, Arabidopsis thaliana columbia
ttatcgttttgttcttgatttgaattaagttatatttgtttgcgatttttttttttgtcatctgaattttattaagaaccaaagaaaggatataagttaaaattacatatgccggcagacggaagagggaagttttgcccaaacaaatttggagaaactaacgtacactagccttagggccagactggtttaaatacagcgggtacggttacggttgcgggagtttacggaaacgggcggttgcggtttcaagcgttatcaagtgttttgaacgactggttgagcgtttggtaatgggtgcggttgcgggagttttatgactggtaaaccagcgggtgcgataataattaaataaaaaataaccaaaataaatataatatattactattaaaagaaaaaatacaatatattattatgataccttgataatatttgggaaattaaacatgcttaataattaaaaccataaataaaactgaaaattcaaaaataaatagattttgtaagaaaaaacttaatactttatgcatttggtaaatcaccaaaaattgcatcaagtagtgtgataaactgtaaataacgttgacctcacgggttttctagattgcctctatacatatgataaagtttcttcaagatatccaaacgatttttaacacatctccaactcaaaatttttccaaacgttaatattcttaagaatattttctttttgaacatcacttagaaatcaaagtctttgaagtaacgcaaatgtggtctcgtctgaccaaatga

SEQ ID NO: 38083 - DNA, 568 bp, Arabidopsis thaliana columbia
gtgaatctattaatcatatttaccattatacgtcaataatttacatacaaaaaacagaatttgagaaatttatgatgcattgcattgcacagtgcacaccttggttatacggtgcattatttcatcttctttttgatgcttcacagtgatacattcacaactaggtatcaaatatgaaaagcatggtcaacacattaactgtgccataactttttttatacacatacaacaaataacatcaatatggtgttagtggttaaaacgtggcgatccgcaaactttgggaaagcctggttttgaaaaagaaaaaaagaaacaataataattgttgataaaaaggaaaaagaaacaataataattcatttatattggtcaatttaattcagaaaacgaaaaaatgatattgatagatgtacatgaatataaaagttgatgttcgataaatatatacaactatcgaaagagaaatatttttgatattaaaattagctttttttctccacaaaatacatcgaacatggatcttctggtgcggggatttgtttccaatggaccccgtaatttcggg

SEQ ID NO: 38084 - DNA, 717 bp, Arabidopsis thaliana columbia
ccctacaatctatttttaaaaagtagattgtagtgttgatcaagcaaaaaattggtttataaatctaactttttacgaaaaaaacaaaaatataatatttaaaatgattgctcgagcaattaactcaatcttaaccaaaagtagtatattcgaggtcgatccacaaagaccaaagatatacttttaaacatttttgagactcgttcttacctaaaacaaaaaagttgtttgtttgggttttcagattgtaattaaataaaaattgtaaataacttaacaattaaacttatgaattaaagacattgggttatgggtatttcaaagattcaatgaataatagaaacacgacacaaggaatttcaacaatgaagcattgtttttgaacatgaacacaaatttatactaattttctctcaagatattaatcaccaaatttgactactcgactactaaactcttgttcgtaatttgctagtcaattcgcattagaattaggttcattcgattcagaatacattctaccatcaactcttattagatagaaatatattgctcaattcacattggttcatgcattttatcaaacacttttgatgcatagaaaaacttaaaatctaaaacaggatgatcaatcctattcagtatttagaatataagaatcaaagaacttaagcagaaaaaactgtggagaaccatcaacccattaattcattggct

SEQ ID NO: 38085 - DNA, 1025 bp, Arabidopsis thaliana columbia
caattatcttgtctgcaggaccaaaatcaaagaaaatgattaaacaataaattaagatatatactaagtgtttgaagaaagaccaaatttagatctacttcaacttctgttttttggcttgactcaaaacttacgaagttacaattaacggttatagacacaagaatcaagatgattgagctacgattctggttctctttttttttttatgttaagaatttatcgagaaagcaaaaataaataaatatatattcaggaattgatttcgtgtgaccgttagaggaaagagattagtaaagcaaaaagtattatttatcttttcagttatcattttcaccagaaaagaagataaaactaagcctaaaaaaaattatcacacataaagctgtaaagaaaatttaacaaaaaaaaaacaatttgggcctttcatttttttgggctggtggcggtcgcacctccgccatacctatgtgagtcaggcctgatcacagaagagaagaagcagcccagattatgccattaaccaacctactcaatcactacctcaaccctctgatcattctgcaatcaaccagacaacctgaacatagaaaagaaaagaggagagaagggattcacgctcgaccatgatgcccactttgagcccacatactcgatcacatagtcgatggacatgttaagtggacttgaagcccgctttcttatctttgtcatttttgttataaataagtctctaagggtttcccctgagacattcacccattcagactattcacgatatactctttgctagttagtagccgcctaaacacttttatttctgcaactttgtaactcgatttgcttctaagttattcagatttgctttcatttccttttttatttctgttttatttcctttaatctttcaagttatgcaatcttcaatcgtttctatgttattgtctttgagcatgttgtctgagtagtgattaggatttctaaggatgggatagagtagttgtgaaacccctggtcgattctga

SEQ ID NO: 38086 - DNA, 957 bp, Arabidopsis thaliana columbia
caagatcccgaaaagtaaagtagtgcttccatgttaaatgataataggtttttagtcaattatcctaaaacaccaatcatgtcgttgtagtattttaggtgtcaatccaaataggtgtgatgcaaacagatgagatgtgatcagaagtcaataagtcaagccaagcaataacagttttggggtttctaacaatcctaagcaaacatgcagaaaacagaaataataacagaattactaaagtcactcgaccacaacaggctgatgccagaagtaggatgtggtcgagtaacaggtcgagtaacatacatgatatgaaacagatatactcgactgcacagtctgttgccagacactgggtgtggtcgagtatactggtcatgtaacaaacagtctatgagacaaccgtactcgactacacagtctgttgcaagacactgggtgtggtcgagtaagttgatcgagtaattggaaaaacgaagaaacaagcaatgagaacgatttagcggtaacgataaaacaaagaaatccgattgacgagagattcctaaggatggggtaatcgaatagagatttgagtagactatgaagatgtgatcgagtgtcttgtcgagtgatggtgttggtggtgagtgacgatactcgaccagggggtcgagtaaggtggtagagtgaacgaccgagtgtggtcaggtggtgtggcgaagtgatactcgaccaggggggccgagtggcgtcatcgagtggcctgagatgaggttactcgacctgggggtcgagtagatgggaaggattggctccaaagtcactagaccagggggtcaagtatggtgctggatgcacgcgacctggtggtcgagtatgtcttctggttcaggctcgtttcttcgaaattgctcgcaaacagctacaaattacctgaaaacaactcagaaatgcaatatgtatgcaaaactatcc

SEQ ID NO: 38087 - DNA, 529 bp, Arabidopsis thaliana columbia
gataactcaaaaccttaaaattgcataaaaagaatatttgatttgtgtatggtaattcatatttacatgaagtttcggatttgagtcctaaatgcttctgatgatattcgatcttcttagagggactaaattaaatcatcccttccacacgaatcaaactagctagtgatacagttttcaacctttttagagggaccgagacaaccaccacagacttgttattcatctagttggagataattcatacatacaaacaagctcaaaatacacaataacacaaatcttttcttctctttctatatttattagttgaaactaatatctcaactttgaattggaaaaattcgacaatcctatcaaatttgatatatcattttgtttgtctaagtggaaatggaagaaactactgcaatatagttttggtagtgcaaaagtgatcaatcaattcacttcgctaagcaatagttatgcggtggtcggaggccggtctagtgggaggggaaggtctgccagccggtcgagtgttcag

SEQ ID NO: 38088 - DNA, 864 bp, Arabidopsis thaliana columbia
atttgcttatttgtttgaggtttttggctaaggttactaaattatagaataatgataaagattttaaattctttttttccggaatttaaagaaataagttctccaaatgctttgaaaaaagttaaacttcgttgaattatgaaaaacatattaatctcattaacaagaaaatacaaaaaaacaattctctaaaaataatgtttagagcgcctcttaataattaaatattgaattattattatttcactattcataagaaactttgttttaagtgaaaatagaaaatcataaatttatgttatatttttttagaacaaaattcgctttgattgaaattgtagtaaagtgaaaatataaatgtttgagtgaagaaaacttcaataacagaaaataccaatttattgatcaaaacattaaaaaatattacatatttcaagcactttcggatattgagaaacaatgtttccacaagtcatcactcttcttcaagtattcagtttcgtgggcaattaacatgggtttatcagcaatatatttaataagcgtatcgtgacacacttttccttctttgacgagatcgttgcaacaaggatcaggcattgttccattttcaaagacagcagcgattatatctaacgcacacttaggagtaattttaacaagacaagttttccataataaatttgcttccgcttcttcggctgagaaagccggaacaaacgcacacaccaaagctaaaacaatgaatagcatagtaatctgagagttaaatttagacatatctacttatgattgaaatatacaagaaatattcttgttttactaaacaaatcgtaataaagaatgatttgtagtttgttattt

SEQ ID NO: 38089 - DNA, 571 bp, Arabidopsis thaliana columbia
aaattaaccttttctcaccaacccagaaaccaaatagagaaaagcaattgaattgaaacagaacaaactaaagggtcaaattcaatcactttcttcaaaaacccaataaaccagatagagaaaggtttttgaaaatagataacactgaagggtcaaatccaatcaaaacaaagtaatgaaagatgattcattttcttctttagtaagtagctaaggaaggtaaaaaggaacaaactttgtacctgacgggaagaacagaggacggaggcggaagagagagcgtttgcagacgccattttgagagaaaaggagggagctttttgaggaacgttctggattggtgtggataaggaagtggttagtgtaaacgaatagtgtgggaggaggggttagggtttattagataaatggagagagtagctgagagaaaaaggatccagaagattctttgcattcgtaacgagagaaccgttgatcttaataagcctttttcacctacttctatgggcctgtttgtccactgtttatggccaataatagaacagtctcaagaacttttatagtttgtgta

SEQ ID NO: 38090 - DNA, 657 bp, Arabidopsis thaliana columbia
ctacccgtgactctcctctcttctcccttctaactgctctaatcgcacttctagaaggggttaatgggctcatcaacttctcttcttcttgttaactctaagcccatgatccatgtgtgttacttgactaatacaaaccaaccaagataattctgaaatattgcttgcaagcccaacatcagatatacgaagctacaggagaagacggatcacgattgggtttatggtttgaaacttatggctaatttcccatgacagatccagaataacataacctgcgagcagccaattttgaggacgaattcctatcataccataaggaaccagaagatgatctctatgtcattggaatgatcttgctttcaagtttccagaacatcttttagaagcaaaatcagagttctgtagccaaacaaaacgaagaagggagaatcaacatcaaaacataaaactgtttttggaaccttgaaaccttcttcccctgagctactagattcagagttgcatcaaacttcctcccaaacatgacatcagtcctctaatcgcagcatcaaatcaagcaagtgacatataacaagctgaaaattgcttcaggtcaatcgcagcagaactctcatggccattcctcccctaacaatagaaccagaggtaactcca

SEQ ID NO: 38091 - DNA, 497 bp, Arabidopsis thaliana columbia
ataggctaagcttgagggggagtattagtcaagtaacacacatggatcatgggcttagagttaacaagaagaagagaagttgatgagcccattaaccccttctagaagtgcgattagagccgttagaagggagaagagaggagagtcacgggtaggctaaggtttcatcttagccatggtcaagtcactatcactctagagaaaagtcgtctactctctcttcatgtctctttcattttgttttgtttgttgtaaagggaaccctagtgtctccctatataaaagtcttgttccctacattgtaaccaatctaatctaagtaatatcttcacttcctattcttggctcttctctcctctataaacttcatacttctccatacttctcatactcttttccgcatattctaacagtttgctgcttcgtttgttctctgcatcgaaacagactcgatgaagctgctgtttggtgaagtgttttttgtctgacattgtcac

SEQ ID NO: 38092 - DNA, 363 bp, Arabidopsis thaliana columbia
gtgttgtctggtcacatgctggatgagtagtcatcttgtaagtcattaccgagtcctcaacataagaataagaagtttctctaaagttcagttttgtgataaatctgatgtcttacgatgtagcgctctcagagatctcaccctacaagggacacttgcacctggactaggaatcctaactcacttggaatctctgtctgttcccaacgtttgtctccgacactgcttcaagtatcagacactagacagatagacctctacagcacccattggtcgtgatgcggtaatctcggtgactattcaggttccgggaaagttcctgaagaggtaactgaattgcaggagcttgagatcttggattcg

SEQ ID NO: 38093 - DNA, 1309 bp, Arabidopsis thaliana columbia
tgcaatatatttaataagcgtatcgtgacacatttttccttctttgacgagatccttgcaacaagggtcaggcatggttccattttcaaacacagcagcgattatatccaaagcacacttaggagtgattttaacaaaacaagtattccataataatgttgcttcagcttcttcgactgagaaagccggaacaaacgcacacaccaaagctaaaacaatgaacaatgtagtaatctgagtgttaaatttagacatatctacttatggttgaaatatacaagaaatattcttattttactaaagaaatcgtaagaaagaatgattagtatttgttatttaaaaaatggggtaatctaacttttatataggaaatcaaaatcacaacgtaacttctaaaaaaaccaaaaaagattaacgttatatttaatggcaattaaaattttgacaaataaatatactaccaaacttaaatttaatagtttctattaacgttgcaaaattaaacaaaaaaaaaccctaaatacatgtaacaatatccaattcaatagatagaagaaagcaatggttaacttttttatattttgatatctaacaccaaatagttaatgggtataaggttcaaattgacatattttatggtattcagccaaataaattttaatttcaaactattttaagtataaaataaatttatttttaaaaatataagagacataactcacattgtatctaaaacgtattatttatttttaaaaactttttttctaataataattttaatcgaaagactaataaatgttagtaaaaatgtattcgagatttaacttattgaaaggatttcaaagtttctctagactaaatttaaaaatattaagtataaggttcacaagagcaaataaataaatttaaaatattaaatatagttttgctataaatctgttgagaatataactatcaaataacatattatttgaacttgcacatgagctcaaacttatagcaaatatataccgatcaatagaattaagatcaaatctttgatgaaaagatcgaacttttgatgattccatcaggactccaattcgcaaaagtgctacttcgcacacgtgccaactcgcacaagtgccacttcacacacgtgccaactcgcacatgcgaacgaagaacacgcaacggagaataataaacaccgtcagcttttatcgtcatttttcgccgctctcaccgaacctctgctttctctctctctctctctctctctctcgtcactctctctctctctctctctctatctctactgtgcgaaaat

SEQ ID NO: 38094 - DNA, 1416 bp, Arabidopsis thaliana columbia
  unsure (1)..(1416): unsure at all n locations
catttaagatatataccattctacgaattggagagtcaatatcttcagtatttctattccgtcttggtgtggaaggatccatgttttcattccttgttcgaccaagtgacgccatatatatatatatatatatatatatatatatatataatcacaacaagaaaatgattaaattaaagatttatacaacaaaaatctaaaaatatattttcacacataacaaattcaaaagatatctcactagttctcaattatctactataatctacactagatacaccgagcgcaccgcntcacactctcttatcactctgagatgcaacaattcttcaaaacaaaaaaaaaaactcaatttgctgagatttaaagagttctaagagatgttctcggctctcttttttttttctttgggagtgaatgatttttttttgtgacttgttacaattattgatcatatatttacatggttttaaagagtacaaagaagtacaaatctaaccaatgagagacaagtactcagatccaactagttgattaaacacactttggtctgatttttactattggtatggagtttctggagcttgaaaggagtaaactgaaaaattgaaactaataatagaattgatacggcaagaagtttttttttgaagtgcatactaatatgaagttttgtagtccggagtgctgcatactaatccgatttgttgaatggtaaattagtccaaactttagtccggtccgcaccatacctaccaaccattcaagacctaagtataatgacgttcacgagtgagtaaaacatgagacggactaatgaaacagagaatgatgagagatgatttgagacttttaggagactcaaaatgaagcatctttgatggttggtaaggtagtttgaggtggatggttgctattctgttttggattattagatctaaatctcaaatcaaactatgaattgatttgaacttgttccggttgtagccgattgttgttctttgacccgttgccgtatattgaagcttggcatgtaatcaacaaaagtttttggcttgcatgaaatatatggttccaacttgtttgaggtttttttttgtgttttgttatgtaagttttcttttgtttataagttatatttaggtttttaaaaaaatattaaacttataaaatattaactgaatatagttggatgattgtgtgggtttcttatttttttttatatatttatcaattatgtattttttctaatgttgaaataattcgattgatgataataattgtaaaattcaagtaatagtattcctgtaacacccctaattttaggaatatgatggtgcatgcanagaggtttaaaagaattgatttggcacctatgcaccaaagtgccttatctttcggttaaagcttgagaga

SEQ ID NO: 38095 - DNA, 784 bp, Arabidopsis thaliana columbia
tgtgtcacaagctacgttacagaaattggatttggatggtacaaatgtagtaaaaggtaaaagaaacactaatcgaaagtttgcctaagctgcatctcggtttcacttttccaagaagcgtgagaagattgtcctctcattcttttgctcttctctttatctttgatcgtagagcctttcttcttcgcgtctacgtccggtaatggccggtcaccacaaatcgggcataccattcctcttgcgcttgtatatgttttcggtacaccgcattgcacacacatcctaaactcatcatagaaatcctaatcaagctcacattgtgcaaatttatactaaagaatgaagaagagggcaagggttattcatacctcaagagatctgcagattcttctgcattaggattggttgcagtagatatccgcttttcaccactctctgaagatgggggtgcatcaatatcgtttcttactctctcatggattcctactagttgaggttttgcttccatgacaacacctacaagccaataaacggaaaccatcaggctggatcgagagataacaacagttccataaacagaactgtgaaactggatagatagagattacaacacaaagtgcctggtttcatatttcacaatgtttatgctttaagtatcaaaacaagcttctaaagctaaatccacattcacatatattttcgagatacaaatccgtaatcttgtgaactttaaacctactgatgtaaattcttcaacatcatctaatgatattagcgaggaatc

SEQ ID NO: 38096 - DNA, 575 bp, Arabidopsis thaliana columbia
gaagtgagtcttctttatcctcttcctccaagtttattaaaatctactggacaataaattgttaaaaatttaataaacattggtttgtatctttatattcataaacaaaaatcctgatcgaataattttagaaatatttaaccataaaatgacattaatctactatattgatgtagacaaaaaaatatatatattaaaccaatgtggggttgacctagtggtaaatctcctagtttcgacattcgagtgagagatctcttctccaaaggaaataaatttaatatgatcccgccactaggagatgtaaggttttcgggcttgaacttccagatattcaaatatatatataaattatatgcattgcatgagatatatatgatcttgtagaaatagaaagatttcttttgaagaaaatgtgtgagagtagtgaattacattaggtctggcaaacagaataagaaaattttgtttcttgatcaagctagagacttgtttacgcccaaaaggtttgatgtttaattaccaaaaaatagatttaaaatgtagataaagtattatgtaacatttatagacaa

SEQ ID NO: 38097 - DNA, 560 bp, Arabidopsis thaliana columbia
gaggatcacgagtccagtcatactagcgaatttattctggtaagagaatccttggatcctcagataagattctttacctctctatggagctctagaatcatcagttatataaaattttggttaagcaaattcttacttgggtcattaccttgctcatgtttcttataggttgaaaacatgggtcgtgtaaattatgggccatatatctttgatgacaaggtaagacttatgttacagacatttattattcgcaggcatgtgataaaattgtctagatcactttatcttatacatctactctcgacagttcttcaaagttagttatctatacaaagtgaatgtgatatttacagtttgaagacagtttcaagatttcggaatccacggtagctcgttaaaaaggtctatattgtattattgttcagggtattttgtcttcggtttatctagatggtcaaattctccatggatggaagatgataccaattccttttcacaatctaaatcaagagccaaatctcactttcgagatgcaacataccaaaaacagaagtaaaaag

SEQ ID NO: 38098 - DNA, 577 bp, Arabidopsis thaliana columbia
accttcaccaaatatccgtgtaatttatgcttgggttggctatatacgatctttgagggtttagtttcttctatcattaaagagtttgtaaagagaaaagagttggttgggataagaaatttgaatggagcaaggaaaaaaatcagaaagatctatgaagaagaagcaacgaagaagatggaagaagagagagaaaactagagaagatgtaaacaagggtaaaatcgtcatatctttaagttaaaagtacccaaatccgcaagcccactaaaaagtgttatttttcctaatttttgggctgaaatgtcccttatcctacaaaatccccggtaaaacaaaggatggtattacgagatggaaaaaagctttggaaggtgtggccacaatcgctggtaccattcaagcaactggtatacccattgattcctagcacattaaagtgtgtttattcatagcctttaaaaaatatcaagacaagcaatgacttatatatgagatttttacattactaactatcataactggaatatgttactcaaatgttaggatcagtgaagcggtgatgatagaaaaaata

SEQ ID NO: 38099 - DNA, 502 bp, Arabidopsis thaliana columbia
tttcttggcagctcaatacatatagtctttatatattttcaaaataaaattcagttttgatatataaaagagatatactcttatacattagaaccatattaaaatatattttatattagttattttaaattagtttggatcgaattagattaatttatccagattaaacatctcttcactacttattatagtagtttctatatcaattcatcatctctctgtagtttattaacttcatctacaatattttttgtcagctcatgccatttaaaattaatttaacttagttaaaacatactgacttttcataatctacttatgcatataaataacaatttattaaaaatataaagaggaaagctaaataagacaaaatattttcgaaaactcgcctttctaactttacaatttcctttttgaaaaaaactatctttacttttattaagaacaatttgctttttcataaaattattccgcacaaagaaaactttccaattttgag

SEQ ID NO: 38100 - DNA, 569 bp, Arabidopsis thaliana columbia
attactcttgaattttatttttgtttttcctttgtagactactcattactctttagattgagatatcaattagaaacatacaaatcacacacaaaatagtgggaaacggcaaaggagagaatttgttggcggaaaattgtccacaacattacaaatgagtaaaggtcacacaaaagagatccttttttctcatatggcagcgcatgaaaatggtcacatggaatgcttttttggtaaattttcttttctcttttgcttatttcactctctgagtgcttttttccctttctctgcttacctttaaaataaaataaaaccacatgaattctaccgcaaccacttgaaacaaaagattcaacatcaccctttatttctcaacttatcaaaaatatatatatcaatcgtctatattctttgacctttggagttacaatgtataaacatagaaaatatatttgcatcgctcagcattttgactattaaagggcataattttggagcttcatgccaaggcaaaaagataaagaacaatcacatgaatgacaaaagattaaaaacaaaagattttt

SEQ ID NO: 38101 - DNA, 518 bp, Arabidopsis thaliana columbia
taaaagatgtgttgattatttttacaaaatatataaatatttatcattatacgagtcatagtaataaactaataattatcattataaaattttaattttaagtctatgtatgtgctaaatctaaaaaataaagtactttttcgtgaaaaaatatggaaaaagttatatatgtgtaatttttcatatttcaatacatcaattcgaagattatccattagaaagacttggtaaaaatttcaagcaaatattaagtaactcgtggtggctactttcaaaataaaacaaaagcatgtgacttattttatgatttcaaaaagttgataggttcggacgagttcacaaataatggaactaatagatccctataaatacaaagcattattcttcgtttatcttacaaaactttaaacacattgctttctattttaagatctttctatctctctctctctccatggcatctcaacaccttcaagccaaccctcatgctgaaggagaatggccacaggcttctgtga

SEQ ID NO: 38102 - DNA, 872 bp, Arabidopsis thaliana columbia
taagtgaagtgaagaatcaagagaactcttggatcaagggctcatagaagagtctgtatgcgtccatgacttctaaataccacatggcttcacgatctgggctcaccgacagtcaaccatcttatgaacctggtttcagtttaaaacaacaatgacaagtttcagtaatcaaagcattgcatgtaaatgcagatgatactttgactcgaacatcacaagagaagatgaatcttaatcactagtgattacaagcatcttcatgccacacctagatatatcatcacaagatttttactaacacattcaaactcaaaacctcttatggaacttaagctccttagtcacctaagcttgtgtcagcctgatctagtgatcataacatctaacattctcacttaactctttaatgtgccaattggcataataaaccaatttgactagtctgcaactctagcgaaactaaaatcacattggagtgatccaatgtgcatatcaaagacctaaagttttcaaattaaccttaagtagaggtatctgcccagtacggacttggtagacaccaacaaccatcacgtacattcctgatttccattgacggagggcaaaatcgttggtgagaccgagctccaaaagaccggttccgtcatcaagtaccagacaattatcgccgcctccaccggagaaggggaccaaaacgccctgcaacgcaagacttgaagtcatcgaaacaggaattaacaatttagctatagacaatgagaggatgatagattgggacctgtaaccaagcacgttgaaaaagtacacctgctagggaggcggcgttctgagaaggcgtcggtttagcgtcccggagctgagaacaaagcatc

SEQ ID NO: 38103 - DNA, 590 bp, Arabidopsis thaliana
tgataccttgctagctaggaatagcccaaacgtcaccgcgggattgatgtgtccacctatacaaatatatatgataagtacgtataatttcataaaaccagctgatccagatgagatagataattttttttttttttttttggtgttttcacatgattaattgttttttgcaaaacttcgatttagtaattcaaatagttaaattattgaaatccgaaatgaaacattaattttatataaaaactaaccttggtttgaaaacaaaaaaaatcttagaacatacattatttggaattttaatttggatggaatttaatgttctagaaagctaagttttcttaccacatatgtatactggccaacattgtgtatcatcaatcatttaactactatagtttggttgatttggtatttttgaaattctgcttctttgttacgaggacatgtataggagcctcgaatgatgaagcatgtgcattttgctatgcaatcagataatgcaaaaaatggttaaggaaagagagagagagagagagagagagagagagagagagagagccagagatccggcagtcagtagacgaggatga

SEQ ID NO: 38104 - DNA, 590 bp, Arabidopsis thaliana columbia
attgggctactatcacatcaataaatctatctcaacaattataacttatcatcaaagatatacgtacattattatacatgtacatatataacatgtttaaagtatgcacggacaatatatcttatgtagttattatatatccatagattttaaggggaaaaccccgaaaaatatctcatctaaacaaaataaccaaagatttctaatgtacaaactcaataaataatctttaaaattcaagtaatgaattaaaccaatccgagaaaaataattagaaaagggggtgagtaattaattactcagtaagagggtcaacaatgcccacagaaataaaatgacaacaatctactcacactcatcaagctttacatagcatagaattagactccacattcatgacatatgtctaacaaacatacaaattctttgttactcaaacacatacaaaatcattaacaaaaacactaaaccgaaatctcatcggcttagcatggtacgaaaccaatcccagggtcgtccaattgtcaggcacgaaaccaatctcaagttcgtgcgccatcacataaattctttccatattgtcacacatc

SEQ ID NO: 38105 - DNA, 533 bp, Arabidopsis thaliana columbia
tttatattcaacacttatgttaatgaagtaaattacttgtttatatctatatataaataatataaacaagtaattaaaaagagaaaaagtaaatttgactacttggcaaacaaaagtatttcatttattttaattattacctctcaaaacatatttatgacctgtacttacttattaatttcaaaagggaacaatttaatatttttgaaaaacagttcatgtaaaagaaaactaaaagagctcatttggtaattgaaaatgtttactttaagtgatataaataaactatctagttttcaaaattttaatttatatttactaagaattaattttactattatataacaaatttataaataattaattaatcattagaagataactgacagttttgaatttcgcgcgtaatttttcgcgggtcctattcctaatttaaattcaaaagattacctaaatagtaaaaataaaataaaacagaaatcataatatagttgctatatatacacgtcatattttcaaaccaaatgtttttg

SEQ ID NO: 38106 - DNA, 752 bp, Arabidopsis thaliana columbia
ccatgaaatcaatcaaactaaacaccttagacaacttcaaacaatcacgaaatagaattaaggttttgatccgattgtagtgttttcgatttagggtttatgtcttttagggtttcggattctaggttatgatgttttcgatttgcgagtttaggataagcaataacaaggcaaacaatcgagcaaacaagcaatcatattgcaaacactaatcaatcattcgtttttagggttttagccgtttgttagatccatgtttgattggggttctttagctttagggtttaatgaattacctttctcctttggggttgtacggactggaaccaggagctaaagaccttggttatcaaacggtggtcgctggtcgacagtcggcggtcgacggaagtactgtcggtcgaaatgcagatagcaaacggtcgaccggcggtcgacggaacggtggacggcggacggcggacgagctagggttgagcggcggctgctagggttttgttaagagcaagctcgtgctgataacgtgtgaagaactaacttgtttcttattgattcaaatgaggttacatcacatatatatacatacttgaggaggttacatgtttaatgggctaggttacaaaagcccataactacttaagtatatgaccgacctaactctagtctccatgggccggacctacgggccgactgactgtggcttatctccatgggccgggcgacacggactgggcgattggccgatggactgg

SEQ ID NO: 38107 - DNA, 933 bp, Arabidopsis thaliana columbia
cgtataacattgcataacatataacaataaaaaaatgctatcggaaatcatcgacctattatcatgggtgcatatatagcgctttctactccgctattgtctcattagatagcgttattcggccgctaaagatacttaatttttttgtactgaacgcgactattagtcttcaactgtttggctcggtcttgcttgtgggggaatctgacggtcttgctggtgggggaatccgactccaacactcattatggaagagtatcttaccgaaacataaatattaaggagtatttttatataataacaaaatagaacacgattaaatgtctcttaaaaattaataaaatttactaatgtattatacgagaaaaaaaaaagtaaaaacaatggaaaagttatccaataaaaaatctttgactatataaaatgcaaaaagattccaactttatctgtgctaccttttatagacttttttttattaacttccctttttaatcgctaatttctgttaactttactaaattaatcatatagtttaattaactaatcgaattaaatctctattcaatacatatgttaaacaacttatagttttgtttataaataaaattaaaaaataagactagactctttacctcttggataaatccatagatacgccaatggtgacataaagaaacattgactctagatgaaaaaagcttatcgggctgagtgtatcaaacatatcaggcggatcaagtagaacaaaagtagatcaagcgtatatagcggtacaaatgcggatcaagtggtttgaacgcttcaaaatatatgttgaatggtgacatcgataacgttttgcagatcaaatatataacaaacatatatattattgaaacctttttaatctgaacattatattagttttataaatctgatttgctttattttgaa

SEQ ID NO: 38108 - DNA, 918 bp, Arabidopsis thaliana
aaatatatatgtatatcgtagaagtatggttttagttatcttattatataaagtatggttttcaaagttgctaactcataggatcgtgccacgtgtcaagtcaaacgatcagatgtttacatgtgtcattcaaaatttaacttttttattctctaaaaaaatagaaaatcttaaaaagtaaacaaatttacatatactaatttatatgtctatatatttataaacaattaacatttattcaaaaaaagaaaattaacaaatatgtgtttaactcatgtaattataagtgaaaatagaatattttgagaaaatagcttagcttataagatttaacttttcaattattttcatttattaattttaactcatttaatattaatttgcatgatgtaaaattagcttacgagattacggcatgtatagaaaatatattttcaacaatgtttggtttctaaatatttttgtggatttctttttttatattaattattagctctaggcgtttgggtattcgggtcgggtatttcgggttcgggttttcaggtttagaagtttagaacccgttcgggtaatttaagattttgggtcgggttcggtttgggttcgggttcgggttcgagttcatttatgtattgaaatatcaaattttgtgtgcaaatctattaaattacttgaaaatttcaaaaaaattcaaaacaacacgagtagttttgcttgaatatatctaaaaatacacaaaaataactaaaatatccaaaaaaattctaatattttctatatataagtataaatataactaatatatacttatatttgagatatgtttggatacctattcgggttcgggttttgaagtttagacccgttcgagtatttacaaatttcgagtacgaccgcctaaataggcgggctttatct

SEQ ID NO: 38109 - DNA, 750 bp, Arabidopsis thaliana columbia
agcttcacctcggagagagctaaaagctagggcgcttccttccagttagaagcccaagcttcgacgactactagaggacgacttttctttctgaagaggcttcggctcgacatcctcaagcaatctaattactgagccatgtatgctagggtatcctaccgagccacaaaactgctcagttcctatgggacatgtgacgaggattctgcatcgctatctaacctcgagatgttcgcctcggtgtcgtcggatggactccaaaccattttttgcttgtgaataggaggaagatcatcgcggtgtgctaagttgatggagtttgaaaggctcataaaatgcctcgggagatcactaaagagatggagatcagaaaactaattttttctaaccggcaaaatcacaacctatcaaaatcacgggggaattgtgacggaaaagaaaataaagtaagagaaatcaagatcagagagaagagagcaaacctaagatttttcttcaaaaacttcaaagtgaatttttgaaggggtagctcgttatttgatagagtttcaagcgcatcaaatgcgcgtgacgtcagtgaaacgcgtcacatccgctgaaaattcgagaatacgcgagacgcttcctcttctcaagaaacaaacgtcacacgcaacataaatttgaccgtcagggaagatgaagcgttaggagacaacgatcaatcagtttcaaagaagaagttgttggctcggctgaaccatccatgaa

SEQ ID NO: 38110 - DNA, 591 bp, Arabidopsis thaliana columbia
tagatctagagtaattaactagatcttgaatccagacaatagatattccagccataggtatctatagttggatctattatttgatgagtctggtttataagtgtgtaataagaatcggtctatttactaagatgaacaattgaactcgttgagaatgcatattaaggttgatagtttctcggcttctccggttattattagctatagatatagggagtttcgcgtcacacccaccggttattccataattagagtttgagtttaagaatggtttgataacaacctagctttcattagatctactaaccaatagtttcctgagaataccctgttcctagctctttattaaatcgtttacaacacaatcaatctgctgtctttttactttgttctcttttattttcactgataccctgctagcttaatctcgacatttaactcattgtttgaacaaaagaactctgtgaatttgatcctaaaataccgtaattgatgtcttatttgagagagtagttctatgtaatttgaattatatcaaacttggcgcagttgcaggaattcttgggaatcacattgagttttgtttagaga

SEQ ID NO: 38111 - DNA, 534 bp, Arabidopsis thaliana columbia
  unsure (1)..(534): unsure at all n locations
ctttatttttatgatcccactctttatggtttgatccataatttctcaaaactcggaatcggtttcacacctagcttcttcaaactcatatatagtatcttcatgattaagcaaatacaacaaaatctttcaatacttttcgtcaaatttgtacccaagaacatgaaaaccatgtggaatgactatttatacgaaccaaaatttcatgataataaatatttcttttatcaaagtggcaatacaatttcgttgtaactagagtaggataaatacccatagagttctgcccctaaaaaaaggaagaaaaaaaaagaagagaaagtagcataaatgcaaactttatcatcgctatatgctcaaagttgtttttttattttttgataatatgcaaagttattttgaaacggattcaactttatataacaagattctctcaacgacttatatgtgaattgatatttgctttccctgatttttttctaacaagaatttaagtggttttcttacaacaaccaaaacganaatgtaaatgaa

SEQ ID NO: 38112 - DNA, 525 bp, Arabidopsis thaliana columbia
agtgtgctctaaagctcttgttgctataattctcaatatctgaatgttgacttgtgttgagatctatttccgaagaacaatctcttgataagctgcggcccacctccgattggttgcgtttggcaggaatcgtgatcatttgcatctctgattgaagattaaaacgatcagaaattgatgaatgccaaaaaagaaaaagtggtagaataatgaataggatcttgaaactgcctagagcttgatcaccaacctgaatccacaatacccctgtatatgcagtactccttaacaagttcatcaagaacagaaacatctaatcgcatcctgcacaattcattctgcaataagtagaagcacgaattaggttgcagtgcagatatataaaattaaaccacgataatagtaagtaactacagtatacaaattaagcgcaaactaaagttttcgcatgacattgtattttaacagcaaagggatggtgaggattgatgacaatgcatagaatgtataaagcaatggagggga

SEQ ID NO: 38113 - DNA, 551 bp, Arabidopsis thaliana columbia
gaacaaaaaaagcgaagtaacttggcgtgaggtagagcaacttcactaacaaaggtgtcagttgcatgcatggacaggacaaatactctcttcagtcatgtgtcgtacacgtcgatctcaccactggacccactctttaatacacaatcagattacgttgtaacaaaatttctattactgccaaatgcatttctttggcacgaaagacaaagctcctatttatgccggtatagccgtcgtatccttcatgatcctcaccggtttaacctttgccggtaccgcgtggctctaaccgttatgataccggttttggtggttcttagtccgattctcgtaccggcggtaatcacatcgagtttcttggcaacggggttcctagcttctggtagcctcggagcattggggatcggctcctcatatggctctacaagtaattacttaagttaaagtaactaattaactcttctaatgctttgattgtccaattgaaatttgttcaacatgcattgaccacatttttattatgtgtgttaggtacattatgtatgtgt

SEQ ID NO: 38114 - DNA, 472 bp, Arabidopsis thaliana columbia
cactgattgcgcaaagaatctcaccatccatttcaacgataggattctgaacctgaattctatcagaaccgcctgaagaagcaaaacatcgaacagctgatgcgcgatgaaactgaacgggaaaagtcacgcgattcctcgaagcgccactagagaatataccggaactaggaaatctcgaagaaacgaacgaagacgataaaccagcagaggttgaagaagataacatggcggtgaggctggcacggtacgtgaaaacgccgtgcgtgacgttattcagcatccgagactccgacctcaacccaaactctcaacttcgatcactgaatcagtgaatctgcagctttcggtcggcaagtttattgctaaagtgtgctctgagctctctaataatcgacgattccggcgaaaaggcaaggtaaacaagaaggcaaagagagccgtatagattatttcagtaggcccaacataa

SEQ ID NO: 38115 - DNA, 355 bp, Arabidopsis thaliana columbia
ccatctcagtttgatatcaataactaaacatacctatgtaaaaacttacatagtctactacccaaaatatcaataattattgtagctcccactacccaaaagacaatgtccattgacttcacaagcttcttagtcttctctatttctatgctctaaaatctccttatatacatagtccccatacttatcctcaaaactcaccacaaaatctcatcaactcaatggcttcaattctctcaattcttcttctcattctttcactttcaaatctccacttcacttcaaccaccggaaacaaccacattaacgacagaaaatccttagaaatcattatcggtggtggtacgacaacaat

SEQ ID NO: 38116 - DNA, 585 bp, Arabidopsis thaliana columbia
cccttattgttcatagagtagaagactatgaaaatcttaccaactttaacaaagatttatttcgctgtcttaatcgaacgcatgtggctttgttgttccagtcttttagtcctttggaaatattggaataacgaagagtagaagattacattaagatggttatggatttctaatttatatctcactttgttgagataaaagggttacattatacgcccaaaaaccttaagttgaagttcaagcatgtaaattttgttgatcagatgctgcacaatagttacgttgaggccataacattgtaaaatgttagctcactaggcaagtagttgtttttttctcttttggaatctgatggcttcttttaatggttctaaaaaatggtgattttaacaaatggatcttatcatttatcttgctgtatttaacaaattgatgcggatttgattttcttattttcaattaccttttaaatttctgatttcttgataattattaattggttaatattagtaaaaatgatgttccttaaaaatttgttctttaatgtctttgattaaattgtaaattaaaaattgaattagattt

SEQ ID NO: 38117 - DNA, 1011 bp, Arabidopsis thaliana columbia
gcgctcatttggctccaagtgtggagatcttgtaagtttgtttcagcaaattaaggttcaaattttttatgatacaaagtacaaacccttattcatataaaatgggccatttttcacaatgggcttatttgtgggccttattcgtttaaatctttatgtgtaaacaaaaaattagtttcccttttcccttatcacaagaataaaattagttgggtagatgagttggactcttctttatgggcccttattctactgcatctcttaaaccaagaaaatatttgagttgaccaaaaaaattgacaaatcaacaattacacaaccctgaaatgaagttaccacaagcacaaagcttatactaaccggtttaatgatgattttttggtacataattggttggagattggagaaataagttaggggaaaatgtcataaatcaacccacacctatcaccattcaaatgctcttccaactaacttctacacatttttattctctctagaattctcatctagaaaatgcgtcactaattccttcttagtcagtaatcctaatctaaagagcacgtggcattacaagaattttgtagatggataatataaagtctctcactcgtgggatattcagaatcacatccacttcttcttcctctcctctcgtttattatccacacaacaaaaatacaaatcactcaaatatctgttataatgacatgtcaattatcatatccttaatttttttttctttaaacccaccaaaaggcaaaagaaatattcaaataatgtaataaaccctcttttttgtattctctgattacttcgtctcttcccctgtaatggcgcttccacacgtagtctcttcaccttcttcaacttcattatctccttccttcaaatccaaaccaccgtttcactcccttagatctttatcaccgacggttgataatcgccggcgttgtaaactcaacagttccttccgatgttcatcttcttcattctccgagaagcatcaca

SEQ ID NO: 38118 - DNA, 481 bp, Arabidopsis thaliana
cacagacttttagtagcgccaccatcgtaaccaccacgttctcactactaaaaccaccacactgttactatttatcatggatatcatatcaccactgtaccaccatcaccatcacaaccacaacggcaccaccatcatccccacgtcatcaccatcaccatcacaaagtcaccaccactatcactggaatcaccaccgtaatcttcgcaaccaccatcgctgatatctatatcgttggaatatcatcgatgaaaatctatggtcggaatatcgcctgaacttgtgccgttggaatcttcaccggaatcgtgctgaaactaccatcaccggaataaccaccaccaccattagtcatttttcatacctttgatgtcatttacataattgatatatataatatgctatattcttaatattttagtagacaagtattattcttacaaaagaccttttacattttctatatctataagattttata

SEQ ID NO: 38119 - DNA, 1185 bp, Arabidopsis thaliana columbia
tattatataaagtacgattttaaaagttactaactcacgagataaaaatatttaaatggagtatttttcttccaacaaaaaaatgaggtattaaaagtccaaaagtaaatagattgagtatttttcgtctatttttcttgttataatttaacgttgtttatagataccgtaacgtccgttaacgaccgttaaaacagaggtttgaatctaccaataatttaaaaataaggtattttttgaccgaatataattaactgaagtatttttcttccaaccaaaaaaaattagatattaaacgtccaaataaaaaataaatgaggtatttttcgggttttttcctttttttagaattttctatgtttatcataaaaataccaaactatgctatatttgttaaaggtttttcttcttctttttttgggtcaaaaacatcttgtctatctttttaatcaaatgcacattatattttgagtctttattaaactgaatcaaatcaaattaaaaaaaaggattaatattgttgtctttgtacaaaaaaaaacaatggtatgaatccttggaaatgagtggaacaaagagaagtgagagtctttttcatggtaggccattaagataagcttccttgttctcatgtcctaaccaccaatcactcatatctctcacacacaaagccgacccgaattttaaagatctgtcctgtttttggatagagttcaagctaatcttttttttttttgcaattaacaacaataaggtgaataagaaagaaatcatttgttaaagtatcatttctacaaatttcacttgtcttttggttgaattgagaactccatgtgtattgtgtgtatgagacgatagctagcgaaactaagcaaaggaagactaagaaaatacttaattaacaaagtgaagatgatataaacgcaaaataacattagaaatcgcttgagcactctaaggaaaggagaggtcgagaaatatgcgggtgggatcgatccaaatgtaatttgcatcgagacaacatcaaggatagaagatctttgtaatttgtcctaagaaaaacgcaaaataaatatgatgaaaccaaatacttaatcagcttagtatcaatacgaatatcccttgaaattagagaaactatggtctgactaatccacaaaacacatatgtaaatgtacacataaa

SEQ ID NO: 38120 - DNA, 424 bp, Arabidopsis thaliana columbia
ttttataatttataaaggcacaataaagtatcaaaaaaaaaatctcaaagatgctaagattcgacttatataaacagtggtactgtacaacaggaaattcattgcacctgaaaaaataattaaaaacaggtgaaagagataataataccaaaaaaatgaaaaggaaagaaaagcgaaatataaaataagagcaaaagagtctgaagttgatcaacaaaagaaagattagctttcacttacttccactgaagaaataacttttggaacattcaacaagacaacaaaatatgacttccccatcatccaccttcagaccaaattaagttcttcaatcttgtttccctgtttcacacacatatatatatatatatatatatatatatatatatgtgtgtgtttgtgtgcagacgatgatgttcttacc

SEQ ID NO: 38121 - DNA, 903 bp, Arabidopsis thaliana columbia
tggagaataaatagtttatttataatcaagttgaacaattttcaaatcatccaagacacgatcatttctctaatattgatatatgcaatgacaagagatctaaaagtgttgacttcaatgaaattcactttttgctatctttttatttttttgtacgaatactcttcagatctttttcagttgatgtcaatcgaaactttaatcatgagcctatcacaatgttgttgaagtacataaaacaaggaattgatttatttataatcgagttagaaaaattttaaaccacaaaaataacatagttacacagaattgtatcaaaatatcattattgttgttatatgtattcatgaagtgaaaaaatattaaaatcttataaataatcagctttatacaaaaaaatatataaattaatatttcaaatcataaatgaatctaaccataaaattgtaactacatattatggatctaattttatataaaaatactagaataaacaaatagtaaatataaattagcataaagaacgatcaatgtattttttttttaacaattttcaaaacaaacccacactcgcgtgggtactcatctagtctctataaaagttgaaggtttcaaagtttccttaaaaaaaccataccccattaacctggattttgtaacattctattcttaattgtggttccttaattttgtaacacatagatattaaccatatggataattttagaatctctatatgaagatttcaaagtcagttcctttgaaaattgatgaaattgttttgcccaaaataaaaatcttccgttgcttaattttgtaatgctctgttcttttggattttttttttaataaaaatttcttatagttgctcataaaaatgctctgttattctagattttatat

SEQ ID NO: 38122 - DNA, 651 bp, Arabidopsis thaliana columbia
  unsure (1)..(651): unsure at all n locations
ttgctgattgtgttttaaaggtagaatcgcgtatcgtacttccactgggcggaaaagatcctctcactgagtaattctttactcaccccttttcctccaggtcacggtgagaatcgtgtgtagtcgcgcaagtccgtctcgcttatggtgtattttgggaacctcgggttttattttctttaattgttatcttcttatacgatttattaaagagttttcaatgatttaaggttatttttaagacgattttatatttgaattaagaaagtggaatagaggaaaaatataagcaaggtgaaagtacgccgtctcaacgttgagggagacgggcgtgacactgatggcaagatttcagtttcttgtactgtcagttgcgcctcgtctggtgaggttgtcgtccgcgcacgccaaaactctagtgtgggtgaagagaactttctgtgagcttcaacaacagtcaggcccgtaacgcttgttaattaaatccaacacatgtggatgtggcacaaccatctctctatcttggtccatgtttgtttctctatgtctattacctattccaattttattgatgtttcgacgttgtgatttgtacgaaaaggcattcgcaanattatgtgtcgacatccttactttggatctctgtttata

SEQ ID NO: 38123 - DNA, 787 bp, Arabidopsis thaliana columbia
acaagtaattgcaattagtcaaagtgcctaatgatttttaagtgcctaatattctctatgtaaagcatataatcaataaagacgaaagtttagaggaagcatatccgaaacacagtaaaacccaaaatacagacaataacgggcttactattgcccatgaagaaactgggcccgataagcaactgatttctaaggaaactacacgccgtttctatctacactattacactgcatgacgttctacgcgtcaagctggtgagagagtaaaggaatgtgtgggtcggtggtttcagattctgagcgcgaatttgaatttcatttctggggttttgggcatttggggaaagaggaagagaggataatggcgggaaagcgttcgtcgccgttttcttctccgttactgagaccaccaccggagtttctgaatgtgaaggaggaaggagaaacggagacgccgtgttggagaaaggaagtggatgagaacttgaagcgtctccaatcgctgctcttcggcgccgacaaattcctggagaaatctgatttctcttctgctcagatccttgggcttcgtcttctaggtttcctcgattctcgttctgtcactgacgccgatcgtgatttcattggtcccattcgtcgtgaagttgcctctaagattgatttagctttggaaggcctcgtttcagattcggatcggtacctgagcttttcccctttgagcctgtttaatttcgaagaagagagggttcgaattttacttgcttagcttagtagagcttatgagtgt

SEQ ID NO: 38124 - DNA, 874 bp, Arabidopsis thaliana columbia
ggtattactctttggtaactctgaatggttggagtcatttttagtctactaccgcaccagttcccccacccattgtttgaaacctcatgcactcttatatattcattatgatatgcatccatgtgcgaaaactacgaagtatacgaaccgacatagctttccttttgctaggatagtgagttgtagtttactagttgttcatatgtgatgacatttagccattatggtttagaggttatatacttgtattcatgggtatgagatgttatactgtttgaattttcttgatgcagagtttgttagacattgattccactcccctgtctctgaaaagagacagggggggaaagagagaaatgagaaaggagaatgaaggaaccggaaatgtcgagttgttattattcatataaataagcatcatagaactttagggaagctaattggtttgtgtctcactgtgattttgcatcatgacatgcatccgctttacactattttagaacccgaaacacttgagccaccaaataatagccttcttacctagctcataatgtgtttgataccccctttgtgagaatacacgcctctgctaatgaacgtaaaaggttaagttcttttagatcttgggattaattttgtcgctactattatggcgaattacagtctaatacggtttgataaattttgtgatgctggtttgcaggcaattgataaaagcatgatcccgaagaaaatgtgagttctcgtgttttcaaacctcttctcctgataaagatttttattttccttgaggacaagcaaagatctaagccgcggggtggggtggtgggtggggtggggggtgggggggagagttaatatgttcttttttggt

SEQ ID NO: 38125 - DNA, 469 bp, Arabidopsis thaliana columbia
ccaaaaataattgggtattaaacatccaaaaaaaaattagttgaggatttttttgggtttgttcttgaacataaaatcttgtctattacgaagttgtatcttggctaatttgtcagcaggttgaggctcaatttgtttctccatccagatggatcatttaggtggagatgaaaaatgatgtttgtttttgacaatttaacagatcatttgaatgaatcatttggatgatccatttgaatgactttgtaagtttaggcaaatttttaaaactcatttggatggacttaattggaccatttggatggagattgtttagtcaaaatgaataaataacaaatataacctttgtaataataccaatttctataaatttgttatttaatattttttaaaattccatattgcaccaaaacatctaaaaattaggaaatcacgaactattattttacgttaaaattgtatttaattt

SEQ ID NO: 38126 - DNA, 913 bp, Arabidopsis thaliana columbia
cgtgccatgtcttatattagtgtgggttttcaaacttgtattgagtttttcagtttttatgatgtttgctgagtaatacccaaattctatgtgaatcagcttcctgctttacttaattaggtattaatatatatatatataaatatctgctaatgctaatagtaggagctagcacaaaattactgctaatcccgagatctgtcccttgaaagttatgggtccgaatggtgactacgttttgcggtgcggaagaagttcggtgcggtttaaatagtaacaaaaatacataaatacatatgtatatgtagaggattgcgacgccctacagcactgttacgatgcagttttgagtgcggtctatgttaccattcatagcctatatatatatatacttgccgtatgtaaggatttctctccttcatcatacacaatttgtttttccttcatcatacttgatgctagggttagcctgacaaaggaacaaatatattttagaaaacatggaagtctgttaaggaaagtattcttgaactgtgtttagagagtatctctgcaaactggactgtgacccaaacctgagttgtaataggattaacaaataaaactttgatcttattgctggttaagttaataggaatataaacctaccactttgaaatcatatagaattgtccacccatttgatagatccttaggctttagtaatttgatagctcgtattagacatatttacttgtgtgtttatcattgatctaggaaaggaactaacattttccaaaagaaaaattatttaagtagcaacagttagagttcttatcacaaatcattgtaagtaaaaccagagttgtgatttatgaaacttaccctcaacatgaaagtactaatgatcatgatgcaataacacatatttgag

SEQ ID NO: 38127 - DNA, 532 bp, Arabidopsis thaliana columbia
ctatactttttgatatataaaaattctattaaactacttaaatatttcgtcatgaggttatatgcattagaaaaaaatatataacaatattgttggaagactggacaattatcgttgaaactatagctatcaccaagatacaactttttgtggaaaatcttggtggcaattagaaactgttcccaatctcgggcatgaaaatcgttattcaaatatttgtcaacaactagtgaatagtgatacagctatatatgtttgctaatttattgaattatttaatgttacgactttacgtaacaattatttaacgtctattcttgtgtacctcacatttcttatcgtcatgtctcatctcttatattattcacagtacacccatctcttctcgctcactgtggaacctgttgtcaattactcgttttgcattttattggtttcccaattactctatcaattatttatcacaaacaaaaacatgaaacatgtactctatagattatgtccgcaaacacaaattactactcgcatcaac

SEQ ID NO: 38128 - DNA, 586 bp, Arabidopsis thaliana columbia
ttcttaaattttaaaaattactattttaaaaaaaaatcacgggacgggtaaagaaattacagaacgggttttattttggaattgggttatatggtggatgtatttgaatcaatatttataaaattttaaaatattattaatatgctgttttaataggggttaaaactttaattttttaacaattgtttcatggattcgtgatatagcgttacttaataacaatcataaactgtaaattataaatattttataaatattactaaataatttataaaacccccaggggcaagttttaatatatattacttctaaaaataaatcgtcccgcgatatactgcgggttaaaatctaataccagcttgacaaagaaagtggtcaacaaacatttctggtagactttagaccattcatgtttttccaaaagatatatcgacattaatagaaatagtaagtcatctcccgaaaccatgtgcatacagcccaaccagagaaagtcacaggttttgtctaaatgaaggatacatgtattatcggcggcttgtatttcttgaaattccggcaggatgtatttgacttgtggggtgtg

SEQ ID NO: 38129 - DNA, 434 bp, Arabidopsis thaliana columbia
ctctttgaagatggagtcttgttctcttgtttccagagaagccttttggttgatcggacaaaagtgtcggctacttgaagagcttgacttaactgacaacgagattgatgatgaaggttctttattttcttcagatcaattcttagaaccgtggtttttggattataccttatcttgttagtctttcctcgtatgatgcaggactgaaatccatatctagttgtctgagtctttcctcgttaaagctgggaatttgtcttaacataacagacaaagggctctcgtacatcgggatgggctgttcaaatctccgtgaacttgatctctataggtatctcgcgtagaaatttatttttcagtcgggtcaataataaaattctccgttctcaatctagtccttatctactccaggtcagtgggaataacagacgtag

SEQ ID NO: 38130 - DNA, 361 bp, Arabidopsis thaliana columbia
  unsure (1)..(361): unsure at all n locations
aaagcagagctctaacgcagagcagtagcgaaaagctaaaatgtgagggaaggaagggattaagggcttctggctacgattagggagacgaatggtagatacggaggactaatgactgagagtgtgggtgaacaaagcgagatgcaacaagaacggctggcatgaaggtttgtacggtgcttttgcaactgtagtctnttgacttcaccagagcgctngaactcactgtgaacgcacagttagggtnttgttgcaccacggtnttaattagcccgtctaggaccgcaantaagaccgcttcttgtaaacagntgntcgtttatgccactggtatctagtatccaggctgctaagtcgtggg

SEQ ID NO: 38131 - DNA, 810 bp, Arabidopsis thaliana columbia
gataagcggagaaataaattttaagatatatagagagaccaaaatacctagctgtggcggtacctaagcggacagcatgctcatgataactgttcagttgctttagtatgaaaggtagatgactgtttattccacaaatgatgatatgatcagcttctaggacttgcatctgtgccccttccctcagttttgtcatattatactgcccagacaaagcgatcaggaacttgtaccaattaacattcatttttcaccagtagtgtttatctcaagaacttacccgaaattgttctgtcattgtgcttaatagccgagagtaaaacactattccccaaatggctaggacaaatccaatgagtctttcgaagcgtgtcttttgctgcagtttgcagtaaacatatacataggcatttatttagtaagcaagaactccatagaaatatcgtgagactaatataagttgttctgtgaagaagcaaatcatgacctccagatgagtatcagcgttaacgaggcatgcccaggcctcccagaggcagtcttctaaggatgtgtctttccttcacaacaagaaggaggggaataaaagtaagaaaccatgcaatggatatcacaagaagttcttaaacatagctaagttacctgaatttgaaaaagaagagtcctccaatgataacaaacgaaaagcatgttatcaggagcaccacaaataccctacaatagccatgacaagtgatcagaacggatgtcatatatagtcacatgcctgcaaacagctatactcgttaaaactctgagactacattgggg

SEQ ID NO: 38132 - DNA, 663 bp, Arabidopsis thaliana columbia
ctaatacgatacacgattccacctttaaaccacactcaacaatcacatagaaatagacacaacactcatatagtccgcatcactatgcaaaactataacacacaactcattcttgcttaagcaagatctccacatcatttccaagttcgatcatctccctgacctttgaacctatctagttccactggactcgttagtctttgagctacaaagaatccgtcaattcaatgcagaccatttccactgttccacttttcctcttttccactgttccactttttatcatctcaaaagttggtgattccactttctcatataacacatataattacttgttctcacaagtacaataattcaatcatcctatattactagaacagtcatcatatcatcaatcctaaataacaattcattattactaagcaatcagatctattcctatgcaatgaatcatgaagcataaaaatagaaacttgtaatcgaatcaccgcagatcacaccctcaccttcgccacttgctgatgtagaacacttgtttcagctgccttaaagacgccttaataactcttcaatgaaccgttaatgttttaatccctcagttgattatctagccagtagtaccatgaagctctacaccaaattttgtcccgatcggcatatttc

SEQ ID NO: 38133 - DNA, 933 bp, Arabidopsis thaliana columbia
  unsure (1)..(933): unsure at all n locations
tctgaagaaccagcagaaggacaactctaagaacctaacaaagccttgtaagtgaaagaaaccaaaaataattaaggctacttcagaaatgagaacaagagttagcaaaattcatcaacaaattatatggttttgtcaatcaaatgagtttgttaccaatgaattacgtttccaaaacaaaaaattccattgtttataactgaaatacgaaaagaaaactaaacaatgaaagaattcacataaagatatcttactaatgggattgtacaattactctattattgttttttgctaacatataacttagaagcaccactaaaatgcatatcaaacgaataaagattttagttctgaagcaagaaacgaaaattacagaaaatcttatgatgaaagaaagatactctaattataacagtatggctcatctatagaatagtcaaatatggagtaagctagtgacgctctgcgagtaagtcagaaaggtacctaaaaatgccaaaatatcagagagtaaacaaaacaaagttaacaaaccaactaaagattagttactgaaaaatcaaaacacaatgtgaattgatgttatccaaatatagttgaccatcagaccatatccaacatgtttaagataactgccaaagttgaaaatgccaaacaatcagtgagtaaaccaagattagttactgtaaaatcataacacaatgtgaattgattcagtgccctgtccacaaaaagggcgagtgctaattattaactgtaagatcataacacactgagtcatattggtggtagcttacctgaacttggagaacactctggtgagtatttaggcccgtaaatgaacctaaaatccaaaaaaacaacagacagacacaaccactataagtanaaagctanacatgggagaataatcataggatcanggtgaagtgg

SEQ ID NO: 38134 - DNA, 599 bp, Arabidopsis thaliana columbia
tttaataacactcattctcattctctttctctctcaaaagtccttcttcctcaagcttctcgagtaagggttcagatcacaatgacgacaaacgacgatgatcacgcggctgagagaaacacgatgtccatgaactatgaattggcggctacgttgagtgatgaagaacaacgcgcaagaaaaggaaaagccaagattgtctgtaaagaagaagaccacgtctttatcaaaaagaaagaaaaatacgaggaagagagcgagaagagggaattcttcagtcatgtccccagaaagataaggcctgcgcttagatacccacaacctaactttgaaaaccctaatggggcttcttcttctttaaacttacccttcgaagaagactactacatggctgagtactacaagaagacggagaccataaacccacctaacccttatcaccaatggtctccttcttcgttcttaacggagtacacacaccctaggatgcttgaggtgttacatcgctgtggattcaacagaccagtggtaacttaatattcaaggacggccagggagatgcggtgagcgtccctaaccatagaatacgacccgggaag

SEQ ID NO: 38135 - DNA, 825 bp, Arabidopsis thaliana columbia
atcccccaaacaaaatacgaatctatgctaagtagaaatccagaacagtgtgtgactactagttttgtgatacgttttccagatgtactagaaggaattatatcgatatcaagacgtttatggaaagatatttctttaaggaactcatagtagctgacaacttgtccatcggatttaagctctctctggaattgaccttagaagtttgcccataatcatctcaagttgcagaaatttagatatcagttctgaggcagcatcttcagaagaatgtgggagattcatgtgaggtccgatcgggatgaaacttcgtgtacttattcatgatactattggctacatatttaatggtgggattacgtttctaacggttagttctcgacttatgagtatgttactgagacagttttgtatggagtaaaccatgacaagtttttattgtttgaatgggaaacgggttcggttggagctgaagctttgcagaaacctttaggactcatggagtaaggttttggttgatggagaagcaaggtggagctcaagagtatgcagttaaagctcttatagtaagttggtctaaaaggagagaaaagagaatagagatgttcttcatcttcaactaggtttaggtgagggtggtatttgcgaaacatattatcattttcttttgttatgcttcttggcgcatagtatgtaggctttgatctgattgcgtaggataagatgatgtgatgatatgatttgatgattattgattgacatgtatggtgatgatgtcttactatgatatattatgtatgagaatgttaagtataagggggatct

SEQ ID NO: 38136 - DNA, 889 bp, Arabidopsis thaliana columbia
atgctataattcaaaatatctcagtcagtatctatttattttctgtattttgcattagatatttatactcggtgtcatacgtatttcactttttttcttctagtatcatatatactaatattatgcattgtacatataatcatgtatttcatatttcacataacccactttatttgttacccttaattgattttaattctctactttcaccaaagtttttaacaaatttgtaaacccaatatccactcaaacattaataatttaaaagattatacaaatcagagtttcatcaaagtttcgctcaagcattggtgtctagtttttttatataatacatttacaatagtaatcacaaaatcgatataatttccaaaaagttaaacccacttcctgtctttcttaaagaaaaaataacactcaaaattgtaaagctaagttttgatatctaatatttatagttatcatatttgtaaaatttaaaattatgatttcatatcatctttgtgtgatcatatttccaaatcattattttcatcaaaccatcaagatctaaaaacgttttagttgatttttgacaggcacaagaaccatgtctaactttattcataactaagtcttcaatcaattataacattctcaatacatcgatattggtatgaaaatcatagatcatatcatgatataactatagaagtgagtagtttggatgagaattaaaaaagagtagtaggagtggagcaagtcttcgaacaaggttccatacaatctgcgtcattgccacatttggtgttacaatttgtggagcatatagcgatcttgccttgttttgcctttattgctttgtatcaacaaaaattaagtccacgtatatatatcagtataatatgtt

SEQ ID NO: 38137 - DNA, 1128 bp, Arabidopsis thaliana columbia
  unsure (1)..(1128): unsure at all n locations
ttgagacatggatgttaaccatattttcgagactgcgtaacaggccttggctggtcgaactcaaaagtttggacatgggagtagaatcattgcaattacaaaatataagcatattttaagagttcatgggattaaaaaagggagatttgcaaagatagactgttcttctagtgttcctttgcaaaaatagcctttcctgttggacatttttaaaattgccccttctcttgcggaaaatgactacgttaccctgaaagattaggtttttcttcttctcttctcttcgacacacaatttcttcttctccgacggcgatttcctatttgaagatccgacgaagaaatcgccagatccggtgaagaaactttttgccaaagattctatggtaaatatgattctcaattgtgcaatttctagtggattaccttaacaattaatcattttgcaaatcaccctaaatcttatagtttagatctcgattttgatttattttgtatattgtttcacacatggactgagagagctaaatcaataaactgaatcaagctaaactaaaaaataaactgaatcaagctaaacactaaatcgaaaccaaaatctatcacaaaatagtataacgaattcacataatcaacaccaaaatcgaataattcaattcgaaattgagacatttaggctaaaataacaaattcgaaatcgattccataagagaaacacaaacctgggaaattgatggtgaaatgaagactgcgagggtgaaagacaagacgattccgacgacgccgtcgtactctccgaccgcgacagaccaagaacaagagagacaaatgaaaattaggccgctggtctgtagttcactataggtaaaagggggatacaaattaggagagagtgcaaatgaaaatggccagaaaaagaggttgattttaaaaggggtatgatgaaaagggtattagagaattaattaaaaaacaacaaacaccaataattagtcaaatcggaaattaacattacatcataataataattagtattatattttacattaatattataaggatcagtatnattgatgttatctgatgtgggatgcatgtcacttgttctgattttattataataaattag

SEQ ID NO: 38138 - DNA, 529 bp, Arabidopsis thaliana columbia
tgattaatgtcttgttagctcctggtacaaaaacgaaataaacgtaagcgttttgcaaaacaattgcataactgcaagtaaactcctccttaattaatatctcaaacatacttttgttcagtaaatactaaaatcgttacaagaattttcatatacatatactccctggattataaaaaagaaagtaaacaaattcacattacaaaagaagatacatcatggccctcaaagcaactatggtcaccaaatccatgtttgcagccttattcacaattatcgcgatggctacattggcatctgcagcctccggtttggctcagtctccagaatcagaccacttggttaacaaatgtatggctaagttatcttcaaggtgtgcgatgtatgtcacggatgcaatctgtactattcatggtccgatgagactaaaacatcatggatgttgtctagaagtttttcacatgggacgtgcttgtcttaaaatcgtaacgaatcatgtaatccaaatgtttttgccaagtttgaaggt

SEQ ID NO: 38139 - DNA, 770 bp, Arabidopsis thaliana columbia
caaccacttttaccgaacacgtgactctcacgtgaagaagatatgaagtaattttgattctgtgttttttaacgcgggacggattattcaccccaaattagagtactaaaatgaatgggctgtcatgtatcattatgggcttggctttaacgttaaaagcccattataaacggacaatgtatttttttgaactgacttttatttttcttcctaaagaaaagtaaagttcgtgtaagcccctttggtggtacattggtttggttgaccaaatgttcattaatacacctagggatttggaattcgaatctcagatactgtgatttattaggagatctccaacgattatacaattatagccgttcgccaggattctacgcaaaaaagatcattaaaggtgttcatcaaaaacatggagaagaagaaggaagtgtcgagaaagaaatatcgtctgtccgaagaacctaagcccatacgtctgtttaataattctcataatttacaataaataataagtataagatggagaaaaaaagttcaatttgataaattactgattttattatttggacttagtttggtctgtgaagcttctctgggtcaagagactcaaactcggctccctgtcaaaggaaaggaagatggtggcttagtttggtctgtgaagaatgtggctaagtccaagtctcttaaggttgaagatagtgtttttgggtctatttcagttcagactaatgggatctctctcggtttggataaggtcagaaaggaga

SEQ ID NO: 38140 - DNA, 482 bp, Arabidopsis thaliana columbia
aaaaacgtcatctttggcttctctccttcgatggctcatctaatttaccatgctcttataaagaaaattggtaagagggagtatttgtttgatgtttcttctctaaatctttatgttcatgagtggaaactaaagtaaaaattctaagaaagttcaccgcttctatctctggacaaaagacgctgaatttgatattagttgatgacaaggtaatgtaaatcttatatatctcatgcttttagaaaattttctttaataatgtatatatatatatatatatatcggggtcaaaaatacatgtcgttatgagtattgaatttggagacatcttctcgatgagacttatggaaggagcatggataagtttgtcgagtttctctctcagacgcgtagttgaaacttttaggcctactggtcatcgttttatgatacacccatctatgagtagcgacaatgtcttcacttttgcctcttttgaagat

SEQ ID NO: 38141 - DNA, 490 bp, Arabidopsis thaliana columbia
atttttcacctagagtctaccatattctagctagctttataatatgtaggaaaaatcgaaaatgcatgagtttcacccaatttcaagtctctgcttctccctttgtcatgctcgaaggagcagtcaacaccttccatgttcatgtatttataaatttatcatttaacaatacacaattttggacccattcaacattgattttaataacttatatgttatatggttaaataacaataattaatcagtttaacacaaaaagacaaccttctttttctgcatagaacatgatcttcgaagaaatccatgcattcgaatcttcaaccattttttttttcttgcttacaatattagtatataaaaaaattacaaattccgaaaacatactgatttaagtaaataaatacaaaactatataatcaataataattcattggatcttgatgatagccattgaagcaaaaggagttacaacaagtgagaaacaagatca

SEQ ID NO: 38142 - DNA, 558 bp, Arabidopsis thaliana columbia
tatacgctttatgggtaggtcagcatacaaagatgttttcttatgtctcaagaaaatttttaccttgaggaaacaacaaaaaaccaaaatcctcctcaagtctcatctacaaggtctggaattactttcagtctttcacgaaacatcaccgataaacaaaattccaacttaagaaatttatgggggcaaaagagaaataatcttaagttggttaagactattctttgttcaatttgccgaggactctttcagggaatatcttctcttcatgagctttcttctttgctaaggcttcttcgtcgaggactttaataggagaccattcaggtaacttgaatgactccatgttacggtagctctctaacattggttttcctttaagggtagcataatcaaatgctgtgcctacagcagcaaaaactagagagtagcgaatcgcacccttaggacctcctgtaaacaccgataatatgtcagttccgagcttaataaccctaaagagactatcatgaaagtttcttccaattgatttaaatatggcagagttattatgatttg

SEQ ID NO: 38143 - DNA, 582 bp, Arabidopsis thaliana columbia
attaaccgccgcccaagagcacatacaagataaaattagccgcatgcacatgagtcgttattcgcatacccgacctacgcgaagaaattcaggttgtcttaaacaaacccagctcggcaattcctcagaccgctataaacgagataccaagtgcaagaccttcacgcccaaatcaattgagccatctccagggtccatgaggtcggacgcgccataagagatatcgacgatccgacactgacgccaatgttttgcgaataccgcaaagcaatgaccacaccaaaacgactaacaaaacacatcatgtcggcaggctacgagaagctaaacgaaagaaccagacggctctggacgtacacaacgacgcaaccaaccaaacgccatttgcgccatcttgcaaagtgaaagtaacagcacccgctggagctaggcgaactgaagaaaagccaaactctcctcaacagcgaaattcacatcgtcactcaaaacgtcggagatctcgttccaacgccatcccactaaaacgaagaaaacgatgccacttagcataacgtcacgtcggacgaacgaactgacaagaac

SEQ ID NO: 38144 - DNA, 546 bp, Arabidopsis thaliana columbia
  unsure (1)..(546): unsure at all n locations
tttatagaaaatatattgacaaagttttttaaaccttcctagttttgttgatgttattccattgaatatgctttcagatgatgataaaaagctacctcaggcaagcattcattaaagctctttctaagatgcctgagtgtttgtataatgcaccttaacctatatcttttgtgaatacttttcacaacttcttgaaacatattgtcatgttttaatgttgtgaggtatctgtgcgctaggatgatcatgtgcacatctctgtaggaaatggctagtattattggcttataagtagtagatttcccaccaatctcgcctctattatctcaaattttatattttattttgtttgccttgtagccggctctcctcttgcacaaaaattgattttccctagatattaatcttttctctaacatgtaacatgtaatagcttatattccttacatctgatgttccataaagggtcatcttggtgcttgtttagttgatctagtttcagatgcgatttggcaaatatatttgtcctgcagcganattgacatg

SEQ ID NO: 38145 - DNA, 539 bp, Arabidopsis thaliana columbia
gttttgctattgcttttgctttggccaaatgggccagcagttcaaatgcgacatcaacaaacgggacgtagactaccactaaccactttaccttcttcatcttcgtcttctacaaggagtccccgataaatatcttcttcttcggaagatggccgaaagcccgacagacacgtttcaaccccattgtggagagtaaattgatgtaacagaaagagcaaacacatcaagtcatcaaacccataagtgaaatgcttctctgttttcgagcatcatcaccggaaaacaacagaaactgcgtcaccaccgcaccaaccgtaccgccgcttcccgtaattcccgccaccactcctaacgatctgtcattataaacggaaccaaattaggaccaaaccgaaattattagcaaaaaccggattggtagactttaaactaaccgcgtggagacgaaagggaccacgccaagtacaaaggacagaagcagcttgaacgaaaacagagaagcccacatgacgaggattgatcccagagcgagttgactc

SEQ ID NO: 38146 - DNA, 253 bp, Arabidopsis thaliana columbia
aatcttaacgtaaaactgaataatggaagaaggcaacaaaaaggggaagatggttaagccaagcaacatgaaaagcttagcaaaccaccatcctgaatgccatttatctctcgatgaatgcgtctttgatgtcccaacggttgaaagagacatcatggaattagaacaactagaggaatagttaaaggaaacatctctctgaaggcatgaaaatagtatgtagtattagactgattagaagaatttaaggata

SEQ ID NO: 38147 - DNA, 188 bp, Arabidopsis thaliana columbia
tgacttgagtgattgattgtgagagcagactttgtcgcatatgtttgagtttgtttagagaaaaattcacaactagaccttttttttcttcttctatcacaaatcacagtgtctgtatttagttgctttactctgttgtagctcacttgttgtttttggatgttttcatggaggcaggtttttattct

SEQ ID NO: 38148 - DNA, 262 bp, Arabidopsis thaliana columbia
aacatctcaatagtgccaaagtcttaaagtggagttcagtgacaaaatcattggtaggggttgagcaccaggtcgccattatgggaccatatgggcgcttcgacaacggggccgtaacgattagaaattccctcaggatacttgcacatatcgagagcaattgtgcgaagatggatcgcataggcatcacctactacggacaggtaagagagctacgagtcgtgagtgctaatcggtcacaaatagtgagtaacaacactgc

SEQ ID NO: 38149 - DNA, 544 bp, Arabidopsis thaliana columbia
attgaatcgtatgggtgcaacagatgtaagaaaatgttttaatatttggtttgtaaagtgatgcctattgaacatagttgtcaatgctactcatcaacaataattatttgaaggagacgtacatgtcaaggctatggccagttattgcagctgaataaacaatgggtgccaattgaacatattcaaaaatgccttaaggtatttgataattaagagatgaaattttgagggtgtatataatgtagattcagaccttgaattttttttccagaaacactatacttcgatacagaactctcttcataaaggactatttgccaatatctcatattcctgcacaaatttgtttctgaaagaaagacaggccattacaaacctcgagtttaattaggccagaacaaacaagatcaagcagctctcctgttccagttcccgacaatgcagagatagggataggtgtgaactggaaattccaccatgaaatcaatgaaacacaaaacaaatgcacagaagcaaagtaactaaaatgtttagcattgcatgt

SEQ ID NO: 38150 - DNA, 598 bp, Arabidopsis thaliana columbia
ctcttaattactcggttacactggttaactcttaattactcggtttaactaaatcgtttacaatgacacagtctaataccaaagatgagaatcactcaccatggctctttcgctgtaccctaaacggctaaacctcaataatagcaattagcacgtgatagggctttttgtgtatactacataacgccgtgtcacaaccttaataaagctatgtttcctggctagattgaccaaagtttatggtctccttcgcatataatagatggtttatgttcaaaaactagccacaatgatacctattaggagacttcacatatacaaaccaagctatcaagtagtttgattctaatccccagacacttgttttcaggtctgttgtcggtctttgataagtagagtaactgcaaacattgttcgatattcacaaattgtctgcgtttataaacgagaatcaaagaacaaatgtcgaatttgaaatcaatatgaaatacaacattgatcaaaccctatttacactatttacacacgcaatgctattaatttaaaaacagagtctcgcacagaaagacaaacccaaagatagttgaagatcatcatt

SEQ ID NO: 38151 - DNA, 570 bp, Arabidopsis thaliana columbia
gagcatgtcaatcacctgtaaactgacgaaacgaaactactcaattaccccatccttaggaattctttgtctgattgattttattgtttactctactgttgtttactgcatcctgtcacctgttgcttagtttctgcaattctttactgttactcgacctgatactcgaccacccagttgtctggcaacagactgtgcagtcgagtatctttgtttcattttctttactgttactcgacctgtcactcgacctcacccagggctctgcaaagagctgcgttggtcgagtgttttactgtttctgtttgattttctgtttcctgcttgttcacttaggattgctataacacaccaaaacctgttattgcttggcttgacttagtgacttctgatcacatcttgattgttagcatcacacccatttggattgacaacctaaaatactacaacgacatgattggtgttttaggataattgactgaaaaacttattatcaatggtgaagccgaaattcttatgagtttttggtgttttgaatcgtttaacaaggaagcactactttacttttcg

SEQ ID NO: 38152 - DNA, 944 bp, Arabidopsis thaliana columbia
aataattactactggcatattaattgacgaattcatctacccaaaaccacgaagtcaggttgacgaaaaaaaaaaaaacgacgaagtcagaaagaccaatgggccgaaaccaagccccactcttatttatgatgtctcggttagaccatcctttccattacaaaacaataaaatttgcattaaaaccctcgaaggaagtaaaaaaaatgaaactttgagctaatgcaacatagtactgaaacattgttagcattgttttagaacccataaggagaagtcacgtgactccgtaagttatcaatggggttttaagtaaattaagcccagcctttaatatatgggtctcctccgctgattaagaaaatataaatgagaataactagtaaaaaaattaatatatgggtctcgtaaagacattccccacccccctttattaaagttttacatgatgaaaatatagcaaccagacatgaatatgacgggttactaataccgattcaattactaaaaattggtatgtagtgacttattttaaatcaataataacgtgtttcgacagaagggaaaatcacaagttgatcgtaaatgaaaacgtggttgtaattataaatatagtttttttttttacgtttccacgtaggattagacaaaacacctagaggcttaaagatagagagaagagaagggtctggtcgtgtgtccgaaccaagtctcgctctttttttctcgaaagtccaccactactatgctctttcgtttccaagagttcaatttcaattacgcaaccatggaaaaatcaaaaaagctttttgtttgctattattaaatacctctaaaaatatgaattaaacccttttgtgaataattaataactttattgacacacaaataaaaaaataaactgctggaagatttgtcgaaatctggtttctccttcgtttttt

SEQ ID NO: 38153 - DNA, 619 bp, Arabidopsis thaliana columbia
agagaatattttttctgtataaacatgtgtctgttcagttcttgcaaaatgttcatcatcttgaaaactcagttgttgaaatacttcaaccaatccttgatctttctttagcgtctgcgcctgcgtctcatccgcgctatcctttgtctgcgtctttgcatttgcgtctgttggcatctcactcgcgctatcctctgtctgcatctttgcatctgcgtctcacccacatctgcgtctgcatctgacccatcactcaacttccacatcttgttggtgctgaacaagtgcataacatctcttccaatctaatcgagagaatacgtaatcactctttaacaagtgcataagaacatcatcatcttcttcttcattcgaatcactaagaacactgattacctcaagatcttctctcttactcatgatttgttcataagaaggctgaacagtagataaatacctcgcacaaacaagaaaacggtctgatttatcatcgagccgagcataagccatgggaaaccctttaacatcaatcttcgtaacatttttcttcttatcatcatcttttaccgacgacaccagcatatcaaatgcatcttttccctagggatacgcatggata

SEQ ID NO: 38154 - DNA, 799 bp, Arabidopsis thaliana columbia
catatcatccattaactttatagttaatagagctataagatgagttaaaaatatatacatgaacgaacaagaaattaaaaagatgaagctatatatattatatttcatcaatgtaatgtacaaagagaaggtataatgttttcaaactaagctaaattaaaaactacactcctgcaaaacattggtattatggcttcgaatggtgaccaaaccgcacagtgcggtgcgtttcaaatagtaacgaaattctttacatatacatgtgtatgtaaatatttttgttactatttgaaccgcaccgcattttatccgcagttgaatcgcacgtctccactcggaaccaatgagtctgaatgatgactgcgttttgcggtgcgggagaagtgcggtgcagttcaaatagtaacgaaaatacatagatacatatgtatatatagagattttgatactctgttataacattcttacggtgcggttttgggtgtattcacagcttatatatgactatgccatgcaacaaatttcaacctacaatgccatatattgcctaactataaaatatatcacacatcaaatcaaacagttttgatacataacaatccactccatacatgactcattaatttttcatttgtaacctgaaacacaacagctttcatcatagctaacgtatgttctagacatatcaagcgaagaagattcaccaaagtcggttattttatttgatctcctcttcgagatcacaaaatattttcgttgtttcaaatatgtaacaaaaaaaaaaaaactagattagcag

SEQ ID NO: 38155 - DNA, 725 bp, Arabidopsis thaliana columbia
tcgaatttaaattacaatgatgaaattttatatttatatctatactcgcttatatacgtgggctttagctaatatcataataatggatccatcaaactaggttgaaacaaacttttctaaatcctatttgattcaaacatatatgcctaacacttgttattcttatgcagacctcatccaattcacagcattacacaaatatataatcgattcggtgtttcttgttatctgaatcagtatccattctcaaacagcgcaaactgtgtaaccttaacatgtgtacaaaaagcataaccagatgcatggcaaatcattaataagagagaaaactgagtttacttttaatattacgctaaccaattaagctaattaacattgaattataagagatataaagaatattgatcgagggcctgactggtttaaacgcagcggatgcggttgcggttacgggagtttaaggaaaagggtgtttgcggttccaatcaagccctaagtaagagatcgtgtctccgagattctcactaacaaaaccctaaaactaaaattgtacgtttaagatttttttttttttttttttcacatggcaaactcacaatctcggtctattaataacgcctaaagaccaaaccaaagaccaaaagcatataaacatcatcttcttttttatggtttgagcattaaaaagaccttagataacaaagtttgtgtctctctgaagtcag

SEQ ID NO: 38156 - DNA, 468 bp, Arabidopsis thaliana columbia
aaagtgttgacttcaatgacattcaatttttgctatctttttatttttttgtacgaatactcttcagatctttttcagttcatgtaaatcgaaactttaatcatgagtctattacaatgttgttgaagtacataaaacaaggaattgatttatgtataatcgagttaggaaaattttaaaccacaaaaataaaatagttacatagaattgtatcaaaatatcattattattgttatatgtattcatgaagtgaaaaaatattaaaatcttataaataatcagctttatacacaaaaatatataaattgatatttcaagtcacaaatgaatctaaaccataaaattgtaactacatattatgaatctaattttattaacaatactagaataaacaaatagtaaatataaattagcataaagaacaatcaatgtaatttttttttaacaattttcaaaacaaactcacgc

SEQ ID NO: 38157 - DNA, 664 bp, Arabidopsis thaliana columbia
ttctatgccacttacttatgctttaaaaacgattgtaaatcatgttttacccttttataagcttttaaaatctcctgtaaatcattccaataccacttacttatacttaaaaaaagattgtaaaccatgctaaccctttttaaaaatccttgtaaatcattctatgccactaggggtgtcaatcgggcttgaagcccgcgggccaggcctgtatagggatgcaacggggcgggtacgggcacatttaataaagcccaaaaaaatgcgggcctcacggtcatggtccgtttggatcgcggttgaaagaagcccgacccatttttgaccgcggatttgcgggttgacccgcaacgtcttctttagcaccgttacgacttacggtgaatcgttgatgaattttgatatggtgatggcatcaccaattcaccatcgtttcttcttcgtcgtcaaaaaccaaagtctccttctttcttcaatcaacgtgtttgttaatggcggctcctattcaagcctcttcttcctccaccaatgggtatcttcactcttcgttaatggtttccccatcatcgcaggtactacttaccttcttcttcgatgaaatttctgctaatcggtttgatttttggttattaatcatatgaaattttgtaatcgttatttgttt

SEQ ID NO: 38158 - DNA, 529 bp, Arabidopsis thaliana columbia
ttatgtttgttcatttctagttgcaatgtgtgctctgtctctcgtaaaggttgttcctttgttcatttttgtgttcattagagagattagtcgcaaaccctttttctgcttcagtctggtattaccttacttgagagttgggagacaattgatatgagaagtttgtatcttgttctgctttgtgttgtgctattggcttacccttcttctcatattcattggattcatcaatcaactcccattagcctttgtgaccactcaacattactggatttacttgattgatatattgatctgtatcaactcaagctgttgagttcaatttcaaaactctataaccctggaaattttcaaaaccagaatggtatactggtgccaagtccaaatgatatgtattgagaaaattgtagaaaagtttaaccaagtaaaagcacttaatgtttgcaacagagatggaatcaatttcaactggtttaggaagcaaatccaagccatgcactaaatttttcaggttataaatcgatttttt

SEQ ID NO: 38159 - DNA, 569 bp, Arabidopsis thaliana columbia
gggtcctgactaaaaatcccatcacaggccctaccagatgatctaaagaacaagcttagcttagatgaggatttggtgtctagttcaagccctaaggaagcactcttacgagcgtctgcagatagagtagccatgagaaataagaacctcaaaaggtacacatcttttgaggagtgtgtgagaaagctttgttacttccaacccatgtgtccttagttatgccatttattatacacagaggcatgtcacactcatattcaacccaaagagataagaatctgtccaagcttgctggttattcttcaagcgataggaggtacgaagaaagaaatcacgactcgccagcgaacgaggttcaaatttgttctctttcattccctcttggcaactttgaagtcttccttttaacttaagggtgcacttcttctggttttcaactatttttaggggtttatgactctgctttcagaacaaatatcatctctcaacgagagaatggatgagttccaagtcgaattgaagagctcaattcaaagttgagctgcaataaaaactctccaacacagcag

SEQ ID NO: 38160 - DNA, 567 bp, Arabidopsis thaliana columbia
cattgacgatatatttgacaaagtcctataaatagtacaaaccatttctttcttcctgagctcagcttcccagtcagcaagctttctctgtttctgtgaagagtcctgcatcaattaaacacacatgttagataaatccaagttagaaaggttcaagagtttagaagatattgatgtcattacattcatattatccaatggaatatcaacagtagcatcaaggctttgaccatattcaactggcctagatgcagcaggaacccttccaccacctttctgcaaaatttatcaaaagttactaaaattcaaaaaactatcaaacgtcaagcaccaataacacaaagaatcaatcaacaatgagtttgattctccaaaactaaacgaatgagtcacactccaaattggaagaaattactcacaaacactattcatttctagaaattttttaacctagtttccagatccacagatataagttcagtattccgaataaacatcgagagatccataatctcaacacctgttaatatcattttcaaatagaaatgaaccttccgtaatcaaaat

SEQ ID NO: 38161 - DNA, 474 bp, Arabidopsis thaliana columbia
tagctgtgagaagcaatactttttaattctcaaggtgctatcattttctcaatctggataataacgtgatgattattttgtttcttcggctgcagttggcaattgagaaggaagaactggtgcaagcactgtcatctgagttatctcgaagtgcgcatgtgcaggtaaaagtaacataaaatcaatggggctaaaaacatgtcttctttgacttgagtaagaattttctgtcaccataacatcatgcataagttctctggctgagctttctatatggtactccgagtcctcatagactcaaaatccaaggccttgtcttcttcttatactcttttttttttccatgctggtccctgcgctccttattttctctgggtcttttataagttacgttttactgtttgtgtgtttattctgtaccccaaatcatttatatttctcatgtttcataaccataggagctgaacagagagt

SEQ ID NO: 38162 - DNA, 503 bp, Arabidopsis thaliana columbia
ctctctgtgattcttttgactaaaatggagaagcggagaataaaatgatgttatataatttgaaaaacgtccttttggaggttggtgcaggcggaggcgatgaaaactaaggagtcaaaagaaccatacttaaaccggttcattttccaattggttgactgttaaagagaagtttctggttttggtttggttcggttcggttcggaacaattcaaataaataaaacaaatcaaaaatattcactagcaaagtagtaaccagagacactgtgccgtcgcccgtcgccgccgccgccacactatcatctctctcaggtttttgattttccacggcaatggagtcttcgattctcaaaagccctaatctctcttcaccatcgttcggtgtaccttcaattcccgccttatcctcctcctccacctcaccattttcatctcttcatctccgatcacagaaccaccgtaccatctctcttaccaccgccggaaaattccgtgtctcgt

SEQ ID NO: 38163 - DNA, 523 bp, Arabidopsis thaliana columbia
aatatgtgaacaagaatcaagaggttgtcaaggattctaacagaagaagagggtaaacaggtaagaagcaatcaggtgatcaagagaaggtgttgacggtggtgggaaagaaacattgtggtggtgttgagttggtgagaagtcaaaacaactagaaagagatgaattttcgaaaatgaaaggaaaaagaacgtggagatggttttgttgatggttttgttcttcaacaaaaccttgatatataagaatgtatgtattatacttggtccacaagatacatgtcttattccccaagttgtctctaatagtaagttatcaagaaaactcaatgcttttgtgaaaccttaaacctcagattaatattagttacctctcttgattaatggccatgcaaccacaccgaatcaaacacatgtcaccaatatcttaaccatttgctaatttatgtatttagcaactatttttaatcttgttaatcttggggagttcagtttgtattgaaaatattttgagcgcgaaatta

SEQ ID NO: 38164 - DNA, 953 bp, Arabidopsis thaliana columbia
atcactgtttacaactagattaaattaatgtatacggtatgaaatggtacaatttaagagaaggaaatcgtaccgataactcccatgataaaacgaacttgtgtcaagtcaatcattgtcaaatcgacggactgagagagagttttgatgacgaagaggcgaagagcagaagatgaagctaattgagaaatagcgtttatgtggtcgggttttaaaactggaccggaaggtgaaccggaagtcttcgggtcattggatcaaccggtctgaccgtagccaatatatatatgactcatattatcaataaactaatgatatatctaaatttaatttaatcaatgaacaaataaatcacatttgtttcaaaagtcaaaaattgcgtccagagagagaataatgaagaaaacaagatcttaaactatatacatatatgctaatcatgctattagtcattgtgaataagaagaaattaagtttacaaatcataaacttctatataattgaaaactggcggttagcctaatgagccagcttcctctaagtatgaatagctttcaccgcttctccatttggttcaaccaaacaacaacaaaaagataaaaaccctaagaatgcgccattgataccggacgcctacagttctctctactcctatttcttctagggttggtatctgtctttcaaagccactatctctctctagggcatctaatttaaatatatagggtttgaaaaaaaggcaaggtcgggtaattaatttggctgtttttgggtctcattaattctctatatatctatgtctggatctgctgcatctctatctaacaagtacatttgtggtcggattcttttggtttttgtaataattaacagtcaaagctcttgtttctcataactaacccagatttagggttttttttttttcctctggtaacagatctcctttagtttac

SEQ ID NO: 38165 - DNA, 561 bp, Arabidopsis thaliana columbia
tatccggatttaattttcagacaaagcatatgcatatgtaagctgggttaatatttagtgaaaagtttgtttggtttagtagtaaccaattttactaaaatcattcaaattaagtctttagggggggtagcttaattggttttgtatgcatatttttacggggtaaaaattgcaattaagtaagaaagtagcttttatgtcttatataaaaagctttaatgagaataattagtttgagcattgcacgtgaaagaaccctttcagtaaaatgttcgtcggcccctccccacgctttgcggccgtcgaatcattgcttttcttttgaggtctttttttgttttgataaattttactttgagatctttcgagcccgtctgatcattgtgctaatttacgttaatcactttgttttatgctcgtatgttttacttgatatctttcgaagacctttttctagaatgaaatgatacttgtatatctagacaatgatcccaagtttcaaataatccttgagtttaatcaacagtgtgtggcctaatctactatacaaacggaacaaga

SEQ ID NO: 38166 - DNA, 436 bp, Arabidopsis thaliana columbia
ccctcccttgtgttacttatctccattgtttcttgcaaaacactcttcaccctaaaatatactactccagacaaattttttgtttctactgcgctattcaaattgctccgaaatcccttcttagtatgagccatatatctattcctgcattttgagtcaacggaggaaaatcaatagactttggtttaatactctgtctgcaagactacaagttcaaaaataactgaagataaatatttcctatatcaatagcctgatcatacctagatcctcgggaaaaccggtttacatctgatttcgaccgatatctttcttgaatcacaatgcacctttccaaacttcggatcataagcatatactaaacaataaggaagtagtcaatttttatgtaacatcatctaaagtgtaatctattaagttacaagttgagggtaaa

SEQ ID NO: 38167 - DNA, 559 bp, Arabidopsis thaliana columbia
atactcgggaagttggttatctccagttttccaaatatagtaaccgaaccgataacttgcttaatcgagtttggtatcaaccggaagaaatcttcccggtcaccggaactcctgaagagcggcaacatgtgttctggattcccgttgacaagtcctacttgaaacttgcacgcaaactcgaggtttgaccaaacctgcccatatctagaattgttttgttgatagtaatatatttttgcatacaagttgaatttagtttcgccgaatattcataacacgttaattagtccattacgtatcaatatatttgactaaaaaagttcaatgattattaattattaatattaatatactagattttaatcttagaactatacaggaaaattatattccctttgaaaatattagtacaaattgttgacaaacaaatagtacaaattccagtattgataaaaaatttaaagtcagtaaacataaagtgtattaaatgacacacaaaaaagtaatttccttgttaaactaacaaatttaatttcctcaagcttaacaattttaaaaa

SEQ ID NO: 38168 - DNA, 933 bp, Arabidopsis thaliana columbia
cttctcaacctgtatagaccttttcagttatgggacactcagagtataacatacccttagactctgtgcttaacactttttggggtacaatttgtttagcttattttgcatctacagttctgttagtttagtttggagtgtgttgtgagatactctttttgatgctgctatgtttatcaccttttagtcttaagtattgcagctttatgggtctacgtttgaagatttctcaaaggttttcaatcagactcctaagaatgcttgttgtactgatacaatggtgagtaagaagctgtcatgacacatacataagatggaagctttaagatcagattcgaaaaatgtttttcgtggtctggttttattgaggagtcatgatgttctgcttatcacaaactactcactttgcaggccttccacaattggcagacaaatataatgtacccctatctgtatttctttactctgtaatttgtagttctttatcagtactcttttattttgtttctttggtccgtaaaaagtttctctccttgtaacaagcctctccaaaatgatttccccattgttgaatgatgcaacttgttccacatatatatagtagtcaatttgttggaaaaagacatataaaaatactttagcataaaaagataaaaaaaaacaatctcctagactttttttttcttttttttttttctaaccaacatttaaattacaaataaaataaaattgatagtctaattaattaaatatttatgaccaaacatgtatccttattattaattctctcttctttctctctacaactcgccgctggttgtgttttttgccccgaccggtgcgtgtgggcaacatggtccgacgttgattggttcttttcggttttgtttagttatttagttttatgtctttgtgtggaaagatctttggatt

SEQ ID NO: 38169 - DNA, 553 bp, Arabidopsis thaliana columbia
tttttaatgatcatgattcatgataaagagattttattcattacttgtaaaaaaaatgttccttcctttgtataaagattaataatcatacagcttattccaattctataaactaattttggaatggattattcttaatctacttaaaacgaatctaaatttatatgttgatctatattcttggtctcaagattctatgaagaagtagtctgactctcacttcttgttgttccttcgagctgacgttttcttccaccattaacaaaccttttcccaaaacctaaaagaaacgcaggaggaacaaaagcacctccgcttaaactgcagacaaccgcaacagctccaccgataatcaacagtttcttcagattcgcagctcggtttccttggtttaatgtaacgggagtttcagtgacaggcgatgcaccgttgctgagggagatgagatggtcttgtgtgatcttggtgttgatttgagccatgaaagcagaccgagaaagcttggttcctccatctgagagtctatgcgtttggtaagcacgtaaaccgggtt

SEQ ID NO: 38170 - DNA, 652 bp, Arabidopsis thaliana columbia
tgtcttctgagattttacctttggaagatttattccttgcttttgttaagagtgacacgcactgagatagttcaactgaaacctttttctggtcagcatcagtggagccaagtttactctctgccaagcagccatcagcattacatggcaagggacaagaatgttgagtacagtaatctccttcaacaccgtgaacaacccggacttttctatttgaactcctcttgcaggtcttagcctccccatgctgctttcgaccaagttctccatcatgttcatttcggtttctttcgtgcaagttcttttcactcttcctatgtctgctaacatcagcctttgactttacctccatgttcaagccagcctcaggattcaatccatgtgacaaagttccatttttagagcaaatcttccctttcagatccttctcctcacacacatctaatccttgtgcattagtacttggaccaaactgctcttctggtacgctgaaacatctacgatctttgtgtttctttctccgagtacatttgatttcttcacactcctttacaacagaatttggcatcacactggactgccgtgagctacgatgtttcaatcgacgatccgaactacggttctgcactttacttggaccagcagatgatga

SEQ ID NO: 38171 - DNA, 741 bp, Arabidopsis thaliana columbia
tcgtgaagctctgcaccaaatttcgtcttgatcgacataggttcagacctccaaacgttgcctcgaagaagccaatacgaattagatttctaggtttccaggttcaccagattctacagttacttatctaggaaaaagcacacatatcttcttgaatataacctcgattcaaactccgtctgttgttgtggattcaaggaattgtgagctttccaaagacgtcttactcgttatctgatactcctcgtcatgacgggaatctccctcgtaaaaccacaacttgaaactacacttttcccttcatcttcttccttctttgattctgttttgctttgccccagcctaggatgctttgatcttctttagcgtgaatcccccttactattttgaacgaaatctccctctcccagtgtttttcctttccgttgatgataatcctatctctctgtcatgtctcgccttctactccggtttcttcttcttctttgcaactaattctcttctccttggccatatcatgtcgtctttgttagatgtggctcatgatctccttcaaatttaggttttgcgtttccttttgacggctttcatgaagaacgtacatacaccaatatatactcacacttttagtgttataagttattaggagagatgagcctatgatgagctaaagtatggagttgggtccacaattctctgaggattcgtcctcgaattcaacatttctggttgagcaatgta

SEQ ID NO: 38172 - DNA, 616 bp, Arabidopsis thaliana columbia
ctcagtctccacaaaatggaagttaaagtccaatttctccctaaatcgaaagttcgaatcctaggtccccataaatttgagtttcacggtttatctttgatttactgtgccaaacccatgtcaaaccaaaacccaatagactaaaccgaattaaaacctgattatcacaacccacaataaatacaatgttattatttaatattaataatataatctaatttaaataattatttaaaaacgatgaacagaattacaaataaatatacatctccttcgtcttcttccttcctccctcttataatcgaatgatcatctcttgtgtcccttttgtgggacaactaatctgcaaaaccactttagagtcttcatatcccctttgtgttaaggaattgtgttaagacgaatttacccctgtatttctaaacattttgaaaaaaagaaacggacgaagaatgagaaaaagctcgagctcgttcttcttctggcttcttcctcctgcgagccgcattgtcgtatttctcctcctgcaagctgcatcaatctactaagtccaggtatggagagagcttcataagctttgaattacatactttgaggattttgagattcaatccaa

SEQ ID NO: 38173 - DNA, 751 bp, Arabidopsis thaliana columbia
atttatcccatgagatgactgcaaatttctgtgatctctatgctcaagtggtaagaagttatttttttggtgagagatactcaattgtcttatctagctattattccttttattggtgcatttcatttctgtttctttgtcactaggcttacttccaacaataactagagaaacttaacgttttgagaagtgtgggatgacccttatgtctagctccggtcagaattatcctctagttttaatggctactaggttatgtactttgtcttaagcatgagatgatgtgtcattcgtttgtgtaacagttagttctctaacggttttcaaactcagaatatagattaggtgttcaaatctattttttaagaaaactctccgacttagccttcctgatcagcacctgctagactttaacctccgctctgataccatttgtcacacccgtctccttcaacgttgagacggcgtgctttctccttacttatatctttcctctattccactttcttaattcaaataacaaattgtcttaaaaataatcttaaatcattgaaaactctttaataaatcgtataagaaaataacaatagtagaaaataaacccgaggttcccaaaatacactgtaagcgagacggacttgcgcgactacacacgattttcactgtgacctggggaaaaaggggaaaaagggggtgagtaaagaattactcattgagaggatcctttccgcccactgaaaatacgatacac

SEQ ID NO: 38174 - DNA, 946 bp, Arabidopsis thaliana columbia
  unsure (1)..(946): unsure at all n locations
gatttaccaactaattttgaaaatttaaattatacatttatgttttcgtttttttcttgttaataaaaaatttcataaacgaatatgatttttgtttttattatatttcttaaagatacatcattgattaataaaaaaaatagcacacccctatacataaaatattatatatattaatatatatatatatctaaaccataaatttacaaaataaacaaaattgaggaagagcatatatagatatctggaaataattaaatagtttagaatatataataattatgtgtattaactcttaagcattgtccaaagttagctctaaactttatgggcttaagatagacgtcgattaacactgtcttaacagagatttaatatgacaaaatgaaataaacaagtataaagccaaagaaaagttctangattgttgatttgatataaagaaattttgtccatacataaaaagaaaattatgaaaataagcagagcgaaaattgatattggttcagttcagctactgtctttgataaatcaacaattttaaatcaaatagaaaaaaaaaacatattcggtattcatatgttacttgatgggctaagcctttaaaaagccctatcatgaattaaaaagcccttcgaacctttttatgtatcatattggtccttcggtcacttaaatcatctcgttctgatagttatggattgtcccataaatttacagttgcaacgagaagttgaaagaaatgaccaaaacctagattttgagaggagttgagtcaatttagctcgtggatgttagaagtgttcgtatggatattttatgatatcactttacctaagtgaatgaatataaaaccaaagtaaaaggattgcaaaaataatgttatttagacgcattgcaattgcaaacctacaaaagtgattggtcatagggaatacttgggggg

SEQ ID NO: 38175 - DNA, 575 bp, Arabidopsis thaliana columbia
atcctgtggtggaaaagatggagacatctttagctggctactagaaaccggtgcactctgagcaccaacatactcgtctttcacagtgttctgcttgtattggttttgcggtttggatggttctactttatttatagcctgcatctgaaaagcttcattgtagtattcaacgcgaggttcattcttaacttgactaactaaatttgaagctggctgagattgacgataggcatcattgttcattaagagctcttgctggtggtattgaccataatgagcttgttggttgaattgacgttctaatggtcgatgactcacctgagccaagttttctttggaattggaagaagattggaaattcccattctcgaactgatgacgtagatgaggttttagccatggattgttttgcaggcctgactgactaccgaatgaagtatcaactctccgcatagaattcaggctcatagaattcatatccacagcagtttctattgagccagatgatgtttgaacccatagagattccagacacagaagtaccagagtactcattgagtaccttcatatgatga

SEQ ID NO: 38176 - DNA, 400 bp, Arabidopsis thaliana columbia
tttggttcagtttaagtttaattcggttcagttttagttcggttcaaaaaaatcaattaatgtgacaaaacaaaattctttcgttcattgtggtttgaactttgaatttaataataatttaaagtaaccaatgaattcaagttgtaagtttaaattgaataattaaactatgaaaagaattacatatttagttatttacaatattattaatataatttattaattaattaaataaccatattggttatcagtttggtttggttttgaaccaaaccgaaccgaccattagggttaagaagaaacataaccgaatggtctgagaaacagaagagatgtatcaccaatgaccattccttcactatgaccagacttcgatgatttgggtgtcttgcatgtatgt

SEQ ID NO: 38177 - DNA, 533 bp, Arabidopsis thaliana columbia
tccgcaaccagatttttggcttagatcgaagacgctagatgatgatctctgcatctggtttcagtcacgatcttaagctctccaactttatttttcagtttctaattctgttattaatctctcaaagcaaataagtgcatttattgcacccaagatttttgtttgaatataattttacattcatacaaggaaaataataacaaatactcatattcaatccaaaattatatcgccactagataaggcccacctaaatatgaatgtgtgaaaaaatagatagattaaaattgataatatgctattttatcagacaacgaaattgatcaaagttatgtaataatctaccgttcgtgtatgcaaagagactaaaatctttttttttccataaactattaaaaaaaagaaagtattatagaaagttatatgaatgcattgtctgcaaaacatgctaataaaatgttattttgaatctgtaaataatttcactcaccacttcaacgaaacataagttcatgaagacacttgaaagtaaa

SEQ ID NO: 38178 - DNA, 470 bp, Arabidopsis thaliana columbia
gcaaaatgaattctaataagtgatgaataaacaacaaaaaatatcaacattcaatttgaaattttgaaatggaatgaagaccaaattaaatatcactaggttggatttacggttactattgttatggtttagttagtgtttggttttagtctggtttcggttagggctcgtacatgaaaatctaatccaataagtttatttcttctttggtttgtttgagaacttttgatacggattgcactccttagtcattttgtattcatatattacagtgaattttttttttttaactacgttgaatctagcttaaagaaattaactttaacacaagaaaaaaaaaactacttaattgactatatatgttgagaatcagttccattacataaactcgcagtaatcaatcattgtctatcgccataacaatatataaggagtatgaaaatatggcaaagcagcattaataattattg

SEQ ID NO: 38179 - DNA, 674 bp, Arabidopsis thaliana columbia
cagtaaagcaccagcagagacagctgatgtagtaagccgattgcagaaaacaagaaacaaagagtgcttaaaaaactccttgttcactccataaggaactctcattatcttctcctacaaaaccacaatcacaaaacaaaagaaatttgtaagaaaggggagacatttcacagagaatggtatcatgaaaacaagacagacctgaagaacaccgtagattacaagagtagacataatgccggaaactgcgaatacacctttccataatttgttctctttcactcctccgtttactaattctggctcagccatggaccatccacctctgaacacaaaacccaccattaatgaaccaaatctaatcacacaatacaagctccgattttgtaatgtaagcgtgagaaatcacagtgactagtgactgtaacacacctttgagctcggagatttcaagctagacgacggattggtaagagtacaacggctgatccggtgagatcggagaaaaattgtctctgtctctctctcacgctccttttgtaaaccgttctccggcgacttctccgtctggatccgatttgctcctccaccgtcctctttctctcaattcctttatttccgcctttttaaagttgtgtcagttgatgtttccaagtataggcacgcagcaataa

SEQ ID NO: 38180 - DNA, 455 bp, Arabidopsis thaliana columbia
ttcaaaaaaaatctatatacgggccgggttttatgatttatctaagtttcgatttttttcatgtcaagtcaagttttatttcattattaaaatattaattgaactatcaaaatctatttttttttccttctccacatcaaaatgtgttaagttatgacatccaagcaacataattaaagcggttccctttgatataaattaaatttttgtgaactttatttattgttttttagataaagttttatagatgttatgtaggactttgttttgttttgtttcaagtcgtttcactccaatacaatagttttgaatatgaattatgaacactttgacaatattttgtcacattaaatttacaactacaaatagaatttatgtaattaaaaattaggaaactattaagaactcatatcatatattagatcattttgtctgttctttgacaccttttatga

SEQ ID NO: 38181 - DNA, 565 bp, Arabidopsis thaliana columbia
tgctggcctcatgttactcaatcatcaaatccaatgatatcgccacttgaattccctacttcgggaggagcttctgctaaaactattaccacgcaggagcatgaaaatgctgcagatgataatgggcaaaaaactcacttttacgttgtaccttgcccttggtttctccctcctcctgatcacagcaatggtgttcctttcgggcttcaagatacacaaagaggtactttttcaaacgggcaccatatcgatgattcttctgcaagaccgatggatgtcacagaaactccgcggtcccatctaccaactagaatcaaagaagaggactctggttcacccgaaaccagacctttatatgatctcaacgaatctgctactgaagtcctctcagaaggaggagatggatttcctgtaacgcagcaagcttatagtttaaagcatgaagatgtttctgagacaactaatggagttacactgatgccgcctggtcatcatgttttgatttctctaccggagaaaaagcatggatcgttggctgcagcggaacgtagaaagagacggaaag

SEQ ID NO: 38182 - DNA, 220 bp, Arabidopsis thaliana columbia
cgtcaacgtgtttgtgatgacgtcgtaactgaccagttcggatgccgcccccgacgccgtgcccatgacactccaacggccggtgtcgccacgcgtggtggccgagtccaaccagaaggcgtcaccgtcgccagcgaggcggctgaaggtggcttcttcgtcgaggtcgatgtccaccgtttggtggtggattgtccaccgtgccgtagtccgggcacac

SEQ ID NO: 38183 - DNA, 510 bp, Arabidopsis thaliana columbia
tcaaaaattctttcttggataatgaacattgttcaagttcatatattattatataaaatgcattttagagtctataataaattacaagtcaatcaaaaaagagtgtctactaagaccatttaaatgattatcctttagcacccgttttcagttcctacaagactgcatgtatctcttggtaattttgtgtggtcgataagaaactgctagtaatccggagtgccacagtcactggttcgataacccgatccatcaattcgatccaacgccttccctcctgccaagctttgaaacactctttctgtgtatatttacaagtaacccgaagcccacctctaagttgaggttaaccatcaacattccttattaagaatcttttcccctttgatcaatgtggctgatgtattggcctgaagaagcaaacttactctgtcctgaatgttagatgtggagtattggagcttccagtatttaagtacctgaatgtgctgcagctcagttgaagaagta

SEQ ID NO: 38184 - DNA, 519 bp, Arabidopsis thaliana columbia
agaggataatccacgaaagagctcgaatacgtaatcatctaacaatttgagaaaataaaagttacaaaaaaaaaaaaatctaacaattttaagatatctttttaaatcaaccttttcaattagtgcaagagcaaaaaaaaaaaatgttggtcaacaaaaattgttttttttcttaaatttataaatggtggtggatttttttggggacctatttcgaaatgactatctaaggagcgacgcagcaaggatctgtttcagagagaaaaaaaagaggttccgactttttgttagcgagcggctcactctactttgtctcccccaaaaaagccgttagggtttatcatatccaccgccttgctttactctcgccggagtcgtacggcgaacgacggttgttcggcgttgtctcagctttagattcttctcttcatagctagaattcgcgaaacgtgactttagctgaaacgaatttctcctaattttcgagatatggcggaggtatcgatgggaagcagcagt

SEQ ID NO: 38185 - DNA, 505 bp, Arabidopsis thaliana columbia
gcctaagtcattcataaactagctttattgagaaacgagatcgaatccacaaatccatcaatctaatagaattaatcgaacaaaagagcagaaatccattagacaagtatagaagaagaagcataccagagggttccgcaaagagatcaagcttgacacgacggccggtgctattcatggcggcgtaacgacgctcttttctcttccccatcagatttcttactctctcttcagactctaaccccaagccaattaaaaaaaaaaaaccagaagtagctttcgcgtcgcgtcgaaaggttaaaaactttatattcgaaccaaacgacaccgtttcctcgcaatagccgcctaactgccttaggctatttccattgagatattttgaaagtttctaaaaaagaaatataataatattttattataatttaccctctcttcaattataaacacacatatacacatactctctcaatcattaatctaaagttttctgcagagaaactat

SEQ ID NO: 38186 - DNA, 605 bp, Arabidopsis thaliana columbia
atctgtatatatacgttccgtttttggcatatctagtgatataaattagtgtttaaatatcaattccatctatgaaatctaaaaggtatgtggtttatagaattaaaaaaaaaaatgaacaaatacatctatatatatcgtgtgttttataaataaagcgggttactcattatctacgcatgtttatgttctcatcggtaattgaaatctataagttatgtggctcatcaggaacaaaaacatatataaatggcgtgtgttttataaataaaacgggttactcattatcgtgtgttttaaatgctactcatctctcctgttatatgtggaatcttttgctacgaagtagggctacaatatattaagacattttccgcaacagtgcttacaagcttttaagccacataatattgaataattatgatttccctccaaactctcgaagggctgctaatcgatggaatctgtcgcttctgtaaatgtcgcatcaaacatataactgaattgtatttgaattacatgcataaccacaataattcatgtgttttaacattatcgcagacgtcatgcgcgacgtgtcgtttaccttagattagttggaacga

SEQ ID NO: 38187 - DNA, 884 bp, Arabidopsis thaliana columbia
gtcgattgaatcgttatatgaaggagaatggttgttatggagatctgtttaatcttccaacatttggattaatcttcctttctccatggctgagcgtatgcactctgattttaagcacatcattcacatgggaatggcttcctctgatcttgttgcagcggtgcagccgccgctgtcacaaccactgatggttatgaagaaacgtcgacggagatgaatttcaatctttgatttaagttgttgatttagctttatcgttactgctactttacaagaatataacggatgaaaattgttaatgaagtttacagacttgtttaatcacttgttgaacctcttgaacttggaatgagattagggctatgaatggtgacatacacagcacccaaatccgcactgcaacagtactgtaacagtatcaaaatctctacatatacatatatatttatgtattttcgttactatttgaaccgcaccgcaaaatcatcttcaataatagatatgaatgttgatgatgtgaactgctctttttttttatataattatttctttgtttgctttggttttccttatgttcattagcatggaagtaatcaattcgttcgattaatttcagccttctttagcacgagactccacaaagcaaatattctttctctttatcaaacataaatctgaaaccaatcagatactaattagtcattcaaatttagttggataacatggtataactgtataagtagacgtggaaatttaagcttcgatactagagctttagatgattctaaaaccaaattattgatttagctctgttgttaaagctctcaatgttgattgtctggtattacctgtgacatagtaatttgcgtgaccatttgtgtaga

SEQ ID NO: 38188 - DNA, 754 bp, Arabidopsis thaliana columbia
atcaatgattcacaattcagaacttgtaaaaggtaactcataaaaggcattgtaccatattagtttgtacattgttatacatgaataaaaggtttgaatcaaaattctttagacattattgtattcaatgattcatcttttaaacaagtgaatagaaatgcccgcgggctgacccgtatatccgctggctttgcaggccgggcttggacactgatatttttgcccgcggtcctaaacgggccgaccgccgcggccggaaaaagaaagcccactgcggggcgggcaagatgggcgcgggccggcccgtctgacacctctaacagggtcccttctggcagttgaccctgcaatcgagtatatcagtcatttctgtgactttttactgttttttgcatcaacactaggactgttagataaccaatcaaattctgcttggcttgatttaacaacttctgatcatatctcatctgtctgcatcacacccttttggattgacacctaaaatactacaacgacaggatagtattttaggattaattgaccgtaaaaacctactatcatatagaagaaatcacagagaactcacatgaacctggtatgtggctagttttataccaaccaagtgatgaagttgaaatatttttatcatcagtattcgaggcattttatttttaccagtaacacaaacgtgaatttgtcttggagttgacatctagttaactattgtggtctgtacaatgttttacacatgctg

SEQ ID NO: 38189 - DNA, 625 bp, Arabidopsis thaliana columbia
atcgtctccagaacagcaaacagttgagcaacattcaaagcaggcgatgcaagcaatcgctgtgaagagctgtgtgaagacaaggacacattgatcattgagcttagagcagcattggacacaacacatgcagcaacatttgttgcacaaggagacacaacagctcgaagcagccttgacgaacttctcagcagcatcaggagctttctgctcgccaaatcctggcggaacattctctctggtggctgttttatccccaaatcctatcccaaggctttgtagcgggatcgttcttgatatcatcttctgtttctcgccgttgcttgttgtctgttgaaatatttagtgaatatatgttataatgagtctggattggtcctctggaacagaattaatcactaggttttgcttgaatgtggcgattttagttcataacttctagatatataaatgagtagtactacctttttctttccgccagtttcgctgggttcaattcttctgtgtctctaattggacattcgagtatctcggatagtcgccggtttggatgcttagtttagcaatctcgaagaagataaacaaaatgaagaacaatcgtgaagaggcagtgggggagtgaatg

SEQ ID NO: 38190 - DNA, 594 bp, Arabidopsis thaliana columbia
  unsure (1)..(594): unsure at all n locations
catggtaagtcattttgtatcgcgataagttataattgatgtgatatatatagatatttaccatcttaactcatttattatatcataataaaaaattaacgagttactataacgtacaaaatatgaatttcatccaataacattattattatcactacctctagataaagttttagttaactaggtaatttaattgttaaccaatttgaatctgaacaaaaactaccattgcgtaatcttcaaccaccacatctccgccgtattcttctcaccccatcatttcagaaccatttttttcctctaccgcaaacccacaccctaatcgatttagaactagatctttaaacgattgagagaaactgccggtaattcgcgaaacttatttggatttatcgaccagaaccacagagctttgaacggagactggaactgaatatcggaaaaaagaaaaacagagttaagttgaatcgaatctatatgagagatattatgtctctcgtctctgacacacgttactgtgtatcttatatattactttagactggatagactgtgtaggggcttataggtcatatnttgtgtcaaaaaccatat

SEQ ID NO: 38191 - DNA, 593 bp, Arabidopsis thaliana columbia
  unsure (1)..(593): unsure at all n locations
gatgttttaatgtaaataacaaattagtatattatttattgatgtaaatatatagatttgtatcaaaaacattttataaaaacattagttattataattgatgctaatcagctatatttgtcatatttatacataagtgatttaatatagtatcacttagttttgtagtacaatttaagtgatttaattcaacttttttgtagtacaattgtagttgcaccaacgaagttggaaaaaagattagagcacatcttattaaatcaaatttaaaccacactcaaaaccaaagatgtatatagttcaaatttacttcttatcgtactgataaatctacgtttatttcttacatctatatacaccaaatctttttaaaaacccacacattttaaccttttaatgtgatgtgaagctatgactccatgtgactggagttaggtctaggaaacaaaagtaaataaaatggcataattcaacgttttctgcccaaaaatatcactttttcaaaaaaaaatctaaactgaagtatttattctaatagatgtgtgattacatagttgagagattgcgtaaatacgnaaaaaaaagatatttga

SEQ ID NO: 38192 - DNA, 572 bp, Arabidopsis thaliana columbia
tgacttgtctgtctctttggataacgatggttttggaatattttagtactattgtttaatttagaatcgtattttactgtggataaagttgaaattagtggtaatcgcaatcaagattccagattgtaataaagttggtgagcgaacgatgttttaagatatagaaaatgaacagagttctctcataatccaaggcttgctttgatcttttagaacattctaatattcacagagatgtaaccaaactatacagttgcatccagaaaatccgactcaagcgatttcataagcacgagtcaaccaccacagatgaaccaaactatatacagtttgcatcagaaaaaaattctgattcagcggagttcatgagcgagccacgaccatcattatctgaatttagccttgagcccagcagttgaggtacatgacttgtcggagagactcatcagggagtggaagaagaggtacgacgtctttcttcctgaaggagagagtcgccggttagatctgcggcggcgagaggacggagatcggaggaaagtcttagttggagaaggtgagcagaggtgaga

SEQ ID NO: 38193 - DNA, 458 bp, Arabidopsis thaliana columbia
  unsure (1)..(458): unsure at all n locations
ttttcattgtaaacgttcctgttatctccaactgacggtttatctcagtaaattctgctaccataccatcaacctataacagaaacagattgctcacacacagttatatctcttttcatttttccacattccagaatacaatgtgtaaggatttgacatggttacctgccggccatagtaatccagagcaatactctggcccagaacacatcctatggttctgatcccatcagtattcaagaactgcaacctgataaaatcncgtcctacctccatccatgtgtccagatttggattctctcttacttcatattctacagttttacagaaccagagatatgagaaagtaagcaacattgcgaaaacagcacacagcgcaaaagaaaagcaagcaactcaccatcttttctcatttctggaagcaacccagaggcatgcctctccactactttaagata

SEQ ID NO: 38194 - DNA, 243 bp, Arabidopsis thaliana columbia
caaaactataaaagtcaatgagtaaatcgaaacttattatatataaaaaaaagtagctcccctctacaattccaaaataagcaaagacatatttaaaattaaagtagatcgaaacagcctgtagccatttcgtcttaatgtactgttgtattgtattgtggatcattgttcgtatgaaattatgtgctagttaattttagttgacacatatatatataaaaaaatatatatgtgtgtatatat

SEQ ID NO: 38195 - DNA, 493 bp, Arabidopsis thaliana columbia
tgtaataacaaatattaagaatctaatctctattccaaagtattataaatgggccgaaatgaaggctttttggcccagttgagattatttccaacttctatcctcttattaatttataaacatggcctttacaaaattctattctaaacataaacatggcctttacaaaaaataaggctaccacacacaaaaaaggtccatttagcaatggtgctaaatgagaagagcttctctatttacctagcagaatcaataagtctaagagcattttattaaatacaatcctctgtataaattccattactcatccactagtataaaggttttcatttatagaaaaaaagatttttaagttttttatattattttcatcatagtttaaaataaaatttgaattgatattttattggtacgaatgcactctgtaaattaaagcacgtgagcatgtggttgatatccatactctctcttaaagtcagcaagcaacacaata

SEQ ID NO: 38196 - DNA, 529 bp, Arabidopsis thaliana columbia
ctctagtcccctattactgaagcctactcaaacctttgcttccatggcgatcaccgttccaggagatgtacctagggtttctatcagagacgatgatccatacaggaacttttccgagagtacaaacgagatcaacatgaacgccaccaatcggaagaggaatcggtttgcaaacgcgcgaaacgccggtgatagacggaagctgtaaaatccgtaccactgattcaatgtggccaatgttgacactgattgcggaaaaaaaatcaaagtcagaatcagagctaatgagagggagagaagaaagagatgattaaaaatagagaacctgagaggtttcggagaaggatcagaagagagagacgagagaaaggagagctcggaggaagcgagcttaaggagtgtgcgacggcacgaagcagtgattgcagttgataaaggaagattctcgattgttcttataaccgattcgcatctctgtttcgctatctctatctctcctatctccatgaccaacaccgtcgtctgctta

SEQ ID NO: 38197 - DNA, 466 bp, Arabidopsis thaliana columbia
caatttacgacaaaaactaacgcaaatgattcaatattagtgtgtttaggagtgcttaatttacttattttacttgacctgactgcttaaattaattggtcaatcaccatatgccacagcctcacatgagcaatcattgaataagttcgagaactctttaagtggagtggaaaatgctgtctgaaaacaactacaacataatggacgaataaaattcttattttttggaacgagatatttcacgttgaaaacaaagctcatcacatgatatacgtgtatacattttactgcagtagttagataagctacatcttatgaaaatgaaatcgtagaaaatacatattgaagccacatatatcgtcattgatcacttgactttcaatttgtcacctgagaccagtttcgcgatactagaaatataacggaataacaatgtacaatgagacactatagataaaaattgatc

SEQ ID NO: 38198 - DNA, 560 bp, Arabidopsis thaliana columbia
aaaatggttggagagataaccaagtcaccacaactttgacccattctttcttccaaactctcacatcacaatatgactcctttcacatctgattgattttattactcaaacgttaaaaataataataaaagagtctacagtgaaactacctacacatgcttttgtttatttatcactattgctcttttattcttttactgtaattgccattatgagattaaaacagaaaaaaaatgttgatatctacaactcataaaaatggtaacaacaaaaagtaaagccgagctatagttcagttaatttggtaaatccaagtgagaatctgatataacaaatatttaagacattaatcaagtaattaaatggaggacaaattgtgtgttacaatcttcaagaatatacaacttcaggaggatcttttagacaaacttataagtaataacaggtaaaactaccaagaaggggggcctatcctcaaatttacattactcgatacaaatgcaaaagtaagaacagacagaagaagactagagtattacttgatgtcgcgaacgtgccag

SEQ ID NO: 38199 - DNA, 532 bp, Arabidopsis thaliana columbia
ttttcagcaaaattttaaattttgtaaaacgaaaaagttatgtttatttgtttaatattaaaaaattgtgaccaatagatgtgtgtgtagcggcacgtgccggcctgcaacagtaaagctaaaaagcgtccggctcctaatattccccgtcaagaccgtgacttcttcttcccttaactcagatccaacggctattgttatacgctttcgttaatcaaccgtcagattttcatctaacggtcaatattaaatctaactccttttttcttgtctcttaaaataatcccaaacccgacgcaaagcttctctctctctttctcgatctctcctaagcaaagtgagcttcttcttcttcttctccttctttttagcttcgcagtgaaaactctccggtatcggaaaacaaaaacgacgtataagaacaagatattgctggagttgagagatcgctcgtcttcttctccgttttgcgatgcttggcacggtggtgcagtggtggttacatattaccgtttaagatttggccggaaaa

SEQ ID NO: 38200 - DNA, 537 bp, Arabidopsis thaliana columbia
catgccttcaagcaatgcaacaacctaagcttattcagagcataacaaaaatgagaattactcactgaaacatccttttggatctgagcttccaagccttgttccctacattagtttcattaccaaaccatgttcattatcaaatcactcaaggatagttgcaaaacagttaactgggatatataaaagatcttctcaaatctccgaaactaagtaatcaaaccaaaccatgttcattatcaaatcacttgaggattgttgcaaaaaagttaactgggatgtataaaagatcttctcaagttatgaatctccgaaactaagtaatacatcaagcaacacgtatctttaaaaccagattttttttcaagcttccttacaacacacgaaacagagcatcctcctaatataataataaaaagttacggaatcctataaagcatctttcagatcacgtgatcaacatcagcaccgttatagttaatcagaaggttcctcctagaaacgcaattactcaaaaacaccaccgacagtgatttg

SEQ ID NO: 38201 - DNA, 605 bp, Arabidopsis thaliana columbia
tgatgcccgggaatattacaaagaaactggtgacattgacgggactctaaggcaactaccgcgatacctcgttgctgaaagagccatagtaagttttaaactactcatgtattggtttctacaattgatgagtttccatgatgatcagttttaatcgggcgttttgaaacagctgcagtgtctgaagaaatgccctggtaactacctgcaggctcttaaaggcattcccagaactttgagaatgatgtaagcgctcgattctttaatatatctttagtaccttccggaacagtgttccttttgcgactggttatgacatgccaagccacagggcacaggcgcagatcaagttttttagcttactgtatatctgatccctatcatgcaggtatgtacatagttatcaaagctacttatggaacaatgcagcaagtctgcgcgtcaaaaattatggtacatcttggttgtttctttattaatgttgtgtcattctgtaatcttgtcgatggaggtttaacttcacccttttgtgttgttgctggcaggaacagccaaggtgtgttgggggcttggtaagtcaaaggtagatgctgaaaaagatgggg

SEQ ID NO: 38202 - DNA, 742 bp, Arabidopsis thaliana columbia
ctcaatcttatggcaattagatatgattttacaagggaaagaacatatgtttgaaatgattggtattctttgggcagcaccatattggttatgacatcgctggttgctctatcgttctatggtgcaagccagctcaagtttcactgggtggagcggtacgacaaactactggttggttcagtcctgtgtttggtaggtatcttaacccttctcttccatgatcatgaccatggcggtcatgaagcacatcaactccacaggaaaatcattactctttagataccgtttcgagtctctgttttgcctatctgtcatgtcctgtttgttgtagagcgtcttaaggtctattaatctttctgcttcgcgttgtatgtctataactagttgtaacgctctctgttgcacgtgaagaaacatatggaagcattaaattccttaaatagaacaactctttggaggtctagtgtaaggcttgtagcttttacataattttgtagttgttccgttgataaagttgggtttaatttttgtaatacaacatagttgtcttcgagtcataacataatttagatcttaagctcttagtggtcgacttttcctataactatggttgcaccaaacccgaagctaatctaacattatcagtttttacatatgtttgattcttcattcactccaaacaaagaattatttatgcaaacaacttaccgttgcatttacttcgaggaaataacttattcga

SEQ ID NO: 38203 - DNA, 594 bp, Arabidopsis thaliana columbia
gaatgatttcaactgctgctttaatggtcgaaggacttgacttgtagttgttttgatcatgtttatcatcaacgtttttgttgcatttggtgtctgatgggatatagatgatgtgagattcttatctgattttttctagtgtcacccattttcagctgcatttggagcagtcctacatgttatatccacttctctccttggtataacagcaatcacaatggcgaataccatcgctggtgaagagactgttcacaaacttgcttcccttttgcttgtatttctcggtggaagctatgttttgctgtttttggctggtaaaggtggtcacactcattctcataaccaacccatggagaaaatggctgttgctggacttgtccttgttcctgcattatctccttgtgcaacaactctcccggttttcctcgctgttggaaattccaagtccatgatggttctcgccatcatagttctgctcttcaggtgagactaagtctattgtttttggcacatttgttacgccttctcttgatatcgtcaatcttatggcaattagatatgattttacaagggaaagacatatgtctgaaatga

SEQ ID NO: 38204 - DNA, 542 bp, Arabidopsis thaliana columbia
  unsure (1)..(542): unsure at all n locations
atccacggcttttgcgttaaattattgctcaatgagcttatttttggcgccagttgctacactgacagataggagaccttcagaaagattggaactacttcggcttcaggatactggagaggtacttgattatcggctagtacagattgctcgacaaatctcattgtttcaccagtccctttcttttgattgttgaaactttgttgttgcagagaataaagcgcgggttgatatatctccgatcagtagaaagaggatgcagaatgcaatgaactggcagcatgatggcattgtattgccggttaaactacagagataaacttgggacctgttcataagaaggttgacaaaacatttattcatgattaaaggaatacataagatagagatccttgtaggatcgctgtcatcctttgtcggatccattgttgtagattttgtttgcgactgtattttatttaattaccatattcttcattatgcaactgtagcaagaagaaacaanaaaaacaaaacaaaaatatgtaagattcttgacaaga

SEQ ID NO: 38205 - DNA, 437 bp, Arabidopsis thaliana columbia
ctataactaaaaatgttaatcagaatcctattaaatagccgaacttttaaattatatggactcttcagattagacgtacaactttatagacaattttcactatgtggaactttggcattacgtaccaatcctataaccatgttaattttgaaggatattgctatatgtttattaatcgttgccaacttctgtgtgagaccccgaagatcctcgatgtgaaattcacgtgtacaacccactttgaatcaatagttacaataaatttaatctcaaacatttgctaattacatcttcaaataagtaaatatgtatatatgaaaagaaataagtttacacatttataagaatgaaattaactagagcaaacttaatattggtcacatctgtttgcaaaatgcgcatacattcatatatattacactatataaaatatattt

SEQ ID NO: 38206 - DNA, 571 bp, Arabidopsis thaliana columbia
agtaacggccgccagtgtagtgtgctcagatatctagattagagtaaatgggtatgaaaccagatgcaatttctgcttctcttgagtttgaatgtcgctgagaagtttagcaagatcagctcttccaacttctggatttagaaacagagattccatttcgcgcacctgtcatcaaagggctcaatctttaacaacacaaggttgaacaacactgtgaaggtgtaatcaaatactctcagataagatccatacttgtttcgaacattcactgaactccgttgtaatctcgctgcacagcttctgataaagtgcttcagcactagactccacatactctgagaatccactgataattgaattcgaaaacatagtcagctcagattaatagaggaagatctcagtaacaaaaacatggaaatctacgaatataaaaaacatctccctctctatccttcacactatttgcctcaatttcaacattcaccaacaaagtctaactctcaggcaatggatcaattggaacttaacaaaaccgcaacaaataaactaactctttgagagatttcaatga

SEQ ID NO: 38207 - DNA, 593 bp, Arabidopsis thaliana columbia
actaatcaatcacagataagtttggacagtattacgcaacatcaacaacctagattcgattcagtcagatcctaaaactacccaaatcacaaacacagcaacaaccgtgtactcactttgttcactcaccaatgaaacccacgagacaagttcttcttaacttttctaatcttccacttttgacaagtaaactggctaaccataataagagaccaacgcttctcttatatcttgtcttggaaaatggaggatgcttcactttatccaacaggtccaagtgtagctcctcatcattatctagacactaggaccatgtcctatgcctgacgacttcgtctcctttgtctaaagtgatacgtcttttcttcactccaaccaacacgccacattggcaaaagcaactgctgctttcccgcttcctctgttctgctctgtattgtttcggacatgcctgttgaacttcagacactttgtttcttcaatttccccctttttatctgactgtgacaccacaagtaacctgcaaaagattagagacaaccacatacaagctaagcaatattccataccaacatagaattcaaaaaccggat

SEQ ID NO: 38208 - DNA, 796 bp, Arabidopsis thaliana columbia
atttgccgtgggtcccaccatctatgtaggaataccctgtcttgtttataagagctttgataaatgtaaaatattcgaaaacaatgtccgaacatataattttcgccccgtaatattgtgaagatcacgaaaaggtccgaaaaaagtacattaaggtcaaaattaggagtagaaaaaaataatagaagaattccattttccttcctcattcattggagagctctctttgggctttccaaaaaggtatcacataccaagtttggcctcatggtctaaaagttctagagtcatacatttttaacaaaaaaaaaaaaaactgaaaaaaagagggatgcaacacgaggactttccgggaggtcacccatcctattactactctcgcctaagcacgcttaactacggagttcttatgggatctggtgcattagtgctggtatgaacatctgttactacatgcaatgcaatcgtatctattcttttttgaagactttatgatccatttgccgtgggtcccaccatcgatgttggaataccctatcctgtttataagagctttgatacatcacaatattcgaaaacaatgtctaaacatataattttcgcatgtaatatagcaaagatcacaaaaaggcccaaaaagtacattaaggtcaaaatttggagtagaaaagaaaccaatagaagaattccattttccttcctcattcatcggagacctctctttgggatttctgaaaaggtatctcataccatgtttggcttcacggtctaaaatttctagagtcatacactttta

SEQ ID NO: 38209 - DNA, 933 bp, Arabidopsis thaliana columbia
tactaatagtattgctttcttcctctctaagtttaatcgtatcgcgagttcttacatatttagttgatattgtctttcttcttcaagcttctaacaccgagctgaaagatgatcatcaaatgtctggaagcaactttaaaggtcaaaaacttgttttttttttcttttcatgcatattactcatgcagaatgcaagattctccatcattcttccttgaaatgagtcgtattatttcttcttttacagcgcaaaagtcattcttctcgctctccacattccgcggcaaaggaaatgattcgaagccaagatagagagcaaacaaagaaagaagaaacttggatgtggatcaagttgcgtgagtaaagagagaaaagagacagattctatcgcagactcaggcagacttcaaagacggtattttttcccgatgaactggctggtaacttcttcgatggtgtgtgtacattttgtttagtgaacaagaattgattaatccgattttctgtaactacattgtgattttggcaattttgaaaaatcctatttgtttttggccttcctttacaaatatattgatgcacattcacaaatattcaagagcatctggctgggcaacgaaatctttctttatttcccccacaaatcatatagctgaaattgtagtgtgcatatcaaattttagttcccatgtttacaaggtagcagtggcaaatcacaacaattgaacaaaacagatatattaattattaagcttaaaataaatctccaaatagccttgaagcagacagtggttatatcaacaacctaatgatagtggcacttaatttcactagcagacacaacagattctttactttttctctacaggctttggtcatgaatctaaatttaattcaaaagcttaatgtcaagcaaaacttaagacggtaact

SEQ ID NO: 38210 - DNA, 611 bp, Arabidopsis thaliana columbia
tccaaattagtttagataaatatgatatttaattttaaaattgctatgatataaaaaaaatatataaatttggattaaatagtcaacaattatgatgaattaattttcgagataaaagtaaataattaaatattggataggttatcagaataaacacaagtaagccaaagtttttttccattaaagtcaaggttttgtaacttgcacgcttcagcgaagaaacggtggcgtctcggcccttccacacattgacacataatatctacttggtcttttgctcgtctcattatctgaatttttttcttgcagcatcgacacatgagatttcaagctaaaccatcttacatatctttttgtttttgttttaattaaataaaataccaaattgattcgacattccaatatgtaaaccaacatacctgaatacccaaaactcttttgactcaaaatcgaagttttctttcatttttctcaacaagcagaacttatttaaatctcatacgtttataagatataaactgccttgattaataatatagatctactatatcttgttagcttgtgaaagaaatatttggatgccaaagattaaggtcttgaatggttgttga

SEQ ID NO: 38211 - DNA, 546 bp, Arabidopsis thaliana columbia
agctctctcattctataaaatgtaaaccaaattaatgtactattagctctatgaccaaaagatgaattcttttttcaagattgcatttttatgatacaagagagttaaacaaagttaattactttctgattctaatggcttcctctaacccagaaactttcttggcagaaacatggaactgtctcggagaatatgagttcttcttacctacagatatgagagaagataaacttcatacaccaaagttcttcaattatacaacattcaaaatcggaacaacggagaaagtttcaaaatttccaatcagatgaccaataatttcgatatcttccaatgaaaaacgaagcaataattgaataacgaacagagcaaacgaagaaacagtgacaagtaaaaatgacaaaccggagagtgataaagaagaggaagtgaccggagctccgagaaagcatctcgacggagctaagtactcgccgtgaaaggaagagcagagttgcaaagaagacgatgacgagaaactggatagaaaaaccgaagacgccattt

SEQ ID NO: 38212 - DNA, 503 bp, Arabidopsis thaliana columbia
cacattctggatattcttagatcaaataatatcacatctttttgtaaaaagtgtttccaacaaaaaaaaaaattcacatttttgtataggtgaaagttaatattttttttgttcactaaataactacactggacctattcctttgggcctactttttttttttttttggcctattcttatcaacaataaaaataaaaataaaaaaaccgaaaccactccaagagtcacaccggataaaaaaataaattgtcacagttactcttattttcagcatccgatacaatcaacactacttatcgtcgccttattctcaatatatcgtcggtgttgttgtttgtcatcacagggtgtataattttcgtatcaatgtcactggagactgggaaaataacagaccatatatctaataaaaccaatcaaaagcccatagataacagaaaaatacatacttatcaaccgacattggaaaatcccgcttaaaaagtgtcaacatcattagttgt

SEQ ID NO: 38213 - DNA, 287 bp, Arabidopsis thaliana columbia
acttagacacaataaccacatgcagtactatatataaaaaaaaaaaaaaaaaacaaacaagtatagacaatcaaacaccacataacgtaataactatgcataacatcgcaaggatttactcgcaacctcatagcatatctcatatcagtataaccacctaacacggtaagtaggccctcgaatcatatctcactcatcaagtagacttagttcagtccatgatcaattcacctcgtccagccacgatcagtctccttccttaaagcttgtcttgtccaactcgacga

SEQ ID NO: 38214 - DNA, 522 bp, Arabidopsis thaliana columbia
aggtcgactcaatggagacatcactttttgttggcgatctagtatttgattccagttccaaacctgaccaatatactcaatcatctcccacacataattccaaagttgggttatctccaatggaagtatttcttatcatctacaactgtctatcgatgcactctatctatcatttgtaaatatgtcttagtaaagtataataatttcacatcatcattattatatctttcagtataaaatctctctctatcaagatatggatccacacgatgttgtggataatcaggtagacataaaactaaataactagaacatgtatatttattattactgaaaagcagtcaatttttactacaacattcttagttctattattaattatttacagaaaacataagattgctatcgaagtcttgttagtcatgttgtgaagccaatctctaaagatctaacataacgcaagttagttatgtttgcagacaaatccatcttctcgttcgtttaattgttatttgatcggac

SEQ ID NO: 38215 - DNA, 540 bp, Arabidopsis thaliana columbia
cctttttatatattctaacataaagaggatatgatatgaagagaaaatcggaaaaagtgttatagcgatgatgacgggtgatggagggtttgcggatgtgattttagatctcatagagaatggatttaaagtggtcgtagtgcacccgactggagactcaaccagccaactattcacattatcacctgactatcatagattgattgattcaaaaagtatgctaaagacatatgaacaagcccgtgactcatatgaataatacttcattggttccttggattccgagtcctaagaaatcaatgtgtatgtatctatatctttaaccttttaggaaatatataatgtttgtaatgtatttccaaattacgatttagaattagtgtctattgtgattaatttaacaagttttccgtatattggtcgatgaatctctgaattatgaaatagctctccttatattattgaagagcagtatttgtcaaaaatgtgagattaaggaagtggctaattagtactattaactagagattgatccgcggt

SEQ ID NO: 38216 - DNA, 841 bp, Arabidopsis thaliana columbia
gaaatatgcatttgagatggtcttacattggagatggtctaactttcacttttgttgcatgtgtaagtaacgaacatgttaccttggatttcaatattcatatattttatttaaataaatacaaaaacttttgaatcttaaattatgtgaaaatctaaaacatcaaacttgatcgaacacatagagtataactatggttttgtaacataagttcacatgtcgatactaaaaacataacttgcctgtcgagacatttttcttttttggacaaaacatatttcaatcattcaagtcatagcaaatacaaagattaagtaaacatcaaccttatggttggatacaacaaagatagtgacgttgatataaagggctagtgacgttgatataaattctttgaccttgggtgatatcgactctatgcacgtaacgtctaaaaagaagattaggaaccaacacggtttctacgaaaagaggtcgagttctaataatagttctctctattgaagagtatggttgcaaaggtttattatagggataaaagggttcagtggcgagctctaaaacactaaacttatattccatcaagattaaaggatggtatttgtcaatcctaactattggttttgatccgatgtgagggtggcgtcttctaccattctcaataggggaaaaagacatcaatatattagggcttaacaaaaatataattgggacatacctgggtccagtagttacaaagatgataaacgtacaaatacttttaggccgtaggagatagtttagtgggccaaaacaaggaaggcctatcacaaagaagaggcccatcttgacaattagtgtt

SEQ ID NO: 38217 - DNA, 509 bp, Arabidopsis thaliana columbia
atttctggttctgcagctccagagcaagaaattgaagccgaagctgggccctcagagtccacaaaggcaaaaaccttggaaagtgaggcagaaaaaataacaaagccaacttttgctgaaggaactggtgttgttacccccgaagcatcccccaaaattcatgattatatttttcgtcatgcttcggggaaaaaattatcagaaaaagaagaacaagaggcccaacactatgcccaaaagttgaaatatccaaagggggcgttgatatttaatggcagtggagaagaagatttcttgtattgcctccccgacagcaaggaaatttctgtctgtcgggagataagcagaagcttcggattcccaactttagaagacggactttcggtgctgtcaaagaacgatctggctgacagcctagcttacaacagtttaaaggtgcgacaaatggaattcttatatgtttgttgagtcaagatttttcgtgtgtttaaactattacacagacatat

SEQ ID NO: 38218 - DNA, 855 bp, Arabidopsis thaliana columbia
aaacaaggatgcctatcacaaagaagtgcccatcttgacaattagtgtttgccttatggttggcgctattaagacggactaagcggctgctcacgatcccgacttgtcattgcttgaggcgtatgatcggagatggaggcgtcacaagatacgagagaagagatcttgactggacgatcttaagagcggatctcaataaaccgatatattgggagagaagactcactattttttctagtcgagtgagattggaaagccatgatttttcagtcaagaagaaagaatcgctgtgcgccgttgacgactccaccgaacatggcgcatatgacggtccaagaggaagttctcctcctcccggtgtgattgttcttctagaaaaatcaaatcagatctaggattagaggtgtaaagcttagtgatggccgtagatttttctttaaggttttcatcgccggagtaaggtggttttggtggatcaattgcgagcagaggttgaggttgacgtgcgaggggaaaggtctattaaggttaagacaaagtttgccaggagaggaatgaagctgagagtatagagaacatgagtagtaactagagcaagtagatcagagaagcaaagtcccgacacatgcgatttgcacctccaccggcgtcagaatccatgttaaaagagggtttctcgataactaagtctcagagcgttttgctttttcctgacgagacttaaactggtcttcgatatacttttctcaaccttagatattaaagtttttactcacaccaataatgatcttattttcatttttatcattgaaaatttttaagtttttcatgtttatatatgtcttttctgaaaat

SEQ ID NO: 38219 - DNA, 621 bp, Arabidopsis thaliana columbia
ttcacttcaggcggtattgagagtcttcttcatcaacatctaaaacatcaaggtagtcttcttcatcatctaaaacatcaagaatacatagtctaagaaaacactatgaatcgggcttgaaaacattgagaaaaagagagtatttccaatttattaatgttcattggtatttttgctacgtaatctaatgaaattcaataattctgtgtttctgttttttgtggaacctcatatagtcatatatcaagacaatataaacaaacaaattatgcaaaagaagataatcacctcatatgaaatgatgataacataacttcgaaagtatatgtttgttttacatagctacagatttatatatataacttgactccttcgtatccgccgtagtaactaatctactcgagtcaccgaatcctccctcctcctagggtcagaccaattattgccggctcggctccaaaaacacttcgctcagtaagatctttcccatcatttgatcctacccaccaaagctgaccttccgcctgctgagaagacggtcagaccatagtcccgaaccagaggacgattgtttgatgtcgcctgaagactacacaaagtggtcttccctgctgagatgac

SEQ ID NO: 38220 - DNA, 595 bp, Arabidopsis thaliana columbia
ttttggatagttgtaacttgttgaaaacgcatgtagatgatactgtagacattgaggagattctgactgatatctgcaacaagaagtcaaaaaagaaaacacggaaaaggttgtgcttggtacatagtctaaagagttaggggaaggacctttggataatattccatgccaaatacttatatgcatttctttcgtgtttgaaggagccggtagaaccagcctgctgcgatggacaagtaacagtgagagagggttgcaaaaccatgagacaacagtttttccatacaaaggctgttggaaaatcaatgtacgttactttccttgcatctggttccgactattcattttcatccactccaaaattattgtctgttttaagcatgttttttttttttttttcggagagggttttaacatctttgcttgttagcgaacatctcttcttctttttgctattcatgagtatgttctcatacactcaaaaatatctaacgagtgtaatattatgtattagcgagtgtttacaattgactgcatgcattttagaattatatcttgattgagtgaacaaactcaaaaggtctaaaagaattag

SEQ ID NO: 38221 - DNA, 484 bp, Arabidopsis thaliana columbia
cagcaaaagaaacaaatttgaagttgtcccgttagttttaagcatgaattctattatggttcgttcgttaatgaagttgtcccactatttactctttcgtagtaaaggaaacaaatttgaactcgggttaacggagccggtccggatgataattcaggttccaccaaaaacttgttaaaactaataacaagcccatccactatccatagcagtataatcgtaagcgtcaaacacaaaagaaatacttcagtttaactcatcgttatcagttataaccggaacaaaccgataggggaccattggatcaaaccgtctcgaaccggtaaccctaaaatagtctggttcttgaaatttcggtgatcctgcaacgtttcttcgcatcgattttgaccgggagctccttgattcaaacaagacttttcttatcggggaagatcagacgggacagaagagatctctgtgtgtacaaaagtaatccttgatt

SEQ ID NO: 38222 - DNA, 550 bp, Arabidopsis thaliana columbia
gttgcccactaagacttatatccgtgattcgaaatagcttctacaagatttcggcttcaatcgagcttgttcctcaaccaaacaatgcaatctcgtcaaaatttaatctataatgattagtctcagaaacacactaaaaatgatgaacttatcccaccgttaaaattttagttagtagtaccataaattctcacaaagtttcatcccgattagaagaagccatctcagaactgatttctagagttccaagttggagcagtttttgacaaacacgttggtttcttgcgcaggaagaaatcatcaccacggctagaacttaaactcttatgacatcaaagatggatcatgtgacttcaataacataagctatatatgtatccaccaatgaactagtttcttttagatagatatggacggaaactcacccttaaaaccccaacttgcaactgtttatctttctcattttccctttttctatcctttcttctcctcctcttttgatctaggtacaatagactcgccattgcctcaccatcaccgtgaactggtc

SEQ ID NO: 38223 - DNA, 540 bp, Arabidopsis thaliana columbia
cacaaaataagctagcgccgaattgaatagcagataccaaacgattctaaaatcgtctctggcaagtgcaattgtaatgccaacaacatttttttccatgataagtgtagcaggaaggaggaacacaacagctatgggagccatgtaaaggaggaggttcatggaatttagcctctcccttccaaccaaatcccaataaatattttcagcagcactctaaaatcacagacttttgaaggataaaactttggctgataagaatcttacccttctgaagaaagcaaaattccttgaagaactgatttaagtgctcttgcagctgtagctgcaatgcacataatgaatccaaacaggtggaaacttggctcactctgacgatatgcgaaaatttgaagaaaatcaaatatagaaccaaagtcaatgtagaaaaaaaggatgctctaaatgtaaaaaagatccaacaggattcacactatgcacgcataaaagaacaacttctagtctaatttgagcagcatataaactacatatcatgaagtg

SEQ ID NO: 38224 - DNA, 1134 bp, Arabidopsis thaliana columbia
aatattcttggttaatcaatttgtacagaagctgagttgtttcctagtgagagctcttaaacagggagagctcgatcaaggaaccaacgaagcaaagtcttaaactctttgggaagacagttttggtatctgattcaggcatgtcctcttctctaacaacttcaacatattgtaaatccccaattcagccattaccacggaaactctcatcatccaagacactacccataataagaaactcacaagaagaactcttgagctgctggatacaagtccctcttaagcaagaagatgtggaaaatagatgtttggattcaggaaaggctgtccaaaacgaaggatcatcgactggatcaaacactggttcggtggatgatacgggacacacggaaaagaccacagaacccgaaacaatgctatgtcaatgggagtttaaaccaagtgagaggtctgcattttctgagctcagaagaacaaactccgagtcaaattcaagaggatttggtccatacaagaagagaaagatggtaacagaagaagaagagcatgagattcatctccacttataacacattttcttacgtaccctaaagaagagactttaaatttactattcattcgactttctaagttttcatcaatgtaatttttgttgttgtttcattgttttctcttgaggtgtttgttctctaggctaaaattttctgcaaaagtttgtaactgtaaaactcgtgtacaatttatacagttaaatctaatgattatgagatctttcttaattgatggttcaacaaaagcaagtttcaggtgtctctcttcaatatctccgattaaattaggtttggtaaagagtttgctttgaaatgaaggcaaagaagaaaaacagtgagttaccaccaactgaacaagtgtgtgttcaaagttcaaacccaacaaataaccgaaccgattcggaaaccaactctaacctgaaattttgatagaatttgaccagaccaaattagaccggttaacaccctttcacgttagccaccaacagattaagcagtgtctaacgtacgccttattaataccacataaagacgcaagagaagatgacgtcatacagaaacagcgtcgttttgaaagctggga

SEQ ID NO: 38225 - DNA, 659 bp, Arabidopsis thaliana columbia
acaacctatcttaccacgcctagtatgacccaaccgtcgagccaacgacgttaaacaagcgcgctaagtgggggcaaccctttaggtagctacttttcccttgggattcttactttgcttttagttttaacctttctagtatttgtttcagattttataaaataaacaaaaatagaaaaatagaaaacagaaaaacccaaaaagaagagaaggaagaagggtcacttggaccagtcactaggcaccgtgacaacaggcccatctactcgcccgagtaaccggtgccgccaggaaaagccggcccagccatgccaagtcttagccagagcacgctgatttgcgccatcacttggccagagtttgccaatgcgccccgaccacccgccggacctcgccggagtgtgccacgcctttgccagacttgccccacctggcagcccgggcaacaacttgcccaccggtccggccgaatgcaaactcatccgggcaagacttggccaactcgggcaaacacgtgaatggacaaggggagtttcaccaccacgaccgatcggtccgccaatggattcgtttaacacatgaccattctgcccatcgcaacgctcggcgaccccatccaacacccggacgttacttgcccacccactccaccctttcgg

SEQ ID NO: 38226 - DNA, 869 bp, Arabidopsis thaliana columbia
tgcggtacggtttaaatattaacgaaaatacataaatacatatgtataaatagagattttaatactgttatagcactgttgcggtacggttttgggtgcggttttgatcaccatttacagttttttttattcagattagatttctgtaggtaattttgattaaaatcttttggtgataacgcagtcttttcgtctggactggacccacgcgaggacccaaaatttgaccaatatgcgatccaataaacaaaaaaatggtaatttaaaatgaaataatccacatgtatgatgtcaaatgtattattttacattcacaattaaatacaggtcagcgaagtaattgttttgacaataaaaatggtaagaattacttggaacgtcatctaacatcattttaattaatactaacatcatcattttaagtaaacaatttttttagaataatagacagaaattaaggtggagttcatctttttgataattagcattaatccctactctaccatgtttataattgaaatcattatttcatattttgataattagaattaatccctactctaccatgtgtataattaaaatcacaatttcatgaaaaagatcaactaacttaaccaaaactatagtcaatgtcttttactgaaaaattcaagaataaaacaatcttagttacgtcactatcaatctccattagaaagaatggtttaaaatcattagtttttaacaaactctaatcatgattattaaaaaaaccaaagaagcaaggaagacttttattcaaaagattaaattttcttccatttaaaaaagggataaaaagagatgtcaaaataattactacaaaagacattagaatttgttggatatgt

SEQ ID NO: 38227 - DNA, 596 bp, Arabidopsis thaliana columbia
tttggtttctttacaaaacacggttaatcgaatctcctgttattattgacatagtatatagaatggatacggatcagtagaaatgtttctgaatggatatatttaaatggacttgttattatggataccaaaaaattgtttgatgattttctttcagcttgcagagacctccaccttcaagaccttatggacatggaactctggtttctttacaacccacggttaatcgaatctcctgttattacggacgtggtatatagattggatatagatcagtaaaaaagtgtctgaatggatatatttaaatagacttgttattatagacaccaaaaaattgtttgttatttttttttacagtttgtagagacttccacctccgagaccttatggacatagaaattatacaaattcctgagataattgagatcaaattgtttaagaaacttctctaatttatttgcagaatcggtacaccgatttttcgtgagccgcgccataatcgataagagaaatcaagcttagaagttagggagacgtagagagagaaaggcactacaaatcatggaaggagagagagagagagagagagagagaga

SEQ ID NO: 38228 - DNA, 951 bp, Arabidopsis thaliana columbia
ttatttataattagggaatgtgacccgtttacgtacttttagagaatattattctgtttgaggcactttctagggaattgacactttttatactaaccctcaattcaattaaacgtaattagaaataaaggaaatctctctagccctctctctctctctctttctctctctctccccccttccatgagtcctcttatcgattatggcggcggctcaccagatatcggtagtaccaattctgcaaacaaatggaagaagcttcttcaaaaattcgatctcgattatctcagaaatttggtaaaagttctatatccataaggtcttggaggtagcggtctctgcatgtattatgcaaaacaacaaataattttttggtatccataataacgagtccttttaaatatatccattcgaaaacctttctactgattcatattcattctatataccatgtccataataacaagagattcgattaaccgtggtttgtaaagaaaccaaagttccatgtccataaggtcttggaggtggaggtctcttcaaactgaaagaaaaatcaacaaacaatgttttggtgtccataataacgaatccatttaaatatatccattcaaaaacctttctacttatctatattcattctatataccatgtcaataataacaggagattcgattaaccgtgttttgtaaagaaaccaaagttccatgtccataaggttttgaaggtagaggtctctgcaaaccgaaagaaaaatcaacaaacaatggtttggtgtccataataacgagtccatttaaatatatccattcggaaacctttttactgttctatatccattttgtatatcatgtccataataacaggaaattcgattaaccggaatctcgatgctacatagatgaaacgagtttgacacatgagagagagcaaaaatcaaatcaagccgcc

SEQ ID NO: 38229 - DNA, 518 bp, Arabidopsis thaliana columbia
cattagcgtccacaacaacgcccacccactttcacaccaacttgaacacactactcctcctccttcactttttccttcaatctctcttctcgctgacgacttggaaataaagtgagggaaaatattcctccaacttcactttcctgagaatctgcaaataaagcaattcaacttccttttctttctttctaaatgaaatttcgttctttgtctcagtctctctctctttcttcggtcgagtccgatcaaaattgaaaacccattgagttcctcgccaaaaggtatagtcttcgttatttcttctgtaattggataatggggtttgatcgattctgattagtacaatcccaaagtgttgttctttgttttctggtaaattttctctgctttttttgtgttctgttttaaaacaattattctgagttaagcaaagcaacttgtggttttgttgtgtaatgatatcaagtgggttattttttttattataagtttctctgttttattgcgtttgttaggga

SEQ ID NO: 38230 - DNA, 482 bp, Arabidopsis thaliana columbia
taacttttgctcaaaattcttttatcttcaaaaacccggttatactctaaacaccggtacccagctcgtacctaaacgctggtcgggaaatgaatcatatcgggtcacaaccgagaagtttcgatcacaagtcttgttcacatacattggctcaaatcaatgaaacggttcgaatttaaagaaagaatccaacaaagaacttcaaattttgagagcgatgaggcggataagcctctacttggggcctgcacgggttatctgctcccatcctccagatactttgctggagtcgaggaaatatgcggagacggcgtctcacgtcctgaggttatgtatattttgtttgttatccttttgcctaaattgtatgtccgtgtgtcggaatgaattcggactagctttattgttgtttgcttttcaggtcgtcgcctcgatgaatcagatggtgcagcctatgactcagccatgcgataaaattttgc

SEQ ID NO: 38231 - DNA, 563 bp, Arabidopsis thaliana columbia
tccccctgaatatcatgattcatattaaaaaaaaaaaaacatgattttacctttttgcagtattatcaatgagcatatataagaaaaaaaaaggttttattataagacgactaaaacattatttgtgtttcacaaatctctcatttatctatctctctcaaaggtttttcaacctctctcccctgatataagcaacaaacaaagtctcaaacaaaacaacacaagaaaataaaacacaagaaccacaactaattgaacatgtgctttaaccacaatcaagaatctcattagttcaattaagtgaactaagaaactcaacccaaatatgttctgctctctttgtcgtctccaccgcaaattcctcagccgcttgctcgtcctttgccttatgcaccgcctcgtgatactcttcgtaagcctgtgacgcctccttgagaagctctgacagactcgtcgttaaagaggtgaactttgaatcaacgtccactttctctgcttctagctttgccacagtttcttgatcgctacgattctgatgtgcacgcgtctcctctttgagcagt

SEQ ID NO: 38232 - DNA, 695 bp, Arabidopsis thaliana columbia
aagagtcgagacatagtacgacacaatggtcacaatggtgtggtgaaggaggacgaaaaattcagagctagcacagagattcaacttttctcagagggacagctggataaggttccagattgttctgctcgttttataaaaggactcgtttttgtagtatcaaaaacatgtaaaaaaaataaagcttgagagactttctttcattcacagagagctagagttgcaaaatgaagtttaaattaaccatatggcttaactgctacactgatggtgagtacaccattgtctccaccattctcaaagaacttgcttttagggttcttgccattctcctgctgtatttcaatcttggtgtataagattacatcactgctcaccaccacgagcctgctcgacgtgctgctggttgggcaggtatgatattcacttctttctctgcccttgatgctgctttgagggccaaacacaagaagctcaggttatttgatgaaatctctatagtctccatctatgtggctctatgggctatgcttttctcaatgtttcagcagataagcatcttgttcatgtgcatttgcggggtctctgcttttatgggattattcaattatatccaccggctctctgttggggtcttgaatgagccgcccaagcccaacgaagctatgacatccttgctcaatgcaatgaagaat

SEQ ID NO: 38233 - DNA, 792 bp, Arabidopsis thaliana columbia
caaactccaagcgacctggaaagaaacaagatacaatctacgcgacaacggaaagcttcgagttttatagagacctatctcatctctataggtgaattctttcgatgaatatcgctgattttctactgataagcctctaggtcagagattcagttgtcaaaacggttgacttggaagagagtttcccggcgagttaaagagagataggagtcaatctacgtgtcgatttgaagccctgagctttatctttccaacgaatctaacctagatccaatcgaagcaatcttccaagcgatattggcgtttctgtcaagcgcagattcgtctctatccgaccagccgaactcaagctcaatttcccagtgatctagagagactcagaagacgatctacagatcaatttaaagccctgaggctcctcttttaaacaagcccgagctcacttcgttagggtctgttttctcggagatactgccgtttatctgcagaaagtgacaaaatacagatcgatctgtatccgatctgttgacctcggaatcaacttcccggcgatctaaaaggcatcacgaggcgacctaagtatcaactgaaagccccgaggcttatctttcaatagagaccgacctcatccaattccgagctgtttactaagcgttatcactgtttcactaaaacatatgacacctgtcaaatcgcagattcgaactgtgggagcaactggattagaaagcaaactcccaacgattcagaaaacatcaagagcccatcttagtatcatcatgaagctctgag

SEQ ID NO: 38234 - DNA, 190 bp, Arabidopsis thaliana columbia
  unsure (1)..(190): unsure at all n locations
taatgaacttactaatgactgcacgtataagagaccagtgactaatggtaaccacttgttgtatctgagggaacactaagttgaagactaagaacgacagacanttgaaccagtatggtatagagaacgggaatagaacagaagtgcggattaaagatggtatcangnacgccctttgatggaaatgttg

SEQ ID NO: 38235 - DNA, 954 bp, Arabidopsis thaliana columbia
tggagatgaatgattgcattggatcaatgaaacaaaaccatctcttttagaaaaataacatcaacaattgtttctcaacgatttgccgaaatcttgatgtagccatatcattacggattgtctcatattgtttagacagatctcaagcgtatataggtttaggaaaaggatgtgattaggaacaagtagggtcttaattaatcaaacgattaatatgtttaaatataagcaaaatgtctcttacaccacattgctcattggttgggtcgacaaggaccggttaaggaattgtacttgttttgcgtctttttcagtctcacatgcttccttcctttcttgttccttcattgttcctcatttcataaacacttatgtcttcttcttctttttttttttcttttttcgttatgaaaaacacttatgtcttcttgtgtgtctattctatatatctttgtcacacttcggccaatgtttttcgtttgacatctccttatcatatccagtttcgaataattcccccgtaaatattgtttctagtttggaccatacttttacctaaacataataatacaagacagttaaaaaaacaaacaagatatatagtacaaaacagaaacttacataaacatgacttcttgtttgattgttatgaaagcaaaaatatttttgtgtccttgtttaaaatactatgcctataacaataatatactccaaaattgagtgatactatttgggagtagatatcatttacacatcatacaaacattacactaatttctatttgtatgtttaagagaaatataatctataaagtaaaagcgacaaaaactgtaagataatgttcgctaaagtgaggttgaatagataaaatatttacaaaaaacagggttacaaaatgatataaaatggaaatgaacattaaaaatggaaccacctatttgagtattgggatat

SEQ ID NO: 38236 - DNA, 547 bp, Arabidopsis thaliana columbia
aaccgaagactcgatcgtgcgagttgttgtgctgcgaggttaaacaaagagcaatatgtgtgtgcttttgcattaataacacaacaaaacagagtgtctcaatgtttacaacaacgacaattttctaaattacaatcaatcacaaatattaataacaagagacacattgccaaaaataaaacacataaagctcttccttgttcccgaaatcaatctttatcgatcgccgatctcacaaactgatcacactgtgtaactccttcagacaaaacatcagccaaaacgccgacaatatcaaatgcttcttgtagatcagttgcagagttgatttcgtcgagccacgagatcaaatcctgggagaaacaatcaattccttcacattcagcagcttctctttcattacaatctcccatggctcaagctctactccacttgatgtaccttctttcttgattggttcgatgtggactgtttcttgggtttgacaactggtgaagctgttcgatcatacaggtgtagaccagcattggtttgacgatagagagaa

SEQ ID NO: 38237 - DNA, 535 bp, Arabidopsis thaliana columbia
cattcggagaccgagaattctagaactgaagatttgttggatgaaggatcggttcttgattctaatggaagtgttactgattgtcaagaggacagagaaagagagatgagctcggtgaagaagagatgtttgagttcacataacttaacaagtgaagttgagacagagaggattgggtatagttttgggacttgcagctaaggcgaaatgcccttggagacaaccgaagatccgaggttcaagacaggtgaatgatttgaactgagtcaaattgagtctgagtttatgtgtattggtttcttgtttgagaagtttgttctggtaactctgagaacaagactctttgcttggttattatagtcactaggtttattagaagtaagtaaagtaatctcataatttagcaaacttgacgacttattttgtcagtactttggtacttttctttcatcttaatttttgttaacactgacactcaatgaaggggtgatcaatttggataccaaaacaaactaacggacaaaatcggatttga

SEQ ID NO: 38238 - DNA, 101 bp, Arabidopsis thaliana columbia
ccccacatcgctgatttcctgcgcggccacctggctgcgttcggccagcttgcgcacttcggccgccaccacggaaagcccttgccatgcccaccggcacg

SEQ ID NO: 38239 - DNA, 546 bp, Arabidopsis thaliana columbia
tacccgattaatttttaaaacgttgttaagtacttattttttttaccaattttaagaatttgaatagtactgagttttaggtttttttacaacgagcaagatagtttttgtgtccttatttactttgtttgaattatgccagtttgatcacaatccctaatcgatttatcttggcaacactaatattgttgaatcgatagacctattttagatgggcattatatcattaccgaagaaagttttcggtaaagtgttttgtaaacatatcaaacacacataatagtataatacttgtataaaattctactaacaaaagacagtttagttgttaggaatttcattgcatatatacttatgacatacgaaagtaggatacatttacaattgtgtttagagattgacaaaaaaaaaatcctaaaataacttatgcttgaataacacgctccaataagaaattgttacacgaattgagcacacacgggtagtataaaaaggaggaagaagcaaagaaaaaacagtaaagagaaaatggagatatggttactt

SEQ ID NO: 38240 - DNA, 536 bp, Arabidopsis thaliana columbia
ggtggatcaacactttagatttgtcttttttttttgttgacaattacatgttgctcacttgttcctttcccttaaatttctcatctgttagttctcacttcaatatcctattattattattattattattagtattatccattcatgcatcatcgtcatcatctttcgatttcacaaacgttttttcttttggtttttaggtaaaaagtctctttatctgcaaatttacactttcttctgcatgagtttttttcaacctagataataacagtttcattgaaaaaataacatcttcaccgacttaacaacgactcgtcagcaaaaactaatccatttatatgtcatctcttaagaaatttctcgtcaattccattttttacttttcagaatttgatctcacatcatcatgctggttttgctctctctttcttcatctccaggtactttattttaatttccatttctgtgatatttttttatatactatatatcattttagacgcgttaataaaaaatacgcgtaattaaaaggaaac

SEQ ID NO: 38241 - DNA, 466 bp, Arabidopsis thaliana columbia
tcgctgagagcaaaacaatcaaaaactaaaacatcttggattttgttattgttcttcatcttttgttgttctctcatttttctagctattgaacttgtgatttcctctgcatttcattctctgctttactgtacatagaaatgatgttctttcactcagactgttgaaaaacaaatatccaattgtaggtgtacagagatgatcaaatttcagtttccattgttttagttttcaagtatgaaattatctgtcaatcgagtccaaataatgacgaaatatatacaatgattcaatctttcatgtttttgtacagagatgatcaaattatgtgtgtccattatctttgtttttaaatatgaaaattatattttcagatgaatcccaaataatgatgggaattttacaaaaatggagataatgatgagtctttgtcggaatgatttttgtatgggacgattcatgcgct

SEQ ID NO: 38242 - DNA, 477 bp, Arabidopsis thaliana columbia
ggttgattgatcttgaagttttatctgactttttccgccaatctttctctttcggtcgggtttcgggacagcgcgctgctttggcatcgtttaatgggaaaaggggttcttgcggtgcagacagatggaccgccacagctacgggtttacgcacattgttcaaaaggaagagtgagttgctcatatcatcttttatatcgcagtttccaaacgtctttttcggttagagtttgctttaaatgctttggttttttcttggttttaggccggtgtgacattgctactgataaatctaagcaatcaatcggattttacggttagtgtcagcaatggcataaacgtggttttgaatgcggaatcaaggaagaagaagtcattgttggatactttaaaaagaccattttcttggattggaagcaaacttctgatggatatttgaatagagaagagtatcatctgacaccagaaaacggtgtg

SEQ ID NO: 38243 - DNA, 890 bp, Arabidopsis thaliana columbia
actacttaccttggatttatgaatcaatctgataataagaggaactgatcaggatcagaggcaatttatctttgtttctcatacattttgatcaaagaagtaatgcgacttggtttaaaaatttgagttgtagttgtaattgaataattgccaaagctatcacacagtttttatcttcccatgaactccttgtgaatgcttatatttagtttactaatgagtttaggttcttgatcatgcacattgcacagagatggtggtaagactctgttcgtttttttttgttcctctgtttcgtaatttgaaggtttggtttctgtttcttcctccttcttggctaaattgtgttattgcccttctcttagagattatcactaggtaatgtctgtatttccactggtgtgtctttttgttttataacattcactttttgagcaataataaacaatggatgagaaactgtgaggagattctgaccaaaattttctgtcgaaataaagagactgtgaggaaattacttttaatacgtgtatttgactttgtaggacgataatatttctgtatttgcttataattctaatttttacaggtatatatctgtttgatgtcttccagaagtggtatccgtatcaaaccggagatgttttagctgtaagaatattaagaagtgaaactctggtctgaatcagtcgccggaaaatacactccaactcgatctcaagctcctcaacagtgatctctgcagcctccaaccttgtacttgcgctccgcatcgctacttcgtcccacgcatcatcaaagcagcaaaactgcatcgtaaagatagaagaaaatgaccctatgctcggttttctctcgagccaaggaacacatacgagtgagaacagaga

SEQ ID NO: 38244 - DNA, 604 bp, Arabidopsis thaliana columbia
aatattttctttattttggaataaaatatgggattttagattttattcaatcatttttagaaattttttcagttcataaactcatttgatgttttagattttgatgaagacttcacaatgccgccttaataaatgaatcgaatggtgagtgagacacgcactaattagttatgtgaattcaccatgttttattagtttattttcgtcattggtgatatcctactatatttgttacggtattagacatttagttggattttaaaaatttaatcactttattttattgtttgattacatatatataaaatatatttttatcttctcggtgtaaatgattttatattttattaaacataatctgattttatattttataaacatgatatgattattttaaattaataagaactctaaaaactctatcatctctattaatattaaatttattaaatacaattcaatcagttgacccgtggttcaacctagttgacccgatgatccagtaacacagaagatagccctgtaatcagtgtttcacgcccaacccgaacagtccggtccgaccggttaacccgtgcccgaacacttttcaggtttgggttta

SEQ ID NO: 38245 - DNA, 552 bp, Arabidopsis thaliana columbia
atatgttaatgcatcagtaagacgtggctgcaccatcgcctccagcctatcttccaatacctctagttgctttctcacattagcaaattctgcaacctgttgacaaaaattggactttaagtggtgacggaaaaagacttaaatcctcagagtactgaagctgacataaaacctacctctccaacagcagacaggcaatttcgcatgctagcaagagtttctgcagcacgaggaagatcgccactagcaaatacatcctcaaccgtcgagcttaactgagttaaccctgcagcatcctgtacatataccaaaaagaagagaatcaattgcagatctacccccaagtgtccacataatggatcacaaaatcactatgaatactaacctgtagtgttttgtaggcagcctccattctctgtttgacattgtccactctagcaagcgcacgtatacaatctgctgaagaacctctgcctgcagagtaccgaattcgataagagcacaagtttcaggaatttgatataatctaattttcgagaagagatcaaacaa

SEQ ID NO: 38246 - DNA, 495 bp, Arabidopsis thaliana columbia
tcccagatctctccacatgaagagaaatgttctgccaacgccgtgtagagatcatcaagcggaagaccagtgtcatatcccgtaaccttaatcctcccaacgtcactgcaataataataatactatcaacgtgacatctgaaaacatgcatcaccttacacataccaaattctcaatttacctcagttttggaatgttattccgtttcgctccctaaaaagtacaggagatcaaatcagaaacacttgcactgctaactaacttgcaagtacttttcttacaaacttgtgaagaaaccatcaattgagaaacaaagataagaaaccagagtgaatcagaaaagccataagagtagagtaccatggtggatgagaacatggctaaaatttgttcgacaagagcgagactcgataacccttattacagatttaatttaggtctgaagagggcatttatagttgtttttttctttttattttgggccttgaattagtt

SEQ ID NO: 38247 - DNA, 216 bp, Arabidopsis thaliana columbia
agaggatcccatacataaaagaacaaaaggtatttctcagggaagcatttgcagcgaattgaaacggcaccgtctcagtcgcaacaatccccgattcaaaacctaaaggaagtgacaatgaaaacggttcacattcagacgaatcggtagaagcgaaattttgaatacaaaggcaaatcaaaacataccaagaagttttgttagtcgatctgtcac

SEQ ID NO: 38248 - DNA, 1171 bp, Arabidopsis thaliana columbia
tgatgctttcatacctaagcagaaaatatctccatggagaaaaatgaaagaaaagaggagatggctggcgtacaggaactggaaacttagactaacaactacttattgcagagaaaaattctaatacattgaagagtctgcacttcagactaagatcatcactgaagtttctgaaaccctaataaccgacttcatgccacaaaacccgaactgagtgtttatatatacacgtttatctaagtagaagattaactacgagacgctaaagatcagaataaatatttcagtaatggattaccttctgacttgtcaatcgaaggaacagatttcttctgtccttcagttttcaatcttgcaatatcctcctgagctagacgaaattcatattcgctgatagctaacttctcagctaaagcttctttctcctccaacaaactttgtggatccgcaactgcattgtagggtaacaattactagctacgctacaaaccaagttgtctaagaaagcctgacactatagaatcaaaaacctcagaatgcgacacaagatccgacatgggtttgttcttggtcataatagtatacccatttaacaagctgaacaatcaccattcaagaaaccttcaattatgattgcttttcaaacttagactatgagaagaacatcaaatgcatgaagaacaaaaacatgactccaccattttcaggattctccatcattttatgaactactgtgcttttcataacttttaaaacatgtccatgatccaacctgaacactattcaactgctttctgaattaagaaagaccaaataagatagctaatttattcacatcatacaacagatccccaaaaagatcactaaaatgtaacgcagctcaaccacactgagagggacgatttagctgacaatttcggtagcaaacaaaataacaatgtgaggcagaatgcggaaaattggcgaacctcgaattgaattataccgagaaatctgatcaggagggaaacgggaaggatcggtacagaactccttaagacgaattgcttgggcatcgcggccatcgtcgaggagctcgtgaagaagctcaaacgccgtcaagaggtagttctccccatcaggaagttgacgaaaaagttgcacaacgacgatcgctcgcgtccatgttttg

SEQ ID NO: 38249 - DNA, 634 bp, Arabidopsis thaliana columbia
atagaggatgctcatataatcaaattctacacgaatatatttgtaaaactacaatcatcttaagtgattatgttcctcttgtgtattgctttcattttctgttaattaaccaaaaagcaagtttgtaatcagatacttagttgaaacctaggatacctaatatctcatgtttactaaaatatataacgactccccctgtcaaatatacaataattcctatccatcaccccaagtccatacaaccatgtctacaccgttgtagaatcacaatacacaatttctataaaaagcataagtaataaccaccaatttcaaaaactatgtccactacggtgctttgcgtttatattctaaccctttacaagtagccatccactagcgaccattcaatgttgaccatatagttgtagggatcaattacaattttcttgtaaatggttagagttatgaccatatgatgtatcattgtacaatgcgcaaacaaaagaaagtgctaatttaccgagctataaacacattcacagcaaatcaaagacatagttgttgtccattgatgacagtccaaaaaatgtagtccatatggttatctaatgattcacatggtagttttataccaataaacaagtctatacat

SEQ ID NO: 38250 - DNA, 547 bp, Arabidopsis thaliana columbia
attaccagaataaatctagtgtgtgtctttcatcacgaaaagtattaccacagtgataagatgtgtagattttcaaatctgaaaaagagataaagctatgtttcaagtctttgaataagattccagtcatattgctcaacaatctttagtttcagggaccctactaatatttttatcacgcaaaccaaagagacaaagctgttttgtgtttagtaaatacatattcaaagtagagtctttttagaacaacaaccatttaccatgaatttccgacgcgacatctctgctctgaatgaagacatcatagttgagcagctacttcgtagccatgatccagacggtcgctggcttgattccgaaatgctgcttcaagaagtcgaaaccatcttaagctttgttctgcaaaatgatgtgagctatatccatcccttggggtccaattcttcaaagagttgtcttgattctggccaataacaatgccactaaactttcaggtttctagaccgcttctgacagagaattgtatcaccaccattgaagtttttga

SEQ ID NO: 38251 - DNA, 475 bp, Arabidopsis thaliana columbia
acgcatttcttggtgcaaattagctatacacactcttttacaatactcatagttttctctatagtcacttgtctattttctagtatatttgtcctcaagaataatccttcccactaaataaataaatacttgagtgtgcgaatccgacatccacagttaaaaacagtaaaaatagggttatatcagaatcgaccattgctaaagatatctaagtgcatggtgagataaggttttggctgtgttgtgatagttactgattgagttatgatttgaaatggctgatttatggtttgtgatggctgatttatattttatgatggatgatttatggtttgtgatggctaagttatattagtgatggtttagttttgatttattgatatttgagttatattttagtgatggcttagttatggtttagtgatggttgagttatggtttagtgatgtctaagttataattattgatgatagag

SEQ ID NO: 38252 - DNA, 917 bp, Arabidopsis thaliana columbia
atttttaagtataaatgtatttaacttttaaaatttaagaagcctaactcacattgtatctaaaacatagtttttcttatatatataaaaaaaaaaactttttgctaacaataatcttaatcgaaatggctaataaatgttactaaaactgtattctacatagaacttcttgaaagaatttcaaagtttctctaggctaatatgaggttcacaagagcaaattgataaatttagaatatcaagtatagttttgctgtccaagcatctgtggtccagtggtaggagaagatttggggaagggtgaaactttcagacctgggttcgatgctcctggaaacaaaaatcacatttgtttgggaagtctgtcagttgggctttggcccaattgatttacctggtagtcagaaatgcaggcggcctgactaccccctggcattagtcggaaagcatccaaactcgggacagacagtgtggtggccttcgggaaaaagtctactctgaagtacttcggtgcgtttctaccggagctgaccggatcagccgatagggtttatcaaaaaaaaaaaaaaaaaaaaaaaacaaacaaacttatctggactggttggatacggttgcacatcttaccttggcaaattatcctcttctagatatcattctcatccgtatgtgtttctaaaccatcatatatttcgtacgtaaggaaaggaatacttgaaggcagctgcagagagaaaaaaaagaaaaaaaaaaaaaaaaaaggcaccacagggctggcttgacttgggccagctagtccaaacatacacgaaggcttcgtcgctagttcgggatgataaactgcaagtaattaattgtttttttttaattgtaacatattgtaattaacaaatataccaaattacaattacattatggca

SEQ ID NO: 38253 - DNA, 469 bp, Arabidopsis thaliana columbia
ctatctgcagggtctgaaagcaaatcttccaaattttcttcaggcgttggttccaactttcttttgtaatatctatgaattcctccctaataaatatattagaaaccaaatttagattagaaattttgatctaattacaaaaaaaaaccttccgatgaattggaaccaccactaccaatttaggaataatccatccttaaattatcccttaaattaactaccttaggcatttggcgccggaaggatcccaattggggaggaacccattaaggggattattttttaaaatttaattggcggaaggaaaaaagcctggtggaaccatggccaaaaaggttccccccggaaggtttatccccaaaggctgggtaaggcctccttttttaggggagagccatatttttatgggcctttttggttaaataatttgggccaaaataatagactcggtttaaatggattggggtgg

SEQ ID NO: 38254 - DNA, 521 bp, Arabidopsis thaliana columbia
tgaatataaaacattcacgcatcataatcatacgacaattagtcaaatttatgccatgatgaaactaccaaatccaaaaatttaaatttggaacccgtttggaaaaaaaacaatcatagaaaatatccaacggatcttagatttaggaattttgcacatcggataatacttgaacaaaacccgaaaatagtacagtaaaaaactcaaagctaagttaacttattaaccatttttatatggaaaaagttaaaaaaaatttacgtacttttaaatttggaacgtttaaatcctatgtaagaagataaaaaaatcgtaatgcttttgttaactttaaatttaaataagaaagtttggttaacaagccattttagtcatgacgttatgtaaactaacagaaaacctttacggtgttaaaatctcgttagtcttctttattatttctaaacaacatcatttatcgtatagagaaaacgacgtcattttgtcgatttaaaaaaacaaaaaccttaatccctaaatcg

SEQ ID NO: 38255 - DNA, 583 bp, Arabidopsis thaliana columbia
gatgaggccagctgggaaatcatggaagaattagctttcccaaatccaagtattccgtcaagtgcttcttcattagaagagtctagatctcctgactgcctagcaccacaccttcaagatcatataaaaacattaaaaaaatggaagaggcaatgaggaatgacggattaagcttccttgccgtaggactgataaaacgctaatggacaactattctactttgtttacagatctctgagggattttctacgtgaccagcaattctcaggccaggatacaaaactaaaatataaatattgtataaatatgatatttctaaattactaagtttttcaacgtgtagaagcatatgaaattagatgaaatgagctgtgctcgggaagataccttagcaaactaatcaactgtcacaatcaaaagcacaacatattcagtaaaggtctatttgtgatattcactatatggtggagacctattcccatgttactttcaaaataaaaaagaatagataccagtatgcacttcaacgaatctcaagatttttttctttaagcaattaagttttatctgtttggcttttgta

SEQ ID NO: 38256 - DNA, 573 bp, Arabidopsis thaliana
tatactagatccgacggacagctagctagattctcattgttggagcccatgaggcaagtggacagtcgatccaagaaaaataagaaatatgaattcaatagtagtcgtgtctcaccaataccgagttggggctcgcaccggggttcactaaacataaccaagtcttttaatccaactttcggatcatcaaagaaattcttctcagcttcagttcctggttcccgaattgcgtcccgggcaacttcaccaatatcaagacgtcctagcccacctcggtcaacaacgccaactcccactctttcaggactaactacaccaaaaattgtcgtggatgataccaagagaagcaatgataacctaagccaagaggtggttatgctaagatctcaagtaagctgctttccacgctttaattcttgttccttactcctgtgtatttaggaaaaaaacatagctggtgagattgtgctattttgtttcattaacatatcgtttcattctttgcaatttgactccttttgcgaactcagtagtaaatgatttcacaggttgaaaatcttacacggaaggcac

SEQ ID NO: 38257 - DNA, 716 bp, Arabidopsis thaliana
atgaagacctttcgatcttcaatcttggtttatccaaagctcgagtcaaatcaagatcatccatctcagataaagaacagtgtgatcctacagctcttagtccaacaccttccattataacactaaaccaagatctaaaatcaaaacaataagatcaatgagattgttataactcctaatccaaaaaaaaaaaaaaaactcgtgtagttggaacacgcgaaataaacacattgcatctaatttttattcgaatataaaattatgcttgaagctgttcttattcgaaatcataaacagatcaagatctataacgagaaacagagtcaacttcaagtaaagctacagagaccagaaaaaaatcagatctaaaaatctaccaaacgaaatcgaaagaaaggagaagaagaaacagtgagagagagacctctggtgttgagtaagtgagaaaagtcgtcggcggcggcggtggcggtggcggtggaggcggaggcggaggaggagaaaatgatctccgacgtgaaatgagagaagagagaagacggagagatttataggagagggaagaagaaggaaaaaaaaaaaacgatagagtgaagaagattgatatttataatgacggagaaacggaaaagtttaacggagtttcaacgggactggtaaaagagaggagaattttagtttcctggttataccggtgaaaaaggtagactttgtga

SEQ ID NO: 38258 - DNA, 527 bp, Arabidopsis thaliana columbia
gacgacggcgcctctgtttccagatctccttcttcttcttcttcttcctccgccgccgcgagacgtatcggttgccggatgtaatgaccgcgactgattccttcgagctcgtcgagacgagagagaccgcgaggtgaaaccgcgtaaagctcgccggtgacgtgatagcccgatccaggtttgttgaggaggaaagggactcggtaaggtccacagacgagaggatatttgtctagagtttggtaaacacctttgaaagaagcgtcaccagatcggatcagatcttgcatcaggacatgatttgagaatcctctctttagagttccgtacgtgaacacgagcgttgttgttgccggcgtcattgttcgtgtccatgattgaacaagagaaattaaacgtagagattaatttggacggagaaagaagaagagatcaaacgtagaattgttttgtgtggttggtgaagaaaaaatagaatcagaatcggaaaaagagaaagagagagagagagataagagaaaatggaa

SEQ ID NO: 38259 - DNA, 471 bp, Arabidopsis thaliana columbia
tagaggatcccctgacttgtgtcttattaccagagtttgggtgatatgtaatgaaataatgcattactttcacattcagaaaaaatctgacaagatattgaagcctgaccaatgagaacgtgccaaaggatactcttagtgatgacagcttttatgtctgcccacaggcaaaggccaatgtcctgagacccacataccatcagatcggatcgccacatcatctccagtttgcgtttttataggacccaaacaaacaccttgtgataaattagacacatttagtcaccataagattttggaactaaatgaacgattataatcgctttcgggccggtggtggtttgaattttactacgattagatattgttctatacaacttgatatagtgtgttagttctaattctaggctcttgaaagcaaaaagttttgtgaagaaatttctagaaacactttttagaaggatcgataac

SEQ ID NO: 38260 - DNA, 543 bp, Arabidopsis thaliana columbia
gaccaaaagcggtccatcaactctaccgacttaaaactaacactcaatgtaaagttggtgtaccattatctggaacttaatgaacagccacaaactaactaacagtcactttaacgttggtttaccattctctggaccttagacaacagccttagtaacgaacttcagcttccaccacaagaaaagacaaaacttttcatcaaatttcctctacccttcgaacagtttcaagcactgaagcataaaaaataagaatctaaagcaggtgcttttgaaaatccacctactatttactgtatcgaaacgatggcgtttttgtcggagtttctgcggctgctgcggttacgagaagaaggggatgctctctgcggctgacacggctgcaaatttgctgccttttcgtcggaatcgagatcacagagaaccgacattcctgagtttccgtcgccggcgacattaacggaaagtcctaaagaggggaaagactaaagagagacagtgaaaaccgaatcaggccgaccggttaaggttgccgagtctaga

SEQ ID NO: 38261 - DNA, 597 bp, Arabidopsis thaliana columbia
taatttatgttcagtaaacatcataacaagtactgtataggataatggagagatctatatctataaatatatacaaaattcggagctattaatagatattaatgaacccttcaaatcaagaaaccatcaacaatatgatggtaacgtcaatttaatacaccttacccaatatttaatcatgatatatccatgctcatgtatgttgtcgtaacaaaaatattaatccaaaaacgcaacaaaaatctattgaaacaagtcaaaaaccttttagctagtgatgcaaagggtttggaccgctaggtaccacccgttcctcatcattgtaccagaaaccgttttcttttacagtcaggcttggactttgacgttgccgttgagtgcgatctttattcttgagaaacggagtaaaatcaaaattacttgctagaattctcttatggcgtaaactattaatgccggatttaagcttgtaagaagtcgtaaaagcaaaagaaatgagaaggaaacaaccacgcagagagtagagagatgtggaagaggaactacacggcttaggttgtttcgtcatggccttgtagctagagaagagtttgatga

SEQ ID NO: 38262 - DNA, 553 bp, Arabidopsis thaliana columbia
gaggtaaagattcttttgatacagtttggttttgttccttgccacctagctttttcaggaacttgtctctctactggcttttgatcctgaaattgtttgtattgatcagctgcccgactgctgtgctgctggtacaaatctcatgaacctcatcttccaagtgatggagttagatggttctttggatactagcatccatcatgacgaaaaaccaggttgtttccatacaatgagcattgaatctgattcaagcagcattgagagtgcaatcagatatgcctttgtccacgggtcctgcaaagtttcttctctctccctacctgagaacgagggtgtcttttcgtgcagggtgttccattctcgatatcccgagctgcagatgagcgtgaaggtagtaattttgaattgggcatatgttgcattatgtttctactatgggtagaattttcagttcaagctcgtgttacacactttttcactgtgattccatgtttttttattttcagattcaggtaacatctgctcccacatctgaaagagaggagagtggata

SEQ ID NO: 38263 - DNA, 967 bp, Arabidopsis thaliana columbia
ctgatgttaagattgtctgggtgttatttaacaatgagagagtttatagagtattgtagttgcaggaattcttgcaacatttttgtttttagtgtatggatattgaatggttcttgtttcttctcaagtctttggaatgtttttgtgacgacaattatatcaaaatcagcgttgagtatgacaaagaaagagagctaagatagttaatttgtaactaaaacccgtttggtaagagcttttccaagcttggttgacatatttgtggggaaaaacacatatcacatggaaaaataaacaacaaaaataaaagtatcacacatctacgactttaaaaggcataattattgcaaaactataatagtaaagataacacagtcacaaactcacaactttgagaacataaactgtaatgcaatttattacacacaaaaaaacttaaagctgatcataatttcacttatcaattcatccaaattattgtaatataacatttaacaaaaacctaatggaaccatgttttattggtaatacttgaactagtaacagggatgatgctgcttgagttggcggcatcaagagcgttggaagattcgtcatggatctgatgttggtgctcctgtggctggtgatggatgtggttgtggtggttatcatccatgaattgatatcccatttgctctgtctgatacctcatttgctcaggatggttcatcatttccataaaccattcttgattttgattatagttctgatttaaattcagatttagattttgaggttgctcattaagtccaacatgttgagccgccggatgacgaaattgttgaagatcaataggattaacaaaattcgcgacagccgcaaatgaggaagaagaacccacctcataaattgtagtggtgggagctgttgtagcgaccaaattcggcattggtatattcccttcagaagcataccgcaggggatc

SEQ ID NO: 38264 - DNA, 844 bp, Arabidopsis thaliana columbia
gaattgataaaactgtctctacacatctaatggacattgttcataaatatttcatttggtgtttagaattctccaacattaattattttataagaattgtttgtcaatctctgcttatgtcaaaattactttctttcttttttgtctttataagatttgtttggaatctctatactattaaaagagaagtacattcgctaaacgagttaggttaaatcgaaaattaagcttcttcaatttaagccaatttacaggtaatttatctaattggaactttttatttcaattcgatttcagatcgattatataaggaaaatgaaacctaaccggacttatatggtaacttttacgtaaaatatttaatttaatatcaacaaatacaattctgaagtgtatggtaacttcttccttaatcagggaaagtatatcgcttaagatataagaatgttctaaatatcagcttaaccatcgaatattctctatgatctttaattatagaaagtgataaagttggtttactgtaaaattataaaaatcgcaaaattgcaaaacaaaacaattgataaaattggtttactgtaacgccccgaccgcccctaccagtgtggcacacttcctctctcgggtccatgggcccaccttgtccgacggtcgatgcgtcacgtacgagaggctttaaagacttgttactatccctacaaatcaccacataatctttctccatgctttgtcctcattcgcatggttccgcaatcatttctcggaaggtaatatggagttctcttaggacgtgtgaccgaaaagataagtgcctttggtgacatcggtgccgaacaatttttta

SEQ ID NO: 38265 - DNA, 478 bp, Arabidopsis thaliana columbia
caatatgaaacttttgtaaatattgaagataatttattttctaattataatattgacaatttaaaatattttcttatagaagattgtactccatctaaacttgtaaatgatatatatatatttttttaatatgttgaagtttaagtctgaaggccctaaacgtgcgccgaacccagcacctccacctaagagatttattattgggccaacaccacgttggttctctctttctttatttttttaactaccctatcacattttcaacattgctacattgacagacaaacatttattaaactataggcttccaactcaaaaccaattgacaataagtggaaaaactcatattttatatatatatatatatatatatatatatatatatctctcttactcaacatctcacttgagttccactgtatgatcataacacgtatacgcgcacgagataatgggcttttaaacatagatttggtat

SEQ ID NO: 38266 - DNA, 594 bp, Arabidopsis thaliana columbia
  unsure (1)..(594): unsure at all n locations
gttagcatccgcagggaccatcgcaatgctttgttttaattaaaaggttatcagttttattatactatgtaacgtaaacatagacactaacttttctagcgatcgttaaactcataaaagatcgagcatgtcctattttttgaactagaaattaaagagaatcgtccttatgttacaacgattgattaaagtactaatccatttttcatgagattgcttgctaatctgatcaattttttatttttttttaatattcgagtaaattggtagagagtgaattgttttcttcgaatttatcatcatatatacgatgaattttagtagctgaaacatagtgtatattgtttgtccaatcaatatacctttgtgttatttcatttgtctaatccagaaccacatgggccatattttccaggaatcttttgtttgtttgtaattattgaagcaacaaataattcattccgtggaaaatagactaaatctgatgactctcaccgcaacatcagaatatcacatgatgaattagacaataatattcacgaatttctattgtttaagggctcacttcgattcactanccaaaagattcataca

SEQ ID NO: 38267 - DNA, 550 bp, Arabidopsis thaliana columbia
agtaattagtttagacgaaggggttgttggaccgtagccttaaaactctatagttagcttttcagtgagaaggcaagtaatattttacaattctgttccacttggcactgataattgttggtgtatacattttgttaaccggactggattgtatcacataaccgggtcaaaattgtaagtatcataattctactgggtcaaaaattactcttttaatttatttcgcaaggaaataagtcaataaccaaagatgatgtcacagccctaattacttaccaacatcgatcttgacaaaaattctgaattgccaaatcgtgtcctagggttccttaattttctttccccggcgatgactcccacaccgatcattgaattaacggcagaccgtggctccatgatgagttcatcggtcacggaggaggttatctctaaagtcgacgaggatagcagcagcgacacgcctactggatgacggcagcgacacggtgtgggctgggtataacgtgttagcggaaactgaaccagagtgggacgtcgacagctttgatgg

SEQ ID NO: 38268 - DNA, 444 bp, Arabidopsis thaliana columbia
tttttgtatcccatgtctcttcttggtctccttctcatgcttctcttaatctataacagcttctctgttttctctcttcatcttgttcccaaccaacctattcaatccactctttcaccaactcatcttcagattcttcatcaccagacatcaacatcatcatctgtgtcagattcttcattgttacttgtggtgaaagaaacctctttagggttcatacagaagcagaacgtttcgtcgacgaggatagagaaaaagacgaggagattcaagagaagtaccgagttaactcctgcgataacacagcggttacaagtcaaatcaagacaaagattccagacgagggtcaagtctttgttgtccaaatcttcttgtgagtcactcttcttcatgacttggatctcctccatagaatctttcggtgatcgagagcgattcactata

SEQ ID NO: 38269 - DNA, 522 bp, Arabidopsis thaliana columbia
atttggtaaataatatttgatgatatgttagtgtatagatcaacattccttttaagtggttgataagagagactataaaattttaatctccgagtcatcattccaatataagtgttctcaagatttgttgctctctcatgtcctaatcgcttagggttccaatccaaaccaatgagtttagtcacatcacttacaaatgtgtatatcaatatatctttacggaaaaaagatatattgataaaggatgtacaatcaaatacaacaaattagtatgcaatgaaaatacaattttagaccagaaccacaaaattacaactactcaatatatcgagtattacaatatattgagctataattcaacttttcacctatagttagctagttttgaccataatttgtagtatagtagtatgtgttagtacgtcgatgtgtcaacattcatgttcaaacttgcatattacatgttattgacatgttcttcctgtagtatacaaattacacattttcataacttcatatatg

SEQ ID NO: 38270 - DNA, 508 bp, Arabidopsis thaliana columbia
atgttactttttctttttggttttgtcattactctcaaccatttatctttcgacacatattcacctcttaactctaaaataacatcttagctaagattcactgcttaacattttaatctgttttgatttaatttttaaatcttataacataagatattatgctaagatataccgttggagaggctcttagaaactagaggtaaatgttttgtttcaaaagtatatatgaataaatcatataaaaaactgaatagaatatacacacataggacaactctagcatgacggcggatttattaaaacactataactattaacttatttcaaatattatagggtgatcatattttagaactaattaacttacaaattatatccatatttattatatgaactacaaaatttaaacctattaacaccttcttactttcaaaacaattaatttaaattggtacatttcagataaatatttaatttgtatttacatcaacaaacaactgagtgtact

SEQ ID NO: 38271 - DNA, 510 bp, Arabidopsis thaliana columbia
gtaacgtccgccagtgtgctctaaagaatataaaaacgatagacaattcctctttctcacactgattgtttatgttttagaagatgggtttgaacctggttggatgggagtaaggacattctacaagcctttttcgtggcatctactctgtatactttgattgcaagatccaataaggatggattcatcttgatagtgtctattttcccgtttgttagctgaacatatatatgcacatttacgcttcgttaccgattgcgtccttcgttcttactggtaagttaacgaattagagaatacgtaatagtgggcaagaccgtaatatttgcaaatcatgtactttagtgttgacatgctgtagtcacaacgtgggtagttgtctatagaaactctcgcaatattaagcagagggcatttgtacctctgggtttgtcagattatctcctatagggagttcttatttaatgcttgctcaagagtaccaggagacatctgttcatagtattagac

SEQ ID NO: 38272 - DNA, 546 bp, Arabidopsis thaliana columbia
taataactctcttcactgattaaatgcatttaggtccactcttcattacaatttctgtaaaaaaatcgaatctgatagagttttgcttattaattcagattttggttttgcagtgaagcataattgctctcgtacgtgggggtgagtatctttctcaatcacaagaacaacgtgaatttcttttctcctttaaattaggttttcttttctttaaatccgttgattttgattcaccaaacgtgtgggagacttcgaattatactcccttgtttctcaagagtgttggtaagtgacaaagattcaagctttaatgttctttgattggaattttttcaggttttgctcaatgtaaagaagttaaagattcaaacttttttttcacaatgggagagaatctgcatttgtctccacgacaccgatcttctctaaagaagccattgttgattgttttgttagtctgtatcacaagtgtgcttttggtgatccttacatgtaccacaacacaacaacagtaagagctctgcttgtgcgggtttgtctagtaga

SEQ ID NO: 38273 - DNA, 522 bp, Arabidopsis thaliana columbia
ctaaaggagtcaagcacaaatgattaatcagcttgaaagattgaacctggaacttggagtctgaagctttgatgacaactgacaacgaatgcaggaaagccggtatgcggcatgctgagtctcgctgctggttgcagggctgaaagatggagctgggaggggcaagatgccgggctcggagcgagttcccgtgatttaatgacaatacgtgacagcttccgtttacttcctgtccaatcatgcttctttactgccgatgctatactgtattatcaatccgttacagcagactccgctgttgatcttccaaggccgaaagcccggcactccggaggactcggccttgaattgaccagcacagagagctgagcctggtccatcacgccatgtcggtgctcgatcctgcgctgctcagcacttcgcctgaaaatggtgaggattctgagtgggaatacgaatatgacgacacggaaacagaggtaggtatgatggaaaacaccagtcctgcggttccgctgctaa

SEQ ID NO: 38274 - DNA, 551 bp, Arabidopsis thaliana columbia
ttcccttaaaagggcagcatttcaaggttttctttcgagcaagatattttattcccacgtcgaagattaatcaccgacgataataagataccaaatcactttcttctttaaagcaaaaaagttctgagaatctgattcagcagaagaaaaatctgaaagctatcaaatatttatattagcaaaacaaaagaacacatgctagtgctagcgaatacttaagagttaagagaaaaagaaaaaaataggtctgtcgtcgtgtcaagcttaataaatggacatctctattgtgtctttccatcggttactaaattatacagtactactagttcgagtcaatggaaaaaatgggcttattagtaaagctagtcttccaccaaataattaaaataacaaatgctaattatcgtaatttttatcttttgttattctttttttttttttggggcaaacgttttggtatttataaatttggtggaaattcaacgaacaaactatataatgtgcatcaccacgtgaactgaaaattcctcggtgagttttgtactttgtat

SEQ ID NO: 38275 - DNA, 485 bp, Arabidopsis thaliana columbia
ttttgcagaaaacaatgtataatatgagtatctagtgtatatgctcaattttataggtttaattacacatcttgccgttataacaaaaacaaattagcctttttgctataaagtgtaacgagttattataggaataaaataaactctcaaacatatactatatatgataaggcatttggaatatgttttagacaactatccgccacttcaaacataaaacaacaatcattattttgttataactattttttatttaacagttttttttttaatgtctttcaaatttttcaaaataattatatttaccaatcagattgttatactagttagagtaatcatcactgcgatgatatttaataatcatgctgtctcttaattaactgctaacttcttttttgatgatcacatccctaaaaacagaccaagcaaattggatctgatggtcctatttcgggaaatattcagaccatgactataatgacaag

SEQ ID NO: 38276 - DNA, 197 bp, Arabidopsis thaliana columbia
  unsure (1)..(197): unsure at all n locations
cgccagtgtgctctaaagtttggctctttttggcactgctacagttaaagtgaggactgaaaatagcatgcgntaattgattcttttcattatttgtgtacttgttgttgcacttgcttaacttgtatggtgtacatggttttaaacgtggctttggacgtgttttgtacttcggttgtacttggttcattagtttt

SEQ ID NO: 38277 - DNA, 437 bp, Arabidopsis thaliana columbia
tattaatcatatggttttcgattagacaaataaccagatgctcaagaaagaaagaaagaaagaaggaaaagttaaagatgcccactatcagaaggaagggtttgatctttgatgcacaagatttcaatgtcacggcagactagctgatttttgctaaggaccggccaagaaccattaacaaagacataaggaaacacaaaaaggcaggcgtatttagatagacataggacttcactgaaagatgctcaccgcacggatgcttgtaatattagcttgagccttcaggatctcagtatcacgttcaagtttatccttccagtcgaccagcgaacttcatcctgttatgttttaaggacaaacgaaaatgaaataaaaagaaacaaatggtaaacaaaaaaataaaatagtacaggcttagacctcaggtaattggatgg

SEQ ID NO: 38278 - DNA, 335 bp, Arabidopsis thaliana columbia
ctttggaaatctgtagagagaaatactaaagtcataaatatatacaatcattaatttataatattgataagaatatatatttacatagaattttcaaaaaagttatagttttattaatttatcgatatgtatcaatttttacactagtcccgacgtcaagacatgaattatgtatatccttttcggagttatgaatttatcgagtattaatttatagagatttcaaaccaaatttatgttgcctgtgtcaacagttcaaagaaaatgtcgatctcgtataatgaaagattgtagattttattggttcttaaacatttgatatagttgagatgaat

SEQ ID NO: 38279 - DNA, 601 bp, Arabidopsis thaliana columbia
tgcaatcataaagacacaacatgcaagaaaacattttggtagacggttcacccctttgactttgactgcacttgcgaagaacgtggtttcttgtctctgaaacagagagcgtaattatatagctcagaaacagagtcattagtggatgatgatgataaggagaggagaaaaaaacacctgcaacaagtaagcttttccaaagccactctgcagaagtgagcaggacagacattttgtaaggcctgtacgaataagccagaaaaaggttgtacttcgtctcttgtagtaagtcggcgattaaattttcgaacatcatcaccacaccatcggatatgagcatgattgtagccggaggaggattacgagctttccactgcttcatatttataaacatgcgactgtatatgacttctgtttcagacagtaacagaaaagcatttcagtagaaattccagagagatggatataattaaccgaatggactaaccgtcgatggaatgtgcaagatcgactccagtggaagagagctctcgcaggatgtgatcaggggttttgttgtggtcgcacatccggtgatggagacaggaccagagtagctagt

SEQ ID NO: 38280 - DNA, 558 bp, Arabidopsis thaliana columbia
ccaagaagtattgcatgagggaggtctatatggaccaaggtaccaaggattttggaaattaagcatcagggcaaaaagtaatgttgcttactcatgttttaccacttgatttactggtcaggtaaactgaaatttcaccctccaacaatttgccttctcttggcagttatggtttttgagagtatgaaatgaaaaatttaatatcccgtttatttaattagaatttttttataattttaaatttatttgaaaatctttcttaaaatttatgttcatacccaaaaaaactttctgaaatgcgataagaaaatatactcatatatgattcatgtctttattttaatagtagaatgcaatcttagtactgaatatatatatatatatatcctcaaaaagattaagaataaacatgtcaccttttaaagaaatgcgatggtggaatcatgtcgacaaacacgctgtccaactactaccggatatttttgtaaattgcttataaaagttttcattcttttcaatactaaaatttgtcctagatgacaaagttgatatgattaa

SEQ ID NO: 38281 - DNA, 301 bp, Arabidopsis thaliana columbia
tgaagacgttcacggttacgaatactgatcacaagttcggatggtaaggcacttttactaaactatctagcaaaccaaaaatcatcgcaatcagaataatgaattaagagttaggaataaacttttgcctatatcaccttcctagaaacttcatagtccggtccataatacgacaggggaacttgaagaggtctagccattgaagccttctcttagttcaagattccttgaagctcgtccttattgcacatatgccagagacattcatagacatcttagcctcccttgtgttttacggttc

SEQ ID NO: 38282 - DNA, 638 bp, Arabidopsis thaliana columbia
  unsure (1)..(638): unsure at all n locations
catcttcaagaaagatttcaacttgattctctttgagcacaagtcttcgaataaacgactccctaggcaggtttaatttgacatgagaaaccctaactctttttccctccaacgtagacattaagtaatgggcttaatttgttcatgggccttcaaaacaaatgggcttaggctgaatacctaaaataattagagcctgaaacactaaacaaaaacattagtgcatacttgcaaataatcccattgattcatatcatcccattgatcaatatcacatgttagcatagttcagattaaaaatcatttagcgaacaaccattcactcatgaacagaatttagtgacccagaaagttattgaaacatgtgagtacagtaagttggattcaaaacatttttatacctttgagatctgttccgtgttccgtgccaaccacttgttcagaactcagcaagaagctaccataaccactcagatctttgatagatcaactctggatacagtggctagtctttcaactatcatgccttcaattccagtagatcggctcaacgtataacaggcagctggaattttcctttggagattggcaaagaatcaggagtgtgatgtntcatttcacacttccttagatttaga

SEQ ID NO: 38283 - DNA, 448 bp, Arabidopsis thaliana columbia
aactctgcatttgttgtatctgctttgtttgtggcattgttggattcagtttgaagcatacatgagctactttagtctaaagttatcgtcgggttttcttgagatgttgaattgagcagaaggaatgaaggaagctctctacaggagaaattattacctttgtgctatttttaataatcaaatgaaaacgtgctcttacaaaaccaaaagacacatttaacatcttaaaccatgttacttaactaatatacctcttgagatttgaaatgattggatcatataatcataggatacgtatcaccgtaccatgccatgttatttccactaatgttggaataattgatttatgacttgaccaacttatgcattaaagggttcatcgtcagctacatgccagctcattgcactctatgtatgagtcattttcggtccttttcgtattctttat

SEQ ID NO: 38284 - DNA, 745 bp, Arabidopsis thaliana columbia
cacgacacaaaacgacaaacattgtattacagaagaagaagaagatattattattatgaagaagaagaaaaaagaaactgaccatctcttcgtctctttgtctctctctcgctcgcagcctttttatttcctcaaacttttttgaacccacgaggatcatcttcctcatcatcacatcaccatcttcttcgtcctccataataataatcaacttcttctcctttattccaagttccgattagtttcagagtttttcaattgcttgcttaagtttctttgcgtaggtgagatcttcatcttcttacccttttggtcttatcttatttgtctgattactctctgttctgtttttttttttgtaatcccaaagttactttggtttttgtagttccttaagcttatcagaggtatcttcaaattcctatatttatttgctctctgagaagttcttgcaagtaatgtttcattgtgtgattttgttattctctttcttctgtttactgatttgcgatctaaatttagggattctaacactaagaattgaacaaattgatctaagttataatctcactaacgtcgcttttgcaaattatctgatttttgtcttgtctgtttgtactaattcttaatcaaaatccttaaaaggttgatttttggttatgatttattgctagagagtgtctcattacctacctagcactggcttgacatacttgagggaattatattgtccgcaatttgagtt

SEQ ID NO: 38285 - DNA, 397 bp, Arabidopsis thaliana columbia
  unsure (1)..(397): unsure at all n locations
ccaaaaacacctttacccattcattctgattcttacatgaaatgaatttcaggctttatgattttatttataagagaaaaaaaaatgattgaacatgaaaacaagtgcttctatataaagcgacttatttgaaaatgaataaactttacattagtgattccagtgacnatatggcgtgccataagggccataacacaaaggcacaaacacactaacacaactggaagctagaccagaccataacacgaaggctcacacttgaggcccagtagcgcattccggcccattatgacacctcttgccatatcatgcttcgtggcccttttcgccaccagggcccatggggctcttggtttggtgagcatccacatgccttgcctgcctagtgcctgcttct

SEQ ID NO: 38286 - DNA, 568 bp, Arabidopsis thaliana columbia
ggctaggattggtaagaccgttgcgccaaagatgcaacttctccatctcttacaatccacaagaaattaataccaaaacagatgcataacttttctctatatccaagcgacactgtgatagagtaaagacttgaaaagaacatctccaactagtaactacctttgcacggtatttttttctaccagttcgatccctcccagaaaggaaaactcattactacgccaactaggaatacctactgctcttcaataacttattaaataaagaaccctaaataagtaaatacaatcataatccttaaattctcccatgaataaagtactactagaaatcaaccaatatcgataaatttcgccaacgtaacatacaaattaacaagaacacagtaccggaattatatgtgtaaatatgtcgaagtattactatacaaaacacttgaatactcaaaagcacatgcttgataatttagcaggcacattatatagcttccgtatacgcttgggttgaaaaggtaatgttaattctcaaatgaccaaagtacctggaaagtttggcttcaataaatgg

SEQ ID NO: 38287 - DNA, 459 bp, Arabidopsis thaliana columbia
tcgccgtgaagtctccttcttccacaccacaacgcaattccaccggtagagctcttacctttggagtcttgtggaattgtcccccatcacagctccccttgattttgatcagaatagcctcgccaaaaagatgaagtggattacgtatgatgaaccatgagccaccgggtctcactgtcgccggaatcgacagagaaaccctatcgacggtgcacgaatttatgctcagaagaagaagagttgagagagaaaaatcgcttgcgagtaagattcacgtacgacgattttatctatttaaaagaattattgtaggctcaatttttttaaaaatgcaaattttcgagctgacagatttggaaatttttggaaaaggacaatttatgattttaccttccacatttggagaaattgttcatgagattttaatccgccacaattgcatagatagcaagtaagttg

SEQ ID NO: 38288 - DNA, 220 bp, Arabidopsis thaliana columbia
gatcatctcagatttttgtaatgcgataacaacaaaataaattttgattcaaatttcttaacatgatgcagataatttgtaataaaaatattttgtttttagtttataatccacatatacgtttataagtttataaagttatctgacagcattggaatgaagtgcactctccttcatatgactgacttgggatatgatatgagtcgatgcataaagtcgg

SEQ ID NO: 38289 - DNA, 545 bp, Arabidopsis thaliana columbia
aattaagtcttcttatctagtaatttggttttatttccatgacctacaatataagataatagtcattagtgctagatataaagactgaattagggtatataagatatatggaatgctaagattacaaagagatagagaatcaaaaaaaggaaagaattaaggggcaaatatgaaataattaaaaacaagggagccaaaggaacaatgtaagaaaagcaataaaattaaaaacaaaaccctcaaaaagaagaaagcggagactcgttagctttttcctgcctcctataaattgaacgcgacttgcagaacctttcctcatcgtctccgtctcctctctctctatccacgagaaagagcagaaaaaaaacatatagaaaagaagaatttagatacaatagattcttcaaggaaatggggaaatacacggagatgttggacgtcggcgtgagaatcgctgcgaggtttcattcacactgtcctcagacggctcgtctttattaccatcctccatccgacaaccatcaccatcacggcggagtcaaaga

SEQ ID NO: 38290 - DNA, 505 bp, Arabidopsis thaliana columbia
ccgcggccggctgtatcgtggccacgatgctccatgccctaatacctggtgagtgcctccccaagcttttcaccttgcttccctcttgttgtagcacctaacggtttgggaagacgaagctcgtgggcacgatctcccttatctccagccatggcgccgccgcgtgcggtcttgtacaccagcgcgggatggtcaccggagcggggaattcgtgtgcacccttggatctgtagtcaacggttgcgattggatctttgcatagtgtttcggcggctcaatgcatgccgctgatcttacatcggatggacgcagatcgatttcaggtgcattaaattggggtggtagatgagtgaacttctaatctgagcccttgatttacgatctcacggtagatagtgtgttgtacccttcggtcagcgctttttgcataagaaccctcgtgatttctgatatacaacctgcagtccccagcggaggtagtctgagtctggtagacttttgtaag

SEQ ID NO: 38291 - DNA, 459 bp, Arabidopsis thaliana columbia
taacctgagtttcagagtcaggtaagggtaggttatcagaattatcactttgaagctccttggcctgcttaatctgcaatcgccattgcatatccttatagaaattgttagtccacagtccaaacattcattggacgaatggggcgggaaagagcatgaccacggatagttagatggcaaagctccaaaacacttccgggacggtgtgtaaacccttgaccacgatttagacttgtgagatttgagagaattattttagattttagaaattagaaacttaaaaaaattgagatgttttttaatataacctaaaatgttacaccgtgggtaaaatctagtatgaaaaaacaaaagttgcgtgttctgttaatattgtttgctttgttaataataatgtttactatttttaaaattgagatcttgaatggacatgttacattcttaagtttttgcagatgt

SEQ ID NO: 38292 - DNA, 513 bp, Arabidopsis thaliana columbia
tattcaactattttcgactcaccaaacacctatagtaaaataattatgatgtgaggttgagggagatagttccatcatcatagtagttaacaaagaagtgactagtgagggaacgagagtttgacaaaaaccttagggagtgaataaaatgctgatttgatctgcttcactctgaaaaagccaagggtcaaaaatagaaatttcaaagtgagtaaatgatctctgcaatagtagaaagaaagaatatttagttggaagattgacatacccctgagcatgcgtcaaagggtcttcaaatgaagcatttggtgcatacatgtcaaaatcgttggcttttgcactagacccgtacctaattcaaaatcaaaactcgcattagatatttagtaacttgatgcttttgtaattcaacaaaaagccatgaaaagacttatcacaatcacaatctacaaactaaaaatttatacagtgctcatgtgtgagaacgcaacaaacttatgataaacattggga

SEQ ID NO: 38293 - DNA, 361 bp, Arabidopsis thaliana columbia
aaattgttatggaaagtgacactgacataaatagagataccaaaaaccatattcatatagacataaattgtgtaaagccgactttcgtgaacaagaaacattacaaagacgacaaacataaactcgatggagaggctttgtctaggtaggtcacagatgaggtttgcctgtttccattttcttctgcagcttcatccccttcttatgaaccgtctgagtctgcgttggctccacgagaagtaacctgcgacatcacatacgccaaaagctcttcacggtgagagaaggtaaaatccaaattagcatactcaaactcattgtaagaaacatctactcctgaatcgcgcatcaccctgtaatg

SEQ ID NO: 38294 - DNA, 459 bp, Arabidopsis thaliana columbia
gcgcttactttttcgaactatacaaaaatagctaatttcgaaagggggttaaacctacagatttgaggtgcgtgctgataactcgcatatagtgcgcgtggttattttattttcaaacggatacaaatatcgctagtgtgggctttcttaataccggtctttttattgtttgggcttaggccaggtttacacgtgtcttatcattttatttttttatgtttttctatgcattaacaaattcgttatggcaaggacaataacaacacaaattcattgaagatcacatagtatggtaaatgtgagattacacatgcaaattttattgtccaaaattactgctttttaatgcataagattatacttgtacggtactaatgtacaaatattttccttgacaaatcattgactaggaataattaaataaattcgtacgtctttgctttttggtcggaattagta

SEQ ID NO: 38295 - DNA, 418 bp, Arabidopsis thaliana columbia
acaggcccactcttaagtccaaacttttgttcctacttccttatcaaatgtgtcatattcgttacaaaggtttttcagaaaggtttttagtaagttttcaaacattttacaagttctttagaagcttggcaagttatttgtttacaacatatattatccttagctaaagaatatgcaaaaacatataccaaaatcgtcttttgtctttcctagtttttttaatgggcctttgacaaatttgagaatagagagagtagagtcgatatgtaagacttattcaaaaatgtggaaaacaatgtgggtccgataggcccatttaaaagccatatgacccctaaggtgtgagtgtgtccagtgtggtgtgggtcacaataacacccaattactctcatatgtactaatgatgtacatgatcatt

SEQ ID NO: 38296 - DNA, 474 bp, Arabidopsis thaliana columbia
cttcgcgtatcggtgctctaaaggctgatcaagcatttggaaatacagacaagaacatcaaatattattttttatttcttaggttgattaagaatctccatattattatctcctaagcattttaaaattcagatagtttggaagttagacaattttgggggtgtgtttgtaaaaaatttgattattattgcagtcactggtcactaggttgatagaattatgtctactaaaaagtgatagtaagtatattacagtctagctataagaatatacggtgaaaaggctggacaacaaagaaacaaaaacaaaaagaaagtagcaactcatgtataaagcgatgaaattgagaagagaatctcgttttaagaaagacatgcagcgtacaatgattagaataataaaactcttaaaaagaaactgcaaaagaaaaattacgaattaaggagaaaatgaaaagaaatcttaataaaaatg

SEQ ID NO: 38297 - DNA, 522 bp, Arabidopsis thaliana columbia
tcgctgtcatttgtgcaaatctcttatctgttatatatggttggggaggttgcatggattcggatagaggcaacggtacgaaaccgtgactagaagaaatatagcttgatggaattgaccaagaaaagaaacaatcaacacacgagctgagatattgcttagcttgatcgagaaacctaacttgttattgcaaagcccatttgtatcataatcaagaagcccaaccaatacattgcacataaacatatgtgtcgactctcaagtctagccgcatgtgactttatatggttatcgcactatactccatgtgaagcttgcaaaatttatttataaattccaaaagtgggagagttgtttcaactagtagagcaatacgaggattaagataagatgaagtttcaaataagaggattaagttttaacaatagattttgacccaattttagtactagattcttcgtgctgttgttgtagattgttaccagattcattgtggataaatcatgatttttgtatttgaca

SEQ ID NO: 38298 - DNA, 598 bp, Arabidopsis thaliana columbia
cggttagggctcgtttttcaagaccgcggtcgtcggccggcaggtccgtcgcgaatcagaagagaatcgggcacattgcggatggcccgtttggcgcaggccggcccgtttggcgcagggcggcccgtctgacatctggtggagaagcaaaagagatggatttcttatcttttggtgggaggcatggggaacattaagttttggtggtgaaccccacgtctgttttcttgtctttaaacacggttccctgttgactagaaaagtctcagaacattccgcaatcccctgtaaacttgattaagcctctgtaagtctctatagattttgttggtcgagtataatgttgaatttttggatcaaaacaacatcatactcaaattcatcctctagtcaccatatggcttctgttggtcaagtatagtgatgatttttaaaaacattaggtccaaaatcatcacatatactcgaccacatttcctcattagcatgtggcttcgggtgataaagtgacatgttgaaacttcaaaatcttgagagtgaaccctctttatactcgattacacagatacacttgctccttgcaggatgtggtcgagtg

SEQ ID NO: 38299 - DNA, 575 bp, Arabidopsis thaliana columbia
cacttccgtaccggttggggtaatggtaagtgatgggataaatggggcacgtggcaagacggatttgcagggacgggtgttcgaatcaacatgaatactatagtataatataattactccaccgttgtaatacgggttaaatctgataacttagtagggcctaatacggattactatatggctgtacgttgggcccattcgcaactgtaaccttttaaacatatcttccaagtagtgtacgcatgtctgtctggtttgttcttcccattcaattaccaaacagccaactaccagcaaccccaatgaatatactttcttgggattggaacgattcattttcacacaacgtgtgaaaattagaacagaaacgcaattatctctaacaaaaatcaaacagccaaacgtttaaccatcggcatcaagatccaaacgagactaatttgaattattttgttattcaagaaatccatgtgttataggtgtaaactgtaacatgagattgtttcatcagagtggtgctttgatggctcattcttagaaacacttttcaacgtaccaagagaacagatatgtgg

SEQ ID NO: 38300 - DNA, 435 bp, Arabidopsis thaliana columbia
aaagaatcttaattaaattcataaacattacatatatattaatcatatattatatacatatcacaaattttcgagtaagtttctaaatactttgggtgtgtctccatggccgggctcagcttgattataactacactaggaatttattatattactcgacctgacgtatagaagccggtcagtttaaagagctacgaacccaggataaaatctgaatatcttgtgcatccacgaactcatgatggtgttgataataacagcattgacaacttgacattaatacttatatgaatgcacgtatatataaagtattttcttaattttaaaatggtttacaaaaaacaaaatccaaataatttcaaggttctacgtacctagctacatgcatataggaaaaatggtcagaatttatatatatatatatatatatataca

SEQ ID NO: 38301 - DNA, 448 bp, Arabidopsis thaliana columbia
tctcaaatcatcgatatggtttatttagttcctcatgtaagaaaatactttgtttatgaaagttttctctgtggattgatttttcacacagctccgtttcttcggtttcctttggaatgtacatgtaagaagtatgatgtattccattttcaatatgttttatttaacataaaatctagattttcgaccaataaccttttcaagtaaaagaccagaacaagtcaatttagtcatttttcgaacatctaaaacttaaacttatgatgatgttacgactcaatctttttaaaagttcccctattacatcactagagcaatagtttttgtgtaactttagttcctaaaaggagcgagtctaataagtgcataaacaaggtatatactaacagaatttgggaaaaatagtgaaattaacaaaaaaggtgcacaagaacacaaacatagatag

SEQ ID NO: 38302 - DNA, 498 bp, Arabidopsis thaliana columbia
tgcataaatatgcaaaactagtttggatctggcctccccagatcggtttacataaaacaatctcgattttgtatgggcccagtaacctagggtttttaatcgggttaggccacatttattgaataacaatcgtaggggagttacaggcccgcttcattattaatgcgccttgtatagattatatgagtataacgacgtcgtactcattaaagtcgacgaaaagaacagtcagcgattcgacgttggtttatccacgtggctaatatttattggttacgatcgtcagagacttaatcctgattggttaagcattgcagtgtacacgtaacccgaccacgaggctcgagttttggaatcgtttccacgaaaacaagtagagagagtgattcgagtttccaatcataaaaatcagcgaagaagatcttcgttcttgttcattctgtgaggtttcattgttagaatcgatacgaatctcaggttggagtaatcttgggagag

SEQ ID NO: 38303 - DNA, 519 bp, Arabidopsis thaliana columbia
tgttggtttaaaattctcataatattctttgtgactaacaattaacaacaaatctcaaaattttaatgctctcatatcatttgttaaatggtttggaagcattaaaagtgttaacctgtgaaatgatagtaatgacaaaatgatttcgtgattgaaataaattgttaataaattgttttgtttattgacgtcacactccaatatttttatgtataaaatgtgaagcaaaaaatttcaaaaccactaattatttcagcaaatacataatttggtccaacactaaaccaacccttctgtctctatctcatttgttcttaaactttcatctattttcgtatctgaataattcttttcatcaaagattttagttttgaaccacatgggatcaagtttgtgctgttctcgcgatccagatagcaccagacgtagtacgatggggagcactagcgaccggagtggcaaaccggcgacgacaagtatctatcggacacaagcaccttttccgtgaaggagcaagag

SEQ ID NO: 38304 - DNA, 719 bp, Arabidopsis thaliana columbia
caagcgtatgagagaattgctaattttgtttccaagtttcaaacattaagatcaagaaactagcaacgatcagacaaaaagtatcccttttaaaattactagcgactggaaagtaactaaattttagggcttacccattatacataatcatacaagcgtcgcaatagaagacaggagcagccaaaaagagtaagacatagaaaacccaaaaccgactgaaacatattcacctacgaccacaaaaccattcgaatcgaactctagtacttacccgtcctctcttaaagagatcaagaccagtattgacgcacaactctgccgtgagatcatccgtcggtgaatttggagacggaggcgacgacgacggagaagaagaagaggaagcgtaaacaaacagatgggaatcccaattccggcgagaattgaaaagggtcgcgtctcctggtggcagccatggccttcgttgcttaactctcgagtaaaggttcgagatgcggcgggggaaatggcggtttagcgacggagctgtagccacagccattcaattttcttctacgcttacggaaaaaaaacaaaacttttatccgctttttatttcctctgttttatttcggaaataatatttaacttccaacttctttgaatattatctagaaacttatatttggtacgaattagacccaaagaaaaaaacattgttgacttcgtcatatccagca

SEQ ID NO: 38305 - DNA, 544 bp, Arabidopsis thaliana columbia
gttcaacatcaacatctttcttgatattttcttctttagttgtttctgtttgattctgtttgaatcgattctcccatctctagtgcctaataatttggccatggattcaagatccatgctattaccgcaacacttcaccatctatcagtatttatcggatatcccgaggaaactttatcacataatcaagttttccatataagaataagatcaccaaggatcgttacaacaaaaaactcaaatatatcataagatcaacttaatcatgaattattatcatttaaatcacaaattttcaaaatacattttaaagataatttcgtgcctttaaccctaaagtagttctaaacaatttcgctcacaacctgttcaaacaggaaatcaaaacatagacatatataacagtaagaaaaattataacaactcgaacttttaaaagttagaaagaaagaaatcaaaaagttttcacggtagcttctcatgggttctataaacaagaaggtaatgaaagataacgatagaagttttgaggtaaaaaaaaaga

SEQ ID NO: 38306 - DNA, 547 bp, Arabidopsis thaliana columbia
taatcggtcaaactacttgacagattaaaaccatgtgcgacttctcgtatagcttgtattttaaagttttgatctgatcttaatatgcgtttattggatcatataatataacatgtggtattttaatatcataaattttggtttcttttcctaaaaatacaacaaaatatctaaaactttttgggaaatctgttagaagatttttttttgaatcaattgtagtaaatcacttcttaaaatgaattttttaaataatataaaacataaaagagaagagaagaggaggttccatcaacttcacttacaatgagaaaagactatgcaatttgcacaatcatgactttaaccaatacacatttatcagaagaaaaagaatctatctttatctttaatctctttacaaattcttttttattgataaaatttcaaaaatgatgtgattcaaaaatacaaaaatgatttgattaaaacatcacttttcttcctatatgaacttgtaataataaacgaattcctggacttcataaaatgatttgatttcgtattt

SEQ ID NO: 38307 - DNA, 581 bp, Arabidopsis thaliana columbia
ggtaccgagctcaataatgtagtgatcttgtttaactcaagtctcatggttaaggagaccaaagctgatgagaacactggtaatttatgagttttttcagactacaagcactaagaaaacaagtgcaagtgtatagtttaaactcaaatagatttcaataaaagcgataaatgaatgagaaagtctcagtaaaatccattgaagtcaaagaaattacagcttctgccaaggggttctccctgtaaaacagggtctcagctccactgcacctcgtaagattggattagatcctcatcgacattcccaagaaataataactcagaagaaagacaaaatagcaatgaaaggctcggataagaatacagctttttcgatcaagaattatctgaagcagaactggcgtatcaagctgttacaattcatcatcccagccaatcaaaacacagaaacccatataaaaaaaaaacaaaactttggctcatattaagaaattcaaccatgtatttaccgtatctacttcattgaataatctcagaagcgcgggtaagtttataatcattgccacataaacaaacgttgat

SEQ ID NO: 38308 - DNA, 272 bp, Arabidopsis thaliana columbia
gcaaaagattaaaattcattcttctttcacaagtttagggttcctacgatccactcagcaacgaaaatggatcaagcccgacagagtccagaggagcggaggcccaataacgccaagattaaaattcattcttctttcacaagtttagggttgtaaattggcccttcctacgatccactcagcaattggagattgttttgtggttccagatgttggatctatactagtcttcttgattcatttttccaattgttgcttgctttttgattgac

SEQ ID NO: 38309 - DNA, 558 bp, Arabidopsis thaliana columbia
acgctcgtatttttcatgtagttctgaagaaaagagcatgaccatctcttatgatcaagattcaagattgctcaagatgagtgactaattagatttaatataagatttgaggaagaaaaactaattttgaaaacgttaggaaaaaaaaagaaagaagaagctaaaaaccaccggagatgatattaaaagttaatggtcaaaggacttaaatgactgtcggtgtctcccgccgacgccacaggcttccgtatattattattagcacaacagaaactgtgaaagagtgtggagagtacggaatttttttcttttcagaatatcgaattccaaaaacgtcctttgtcaacgttgaatattacacatctgcatccttagtgcacctgctcacacctgattttcggtggagggaacatccgcgtggcatgttgggataatctgtgtgtatgaactaaattcttaaaataaagagaatttgtaatagatgatgccacaaaagtttcaatatttttggttagtttggatacagtcagaagaattagaggagtaaaccaggaactg

SEQ ID NO: 38310 - DNA, 481 bp, Arabidopsis thaliana columbia
aaattcaatgattcaaagtttgaattcttttaccgaaagtaaaaatgcaaacaattgaccaattctttgaccaagtttattatagcttattattgattagtttgacagttacacatcatattttcatctctacttcatcatcataattcttagttcatccgcggtggcggtggcgacaaacgaataacacggtttattgtctgatcgtggcttgggtttgggtatgttttcggataacccatcatccgcggtggcggggcgacaaacgaataacacggtttgttgtctaaccgcggcttgggtttgggtatgctttcggataatccatcatccgtggtggcggtggcgacaaacgaataacacggtttattgtctgatcgtggcttgggtttgggtcttttttgggataatccatcatccgtggtggcggtggcgacaaacgaataacacggtttgttgtctgaccgcggcttgggtttgg

SEQ ID NO: 38311 - DNA, 560 bp, Arabidopsis thaliana columbia
ttaacttgtgttaaaaagtttggagatctcactttgattggagatcaagaccaaattgttagtgttgtgctaattgtaaagttgtaatgattatgtcaaatgtgatttggtaagagatgggtttgctagttgtgataaaatacataatttgggaaatagcaaattaaccaatcaaaatctgagtactacacttgaaatggtttttctttttttaattattatacttttgaaggtttaattttttttttttgttttgttatgtatctatacttttaatcgcgattcgtgaaattctaaaagaatagtataactaagaaagtgtaatctattcaaaataatttttaatttctaacgcttacaaataaaatatagtagattgttgaatcatctttataagaaacatgaaaacataagatgattgttgtgaataataatagacaaagaaatcaaatcaagcttttggaaaaggtgaatatatatttactgtaaagcttgattaataaaaccatgaaatacgactaagaaaggtgtcggacaaagagagtgtctttggtttttga

SEQ ID NO: 38312 - DNA, 567 bp, Arabidopsis thaliana columbia
aaaatttcaatccttaaaatctataagtatattttcaaatcattatttcaataacattagattttattaaaacttttaaaatatatgattgaataacattgaatttgttactttaacacaaatcactcaaatcttatctttgctttttaagagtaaataaattagctagcaccattgaaaaagcagttaaggtcatttgggttaggatacgaagtggtcttccgaaccctccaacatttagacaaaacagtgatgacattcatattattatggatgttgcgcattcaaaaatgcatataactttccatgacgcataaactagtttccaggtacgtatgacggtttgaagttttccaagtgagatttacgcataagggttttgggaggtgcacgtattgcgcgtcctatgcacatcagctttcctctacgtggtgtggagcgttaatatactttcatgtttgttggtttgagaatttctcataagagctatttgccgatattcaccggagcgtcttaatgataatgcaagaaatacatggtttacatgatagtaacggaagaatattt

SEQ ID NO: 38313 - DNA, 568 bp, Arabidopsis thaliana columbia
agcggctgctacacaacacacacaagcagggcaaatcggtcttctcgagctaataggagctgatgtgaaatacataccaagaaagattgatccatacagatcactttactaatctaatattggaaactattgtaggtatatataaagtttagtttgatgccttgagttgttacctcttgggatacgagtagcgttgctttgagacaagggaagaacaagtagcagaaacaagacaaagagcttcaagaagatggattttccactgtgaaacgacgccattgatgctttggtttgttatgctttgtgttcgtagaggattaagggtaatcatatttatatgcgtttttaaagatgacttttccacagaccattctaagattcaaagtctctatttctgagttgaatgagaattcaaaggttcctcaaacattgaccgatccactttaataataagtttaaaacgaagctacaaggcaaacaaaacatatagaatacttttttttttacctataacaatcaaagtagaatggcctgagtgacaagattcatacggagtctaatcttttga

SEQ ID NO: 38314 - DNA, 386 bp, Arabidopsis thaliana columbia
agaatcccccatgttttatctccatgtccttactgagaaattttcaaaagataacgaaaaaaagaaattatgcatacgttgaatggttttaagtataaaaaaaaaaaaacctgctatgatttgaatgtaattaatccatttcccaaccctgcgatatgacattttatcctaattcccggctttaccgtgttgtagctcaaaacttatcaccacataaatccataataatcggttatcgtaaccgttggtcagaccgatgctaacactagacataccacttagacctgtctaactgaacccattgccgatccgattttcccgacacccacccgccgatttgaccggttccccacccttgttgcttatctttgcggcttttccctggt

SEQ ID NO: 38315 - DNA, 1305 bp, Arabidopsis thaliana
ctctgataataacagggcaaaaagcgttgaagctgggtcgaatctaacatctccagcaaaagaactgcatgcaagttctcctaaaacgatggaggaagttgcagctgacgatcctgtttcagaaacaattgataacactgaacgttactgccggcattatctctcaaagcttgatgtatcggcaggacttgctgatgccgagctgcgtaaatgcattagtttattgataggcgaagagcatctagcaatggatgacgggactgatgtgtttgtaaatctcaaggtaaaattctctatcctcagacatagaaatcaatcattctatttgtgtgcaactttgagacccttttctcatatctctctataagctggtaattacaggaaggtggaaagagagtgaccaaaagcaacagtaattccctgaaggctctttcattgtctccatctcaaaacagttcagtgtttcaggtactgcactaagacaaggaaaataagattctggtagtagctcctggcaattcgagacttatgtcaatacaataacctgagcttcccacttgcagattgctatggatttctacaaggagcaaagatttgaaataaagggtcttccaaatgtcaaaaatcacgaggctcctcaagtgcctccttccaacttggttaaagttgaaaacaatgatgatctgaatgatgcaaggaatggaaatagttcaattgaggcaacagatatgaaaattgcggatgtatcagattcagacacatcccaaaaggaactgcaaaaagtgtcgtcaaatgctggtgccaaaatggagacagaaacacgagatgaaggatcttcgtctcccaatccagacaattcacctgaggctctaaatgctgtgtcgtcagatcacattgaaggttctgaggaagctatggcttcagatcacattgaaggttctgaggaagctgtggctttagaccacattgaaggtgatgagcaagaggctaagctagatgatggagctggtgtagaccaaacaatggagacagctcctgagcatgatggtgttccagaaggtgatgcagttaccttgacagtagcaccaccgactctcgaggctatggatgttgatgagcggaaagatttatctgaagatgagaacatggaagaagcagaagagaagaagggagctaatgatggtgaggaagctgaagctgatgatggtgatggagatggaagtgtagttgttggggatgtatctccgaaggtaaccgaaccattagttcatgaatctgatgagtcagtaataagtcggatacatc

SEQ ID NO: 38316 - DNA, 561 bp, Arabidopsis thaliana columbia
tgttttgtttttccagaggactaatcctgtcatggatttgttttacttctattttcttgtttagtcttaaagtttgtgttatcgcacactgttcttcttggaaacccgagaaatggttactgagattttatccgtgcgtacattaaaaccatttccaacttgcaagattcagtatggaactttcgagccatctcctgttaccatggagctgtgttccaatgttgttggattacatccacttgtgctgagaagacttgatgcgttcttatttgacaagcttcattatgattatggatatacgatttttgctagaacctaatagacaacgaattaggtgggttagtacgaaacagaacatttttcagggttgtttacacattttaatactcatgtacagatattttatttccaaggaagagaaatacaaaacgaaatagaccataatgatactatgaactccaaatactgatcaaatccaaattctagataaaatctcattgcagctaatagtagtaagattaaaagacaaagcaaaatatccaattgtcttgagaatagaaa

SEQ ID NO: 38317 - DNA, 587 bp, Arabidopsis thaliana columbia
gattcaaattttagtccaaaagtagagggttataagtttctcggtttgaataaattaatttagtgattttgatttagcgcttaaatttgattgtaaacacagttcactctattatatactattgtccaatattttgcatactgtaatccacttttaacctacaaaaatattgatataattagtccggtttactgctaattgaacaaccattcaaaatttgatttgttgtatagacaatgagttatgcctcatcagaaataatcacaacttaaaattattctagtatgatgaaatatgtgttctgttttgtaaatattatagatacaacctataaatagttatacaagttacaaccaatgagcataccgaataattcacttgactttaaaacaaacgtatcttgaattcaaagattaaagattggttgtaatagtatatatgcacgaagaaccaagaattgctcaatttttaattgatagtgacatttgaatagaacgaaaaagattgaacactaactaagcaatctaccaaaatattaaacctaccacataatatcaaatatcttaaattataaaatagccctatat

SEQ ID NO: 38318 - DNA, 390 bp, Arabidopsis thaliana columbia
aatcagcaatcaggcatgcataaacccatcttcgaattagcggctcggactggttttctactcccagctattatatatacagcatgcattaattgaatccataaatattagatccccatatgaacttccattatcttatctagccaatttttgtaacgtatagttgtgtttaattcatagcaagtcatagatttcactgttgaaaaaggctttctattgaaatgcataaggaaataaaaattacaatagcccagcccgactttagtgtttgtttggtcgtaaccaatagagaaagagcataccccaataacaattagaaacacacattgaaacatagatcttagggttgaacctagactgtaggtgcaggtagccgatggaatagtgaga

SEQ ID NO: 38319 - DNA, 524 bp, Arabidopsis thaliana columbia
ttccaactaccttttcggttatcttctccataatgtaacaatctaatttgagtgtgaatattgtaccatataggtgttataacgttactagttttgtgacgatggtcacggctttaataacatcataaatatccccgagattttgtgtgtgttcctctataagaattggtgatcatgtagcgagtactaatcagcttttgatcaaagttaatgttgttaatatgtgatggtttgtgtaatcaacgtttcaatattatgtacaattatttaaattattgtgtttcttctatactacatcgtcattcattaatttttttgacgatctatcatctaccaaccatccacgactataattgtatgtatatcaaatattgttctgatagtcaaaacattatgggctaattaagaagtttgaacaagagttaaagaaagcttaaaagggctttgatgaatgaactcagatgggctttatggccattaaagattttgttcttttttgagtcgtcgccccgagatcgtgggtg

SEQ ID NO: 38320 - DNA, 920 bp, Arabidopsis thaliana columbia
ttcgaaactttgtttggcgacatctcttctacgaaacacctaaaagataaatatgtaactaaaataatttaatttccaaaagagtgactaacatctgtttcttttttatttttgttatcaagagtgacgagtatttatactcgacttttcttttggtaaaccacacacacaaaatcttaaataagaagaatcttttaaatttttgtgttgagtgtgaaacaaaaaaatatgtgttacaaaattcttctacctctttgctatctctccggagagcttccacgaaattaccccggtggcagaagtgacggtggcaatagatgtggaagccaccgctggtcaccgtaacggtggtaacagtggcgatggaaagaaaaagtgtgtgtgttcaccgtcgaagcatccaagatcgttcaagtgtaggtatcatcaacatgaatatcaatggcttccttcatcttctttttcatcccttcacaaataacatatcatcaattcatcatgtaaacaacaaatatagttatatattattattattcatggttattttgattcgttaagtatttcaatcaaagtagaaattgtgttgtggttcttcgtattgctcatcaactacattagctcatatctatgttttatcaaattcccctgttgggaaatctttatttgcagggaatgaaagcttggttggtgtttgtggacctcgtgtcgcatcttgtttggacatgctgttttctaaaacacttgaagttcccttgcgagacatttctgtcccttatcgttctagcacccatacattggtagcagaagatattgtagtgaagactgccttatcattaaagaacgccctcttgttggcgtggaatgaagactctttggttttgcaactgttcttagactcccagttcattgtaatgactgca

SEQ ID NO: 38321 - DNA, 1038 bp, Arabidopsis thaliana columbia
ggtacccgtaattttattaaaatgatgattatatttagatgtggtcatgtggatgaaccaccaccagtgcaccaaaaacagaaaacgacgcctaccaacttgatgggcttttaatagatatagttagttaggcccagtttagtgttaatacgataccgtttgacgtagtttaacggccaccgacacgaacgaatccaaaacggcaccgtgtcaatcgcatccaaagctctgatgtaagaaactctacacttgttcgagtttcggagaaaagaaacgatgaggaagagatgaaacgcggtggaacaagacggaagcggttgttcgggaagacgattctcttatcatctgtggttttcttcatcggttttggtttgttgttgctcacgctccgttccgtagatcctaattcgtctttcatcgacgacgacgatgacgagtccgaatccgaggaggcttcgagatggagcaactcttcttcgattggagaggctatggtcgatggagctaaactctgcgcgacggtagaagaaatgggaagcgaattcgatggtggtttcgtagatcaaagtctcagagttcgagatgttatccatcgccattttcaaatcaatggtgagatattttgtttttgaatcgactcttatataagcggaggtgtttacgatgaatcaatgtcgatgtggttattgtggtttataggagcttcaggatccgtgagctgcctccggagcaattttgtagacatggttatgttctagggaaaacagcagaagctggatttggaaacgaaatgtataagatcttaacatcagcagcattgagcataatgttaaacagatccttgatcattggccagaccaggcatatattggttctttctcaatcctttttctctatattaactgaactgttactatgcttgttgtagtttgtgttatttgtcttgtttatatttctttctttctctgggtatcctcagggggaagtatccttttggtgattacattgcttactcaaatgctacgtttacaatgagtg

SEQ ID NO: 38322 - DNA, 708 bp, Arabidopsis thaliana columbia
tcttacagtgtagtttgactatagtaccaattacaacttgttctatgaaacgagtacaaaatttcttcatctgaaaaggaaatgcatgtgttaagaaaattagagacgtgaaagtgaaaggaaacaaaatgtttcgtggcatcgtgaaagatataaatatatatcgtattttttaaaaatcagattattacttcttgtaattagcttatcagattcaaaattcaaaatctcaatagtaataatcttttgaaagaaaataatgaaaaatcaactgtcaacaaaagttaatcaactgtccaagtgtcccgttgtggacaaatcacgtttacttcccaccaaggattttcaactttattatgatcgcgtggactttccagcgcacgttagatctcctccctcgccaaaccaaaataataattaaatagtacgaattactaaaaaccaaaaaattaaaattaataaaaaaatgaaaataatttaaaagtattgcgaacgataattactttcacctctctctctctctctctgtctgccaccaacagccgaggacgacgaccgtatcttccaccacaaactgcttccgtctgagacgacttcgatctactccggctaattctgttacttgattctgctctgaattttaacaagcagaatttctcggatagcaggaagaacgggattaattagctcatcgcttggttctctacg

SEQ ID NO: 38323 - DNA, 849 bp, Arabidopsis thaliana columbia
ccattatatctaccatcatgcctatggtgaaccaaatgaccatttgttccagcattcaaagggacttgtctataaggatcatctaaagggttactatgaattccaaaccgggggatttcacgaaactcttctaacccattaaagtttccgacatacctgtttcgttttcctctgggatcttcgtatctctcttcctctctccagttacccgtttcttctagagctctgtagcggtttcccaaacaaagtcttttggtgtgatgttcttcaggaggaccgctgaaaccgtttctgtagttattgtgaagttgttgtgagtaaacgttgcgcgactgcacagaaggacgagggtccagaactgcttcttggggaaacgacctatgtctgaaatgcgtttcagcgatactgccactgaatggcggcagaagaggacgaggctccacaagtacttgttggtcaaacaacctatctctgaaatgagttccaccaatacttccattgactggccgcagaggaggaagaggctgcaacacagcttgttggcgaaacgactcatgtctgaaatgtgtgccagcgatattgccattaagtggcagcacaggaggacgaggctccacaactgcttgttgcgcaaacaccttctgtttgcgatgtgttccagcaattttgccattgagtcgcggcacaggaggagaaggctgcaccacagcttgttggccagacaccttgtgtattccagcggtctttccattaagtggcgccacaggaggaatctgcacaacagatcctttgccaaacaacctatgtctgagatctgttccagcaacttgtcattgaggaatcaaagat

SEQ ID NO: 38324 - DNA, 536 bp, Arabidopsis thaliana columbia
ataaatacctatttacacacttttaaatccatttcttagaatcttttatcggccgtacacatgatcatcatcttcaaactcggttactccgagcatcgcaagatcaagatgacatttcatctcggatttggtttgttgcaattgtgtataagagtcaatcatacccgaaatatttgtagttttcctgcttgaatgtgtttctggctctacaccttcttcgcctttcaagattgagacaatctcttccataccgggtcttcgggactcctcattgatcacacacgccgctgcagcacggatcatccgctccatttgaaccgagttttttcttgtgcattttagccttggatcaagcagctccactatagcttctatccctctatccaacaacggtttcgcctatagaaagaatacatataaatctttttccaaaacaatcataaatgtattgacacaaactttaggatatggtcacattatcattcaagttgtaaaattagatgacatcccaaacaaccagattttcttgaccagat

SEQ ID NO: 38325 - DNA, 435 bp, Arabidopsis thaliana columbia
ccgagttaaaaagaaaaatcggaaattctttaaaacgtttctcgaccacaattaaaatcataataaaaccttaaatcctagtttaaatgtatgttatgaataaatttcaaccacatgagttagtttattatcgttaatttccctcgttttaatcaaaggtgcattggatagtacgtgattgttttattcaccacgtgattgcttttttctgtgcttgacttccgaggctaccgtacgaaccatctttagacaaatatcgacagaagaaaaagaaaaaaagaaaatggagaaaaaaacaatttataatacggcatcgctactatccaaaggcaaattgctaaaagaaagatagcttatcaaccaccacgtagttgattcttcggtcgaccacatgacgtgatctgtcaagccgctgatcaccaccagtcgtaatgg

SEQ ID NO: 38326 - DNA, 505 bp, Arabidopsis thaliana columbia
tcccctaaaataatatttatttgtctgcgtccttctaaagatggcttcaaaattcaaatagaagaaaaatccaatgcaagtaggtgtgctatctagtcctacacacattttaaggaatttataaatgttagtcatacgcattattattgttccagggtacctccatgcaacagttgcgttgtctatctaataaattgagatcatataagttaaaatattgtgtcagaatattttgaaaatcacgttgaagctttatggttatctttttaatataatcgtgttagtggagtacagtttgtaaagcaaaggtgattctcttgattaaataaacatctattagaaagtttgataggcttgaatcactgatacagaagcttacatcctctttttgtccattttttctccagcttgcgaggttatgattcatcatcagatccagactctctgattcatcatctgcaatggctagttggttgcttcagatcctgatcatctcttctcttca

SEQ ID NO: 38327 - DNA, 873 bp, Arabidopsis thaliana
actctagaagatatggaatttgaaatctcctgctctttctgagggttagatacagtgatcttgatgtaatcagagcttgaagaagaaggagatctcgatagtgaatctgagaattgactatgaaggctattatcctcggtaccgttaatctcgctatctgagttctcatcaaagggactgaagataacatctgcatacgacggaggctcgatgtaggagttatcgctgctgatcggcttagagctgaagctgctgcggaaatcttcgtaggaggatggcgcaaggagtggatcagaatcagctggaatcataacggtcggtggcggcgagagcgggtcacggacgttggagagtgttgacatggcgctacggtaaccagagttcgatgtatcaccgttgacatcgcttatcttcagaggatggtcaccaccatctactcctaggtcgagattctccatatcatccctttgcgcattgagattagtttcttcgaatccatcggcattctctgagcccatcatttcgacttctctggagtaacgacgaactaagctaattgaaattaacagaaaattagggtttgatgatttgggaacaaacggagatcccctgaaatgtgacgctgagcgacggtgtggctatcgagttacaagaaaccggagtgactaaaatgcgcaggtggggactatgggagcaggagactaacgtgcacaccgtggcgggttaggggtggcacgtgataatggcttaaagtctcgtcaattgacaaatctgccaatgcgtacatgtgatgtgaagaatctgacaactttcaggtaaagtatagtcgccgatgggcttgtttagcccattaggagagccaatattaattat

SEQ ID NO: 38328 - DNA, 597 bp, Arabidopsis thaliana columbia
  unsure (1)..(597): unsure at all n locations
nnnnnnnnnnnnnnnnnnnncctcaaataaaaaaattcaattttttgatgaatcactcgatcgcaagatgagagtaaaagctcgggagtgcgatctagtggttttgggacaacatctttctcaactacaatgtcaaactacttgatcgcaacctggaagtagtgtgatcgagtggtctccttgtggaattgcccaaatcactctatcgcaaccccggagaacacatgagcgtcatgctccacaacctcctgggttgcgatcgagcacaatgacgaggagatggcagagcacatcaagaaccggtcgtgcctgctgagtacactcaagcagatatggatgactacatctccaggacattttactgaggtaacacaccacaaccatttgtaaataccgcgtttgtttttgtttctgtgtttatcttgaattctttcacaaattttaattacacaagagacaatgtaatttaagtttgggggagggttcaaacgtatttgacttgttttttgcgaatatcatttgagtcgtcatataatctaagcatagaaaaacaggaaaaaattgaattttttgaaaatgaattcacaagaaaaaaaa

SEQ ID NO: 38329 - DNA, 557 bp, Arabidopsis thaliana columbia
ggctcatgagacgagtgccttgcgggacttgcggaacggtgtggtccctctgttaataggtggatttccttttgttgggcaatgtcctggcagctggatggcatgtcttcaggcgggttgtcattgaagtcatgtcgggcattttcacttctccttgcgattgagtggtttgggcaattccactaggagatcactcaatcacaccacttccatgttacgatcgagtagtttgacattgtctttgagaaagatgttgtccaaaaactactagatcgcactcccgagcttttactcccatcttgcgatcaagtgattcatcaaaaaaaattgtaattttttatttgaacactcggttgcatccctgatgttgctctagctgttattcatttcctgagaatcaaaaccaaaaccaaaacaaatcaaaagtaacaaaataaaataaaataaaaactatatacagggatagacgtgggacttcccccaagtgagcttgttttaagtctctagcttgactcgtcacactcattaggctcaaggagggtgatagagtagaattg

SEQ ID NO: 38330 - DNA, 553 bp, Arabidopsis thaliana columbia
ctcaacaataccttcagattaacgaacgtgctcgtgatgctaccaaagttttgcaatatcactaaaggttcttctgttcatgtattaagtattaactttggcttttgtagtgtcattttttgttgttgtttagtaaagtaactatcttattttaatttattctaggttacaatttgatatttgttacgttttatgctcgaatgacaacacaaagatcctcacaaattctcaatcactcaacaatcgaaactcaaatcagctcaagaaagagatcgaaacagagaacgaaagataacaacacaagagtttgtttacccagttcaacaagatcgatatgatcaagtctacgtctggggccgaatcagttcggcaatccactaaatcagaacgagaattacagagcaagagcagagctcaacaattggagtctcagagctcaaagtttctttttttttttacaagtatgaaaacggataatgaagaagaagagattacagggcttttatacctaagtccaaacataacagaagaccctctctcgcaaaaagaaggt

SEQ ID NO: 38331 - DNA, 740 bp, Arabidopsis thaliana columbia
tgccttatttgaaatgcttttggcctagacttctcaatatggcttttgttgtttcagaatgaccatcaggctgttgacattcttctagcggagattgatgtatatgaactatttgctttcaagcactgcaagggaaggaaggtgaagcttgctctttgtgaaggtgcttatattaacgctgctttattttcatgtaccctctttgtaaattctttttccttggtctcaaagaaggattctgtacagctcccgcgtcattttcttgagttactctttcgagattttgtttgtctttcctcattttgtcttcgctttacgtgtccaagaacttgatgaaagaatgcgggatttaaagaccgagctccagtcatttgacggagaggaatatgatgagactcataagagaaaagccatggatgcactaagacgaatggagagctggaacttgtttagtgatgaacgtgaggtattttcttggtcctactccaggctttttgtcttctgctgctatcttccttgctggttgaaaatgtgacacattgcatcgtgatgtcgattgtacaggagttccaaaattacacagttggacgcgatactttccttgcacatttaggtgctactctctggggatccatgagacatataatatccccatcagttgctgatggtgcattgcatcaatatgagaagatctctcatcagcttgtcttcatcacccaagaggtatgtactcgtcaaat

SEQ ID NO: 38332 - DNA, 640 bp, Arabidopsis thaliana columbia
aatcagatgtcacaatggcagagtacctaaagacactgcgactctttactgtcaatagatttgttcgactttttataatgcatatttttggttggattcaccagcgtgtgatgtttgttttttctaattacttgcaagcgatgtgtaaattagattaattcaatccatgagtttggaacaatttgtttggccttctatcattaactcttgttctacaaagccgtttgttttgaaatctttattcaagaaattcaaggacacacgtttattcataaatttagataatatttcactaaataagttgaaattgacccgaccaagcaaaataaattcgttacaccaaaacacgccaccaaaaaccgatgaagtctggtaagagaacactcgtaattaatttactctgatggtagagacttgcatgcgtgtcaaattttgcgaacaacacacgcttacatgtatttaatgataagagagagattcactatactcgtcaatattgggcttaaagcctatataaagtcttaacgggccagactaatttagtaaaaccatctcctacagtctagtctaaccgaaccgaaataagttgccaaatccaacaaaatcaaatttgtccaaaccgatctgtattgaacttggt

SEQ ID NO: 38333 - DNA, 369 bp, Arabidopsis thaliana columbia
ataagctgttgacaataatgtccatgaggcgactaacctgccatttgtttcaaacattagtgacgaggacacacacaaaattgatcacaaaacaagaaatcatctaaacacacagatcgtacgtacttcagcttgatactcgaatttctcagccggtggaggagcttgtgaggaagaatctgatgctgctgcactggattcgttccggtatcccataaaccaattggttttcatgttcaattgagcaaatgacccactattcttagattgtccattggttaaagatgagtaccatctcgattcagtgtcacttctcttgacatcctaaaaggggggaaaatagtgacactgtaagtaatccaatcaatt

SEQ ID NO: 38334 - DNA, 590 bp, Arabidopsis thaliana columbia
gatggcaatggaggtagtcccattgttggaataggcagatttgggatttgaggaagaggttgttgttggagaaggcggcgtgaggctgagcaagtgttgatcatcatagaggaagagaggcacactagaaaagcaatgcggaagagcttgtatgatgccattttgctttggttgtgaatctctaattatggttaagcctttctaattgcttctcttgtattgcttgctttgtgttgatgagaaattcaaagatatgcgattgagtttatatagcggcaagagtctctatggataacaaagaccttttattcaaatatcatatatggtttggttaggtgtactttatggttggcttgagctattgttagttcaacttaatgtgtgtttaatagattattttgacaattcaaggatttttattgaagttagttcaacaatcaaaactatctaactctaatacacatgttaagtctataaccaaacttttaaatgtcgattttaagcttataaataccaattaccaccagtaagtatattataaaatctgatgtaacaacataaattttgtgtaaagctatgaaatatgaaat

SEQ ID NO: 38335 - DNA, 313 bp, Arabidopsis thaliana columbia
tataaagtctttatgtaatttggttagttccaatcttacgaggattatatatcttgtgaaacaaaggtaagtgggaaataaaacttgccaaaaacaaacatcatccgttcaaacagaaaggaacgatatagggaatgaaaatcagcacactctaaaacaacagcactcagactgtctacactaagaccattaactaaaaaccagtactcagaaaattgagtttaaaagaccaaaaaatagaataacacctagataaaaagaacaaaaatcctaaaaaaccatcttcgagagtctgaagaaaacttcttgcaag

SEQ ID NO: 38336 - DNA, 273 bp, Arabidopsis thaliana columbia
tcccctatccgccaatctctgaagccagtgatagtacctttccaccacaaaagggaagaaaatccaagtcaaaaagtaacttggatgccaaaaatagtcatgaaacagaaagagccgatattgcaaaatattcacaagacacatacagaaaaaagaggctgtaaatggtattcatggaaacagatcgcaccttttaaacacttgcttctctgtcccatatacacgaacggttctcctcaaagagtatgtctcctgagcgacctagaagatcac

SEQ ID NO: 38337 - DNA, 208 bp, Arabidopsis thaliana columbia
gattcctagtaaatgacggatttgtctctttataattgacagcaagtccagacctgttattgcttgagttgactatgtgaactctgattgcgtcttgattactagcatcacacccatatggattgacaacctaacatactaggacgacatgatagtgttttaggcttcattgactaaatacctatcattagtggttaacatgaataag

SEQ ID NO: 38338 - DNA, 434 bp, Arabidopsis thaliana columbia
gaacgcatggattttctcttgacgagaaaaaaaaatgttgaaatgttttgaagagagagagagagggagggagggagagagagaaggatcgagagatctccgaggagttattggttaaagatcaacagaccaaaaagaagaagaggaagagcactaagttttgttgttgttttaacagaggataaaaaaatttagaaaagaaagaaatattttcatagttgtaattaacagataattttataattagattgttgattggtaatggaggcaacgtagagctattatcaaagggaccctcctttgggaaacaagttgtcaagaggatttccgggtcgaatggaaggagacatgaccacaccaatttcttattgtactaataaacatactctaatgaatctaagatggtataaagtattattagagaaattcataga

SEQ ID NO: 38339 - DNA, 1221 bp, Arabidopsis thaliana columbia
  unsure (1)..(1221): unsure at all n locations
ggaagtggtcaagttaaagtatggaagtggtctactgagtcgacccctattttgtcttgaggcgcaaaacagagccctagttcttcacctttgtcaaatctcttcttctcggagtgtcaatagttcttgtttgttttgttgttcgagagattgtaagtagcatcaaggcatctgtctctctggctccattaagtctctgcagttaagacagacggccgcagagaagattatggaccactgattgtatctactattatattgatttgatgtcagagcagagacatggtctgatcagttccagagacgcgtatggatctgcccacgttggttgcagacttactgttcttacttcttaggcataagaaacttttgtccctctttggtcaacattcttgtcatgtaatttatggcatagatctttgtagtcatgtttcagtgtaataaaagagatgatttatcataaagagaatttcttactgtattcaaattatggtcagggtcgaatgttgaagagaatgtccacaatgatggtattaacagagtttccgaagcatcttattaaccttgatagcatcacttccacgaccacgagcactgggattttccaacttcctctagagagaaactgagcctgtgggtattgagcggtttcacatcgatcttctggcttgccacagcagtacgaggcacagatgccaaatgttcttgtagctgctaggtacagagccgaacgggcattgaaaggttggccttttcatttgtgtgaccaaagattgttgaatgtttaacacttttactcaagatgagacatggggatagtttacattatttatatagttctgctggaaaattaacaacaagcccgtctagctcagttggtagagcgcaaggctcttaaccttctggtcgtgggttcgagccccacggtgggcgtgaaattacattttatttttgtaccatgatgtcagtaagcccattctctaatgaatatgaaactaaacggagttattttgtcaaaatggaaattagagcatgcgacatgatcaaaagtatttctaattagggtttgtgttacgtatggatttcttatttttgcgttaaaggtgacgtgtgggactacgtcactccacccgaaggcgcntcgacgggttaatgtgaaggccattatgaatttatgatggttatgatttgtgaccacccactaatgtacattatagtaat

SEQ ID NO: 38340 - DNA, 530 bp, Arabidopsis thaliana columbia
aacgtccaaacagagaaatcataacagtataaatacattgagtcatggaggagagtctaatactaatctatatataatcaattcatgcaaataaaaatggaaaaagccaccatgcatgaaacaatttgaaaaaagaatatactcagagacgcttcttttgataataatttcaaaagaaaacaaaataaaaactagggacgctgagaataaaaacgataaacaatgacttttagaaaattaaaagactaaatgggggaacaagtaagtaggaacaagaaatgggaagactaaatttagagatctagttagggacatggacacgaacatattttctcaataagagagaatgaaagatagaatagagaatgaaagatatataaatatgaggataaattgtcatttgatattataaatgtggtataaataaaaaaagtgaaggcaaatgtggtagaaatggaaataggtccctaaaatgtggcatttttgttaatttttccgttgaagttggaactagcaacaaataaaaaaag

SEQ ID NO: 38341 - DNA, 738 bp, Arabidopsis thaliana columbia
cagtgtgctgatgtgtattatttggtgcttattataaagaggaaaaacaaagaaaagctatatattctgtgtctccctatctggtgatattttttttggttctgcattgtgttccaaagtggaaataaaaatcgataaacgatgtcgtattgtagtactttccttttctttgtatgaatttgttaagattggtttataaatgggattataataagtatctttaaaaaagagtgtaattagtatctttaaaatttgcagttagtattgtggaaaacaatcatgatataattgacacgatagaccaccgaaataaaggaatcaattagattagattattgaactaaaccgagttttgtccattctccaatcaatcgcaatcttcgttatctataatcaattaagtttacgcgttgattaatctttttgcaaaggaataggagaacctagagagaccccctccaaggggctacatagtgggaaaataatgataccctaaccttctctaaacgctaaagcaaagcacccccacaaaaccaaccaaaggcaacattatttttccttcttttaaatttcgtttctgttgcctatatttcaaagaaacatccaacataaagacaaaaaagatcacagaataagaccgaagagtcgaagactgatctactttgctcacatgcttcaaaaccaacataaaacgaccataaacctagagagcagaaacattggaacaagatattttct

SEQ ID NO: 38342 - DNA, 540 bp, Arabidopsis thaliana columbia
gttcacaatgcctctacttctacctcttccgagacatccttctgctttcctagtttagtgagatacacatcctgttccagctttattatgttttcatctttcacgtttatctttcgtttagtctaatgtgtttggttattcgtaatctctactaattctaatccgagtttaatcacacgtaattaagactccttgtaattattcacatgttagtaaaacccattttaccagtttctgatacaactccttctcttacatagtagccaaaagataataaaaaattggatagttctatctgtatacaattacgttgaatagagatttgtatcataaaatatattaataattggcgcaatcaagctttactttgattcaaatcaacaaaaatacctttaatcattacatatagtaatgactatacaaaaaataatctaaaaaaacaactacaattactaaaaatggattataactacttttcatgttaaaacatcatctccatatggataagagtttatggatagttaaacgggattgcacaga

SEQ ID NO: 38343 - DNA, 1429 bp, Arabidopsis thaliana columbia
gactttttcggttatttgacaattaattgcactatttaaaccggttttataatggattttcccggtagttggtaattcaatattgtatttgtcaggaagagattgattggtgcttgatttgttgcaacatgactacatgagcatgatgtttcacattcttaactaatagaaatggatttagactatttatggggacgaagtggtacatacaatgtgttggtgacgaccaataatcataattaactaatagagcattaaaaaaacaaagaatcaaccgtcttaattaagcaaagcaaagcaaagctgctatagacaatgagagattcagctaattatgtgatggcaatatgacaaaacagtggctgcaatagctaatgttgtcatccaataggactgagaaaaggtgttgccaatggaggaacttcggtctgagtttgtagatcctcctctagaacctgcaagaacacaaaatattcatgaaacatcttttgattgaaaaaaaaagaaagaactaaggtttgagtgtgtacgagtcaagcaagcaatgggattgacatgttctccacatcgagcaggcaacatttgagcatcattgacatcgatgccagctcgctcggcttgagaactccaacggttactaatcatacggcacaagcactctggattgttccttatcactgatttgagaggattacaacaaacttgaggtacttccttggtcccattcaggtaatttaggcatggagcaagttggtttagacacgaaacgctctgcccatttatccgcatccccgagctagctgcaactagaagaagtacaacgtaaaaagagaaaaacttcatccccatcatcatatcaccttagtttactattttgagtgttactaaaacacttttgtacttgtttaatttttatgtttggtgaccagcttttaagataggtagacatggttcaccagtcaaacctactaccaccgtttgaccatcctcaacaggtaagttaccagaagaacccatcaaatatgaaataattttacattacgtaagcaaataccaaaaccacagaagtagaataacaaattgttattccatcctagaatatagttctcgttcaaccataagaaaaacacacagaggtttgggctatacaaagtatgtcatgccaactaataacccatcgaataatgggcttttgatgtccaaggcccatatatattaaatatgtatttgaaagtaacacaagagcagtttcttgttttcattaatcaagatacaaatgataacttgttattgaaaaactaatgacaaacagtcactttgatcacataggcagagatcaaggacggcgaaacatagataaaccaaaaaagaagaagaaggaaaaggtcaaaatgaggaaggtattaaatatggacgatgagaaagaatt

SEQ ID NO: 38344 - DNA, 784 bp, Arabidopsis thaliana columbia
actttcttatagaacaccaaatttaattgagtattatagcaaatcacaatattgttcattaagatagaacagattctgatgtctaaagctaacaagaacaaacacaacaagaccaagtgttccatattagacaactccaccaagcaaagctaacattgccatgaagtaaaagagcaaaatcatcattggtgagaagagctgctgcaacttttgatatcccatgaaatatgcttgtcttcttcctcgtagaaagaaataaaaccttcataaacttgagcaaatgaaagaggaagcaacaaggctaggtgtctcttgaataaccaatgatcactatcagctcccccttgtcttggaacacatgtcatgtcatttcttgtaaaagacagtgtagtgtttgtgctatcaacaaagagaagaagaactggaattggaacacatctctgagcagcaacatgacacaagcatcacacaatacatcactcaaaattgtgtggtgtattggactgaaccacgctctctgcgacagaaaccatcaaaaccaccaagctctcgagcaacaacatcatcactaacgaagacaattccagaatctgaaattatcattcattccagaagctaaattcatactgagaaagggccagtatccatgaacatataacatcaaacatgaaccagagagtatgaatgactttctggtggtcgcgtaagagatccacgatgtaccattatccaaatctgttggtttgcagaacatgagctgcatgacatcactgagagatgtaca

SEQ ID NO: 38345 - DNA, 551 bp, Arabidopsis thaliana columbia
ttcctccaacttatttctgttcctcactttgtagtgtattctgtaacaagtttcagattctaactctgttcctgcagattgtatcttatccgttgtttttgtggaaactctttttgttaggattagtaattaataagaaactaggtcatttcatcaagtaaattagtatcttgagtagattttgacattttgtacctccctccagtgttcttatagaaagaacatgtgtgtggtttttatattgtcttgtcattgatttgatgcatttcgaatcttgtcatgcttttgaattccacctgaatcctttaatgcatcgttcacaccatatggttcttagaagtttgacactcccactctcaagtgtcatctagtaagaatcacatcgtcgcattgtactcatatctaactcgattccttatattcccaggtacttgagattgaagtatataaacaggcaagcaatggccaagatcgtcgttccttgcctaaagctctaaaaaaatgcagtcaagagataagtcgctaacgtatgtgtccgtgaggcattatta

SEQ ID NO: 38346 - DNA, 545 bp, Arabidopsis thaliana columbia
gaagcagcttcaaagtatatagagtttgggacatcgtctctggagaagtataagcttgcatatgagatcatgcgagagggtgggaagaaactgtgttggcagagatgagaaaaccaagtaaggtcagttgtcctgattctctttgtttctcgagtttataatctaagatgtctaaatcttcaaaatctgtttggtagcgaggttgttttctgttcttgtccttcatagattctcatttgggctgtgttggttgcctcatcggcggcagactctccctctgttctgcctccttatgaataacattgtttcatttatgtctgagctcttggatcattttgccattagattcagtttatggtttagcttttaatgacgctggtgcttcatgtcgtaaaaatgattgatccagtttcttgtaacagagatggtattatgaattgaagtgaaacaacgtcatttggtatagactagagactatctcctttgtaagactatctcctttgtctgggaaagtagaatattttctagcaaagaaatctgacata

SEQ ID NO: 38347 - DNA, 535 bp, Arabidopsis thaliana columbia
tgattgaaatagatcgagctcaggtgtttctaagaagatatttcgttaattagtgagtatgcttagacccttacattatctttatgatactagccgataatttatctgaagtccgcatatcagcaacgtgtcacgtactatctacgaatccatctaaagccaaatactttcattaacttcattttgtcgtttcctcagaggtgatgttaccctaacaagatttgtatttgagtggaacaaatatatatatgttagatctaattgtgtggttcgtaatgaggaatgatgtatcaatgaggaatttcgtacatgtgtactttgtgtaagatcccaaaaagagagatcgtttccaattttgaaacaaaagctgttttatgactaagaaaagctctatattgtcaaaagaattactagtaggttattttcatatttgtttcctttaatactattacagagcagtaaatgtcatgtgaattatgtagtctgacaaattgtgtggatgaattaagtagctaaatgttagttgaaaatggtt

SEQ ID NO: 38348 - DNA, 718 bp, Arabidopsis thaliana columbia
tttaaccagaaaatgatggtgttttgtaacaatgaaattctacataacttaaaaccattgaataaacctcactaaaaataagcaaagaaaaaccctatcatggtttcgtaaacgcatcatgcgagaacttcattaccgcttgaaccacaaaacagaggaagacagtgaagaacaaaaaccattaattcgttgcatctcttcgatagtcgattcttttctcttgtaaaatctaactaaaggttagatttgtgaattgttaaatctaagtgtctgctcagcataatcgtaatccttataccccataaccatgaaactaaatcagcaaaataagttaacgaaagagaaagtcactgacatacaagtttcgttatagcaagttattctttaattgtctatcacgcgatcatggcttgtaggtatcaactttctgtaattttccattaacttttacatatttctttgaaaaaagtaaaaaggacaagaaaagcacgaggaaaacgatgattgtgggtgtgtggtctttaagggacaaccaaactcgagtgttgacgaatctaagccccatcttccgcaaacttagaccccgtactagatatttagataattattagttctaataaacaacctaatactctacatttatccatttcattctcctagtttctttattcactctatctacagtgtacatttacataaacccagtgtatagtcagaa

SEQ ID NO: 38349 - DNA, 221 bp, Arabidopsis thaliana columbia
aacccggtttatacaactacaaaaaaaaaaaaaaaaaaactgagtcaagggaaatgtaactgatttgtgtttgcttatgtttctgcaattccaaaactatattgaaacatattgaagaagagaactatcactgaaggaggactttcgaagttggaacatttaacggccacgaactttgactttaagcatccacggatcagttccttgtcgcaaaggaagtg

SEQ ID NO: 38350 - DNA, 762 bp, Arabidopsis thaliana columbia
tcttacaggaagaccaaagatgacgactttcttcccctgcaaccaatcaatatccacaaacgttttgtcagaaattgaatccccctctgaattgaaattgtcagaaaagagagattcgaaccttgaagatatctgacaatggcgtggtggagaatttggaggaaacaccttcgtcccagctgcgagctttctggagagaaacgccaggcgccgccgaggttatgtcagtgccttccgcgagctttgagaaacccctcgatgaaactccgatccgggcactatttgccgccgatcttagtgccgataaatttcttagctttagaattgacatcgccatcgctgaaaataagattgagaccgtttcttggttccttcgattactgtatagtgtcgtttatggcacttctcaaagacctttctaaagagacttaatcgttgccgttttgtaacaaacaaatcagactgcacgttgtttaaaagcctcaagaacagcacacactcaaattttggttttgaagtttttacttctttcaaatacatcatttacatttcatcttgtgaaaaacattcacttcttgaccaagtaaaaaatacattcaaatgagttctttgatttctctataaaaaaaaagaaaaaacagagcttgttcaaagacctggaacatgaatcttgacgagtttctcaaaactatcagcaatgtcgatattctgaattggtatagtcgactagctggcgtggtaccggcttgagagaggtttgag

SEQ ID NO: 38351 - DNA, 868 bp, Arabidopsis thaliana
cccattaatcctccgcctcatcagaatcctacccctaaccctaatttgggacagcagacaccgaattttcaacagcagcagcagcagaatgtatcgagtcagcagatgatgcagcaacaacaacaacagcagcagcagcagaaattgatgaggccattgaatcacatcgagcttcaatgcgcttatcaggacgcttggcgtgtttgtcaccccaattttaaacaacccttctcttctctcgaagatgcttgcgagaggtttgttgtatcaaatgcaaattatcaaactttatatacttttgatgaaattcatcaaagccgcagcaattagtatagttttctagtctcaatttaatgatatcaaacattgatctatctattaataattgaatttaatgatctatcacgtttttttgggttttgagttgttatctccttaggagtcgccctgaggctttctgttgtcctatttggtagtagaattagaatgatactatatgttagccttttggtcaactatagattgtgactatagattaaaaacgggatctttgtctactggaagcatgagtttcttgaataggtatctttctgaaaaaggtagatgctgcatctgttatattttccctgtctataagtataagagatcctgttcttctctctgagtttgatgtggcatctctgcatggtcctcatttctttgagatcaatttggaattacgtcctgtcttttctcgtaaaagctataaatacctccttttgagtgttgagaaacattactgagttccgtggatattactaattattcttgctatttttgttacctgcatcttccatatctgtgtgaaaaggtctattgacgtatatta

SEQ ID NO: 38352 - DNA, 629 bp, Arabidopsis thaliana columbia
ctttttcatcaactggatatcctcctgttgatttagataggcatacgaaacattagttataaaattaagtaattaacatgacttcgtagagcccatgaatctaacgattcactatgaaaattctaatcgataaaacttaataaaataaataactataaaaactgaaccttatgatgcactttatcctaagtgttatatagttaccaacttttacaagattaacttagttctttttttatttaactattcatcttgtgttgttccaaattattctttatacagttttgataaaatgttttcccgaaattaattatctggactacttcaatcatcttttagttgttcgaactacacgtgagaaaatgatactatcaatgatcaaacgtttaaaaagagaatctagaagctaataccttgtagcgatggtagaaatcgacggcctcgtcagcattgtgattcttaactctatctgcagtttaaatatagtacaaaatgttatttattatcacgagatatctggttcgctacacagttacttactataatactggtcgttaacaactctttataatactcttggaatcaaattcataataacacacgagtgatgaatgcatgtttaaaaaaac

SEQ ID NO: 38353 - DNA, 588 bp, Arabidopsis thaliana columbia
tagtaacggtcgcagtgtgctctaaagaggcataaggaagggggcggtgaaataggaggagtcggagtcgatgaacgataagttgtatgcgataaagagggacggagagatcgtataaagagcgggggcgagatgaagcgattaaccgtgggatggtcaatccatcaagaacggcggattgactactgctcgactattgccgacgttaaatggagaggtggagttacaccaaactgggagattctcccacggggctgagtcaggaatggccaccattattaatgaacgcgagtcaaaagcagtcgactcactgcacaaccactttcattatttagagaatcgaattatgcgtaactatcaagtcagtactaaggatacaaaagttcttcgcggggccagatgttcattgtccatcttatcagttgtagactcattcaaccccttaacgccaacgcaaacagctccctccaatccccaaatgcgcatcgtggtctcgatgcggataagtttccccttgctcactccactccaaatcagatcaattcgaagccatcgcgtgatcttcccgcgcatcaaaagaaggaagga

SEQ ID NO: 38354 - DNA, 676 bp, Arabidopsis thaliana columbia
gttaattatgaacacacacatatgttttttttgtgaaagaacacacacatatgttaattatgatcatcatcataagattcataacgatgttaattatgaacacacacatatgttttcttttacaagaatataatcaatgacctgaaaatatttttgagatatttattatattctcaacgttactgaacgaaacacgtgaacgaaaaagaagaagcaagaattaggtctaatttaaagccatcataccaacatattatcatcaaatatcagatgtagtagaagactggcatcagcatgacgtcatttcccgtcgacattacgtaattccctgaaataacgccattgccggagtaaaatatatagtggcgagatgatatcgcgattaattgatctggagaaagcgagatccgtttttctgggacctcacaaggagacaaagtttggtgacgtgtcgacttcaggagcagtggaccactgttctgtcggcgtcgcctttccaaaacatacgctaataacgacaaaacactactttttcggtgcataaaatatcgattatacccttcgctcttcattttatttactggtttatgccattgttgtttagactaaaacacgtcgacgacgaacgacgcagttactttcacactgtgtttgtcactcgatcgggataagattc

SEQ ID NO: 38355 - DNA, 557 bp, Arabidopsis thaliana columbia
tgaagtgaggatcaaggagcctcttcccgagtggatcgattggtagaaaaggagagtccttccttgttcttggttttcgttttggttttggttttggcgtttaaaaactagtaccttccactagggtcatcagatcaatcttccgggtttactttgattcggttaacatcctcagggaaactggaagcactacagagattagaagtagtagcccacagagattcagccctgcgaatctgacaagacgaacttattgtacctccctgatgacgacgaatacaaattcctgaaacggttcaagtatcttaactttagtatctgtctactcgcacaaaagagattctcccttggtttttagattcaatgatgagtataaaaccataacctttgaaaaagagtatttcctttagcttgatctgccaagaggagttatacgaaaattgaacaaggtttggtagagacggatcttcatctaccataaccgcagtcttcgacaatatcagtagagcttatttgcttgctttctccaactactcttgagttttaagatgctttgt

SEQ ID NO: 38356 - DNA, 737 bp, Arabidopsis thaliana columbia
atcccccataattgaatagagcctgactgttatggataaaggttgatcttgttagttgcgagtttctaatttgtttactgttgttaccagtttccacagattctgacactgtcttggattctctaaggcaagcttcagatgagcttcaagctttggaggtataacttatgtcaataagagtgctatgtagctttttgttcaaaaacaaacctgagcactatattatcgccacatcattgcataagagatgaacaaacaaacctgagcactatataattgccacaacattgcataagagatgctatgttgcttttgattcgaaaataacaccaaactcttataactaggttcagcttcgtttagctcatcataactctcctagtaccgtgatttactgttggttcacttagtagttgtgtttattgtgcagtaccatgaactggcagcggaagcctcgtacttaatggccatggtatatgacaagttgggacggcttgatgagagggaagaagctgcgtctttgtttaagaaacatatcatagctctcgagaaccctcaagatgtggaacaaaacatggcatgagatgttgtgaaccttatttaataagcttattgtgcaaagcttgtaacttaaagttgtaatcatggtccttaccaagactcgttctagtgtccgaatcttgtcgagattgtgtaacttgtaaccttgtataactctaaaatgtaggagactgagg

SEQ ID NO: 38357 - DNA, 605 bp, Arabidopsis thaliana columbia
ctagaacattaaaaggaaatatggagcattgtaatttaattaatcctaaaggtcattgtgatatctcactttcgtctttaagggaggggggatgttagaaaaatgttgtgttttgggtttgtgatcagaacccatgcacatttcaattcaatgcatctcataataatatacgtagtaacgtctacaagaacttttctaccacttggcagatttagggactatgtttctgtgtctctctatcacccctaattcaatagcatattaaaagtttactctaaaacaagaagtcacgacaaaatgagatcattgtgaagatataattggtttactataaatttcatgtaagaaataagtatccgtatttgtaggatatctaaattatgtgatccgttttacacttttacttaagagaaagttgaattcctagaaaagtttcaaatatccaattttctcctctaaaagactaaaaacgaaaaaaaccataagtttttaagaaacgaaaaaaaaaaagtattttcattatgaactattcagtgaattcatctattgttttttcttcaaatagtaaaagtgaaaaatgaagacggtggtaataatagtaaaat

SEQ ID NO: 38358 - DNA, 933 bp, Arabidopsis thaliana columbia
gtaactttttaatatattcatttggtcaaagctggcaggataaaagttttcaacttataattttcttatgaagaagatactgatacaatgcatattaaggtcatagcaagagtctaacaatttattattcaaggaatatatataattgttaggtaggttcttattgaaatgaagcatttcacaccgtaataatgatatagctgtagaatatgaacaatgcgcgtatgcttgactgtttcgttgtaagtttgtaacaataatggccaccaagtaatctgtcactagaatattgcaacaaaataaaaaccataaatataactataatgatctactaatttattaatttaattaacatgaaaatatgacagcttttgccagcccttgctcgtataatcagtccagataacacattacaacgaaacatataaaataacttttttcaacagaaacgattataatatacatctaaaataattaacagttgaaaattttgatagacatactatatatgaatatgaacttaaataatgacccatttttcgtataatgttaattatttactcgtaaacgcgttatttccacgaaacattaggcaaaactcaagttaatttacgcctggcattgtaacgcggttaaccaaaaagcaaattacgcagagtcaaatcatatctaaaaaccaatataaacataacacgtgtcaatacttaactgatctcagaattaacatcgttaagagaaaacacgtggcagagatctgtgtatccgtttggtgctccttcatgtagatgattcttcaagaaaacttcaaaaactcaaacacgtcaagtttaagaaagaaaaaagacaacaattatttaaaccgccattgaaaagctaagccatgttgtatttttgtatgtggtcgcatgattagtgtccaccaataattaatta

SEQ ID NO: 38359 - DNA, 498 bp, Arabidopsis thaliana columbia
taaaacataaatatcaaatagataaagtaaaattcttaaaaataaagattaaaaagcgtaatatcaaatatttagaccatcattttcattagttccattagaaatcatatgaagcacatgagatttgattcgtcgagagaaagatcttaaaacttgagtctcccaaaattagttaaatctttatctttccaaacttttattattattaagtttccaaagtaaaaaaataagattttttgcgtttctaaaatataaaaaatttcatcgtgtttccaaatataaaattttaggaaacgcgtttttgtgaatttccatcgaatttccaagagtttccgttttctgaaatgtttcggaaacggaaaacgcactgcggagagaatttccatgcaattagcttttaatatatttgtccaaatgaaagtaaaatgttcataatataaaaggtgccatattccaagagttattggtcctttcacttgatcgttaaatggttggaag

SEQ ID NO: 38360 - DNA, 390 bp, Arabidopsis thaliana columbia
cgaatcaaatttcatatgcttcatatgatttttgatggaactaatgaagatgatggtctaaatatttgagattaagctttttaatctttactttttagaattttagttaaactatttgatatttatgttttagatttttgttatttaaagtatatatatatatatatagaaagaacgtgtgtatacgttttcaaaacgtgtccataccctagttttagaaaaaaatcgtttttcagttttgaaacgtttcgtttccgcgtttccgtttccgttttcatgcaacatagtgaagaacaatatgttgattgagaatggattttacttagagatgataaagtttatttagaatgataaagttttttgtagcaattgaggctttgtatgtttgat

SEQ ID NO: 38361 - DNA, 544 bp, Arabidopsis thaliana columbia
ttttcatcaagtttcaattcaaaaataaatgtagatgaaaaatggttacgataaacaacaactatagagtcgaatactccggttatatcgaaccatatagtccagttaaaaattgaaatggctttgcatgaccgcatcgccggttaacactgattattagatagagattagacaaatgacataattagatagagatatacgaaaaggatagtgattccattatcactaatagtgacaattactgctcaagaaagcaagttggacttgagtgataaaacgcgtgaaattattgtcaccgtcctaacaaaaatatattaaattcgaaaaatgtaaatttagtagaattattaaaagtttttgacataaaaattgttcaatctctccaccactgtctccgcttaacagattcgctaactctaaaaagttttacgaaaatcaaattctcaaatctgaatctctttctctctttctcatggtgaagttttgtggcacctgaaactgagagagaagcttcttcttcttcttcgtattgaacaaaccagtg

SEQ ID NO: 38362 - DNA, 490 bp, Arabidopsis thaliana columbia
caaattaattgcggagatgtaatctccaaagataaatccaacgaatctataactttaatcgaaaactaaataaaataaggaaaaagagaagatttaaaagcgaagaaaagattcgaaaaagagagagagagagatggaccaaaacggcggtttattcagacgtcagcagcactaactaagaaagaggagagagctttaactcttccccttgcggcttccttctccaaattctcctgacgcgtttctgttcatcttacgattttacacgtctctctaaagatttaaattttcgactttacgtttctttcgggttttgaattttctcactaaagatttgtcttttccatagaaagttcttgaattttctctcttcgtgttcaaagggtttttcagaatttatagtaacccaccaatctactgattgtctccgttcatcgtaatctctcaagatttgatttttatttgttttttgaaattttgaattttgaga

SEQ ID NO: 38363 - DNA, 729 bp, Arabidopsis thaliana columbia
aaaaaaaccttcctgttaccattattctactttgatagagtctctacagcgcaaagagttgtatgccttgagatatgtaagcgatgatattgactaatcggtcatgtatttgttaagtcttattcgatactccctaagggaatggtggaaaggtacttcaacacaaagatggccgtaaattttgtgtttggaagggtaaggatcaaataggcatttatcactcttgcttagcttatccaaaaaaacacactgcatttggaggccagaatgaatctctatatgaggatttccgcaacttgaccatccattggagatgtttctaatgggcagcgatttcaaagagaattcatgttcggacgaaacggatcatcagcagcattagcgaaaagactaagatgaagattttggagtttcattggaaatatgattgccaaaaatatattgttttctgcttagtgttatttagaataaggtaagttttttaaaattacaaactatgttatttagaagaaggtaagcatttaaaattacaaactatgtacactttgttaatattaaaacttagagtagataaacgaacaagaaaaaggaaagatataagttagatttgctttcgaaacaaaatattattcaactatatctaaacaatcataatatattagacaaagtaaatcaaaggctaaatataaaacaaaaacaaatcaacatattattcaagtatatatatat

SEQ ID NO: 38364 - DNA, 668 bp, Arabidopsis thaliana columbia
agatgactaaatgtgaatcatatatagtacagtctaaattagtctacttttgtattatgacgatcttgcggcgctcgagctcataaagcaattccacgactgcagagtcgaaggaactcttcttgtcaggccttgcttctccagcatacatcacagcctcacgattgggtatccttagggttatggtcgatgtgaaactgctgaagctagtccgcttctcaccgccatctatgaattcaaacggagttctgtgcagttatcagtctcagattggtcaggactcgggatacatgagagcagagaaaaaaggaaccaaaatgagaagtcacctggatttctcttccgaggtatcgaaagtaggcattggccacagatgcttcttgcaaaactcatgtagagttccacgaggcccgcctttcttcatgtttataggtccaataactgaaacacataaaaccatgaaatgcataacccttgatacaaaaaaaaaaaaaaactgaagaagaaaagaagaatctctctaggtaaataacagtgcttacatggaatcactatactctggatttcagtagtctctgaagtcagagtttctctgtcgctatgattgcaagcaagattgacatccatggaactatgattgtcctttagagcacactggcggacgttac

SEQ ID NO: 38365 - DNA, 841 bp, Arabidopsis thaliana columbia
tatcccctggatatagtattttaaaaatatatatatttttcataaatggttatggtctattctatgttaatgataatcattagtctttttgtcaactatgtttttttttccaacaaatttagtatgtaaacttttttttactaccgttttattaaatcgacggttgatcagatcaactccggtataacacaacataagtttcgttatcaaaacagaaacaaaaacagatttttttctgtcaactaccagtgaagattagtcttacgtgtcaagaaaccggataaaaatatataacgtatttgggcaatcagctaagatattaactaacgcggagttcattattaaaatggagtaatgatgttttcagttttctatataaatcacgtcgagaccgtagagtcttacacaacaatccttcttacatttctaccaacgaaagctctaaccagaaaggagcacccgattctctgacacatggcacatagatagagtataccccggttcatccatatcacgaagtctgtgacacgaaagggcattcccttgagcaaacacaatactcccgggtgtaactctataccttcaatctcagtctcatagaagccatgagggattctaccgatgtatagcacagtagctttattctgaagaggtggggtggtaactggagcttttcgagctggacctccttctagtggctatcaacaaaaacccatacagagagattcaatgtaaaaccctaaagagtctgatacgaaatcgaaacaatggtggtagtaagagacagtatcgaaggacataccaaaaaatcagctgaaggtttcgggttctggggaagagg

SEQ ID NO: 38366 - DNA, 707 bp, Arabidopsis thaliana columbia
ataattagtcgcatgtttcatagtggaaattattcagatcaaactcaagcacagttcgaagttttcagcttctctcagaaacattagtttttcttcttctgttcatcaatttcatcacataaaccctaatttagattttagggttcatctgaaaactcttgcaatatttacaagctattaaatcatcaacaatggataataattaccagaactatcatcatcatcataatcataatcatcaacaacaatggcgtccagcaccaacacagccaaacatatgcccgatttgtacagtgcctcacttccctttttgcccaccgtatcctcctccatcttctttcgcttacaaccccaactttcctcctcctcctcacctcaattcacctcgtcctggattcgattccttcaccggaccaccggttcgaccaccgcaaaatcactatcctccgtggcaacctcaccacggaaatcaatggcgaccagttgccgttgatgttgatagggaagctgatcggagctataagagagctcggattgatacgatcgcaggtggttctccgggttacggtgtttctgagagtccgagtcctcggatctcttgggaaaatgaacgaaggttgaagatggttcgcgatcatggttatggtttagctgcgccgtccaatatagagatgaatcatcagtatgggagtgaatttaggaatgga

SEQ ID NO: 38367 - DNA, 847 bp, Arabidopsis thaliana columbia
cccaaaaaaaaaaaatcaacaataaaaccaagaatatgcatcatcaaagttttctggaatatattagatcgattgagaatgatgtatactgatctttggttcgcttttgtgccaaaataagttagtcaaaagaggtcaacatgatcataaattgacgaacgaatgatcgtagtttcttccttccaaattaaaaattcgggcttttagggtttcattagcaattgggccatttctagatttgggctcactttttgttttgtttttagcagttttggtatcacacaagagtttgcagatcaaagacaactcaacccacaaaggacaagtaacgatttagagaaacataacaagattcttttgatacaaacaatctcaaatgcaaaacaagaataaaagaatacaagactattgtcacaaccgcaaattaagatcatacaagtacaacacaaagatcatccactgcattttctcacaaacttctctaacccaaaccaagttaatcctcaagcatcacaacaatgtaaaaccacaacaaagattctacatcaatctgcaaatttttctcacatgtttcaaactcaactatacatcataacctacacaaaccaaaacaatatcagattaacagaaacactactacacactcactttgatgccagaagaatctcaggttttttcgccttgcttggagtgttcacattcgatgagccattaacagtctctgcagctacggtctttcccgaggttcgtgcgcttgtatcaaggttaactaaactccttgtagctaaaatcgcctgtggattcagatcatgagaggctcttgcgtacaatgatcttactgcattgg

SEQ ID NO: 38368 - DNA, 519 bp, Arabidopsis thaliana columbia
tcaccccattactctttttccttttttcataaaacccatgctaggctcagtttcaatagctttttattacctggaagcccacatacattcgtaatacgttattgatgcgttacgttacaaaggccgaatcacctttttattcagttggtcaagaacaaaagttttttgacccattataggcccatttactatttctatctagtatctacaatcatccacacggtttcttatttggcgattgcactgatcatgttctagattacatgcaattatatatgttcatacttgtgaataccaaagtttcggttaaatttcacgtgctttactcagttacttttttaaccggcaagattacattaatcttgcaaatcaaatcagaattcgacattcatgagagggatttatttcttagtcaaacaaaagaggagtttttttttttttttttttccattccagaaaagattcaaatatcaacattttaaagatagtaatttcttgatgacaaaaaaaaaaaaaaat

SEQ ID NO: 38369 - DNA, 794 bp, Arabidopsis thaliana columbia
gattacgagattcctcaatttagtttcgacggcagcaacagaagaggagataagtcgcccctggtgttttcgtttccctctgtaagcgaagaggtggtcagtgaggatgatgatgcgaggtttggtatcaaatacacatttgggtcagaaaagccggagaggatatcattcagctcagcaggaagtgacggtgtctgctgttaaaagacaaggacaacggtctttgtttcttgtatgttttccaaaaaaatttccttttttgttttctcgaattgtttttgcttctttacttttgagagtagaattttgtgcctagatcatgagttttgatttctattcatttgaggattgatttctttatgaatccgatttttataaaaataaaaggttaatcgagatttataggtcgaaaatgtcatttgattactttaaaataatactaactttttacgttttaagtattttctctcgtatatccttaatgttggaagaatttgattggtgaaagcagagttgtagcaatataaaattgatgtaattagcagagtttgtggtgggttcgaattagagaacaaaagatatgccacgttatatcgtccccgcgtattagccacaatctatcgaagacgcagcaaagttaaagcttctcttattttccagacgaacactcgagtgtgaggtggagggtgtcctgatctgatcaccttgactgtacttgtaccagggtttgttgaacatcatgtgccgatcgtgctaggttcaggtttgcagcacacaatggatgagaagaagag

SEQ ID NO: 38370 - DNA, 853 bp, Arabidopsis thaliana columbia
ccagtctatcgaaataacaaccataaaaaagagtgatgacttacgctcatgaaggcgatatcttcttcatctctagggagttttactccggatgccgaaggtcatttgaatctcttgtcttgcactcgttgaacttctctgttccaagacggattaaacaccaacggggatggattttccaacccaccattcttagtagctactagtttccggttggctcgatatataggaacattcatttcagtagccccctttgcaatctcctgtagctatatagaccaatcacaaacatcaaaactccattatcataactgataagtaaaacatacactttcttactcaaagtatgatttagaaacccaaaatggctatctaaatgaacaaatctaaatcaattcaaaccaatcaggtaaaaacgtagaaaggtgattccttgaatcattacagaacattaacagactgttaagagaatcaaaagacttactttagtttcattgaagaatgcagaatcaatcaactcaaacatgccctgaagacacttagcttccatagtcttatctggtagttcagttagagtaactgtcctgatcataaacagtgtaaataacatcagctcactgtctaaaaccacaaagttgaaaacatacaaaaaaatagattttcttatacctcgtcaaagttgtaatcttacggcaaggagcactcactttccggtccaagagtttcacagattcttacaatttctcaccatttcaatagaaggccacatggtagaagacgggagcagagaagcttcgagtcagaaggatttgcgtctgcacaaaagacggttaaacctaggaggaggcagagg

SEQ ID NO: 38371 - DNA, 595 bp, Arabidopsis thaliana columbia
catcatgattattggatcaaatgattttaattaatttcagattatatagttaaagaataagcaaatagtgattttaatagagggacaattggtcagaaaatctttatcattatcatttctgtgttttatttttaagaagcccgaaactttttagagttctaaaaaaactttaataactcttttaggactaataagaacccatcataacttggtttgaagccatctcctctgttttggatacgttaaagtttgttgttggctctgttttgatttatttatttaagtttctccactagctactcatttgaaacatacgattattgccaaaaataagagaactgccaaaaattaatgcgcccaccgtggggttcgaacccacgaccacaaggttaagagccttgcgctctaccaactgagctagacgggcttagatgtttgaatttatacttgtaaatacctaaattcaacagacattcctgtgtttattcaagaccacatccttcaagttcaatggtttttcctttcctttaacttgaactattttgtgtcccattttttaataaagacattgtaataccattaccattgtatttac

SEQ ID NO: 38372 - DNA, 1331 bp, Arabidopsis thaliana columbia
gtaagttccgatactaatttagattttagtctatgaccttgaatgacggtagtttttagacattaggtcttagttttaaacccaaaagaccgaatttgatataggatctatttatggtaaccgaagaatttaactgcatatgactaaagacatgactggtttaattgcagcggacggggctgtggtttcgcttgcggttgcggaaatttgcggaacgagatattgtggtttcaagcgttttaaacgactaatttaacgtttcaaaatagatgcatttgcagaaatcttatgactagatgcaataataattaaataaataaaaaagatccaaaataaatataatatataggattagatacaaatatgaaaagatatatacagaattatatatatttatcttaattacaaatatgttgattattgattattattttcccatttccgctcaatcgctaccatccacaactacaaacgtttgcgggaaggagtttttgaaatgtattgatatcgagcgatccgagcagtatcccgcgatttatatgattattgtcaatcactaacaattgttaccacatgtaaatgatgcgtttgcatgtagtagaaggagaaccaatcaaccccttaactgatgatggctgaatttattttaaaggtggctgaatgacttcaaatgataaccactgaatttatttgagattattcatttttcaatatagttacctgctggtaacatatatttcctccattcataataatatcgttttaaatatttttatataaattattaatatatattatattttaaaaaccaaactgattcatactttatagattttacattgaaaatttagaacaatacttattttggaaaaaatctttaaacaacaaaacagaataagtattttttttaatattattttgtgaaaaacaactatttagtttacaataatacctaatagtataagtaaacttttacaaagttgttcggtaattacattgtaatagtcaaatatacaaaatgctaaacatattttaacagaaggaacaaatattagaataaagtaaaaagaagccaacttcattttaattcaagaattgtcacaatgcatgagaattttaattataattggactgtctttaggtttaagacttttattactctatatatatttccccactccctattacaggtcccacttttaaccatacatttaaccatagttaaattatcaaaccctacctttctctgttaaacatcttcaagctctgtcgggttttcttttttatatttattattcacatttattaacatttttatatctctccctatt

SEQ ID NO: 38373 - DNA, 824 bp, Arabidopsis thaliana columbia
  unsure (1)..(824): unsure at all n locations
caaaccgaactcttggaagttcatctgaagaaaatgtcgaaccaaaaattcaagagagaagaagaagagatggggaaatgggaaggcgataggattgctgataagcggacgcttggtatcaccattgcgctaatcgcaacgcgactcttctctcgctcatctccgacgttctcatcgttctcttatcttcactcgccattctcggccttctttttcgtcacctcaatgtctcgtaagtttctctaatttcctccttaaattttctttctttgagtgttgggctttctgttacatctcccatttgccgatctaaggttacaaattgagaaattctttgtttggctgtttgatctgttcagaattcaaaatgagtgagctttttgttgtgtttagttttcacataatcgtgtgaattgttgttgtgatgctactagctagtttcaacgtgtttacgacatgaaaaggttttattttgcttgcctttgcttttggtttcaacataaggaactaggaaccataaaagtgtgatttgattcgatgatataaacggtttaaatttactcttgcattcttaaaagtcacattatctacaaagctcaatcttttgtttctttgaatgtaacagcttttgatcttcatgaccatgagcgttggggaaaaagttgtgttttcaactgtgtattcncatcattctatcattttcaccctcttctctgatcaatgcagaaattacagcgttattagtataattgatttgatgatcactgtttgaatatcctgcagctttatagggcacatgatttaacaagtagtacttttgtgtg

SEQ ID NO: 38374 - DNA, 619 bp, Arabidopsis thaliana columbia
gactgtctcagataatcgtgcaaatgatgttgcttgagcgtgcaggttaacagaagctgacgacgagccactaaattcttgagccttatatgaacataaaaatacaaaagtgtgaatttcacaattcaataaataaaaaatggatcaagaaggatcataacatcaaaaagacctttgtataatgatctacaggcttctgtttttcttcaacattaacggatgtaacaatccctaaaatacaacaaaaccagatcatgaacaacaacatgcaagaaagagtaatgactattgagtgttttctataccattggtggtgcttggactaggttcttgagttttttggttatccactcttcgagtcaaaggactagaatcaaatagagaaaatcttgctccatggctaatcgcatctacttgtgctcgtaaatcttgaacttctttcgatatctaaaccaagtacgagagtaatgtaaggcaacaagacttcaaggaatatgtcattcgaattcactacaacaatgatgttgagataaaacaatgttgatgaagaaacaatcaaacctcttgcatctgaggttgtttcatgacaccatccaagtgaccacgagccatattgatg

SEQ ID NO: 38375 - DNA, 1092 bp, Arabidopsis thaliana columbia
tcaaaccatttccaaaaggccaaaagttgcatgacatagggtctttgttttgatcaattgcaactgcaatttcaattatactacaagcaaccatgtatactttaatctttcttaattatgcggacataaaagttgtgtcgtcttcttagaaaataccaaactggcttgaagagaaagttagggtttgttcgataaacgacatggctccaaaatcaagcaacagtgagatgaaggatggatcttcgagcgacccagaactgacatagtccattgaaacttctacccgcgttgcctcatcgttcatggtgaagcgcagggccgaaattcccaacatatatcttgctcatgctgaagaaaccaatttttacttgaatttattatacatactttgccacgttttgggttttgacttctttccatatttatcagcaactaatttttctgtttattttgtctattaatgtttgattgaaaggcaatggaagagagaccatttccaagttgatggaagagaataatatcatatcttatttactatttagcattgtactgtgaatagtcattaattaaagagggttaagtctctgttggaattttcagttagattataaaacaaagttgttttgtataagaaaaatcaaacaaatgtgttcctcaaattcctttaaaaaaaaaaaaaaaaaaagaatcacacaaatatgagactacaagctaaaatattttaatgataaactgttggctaggcttcttctctacaaaagaaaaccaaattggcttgaaaaggaatttagggttttgaaaaaaatcgacatggctccaaaatcatgcgacggcgaggtaaatgatggatcttcgagcgacgtaaatgtgatggaaccaatggaaacatccaccggcgttggcctatcttttctggggaagcgcagggccgaaacccccaaccctggtgaaagcgagcaaatagctgacgaggacggagaagaatacgaatcagtcgaggacgttgttgtggaagacgatcgaatcagaggaggaaggtgacgaagagagtcacagggatgaggaggatagtgagccggaatggggttatga

SEQ ID NO: 38376 - DNA, 718 bp, Arabidopsis thaliana columbia
cataaaatatcatgtttccctacgacctcaagaattttatccattttgcagtgacgtgttagctacatgactttcttcgggtcttaaactgaaaccttgccctctttctaaaagggttagttaagataatagtaaaagtttcttctttatgggtcgctatggttgtgctcttatcatccgtatgatgatttatgccttgagaaagttacttatacaagcatactgctgtagatatttgagttcatcgatgtggagaaggtcggatcaatcactttcaaacaggtaatttgaggatttttatatgaatcagtatctttccaaagatataataaaccttcgtagaaaatcttagtatataatatctgatacatcttgcttcttctgctgctgattggcctgcagttcttgtttgcctcgggccacgtgttgacacagccgctttttaagcaaacatgcgagctagccttttcccattgcgatgcagatggagatggctatattacaattcaagaagtagattcagtgctctttaattcttcacacctcttttccatatttgtttttgtgttcttatgagtttttcttatatatttttggctcagctcggagaagctctcaaaaacacaatcccaaacttgaacaaggacgaggtaaatgtaagatttgagcagaatcaaaatttccaaatctctgaaaagatgtatagcctaatgatttg

SEQ ID NO: 38377 - DNA, 619 bp, Arabidopsis thaliana columbia
gggggcattcgtatttcatagtcagaggtgaaattcttggatttattagagacttgagatgtacacggaatcagttgtatgcaaaatggcgaaatgtacctaaaagtttttgttgacatatgtacctaaaagttgtcccggtacaaatctaccaaatgatatgatatagaagatatctctaactgaatgatatgtaaatactaaataccaatcataataaatgttttgataaataaatcaagttaaaaagcaatcttaacatttcaatacaagataaccttgcacctttgttgttttcacctaacgaaaaatcaaatagttgtgacttaaagagagatgacttaatatataaatatatattaacaagaaagttttggacgtaaataatcttttccaaatgggtaaataatcttgccaacaccaagccaacacctagcacaccacaaatttggttgtatagtgtatataacagttatgttaattgttatcggttgatgtgtataaaccaactcacatttgtttcagctaggtaattctaactctaacctgaattttccgactcttatagtcaattttctattggctttagttaaggtagttgtgtatagctgaacgacaa

SEQ ID NO: 38378 - DNA, 453 bp, Arabidopsis thaliana columbia
gtagacctatagtcaggtcgtttggatgcagagatatctctaccacatttaagtataagaataatttgcatattgggctgggctgggctgctacgggtcgggtcaaaacccagctaaacactttaacgtgacccgaaagatattactctttccatctcatcttccccaattagttattgacgagacttgacgctactacattcaatatctggagccaacaccgccgtgacttagccactccgcttatttattgcagttcacgaccaccgtatcctcgtaatctccgttatctcgaaccgaatcgaaaaatccctaaattcctgtgaatttattactaaaattagctcaccttatagatttaccagagatgatgggctcagagaatgacgaagagtcccatctccactcatccaaagaagagatggagaaactctttctccgcgaagatggcga

SEQ ID NO: 38379 - DNA, 723 bp, Arabidopsis thaliana columbia
acaaacctgaagagagattcaaagatcttctgctttcgacatagatgcgagtctactacgacgaggctaataagcagatcttctctttagttgatgtgaagatggtctaatcaaagtagtcaaagctcttcgcacccattcaccttcaacaccaccaattctcacaagagaattcgtcatcgcagatcgacgcatattcaatccattcgttgtatacgaagctgtaccttgaccatgtggattcgcgacgttcttgtgtagactacaccggaatgaaccaggatgcgttgtcggagagcacatacatcttctcctcgaatccggaatcttgtgatgattgctaggtttgttggaagaaacagcgatggatcgattcggtgatatagatctgttatcgattgagtaacgaaacgattgcgtcatcggagctgatgtgaatagattcacacgcgtcggagaagcagatctgtgttggtggtggttgttctgattgtggctgctgaaaaacgctgtagacggtgaggagaaacttgagcttgtggaagaagcgaaacctgacgacgacggagatgatgacggcatacggtttgagtcacgccacagaatcgacaggacggtgatttggatcggagcgacgagatccgtttgatctggtggtctagaaaagtaacgccatttttggagaacttcgagagaagattgagaatatgtagaagaagattt

SEQ ID NO: 38380 - DNA, 605 bp, Arabidopsis thaliana columbia
gtgataaaacaatctgcttcaagaaaaagataccccagtggacgactagggtcaatgaaaatgaaaacagagacaaatggcaattcgtaattattcacatttatttcagggtactttcgtaaatccccaacctgaccgtttctcgaatctgattacgtggcagtcatcacaaatgcccacaaaagcacttcgctgaaactcaatctcagtcgttagatcagaatccaattcttttcaatacggcaagttgagatccccaaacccatcatgtgtaaccatggttaagtcaattaacccaacacatagaaatctcctaaaatcaccaaaaaggtcacgaactttctcgttaattacataaaatgccattcttcgctttagctataaattcgtcttctgagactcgctaggtttgccgaaccaatcaccctaaggggacacttaaagagagaaacaaatccttcttctaaaatattcttcaatcttcttctcgaagcttctccaaaaatggcgattacttcttctagaaccaccagatcaaacggatctgcttcgctccgatccaaatcaccgtccggtcgattctgtggcgtttactcaaaccgtat

SEQ ID NO: 38381 - DNA, 739 bp, Arabidopsis thaliana columbia
cactgcccttcaaacactgatcttcacttatgataactaaatggaaatagaacacaaattattcttagttaatatgacaattaagtatcttaaaaccaatttatgttgttctaaacccttgttaaaaataataatgagttgtgtcgtatactataacgattgtgagtttcaatcatgaaaagacaataaaggaagaaaacttctatgcttgaaattcacataattgccatacattttttataataatttaatcgttttatgcggttttatgacctaaagatatagtttcacttctagtattgtcgtgtgtcttacgtctttacatgtcgagaacgtggaaaatgcaaaaaaagaagaagcaaaacagcgcattggacatgtacttaagagatttgacatttgttgaagtaccaaattgaatgatcttttttttttgaaacattgataattgaatgtcaaatctcttaagtataaaagacatgtcaatttggcggcaaacttgtgcaaaggaagaagttggcctaaaagattgattttgggtcgccctcatctaacctcatctgtggttgacctcagcacacacccacatggtcgaccaccaaggtaacttcataaatcataaccaagcctgttgtacaagctaaaatcttaattgagaaccgtgctacgagcgactgcaataatagtctagactatgacatagcggtttagatatgtcacagtttttaccacttttgac

SEQ ID NO: 38382 - DNA, 573 bp, Arabidopsis thaliana columbia
tctattaacaggaaacaaatactagggtcatgattaatccgacacctgacgaacataattttcggttcaataatcttttcgaaataaaaattctaaatttcatctccatttgggcttgaagaaaaagccaaaagtaacgactacattaatatccgaatattccgtttgaaattcagataaaacctaacacaaaagtcaatggttaacaagatgacttaaatattaagacaacgagactttcataataaatgtcatcaatctctctatatatatacatcttgttgtttccttatcggaggagtgaaaaacaaaattaacaatcaaaaagaagttagtcaaatgagtcctgtggccattctgttcatagtgtttggggcatttctgatgtttttgttcatcttgtggctcattcactttctctaccacaaagctaagaaggatggcaaggaaagcatcgcctgtcttggcagcggttacggtggtgattttggcggttgactttaatcttactcgtgcatcggtgcatggaaacgtgtagttcaatatttttgttgggatatatatatatatata

SEQ ID NO: 38383 - DNA, 840 bp, Arabidopsis thaliana columbia
  unsure (1)..(840): unsure at all n locations
tcacctaaacatccagccattttccaacctcaaacatgtcgctttcctgtgactagagattagatcgtcatatgctttattctatttgtactcgaccatctcaaaattagaataaaggcaatttcgatatacaatgtcaccctttgcaaatcaatcgctgctgaatgttggcggatccattttgtgatctcatttccaaaaagtcaacaacacctctaagccataaaagcataccatttcgacttcatcggtgctcacctacaacaaccatatctatctccttccttcgctataaaaacataaccaactaaacaaggaagaaacgaaggttccattccattcacaatcttgcgataccttaagcccagcatccaaaaactggcaggtcccttgtgtgacctcacttcaataggtccccgagataagcaacacaaacctgcctagattcgaacctacgaaggacatactatttcacatctgcaatacttaggcttaaaacaagacctaatataattatttttaaaaggggaggggggggggataacgcatacaaaagatattcgatagaacaaaagtaatttcaaatggataaaagccttcccaggcaccgaatattcgatagaacaaaagataaaagccttccctggcaccaagttcaaaagtaaacaaaaggatgaaaccatagccaggtcaacatagctcttctcgaggtccttcgaggtagacaactccattttcagtctgcagatctttgcctanaaccatagtctggtcagcatcattacaccatcatacctacacaaagcacaaaaacgaaaaaatgataggagtgtcctggta

SEQ ID NO: 38384 - DNA, 902 bp, Arabidopsis thaliana columbia
gaacctccattcagataaatcgaatccaactgtgaagcaatcttgtttctccgagaatctttcttttttgtgctaatactcttcactaaattaacatgtttctttgtgtgaaccaatttgagatgcttatcttcagctttactaccaccaagaaccacacatctgcaaaaaaggaaagaccaacattgttaacaatttatgaaacacctatataggataacgaaacagttaaccaagctaggaaacacctatataggataaagaaacagttaaccaagctaggaaacacctatataggataaaatcagcagaatctttccaatctatgaattacacaattcagattgagaaagtcaaacgtcaagtcaaataaggaaaaacaaaacgagacctgttttctcagaggagataatcatcaaaacacccaattagcctaaaatttcagccttttctagggctttatcgcccaaaaaagacaacaaaggcgcacgagaagaggaaagtatgaacctttgagtgactccggcgagctgaagcttctcccagataactctgatacgatcgggacactctacgtcaaccttaccgttaggtgtgtcgtgtttgcacatggtctcgtcataaacaagacccacctttcgctggcttttaccggcgactttgccgtcaccctctccgcatttcttgccggaagattcgctggtcattgtcatatccgggagatgtgacagtcttatctttcgaagaacagtgagagaaactgaagggtcaactagtctcaactctgaagaagcttcaaacttcaaaagcatttttgttttcaaaatatatttttgtttatcttatttacgattaaatatatatttgttggacgattaaagagcttctttggagggaaaatg

SEQ ID NO: 38385 - DNA, 878 bp, Arabidopsis thaliana columbia
tatttggcaaaaagagtggcaaaaagagtgtgaacataaaaaatacaaatggggcgttccgagaatcgaactcgggacctctcgcacccaaagcgagaatcataccactagaccaaacgccctcatttgatatttcgttaattagataaataatacctaataatacaaacttgaattggtcttgcatttgggccgttaacaggccttgctaagtcatatgtggtgtgtatttctccatctgctattgatctcagtaaaaattacataaagagagccacaagcttactgactctcttgtgtatcgctctctccgcatttccattaaccctccaattttcccgcctttgtctcactctcttcccgccttgcactcgccggggactccatggttcagaagcagcaagcctccgccggtccgggtaccgagcctaagaagcgtcgccgtgtcggattttctcccgccggtgagtcatttcttcttcttgtttgttttcctttactcgcgattaccactttcccagctccgatttcgtatttttctttaatccgttgatttttcttatgtgcagatactggtgtcgaggctaacgagtgcatcaaaatttatctcggtgcgtatttgatttaaatcatttgaagttgattttggggatatagtttcgtacgaaaattagggttacgtttcctgctttcgacctttttggtgaaattagttggccttacttcaatttttctagtttttggcttttccggcgaactttattgctttcaaaaggtagttttcagttattgaacatgtagagcagatctgtatactgagtttctgttgatttatgtgttttatctttcttccaattgatatttgttcaatgagttgt

SEQ ID NO: 38386 - DNA, 605 bp, Arabidopsis thaliana columbia
atcaaattattattttcctttttctcgttagtttgtggatttattatccatgataaaaaaataacatgtggacaatgttacgacaagtggtatgtggaaattgaacaacaaagagaagagagaaatcgaactggcttggtatttattgttggtatgcctattgttcagtacttcataaatagctaggtagaaagattggtgcgtaatggattttgcatttccaacaaatacatatccacacacatttaagtataaattgccttgacgtctgctgaaaagtttggcagtggcaacgtcaaatatcttttcagtatcattattgtccctttagaataataaaactccaaatatataactgtggaaattttctttttttgttttttcatcaaagtacatgtggatcaaaatgattagattttaaatcgctatgcagggttctggttgtttcaagttcacattgtctcttaaacttgtttgatcagcaaagaactgaataggttctgaactagggggatccatgggttttggcaaaacatttaaaaattagcaaaggataatataatatttgggtatgttataaacaaaaagtcaagatggccgagttg

SEQ ID NO: 38387 - DNA, 468 bp, Arabidopsis thaliana columbia
caaattgaagaactacaaatatcaatcaaacaattgataacagtaagaaaattggtgtatgaactatgaacgaaagcgataccttgggagaagatgagaagagaagcagaatcaaaaatctcagatcagttcgaagagaagacagagtaagacacagggagagggagggatgaatatatttgtattataatatatataagaattagttctagggttttacttagaaatctccgacgaggagaaattgggattgttgtagccttgtattgtagggctttcttcaagatttttacactaaaattatactactattattatttatggtaaggagggaagttttccttgaattgtttgtatttgatgattatgtatattgttgagttatggaaagttgtggctaagaagaattgtattctaatttcataaaacagaaagagatataaaaaagagtgagtaaaagaagccccg

SEQ ID NO: 38388 - DNA, 809 bp, Arabidopsis thaliana columbia
gaggattaaatctgggtaatgagattttggggaggtacaagttttgaactatgatttgaagattttgtaagtttattagacgattttgaactataattctcaactgtcttagatgagcaaaattacctattcagaaagagattttgtttaggaattttgtaaacaatcgaatctggaattaatgcttgtttttttttcttgtttttttttgaacacgaaattaatgtttgtttaaaattataaattcgcacatatgtttagaattctaggtttagacatagataatctctcaaacaagagttgattgattttacattttgtgattcaagttcgaaaacagattttagtaatcatcctaataacttatttaatatccaattctaaattaactaagaatttcccttagcctacattttcctcgattgattttaaaacaaattttagttacttgcttagataaatttataattttctgtttagcttaatttgaaaccaataatctatagtgtaatctagacagttttgtgaaattcgacccctaagtattgcactgatcttgtaatttgaggggatagttcaacggataaatttgcactatcaaatttttgcgtcgtttctaaagttctattttgattcatcattagataaggtgtagaaatttagtcctattttttttaattacatgcgttttctctcttctttttattgtgtgttctaccgtagaacaaaaacaagtgaagacatgaacaagagtcatattgctgcgttaatggctaagattgagtttgtgcacactccttgtggagggt

SEQ ID NO: 38389 - DNA, 1009 bp, Arabidopsis thaliana columbia
agacgaaaatagaaaacagtcacactttgcaaccaataacctacgtattactaactctcgatttttgcgtttcgaaattttaaagtttggtctgtttatatgttttcttagacattgatactttaatttgatagatattagatattacaccacaacccaacacttcaattcggacatttatagactaaacatttaacaaacccaccctctatatcccacgtcccatggtttttcattgtcatgattgatatttttaaagaagttctaaaataagttacgaaaccgattatttatatacttaaagttctgtatgtactctatatcactaaagtgggtgcttttcagttatttttatcaatagattggatcaaactatgtggattttaaaagtttatattccaaaacttcacataccagtcgctcgttacaacttatttgcgacgaaaatagaaaacagtcgcactttgcaaccaataacctacgtattactaactcacgatttttgcgtttcgaaattttaaagtttggtctgtttatatgttttcttagacattgatactttaatttgatagatattagatataaaaacataaccaacacttcaattcggaaatttacaaactaaacattcaaaaaaacctaatctatataataagttccatgttctttcattgtcatgattgatatttttaaacaagttctaaaataagttacgaaaccaatgatttatatacctaaagttctgtatgtactctatataacaaaaatgggtgtttttcagtaatttttatcaatagattggatcaaactatgtggatttcaaaagttgatgttctgaagttttgcaaaacgtcacaaaacagtcgctctttgcaacttctttgcgacgacaaaagaaaacagtcgcactttgcaaccaattgcctacgtcgtaccaacactcgatttttgcatttcgaaattttaaagtttggtatgtttatattttttcttagacattgatacttta

SEQ ID NO: 38390 - DNA, 613 bp, Arabidopsis thaliana columbia
taattacttttcctacaatgtatcatttcaatatttcatatgattaccataacattagaaattttcaacaaaataatttttcaggaattaaagaataaaatataagtttcataactatcaagaatctaacaccccggtttcaggaatatgatggtacatgccggataggtttaaaagaattgatttggcccatgggcccgatagaagatgtggggcccattggtagaggcggttggggcgttacaagtggtattagagccaaaaccatacaaatgtgcagtcaagaaggctcaaaccgtagggggtgacagtcttggtgcacaacgaggacgttgcgatctgttagtgggggtgaattgtaacaccccggtttcaagaatatggtggtgaatgcagagaggtttaaaagaattgatttgaccacctatgtcaccaaagtgctcttatcttttctgtcaaacatcttgagagaactcctcagttaagcgtgcttgggcttaagtagtttaaggatggatgaccttctgggaagtgattgtcggaaccatgcaagttaggacgaaccatgaggaaaatcatgtggtgatttgtaggatcggacagtggtgggcca

SEQ ID NO: 38391 - DNA, 549 bp, Arabidopsis thaliana columbia
attgttcttatttattttgttgtattaatatcagtgttctaaaatacaagcatatacgatgtacagtaggaagttgtactacaaaatggttatacagttgttaaatacggtgaaagatatacagtttgtatatatagcaattatacgacctatatatcgtgaattccgcatatacagctctctttataaatgctaaaaaaaatatagatatgttattttattgttttcattcttattaattatcattgttatcatttttctattattttcatgcttattagttatgtaaaattttaaaaatattttgtaaaagggaaatttttagtttttttttttgtattcatgcttcatgattatatgttttattgttattaaaaatttgtaactatatatacatatcttcacatattttatatttatatattcttttaacaaaaaaaaatatcaacggtaaaatctcctcataaatagttatatatacgtttatatgctatacagttctttgccgtacgcttagggtaatgtattttagaacagctttggttttta

SEQ ID NO: 38392 - DNA, 1095 bp, Arabidopsis thaliana columbia
tttagcagcagtaggtgaagggtcagaaggagtcgcagcggaaggctgaccagcaccagagactccagtcaacgaggtcgcttcttgattcatggtgacttcgactttatagagaaaatgaccctttgaattatgaggtttgagcagccaaaaaagcgaatgatacttctatgggagctgctttgattaaatagcacgaacacttcaagtgaaaccctaaaaacaatacgaaaaccaagccagactgcaaaacactaaattagatccgtcaaacattcacagggccttataccaggcccaaaaccaacaacaaaagatccagacacataacaaatacccaactatgtacaaacgacaattgcaacattaatctaaggctgaccatatataaccacaaattcacccaaatcaacacttgaatattaacaaccactgtcattcaagaactgtgattcaaactgaatgtgaaatctcatcaagtcatcctttaaaacaaaaacacaaattacgggggagtttctatatatatatatatatggtacaaaagcgtttgaggatacttctaaggaagtcaaggagcctacctatgcatttcatcaaagcgagagggtcagattccaaagtacagagttgcatagcttacttttagtatggagaaataacagcttcctagtccagtgagatgaaccatacacactgatcatagccagttagtctacactcgtcatactctcgatcgaagtaacctcatgatgtgtgtggtcaaaacggcaagggggattggtagagcctataatgaacaaagatgttttgagggggtatcatagatacatatatgccccaaagataagaaagaataccaatccctttcctgccaacacacattttcctgttttttttgttatttcgttttttcttttgaactttcatttgttcaatcttttgggcttttcttttttcctctctttttttctttcatttttttttattacagaccacacacaatatttttggaaacttcattgaggaagagcatgaagagcacctattttcgtgaaatgaagtgccagaaagacagacacgatagatatttac

SEQ ID NO: 38393 - DNA, 536 bp, Arabidopsis thaliana columbia
agagcagccgccagaggcatccggacagtgcacagtacctatccggtgcagcaccggattgtccggtgccactatgaagacaaagcctccaacggtcgtctgcgcccgaaccctaatggttgggtgacgtggctggcgcacccgacagtccggtgccccatcgacagcagccacccccaacggttgtcttggtggttgagggctttctattctttctcacttcttactctcaagtgctttgtaagcgaggcaagagacaccaattgtgtggtggtccttgtgggttctaagtgacccgtgagattatggaagaagcctcactcggcctaagtgaccgtttgagagagggaaagggttgaaagagacccggtctttgtgaccacctcaacggggactaggttctttagaaccaaacctcggtaaaacaaatcaccgtgtcattcgctttatattcttggttgatttgtttcccctctctctcggactcggattttattctaacgctaacccccggtttgtagtgtgcttaaagttgt

SEQ ID NO: 38394 - DNA, 552 bp, Arabidopsis thaliana
tcaagaaggcgtaaatcaccatggctagcagacacggcgcgacctatgcagatcaacatcaaagcaatgttgaaaaacggccatgttcgaatcttccagacaaattctaggagattgaaggacattcagatcgaagtagataagcaagagtacttcccagatacctatgtcattggctgcctccatcatgtcgcccggaagtgccacaccggcagcggggggtgggcgcggtgggggtggggaagggcgcgggcgtggcggcgaggggcgcagacctccgtcgttaggtgcctcgtggctcagacgcggcgtagtgggaagaccgcggtagatagcgtggatgatgggggcgacggtagacactgggacggggcgggggcaaggggtgtggacgccttcggtgtattcttaatacgagtagttgaaagtcgcctagaggaggggtggataggcagaaactgaaatttacaactttaaacacactacaagccgaggttagcgttagaataaaatccgagttcgagagagagagagaaacaaatcaccaagaaa

SEQ ID NO: 38395 - DNA, 772 bp, Arabidopsis thaliana columbia
tatagtaaattctatgtggcaaaatgtgactcatattttatgagcctctttataggtttctcaataaagtagcaatattcatcgaaatcttttctaatgtgtctttgtcatatatatacgaatagtaagtataaccacaaatatttttgagatccttaaagcagagaaaaggatattatagattaagatagaaatgaaaaagctccaattttatttaaacaaacttaaactccaaattttatttaaacaaaacttaaatacagtattgtgcttcttgtcttttgggtacaaaaattttccatttcaggcaggtaccaagctaaattctctacaaatctcttagtttttctcagtaggaaaagaatgcaaacaaagttctattgatttttcttagtagtgggagtgaacgatggagagctctgagtgaacgatggagagctctgagtgaacgatttagagctctgaatctgatcatctttagacgttttgattataaatagaagcgtttccacaagcatcgccagaactagtccaagaatcccaccagcagcactctgaaaggaaaagaaaaacatgattcacaaaaatcctcttgatggttttcagaatctgacaaaatgagagataccagagcggggttgcggttgaataaagctctgaaggaagcgtatccaaccaaatatccagtgaacatggtaagacaacatgtaacctataaaacgagtttgcaagaaaacaaaatctcagtaatgtgtaatctttccaagacaaa

SEQ ID NO: 38396 - DNA, 963 bp, Arabidopsis thaliana columbia
tataaaaacaaaccctggtcacacactttagccaataagaatttagagtcgtgactataacatcaacatttaattgtatagtttttagtgataagtactgtttaaagtgatatagtctatgaatataagtggatttaattctggatccgcttatagttatacgtaaaatataagggaatctcattatatgggaagacgaatctaatctattggaatataacgaatattattcaatagtttttttggttctttctattttattataggtgcatgcccgttcaagctcgtcagaggctcatctcaggttgacgatctggttaagagccactttagataaagctattataattctgtgatgttatttcatggaacttcatggacatattgtatatgcatataatcacaacttgctgatttttttaaaattaacataatcaaatgccgaagaaaaacgaacagaatcactttgtttagatgaattttaatgataattgattcgcttgtgccaatttatgtcgtccagctaacttttaatctaacctttttctattggagcatcttaatattttattattgaaacaaaacattattccacataattacatccgcaaattattcactacatttacataattacttcaagtaacaattttaccacattatttcaattagtacttaaccaccaatgcatatttgttccgaatttcttgatcgataaatatccaaattaacaagttaatgaagaaaaaaaacgaagaagatcaatggtcaatatttaatcagaagcatccacgtccacttcatcagattctatctctctctctctgtaagattccttgctctcgcgcttttctctctcactctcgcgttcgttcttatccacgagctctgcaccgtcgcaatctccgtcttctccatttagatcaacacagagccgtttccacatgatattcggcaaagagt

SEQ ID NO: 38397 - DNA, 735 bp, Arabidopsis thaliana columbia
tgtatgtccgtgtacatgagatagtcagtggtgaggggaaataatccaaattttgttttgatatgaatccgatagtcgtttttgcacatcttatagggacatgatcagacatgatgttgagttctttaagctgtcaaaacaaagatataatgttttgtttgtaatcttaatataaaaccaaaatctttcaatgaaacttcacattatctactttacgctatataactatacaactatatatatatatatatatatatatatatatgcgtttaaatttcacagtatcttcttatatgcgtttcctaatctctctacaaaactaggatattcttccgtgacaagtaagtagtaacagcctctctctttcaatgatcagtctattaacatctatatattgatatggtcatgttttatcgcttaacgaatcaagcaacccaaaaccaccaaaaattcacatttgacatttgtcaaagactctcaatgtcaactctaaaactcatgcaaataaaataatcaaatattctcaaaatcatcaggtatagttcatgaaaacctgagaaacaatcatattattgaataaaccctcttgcagtataagtaacttatataactctatcaatgccgacacttaacattttaaatttcaagtgcctcctttttcagttgaagatcttttgtgtgtttaattaagatactactaacgtaaacatggtaacaagataatgttttaaatac

SEQ ID NO: 38398 - DNA, 1391 bp, Arabidopsis thaliana columbia
tgctctaagagaattggcacccatgaccaaaagtgagcttataattaaacaattaacatgaaatttgttttaacttatttttcaagaaacaaattacttttaaaagctatcacttacttgaaatgacatttctcttcgtttttccttttttcttcaacgtcttaattccgtctcaataatttgctgtcttcataaaaacagattaatttcatcatcgtatctaacatagacgaaaaaactctcactaatgttaatacatcatcatagcatatttttattttttagttaagaaaaacaagatcatacaataactttccgttgcgtatatgaaattgacatgtctccactcattaattgcataaataaatcaagtttaatataaacataatttcaatggacctttagttttattttagggttttgtgcaaaaaagaccttctagctcgtctatttttgcatctttaccttcaacttccaagaaaatacaaattaatcgtacgaagtaaaaagtaatacgcaatataatccttatatgatgagttagagagtttttttcacaaaatattttattttatactaatatattttattttagtttatacataaataagttgaaatttattataaacatattatttttacctaaatagatcttttgaaatcatggacttctaatattccaaaaagagcactttcaggtacttattataataagtttcagcaaaatcaatcatgccgaacactcttacgaaatcagctttgtctgttgttctcccttccccgttggtggtggttaaggatcctttacatttatacaacgatactagattttaatccgtgatacaccgtggggacaatttatcttttaaagttagtatatataaaagtttacaaattttctctatctataaaatatttttattttatagtttacaactgttattaagtaacgtcctgccaaacccgtcccgccaacccgtcccgtaaaaaaaaatatttattttattaatgttgatcttatttatgatatgtttatgaatcattgtctaaatattttataattttgtagtaaatgctatcaaatgtttctgcggtttgatgattataatcgaattgttatagtcatacagaaaagtaatatcaaaaatgattattttgtaataattaaatgataataaatattttgcaagttttattttagtaactaatcgtgtagataatgtggagagatttttggaagattggtaaatgtcaaatatttaattcaaaaattttctttctaattatcaaaaacaaacattaaaaatcagtggcaaccattgtaaataagtccaaactacaagatttatttaacaaaatagctgtaaaaatatatacgtaaatatgctaaa

SEQ ID NO: 38399 - DNA, 630 bp, Arabidopsis thaliana columbia
gactaagagatgaagaaattgctcttatggttctgaaaacttctaatatgtcgagttgttctgagttttaagattttccaaaatgtctttgtctttttttttatatctttagagttacttgaacattgtgactacttctagggttgggtttgtgtcaggtctgttatatcgtgtggtgggtctgtctaatactgattcgagtttttgttattcagctaaggaacttttcttgtttctgaacaaatcttttggttccctagagtaaaacttgacttccaaaagatagacttcctaagatcactggaatagataggagtgacaacttgacgtgaaaggtagcttggctatagtaattttagatcttacaaaacgagatcaagaagttaataattttcacaacaccaatttgttatcgcttaaaggttgattgatttgttcaatagggggaatcatattcgcgcatgctcgaaaaggggagagaagatggaatgaacataactttaaatcggatgtttgattcaacaacaaaactagactcagatagagattatgaaggattccggaatctgaattacatgagcaaaatttatagctgaaaaccctccatggtcttactgtcacctaaagaca

SEQ ID NO: 38400 - DNA, 563 bp, Arabidopsis thaliana columbia
ctctagtaacgcgccgccagtgtgctctaaagcaaggcctctgcttattcgtttcaaaccaaaacgcccatgtactttgtgtattgacatccgtattgtccctgctggacttcaggcccacatgctgcagcagcggtacgcaaccgcatacctgttcagcccattcaggtccgcatactcctcaatcagcgagtctgtctgcccatgccccctgtcttccaagaagcctatcagcctatccacctgctgcgccgggaataacaggccctgggtgcagcacccgaacttgttcatctgcaccacgccgcggagctgtcaggttgtatttccccaccatgtacgccagcgctgtgaatgcgggaatgcagaggagagaaatgacgagaatgctgggcgtgtcgaggtgcaagggctggaagcggcgagacggctggaggaaatagagagctgtgaatgataatgccgtgagcgtgaggaagatcagcggcatgtgttcgtatgcgaagtcagcgctgctccagcccagcgcggtctccgtgtaaaagagccgcaggtacagccat

SEQ ID NO: 38401 - DNA, 662 bp, Arabidopsis thaliana columbia
gagatcaattttagtcatgtctcctgatagcagaaattaccaacgaatcaaacatttaaacaacaagaatcaatcaattcaaattactacaaggtatattagattatcagcagaaagtaccttttggatcaacttcacaatcttgatttgcagctatgcagttgagctgtcaaataaataatcaatgtttgttaatttgctctaacacacacaaactttagagtttagaggatagaagcatcatacttttttttttttttttttttttttaagcatcatccttttatagttgtattctgctacaaacagagattttttcgattctctccaataccttgaatttacaccctaaactttacccaaagctaataacaccctaaactttttgattgaaagatttatgattacgtaccgcacgcttcaagagtccaggaagaagaacctgttggtggcgaacgggcttcatcacagaaatccgcatcctataataataacaaacaaaaattaaaaaccttagtagatcgtgaataagttaacggagaacggagaagagagagagagaatggtaacgggctaacggcgatggtgataaacggaagagaagagagagagctagggtcggagaaagagacaaaagagagggacgacggaatgcagaggaa

SEQ ID NO: 38402 - DNA, 625 bp, Arabidopsis thaliana columbia
tgtttttggttacaaggtttctttagtcagaatggtcaacaaagtttctgacacgtgtcttattcagagtggttactttgaccagctgctagttatatttttgactcatcaaattcaccggcaaatccagtgagtaacgacggtcacgctgttccacgaagcttcgctgtcaacaccatcatcggaacttaccggagttcgttacggtaccttaaacccaaacccttctccgttttcgctttgttgattatcttcttgagtgacttcgttttgagaatttttctgggtttcggcattgtggaatcgaaattagtttttttttttctgttttgggtctcctctgtctcctttaactccattttcctacgaatctgtttctttaaccctaggaagacgaaaattatcgcttcatcgccacttattctagggttttgaatgcaaagaagaactaatttcataaacctgattgagcttagatttcaaatgatttcgactgattcgtactatgaaactcatcttccacatttagttctcaaatcatttgagaaatctagctcaaacgattcgagtttcagaacttttgttcacaaaattaagaatttggtcatgatctagcttagtttgt

SEQ ID NO: 38403 - DNA, 1105 bp, Arabidopsis thaliana columbia
  unsure (1)..(1105): unsure at all n locations
tctctcgagcagattgtgtcaaacattttgcatccatagagataaaagtgcctgaaactgctgattaatcacaaagatttgagcaatcaactacatgatgcagcggaattgacattgtagcaggaaacaataattcaataatggccaaagacagcaaagaaactaaaggttcaagctttttttggtatggattaaagggtcgtgctttcacgctcgaatagtttcaacctctgggttaccagactgcaacaagcacaaaaaattgaatgaggatgctaaagatggcagagagtatcagagaagatccacagtccagaaaaacaataacatccacttttcgcaagtatatagatatgagcatgctaagcggaattaaggagaattcagagaggaaaaaaaaaggaaacttcaaagaccgtatagaaaacaaaaggttgaagcttttttgttttttgatgctgaattaattaaaggtgcaagcttttcatatgaagaagtgaaagcaaatagatacaaacctgaatcgtggagaagggcgaaaacagatccagagaatgatggcgttgtcccctcgattcgaaatttgatcggagtctctctgatatcaaaggatttttgggttatttctctatctatatatagagaaaaatataaaaggaaaattactcaaaaaaaaatggtagagattttccattaaccttaataaggaaacaaacccagaacgtcaaaacgacaatgaaacttgttgttttgagttcatccaatgaccctgctaaatcttggaaggcattgatgctgctaatattgttgacatcattgtagatatcagttacgtaattacgttgtttcacattcaaaacaagagctgagaaaatggaaggatataaagagtggtgataatagtggagtgaacatatagaaaattcatggaagaagcttttaagggtcgaaggagaaagaagccgagtctaatgagtcataaggaaacgggaaacaaaccccaatcccatagtcacatataagtgagtttgatatgacacagttaataaaggaaattacataaactagatgaccaagtttgatatgaatattntttctttttttt

SEQ ID NO: 38404 - DNA, 659 bp, Arabidopsis thaliana columbia
atccccaaaaaaatggaaatatgtgtggaaacaaatctataaaggatgattaatatacaacaacttatgattgtttacaaatctatacaaagcaagatatatatagaaacaaatccgaaattttaatgacaaagataaacaatgcaattaaggatttgtttgtttgggaaagaaaacaaaaaaaagaaatatgacaagagacaagagctccagaaacacgtgtccactatttgaacgctactctctcttcgtcttctctctctctcacaatccaatttctccagataaaacctaaataaaatccctttctgcgcatgttagcaagatatggttccagagtaaactgaagaccaaacaaaaaaaaacgcttttctctccttcaatttctccgtctctctctcgttttccatggccgagttacagttagtagaaggtcaccagattaacggcggttttatccgccggcgataataaactcaatcgaagcaccggaaacatccgccgcagccggagtttcagtcggatcgaaacgattgagaagacctagcgttaggttaggagacatcggcggtgaccagtaccacaacacgtggttgcggcgtacgattctcgcaagtccgaagccgaaatggagcctagtggtggtggtggtggtggtg

SEQ ID NO: 38405 - DNA, 764 bp, Arabidopsis thaliana columbia
ttgcaggtaatgtacttggcttataaagacggcatttctgagagccagcgtggaagccttattgaggtaaagaaatcaattcaatttttaatgatctattacttgttctcttgtacaacacatttgagaacagaaccgtgaaggctcatcttttttcttcttcttttggttaaggttattgattcctacgttgctgatcagagagttggctacgcagagccagcttcaggagtggagctttacctttgcccaacacgtggggagactctagatttgctaaacaaagtcatctctcaagaacagctcgatgaggtcaagtctttggatattggattggttggagttgttgtgtggagacgagccgtcgttcccaagcccggttccggttcaaaacgtcagcattctttttcttcttctattggttctaaaacctctgttttgcctgtaaacaagaagcagagagtgcatgttacagagaaacctcttgttgttgcatcaatgagaaatcaccatcatggttatgtgaaacatgatactgctgctgatgatgatgtgccgcctggatttggtcctgtggcttcaagagacgaagatgatttaccggaatttaactttaattcctcggttgtgccagtttcttctcctcagccattaccagctcaatctaagtctttggatcaagtaagaaagctcatacacaagtatggaaaatctgcaagcacttatgatgatgatgacgatgaggacgacatacctgaatggca

SEQ ID NO: 38406 - DNA, 953 bp, Arabidopsis thaliana columbia
aaaccttgtataagtttaaatagtgataatattctataaagtttatatatataaataataatatttaaaaaatatatatattttttgccttttaggtaatgacataataactctaaaagcaaagatttagaagatttaaatcgttaattaaatattttcatttctaaataattaatttcagtagcatgacattgtaaataagttcaaatacatgatcgatatatctagacctagaacgtgtagtaggaataataattatttaaactaaaaactttgttgtaaaatattgttaacaaatacgtttatgctaattttaagggattgatgtgaagtttgtttggattaaatttgattgataatgtggttgacaatttaaatcaagaatttaaagtaaaattaattattttggagaaaagatttaatgttaatggcattgagttgtaaataaatccaaattcaggatttatttgttaaaatgacttcaaaaatgtatatatagatatgcatatagattagtgtgtatacattttcgcatgcatttctgtgtttatattatttcaacaaataaaaagtttaaaagcacacaaagacacgcatgtgtgaacacacacatatccatgcgtatagactacatgcaacattatagtatatatggagcttaaactcacggaatatggaatcattaatttaattaatcgaaagagactaagtaaaaaacaaaagaaagagtataaagcgcgtgatcatagcgtaggaggagggacaagacattactgcagaagtcagtgtctcgtttgctccaagaacctacgaaaacactcttcacaactctcaatctttcattttgttgggtctgatcacattttacaaaactcggaaccaggggttgatataatattatgtggccattcaaaaatacataataactgttgtacgacaatttcgaggaggaa

SEQ ID NO: 38407 - DNA, 897 bp, Arabidopsis thaliana columbia
tgctattgcttgattttatttctttattttataatctatttgttagcttaattcgataaccttattatattgtgtggtccgaaagctttgtgaaattcgaccctaaagtcctagaatcgatctcttatttgagagagtggtcttaggattaatttgacttacatcaattgcccctactaagaagaacaacattacgatgaacaagatatggcgagctatctctcagatcaagctatgtgtttgtgttcgaggatccaagacagtaggggatcgacatatggtgccccctatagatgttgctagacctagtcgtacttcagacgtttctccatgtgggtccccagtcgctcgcctcagcaggagtaggaggcagccaatagagcaaagcttaagcgagagcgcttcacaagatcgttgagtaccaatatcatttctttttcccttgttcataccatttttctttgcctttattttgattttatttgtgtctatgagacacctttcctttgaactgttttcccactgggtctggtgtgaagcatgtcaggggggaggttgtcacttgtctactaatctagtttgatgttttttttgtgctttcttttgagtgactttgttttatcgagtcaaaaaccgtgtcttttattgactcgaaatgttgtgagaactgtgatcttttcttaggaaattgtacgatgcttgatatcattgtcttgggaccattttagcattattcgataacttggaatgtcaggaaaatccatcactagatcgctttacaatagtccatatcgctttgaagaatttgggtgaattgagctttctctgatctatttaaacttaatctatctctcttaggggcttgagaatcatgtaatggatcatacattcagagtt

SEQ ID NO: 38408 - DNA, 843 bp, Arabidopsis thaliana columbia
  unsure (1)..(843): unsure at all n locations
ttacaattaggttcattaggttcacaatgcattctagcatcaactctcgttggctagaaatacattgctcaaatcacattggttcgggcattctatcgaacacttttgatgcatagaaaaatctagaatctaaaacagggtgatcaatcatattctagcattaagaacatgtgaattaaagaacttaaagattaagaactccaaacaacaatcaaaccatcaattcattgaatcccctacttagaaccctaacacccaattaagagactactcactcatagcaaaatgaacaacacaaagagatatgaaagaaaacataattcaaattaaataaatgagataaggttcagaaatcttctccaaagtgtcaaagtggatgaatctctaatcccaaatgtgcttacaaaaaggttcttagaaatgttgcagaaaaagaagcgtaaaagaaaaagtagaaataaaattaggtctctcgggttttcatacccaattacagaaaaaggcagataaatctggttaaggaaaactggtctggtcgtcgagagggttggatcgatcgatccccacctcggatcggtcaatccctcggtggcggatggatttcttcaacagatgactggtggatcgatcaatccccacctgggagcgatcgatccggttttgncagatgatttgtgtgtcgcggataagtgtttgatcgatcgagccccacctggcggatgagttcttgattcctgctatcgttcttggtccaaatgagcctgataagttccgaaagcatctgtgtcttgcttaaatacctacaccctgcaaaatgactcaagacacaaccgaaaagactcc

SEQ ID NO: 38409 - DNA, 688 bp, Arabidopsis thaliana columbia
ttcgattcattgaagtataggatcatattgtctaatgaactgtgtaaccctctattgggcaatcggctctgttgcttattagcttgtgtgaaaagttaatcacgttttctgtttcaatactcttacaatcaattcatggcctgattttgctttcagattcactctgacaatttctcaagctaaaacagattcataaacacatgttcttgttctagtaataaaagaaaaaacatttgtaaacaagataactagttctaaaattctaaaggaaaatacaagaaatatggtaaattaaatgaccattcactatagcaaagatgagaagaaaaagcgtgataatgacgaagctgaactagggttttccgtgttcaaacttcatacaacacatgagactaaaaacctgaaaggaactacttttatatgattgccgacgacatgagtatctgcctcatgagattgttttttctctggtcagagattttatcctcctcaagctttactttgctgggtttgttcaggcatctccaaaaacatatcgtagtttgacggattctgttgctgctgctgcatctcttgttgttgttgcatgttctgatgatctaaaccatccacattaacgtattcatctccgtcttgttgtaatagactttcgaaggaattgcagcgatatggaagattttgcctttgc

SEQ ID NO: 38410 - DNA, 600 bp, Arabidopsis thaliana columbia
ggcatatgccctaaatgttgtagtccattgtgattttagccatgcataaagtatcgtttgtatcaatggtttgctcataccaatatcttaaaagttttcacatatgatctactataatttgtagcgtcggctctattcattagcatgtagcagaaatattgtaattcagtgtaatgacatctcctaagttctagtaaatattttgttatctaaatatagaacggttttgttggttatagttgaacaaaatatgggatgcatggcggttcttggctcgtgtggtgtcattacagattgcagtgggtcatgcaagactaagtttggacaagatgctagtggcgattgtgaccgtgacggtggtcaaggaacatgtatgtgtggttatccttgtccacatgataagctacatatgtgagatctacaatactttgaaatctatatttcttcaaaatgtattaagtagaaatcaaaattgaaaaaaaaataaaatcaaaacagtttgtgctatggtctctcataatctttcagatggaacttttgatatcaatgaatgttagatacatacaaaatgcttgagactgaaagccaaaattgggagta

SEQ ID NO: 38411 - DNA, 1426 bp, Arabidopsis thaliana columbia
caacatcagatgctctggcaagccaccacagtgtggatgaaggagtagagaatcatgaaccctgtaaaagtttcgactcgtccaggggacttgatcagtctgagatagtagtttcttcgcactccactagaatgggctcttctgcagaacaggtggagcgtaagaatgatatactcaatggtgattttataagccattggcaaaatttgcagtatggccgctcttgccagaattctcaacatccgcctgtgttgtatcctgctcctgttgtagtgccacctgcttatctccaggggcgtttaccatgggatggtcctggaagacctctggcttacaccaatgctgtgaatcaactcatgacctacggacctcgtcttgtacgggttgctcctgtacaacctgtttcaaccaggccacccaacatttaccctcgttacgctaatgaaactcccagatatcgaagtggaacagggacctattttccaaatccagtaagaacttaataccttccttgagcttcctttatacttgcgtgcatgctttggttaatcgaggtacaactttcattttattgtctggtcttgtgaaacgaaccatagatattttcaaatgctaaatgaagtgcttttaccttgcttattaataataaaatggtctgtcagtcttgcagccctatatttctttaatgaatttacagcatgatctgtctgcttaccgtacttgcatccaaatctgcaacttgacaaatttggtcatgttgcaggctatatggttctggattttttccgttatacctttttttctttaccttttcgttttttcgttttttgttttccgttatacctttattgattctgtcctgtctttactcatgacggttttggtttgccacactgctctaaacttgtgctgaatttgttgcagaagatttctcctagggagcagcggcctacttctggcatgaggcgtggaaattatgggcatgacagaaccgaccatcatagcgatagagaagggaattggaatgctggttcaaagacacgaggttctggacgtaaccacaacaatcgtaaccaagctgacaataagccaatttcaaggcaagaccgatctgataggcattgggggtcgtcgtacagacatgaatcgtcctcctattctgctcatcattctcaaaacggtccaattcgctcaaacacttcacaagatgcttctggaaatattgcttatggtatgtaccgattaccaccggggatgaagcaaaacagtgtgacttcttcagagggacacaacgttccatctgtcatgatgttttaccatatggccataataatgtttcaattcacatctgaacacaatgagtatgggtccttggccaggtggtgaagcgcccatttaaatgacgaggatcaccaaggttcgtggt

SEQ ID NO: 38412 - DNA, 1213 bp, Arabidopsis thaliana columbia
tcttcgtcagtaggcatactccatcccctcaaagtcctgatagtactgctgacatgagcagtgcagtgaacagttactatgatgaagtagggtccgtttccgtgaatgaagacttctctgttgcaggggaacaggaagagcaagatcttgttaactcgatgacatctgttactgggcaaggttttaatggacactttcctttcccttttaatttttcaacgggtcacttaccgtttccaattacaccttctatcttagcttcaatgggatatggtcagaggaatatgcctggtattgttccttctaaccttcctttcatcgaggcaccttggagtactaatctgcaatttccgcaaaactttgtttcttcaccatttacccattattttcccagtggagcccacccaatttcagaaaagccgagcaaaactggtagtgatgacatggggtcttcagaagtgaatgtcgatgagtctgacaatgatctctggcacgagccagaaaggggaactcatagttttggacttgaaaatggtggttatggaatgcatcaggcagatgataaacatcagtcatcttttgcagacacagttttgtaccttcaagaaggaaaaatcggctgacaaggggggatgatttagaaaattcccactctccagtcagaggaagcagtcagattcagagtgaggagagaactgtaggctctagatctgtgtctggcgctagttccgttcgaagcaggacttcatctgaaagctcctgggatggatcaactacaagggggtcaaagccagctaaggatagacggaataggaaagttgtgtctggggccgcatctacactgtatggaaaaggaaagagtgttcctgagcactcaatccagattgatgatgataacagagaatggattcctgtatctagcaatgaaataatagatagagatctggggcctcgtcctactgtcccttcatttcaagttcagaggcatcaaatacatggtcatgaactagctcaggcaagtggatcagagtccacagtgtctcttgctccgtttatccttggccatgagatgcaacaagacgaggttgataattctggataatacgttttatcccacaggaccacctgttccgattgttgcaatgcttccaattgtacaattaccaagctggtggtaatgcaacatcagatgctctggcaagccaccacagtg

SEQ ID NO: 38413 - DNA, 610 bp, Arabidopsis thaliana columbia
ttttttttggtaaaatttcatatgaaagttagacctattaccaaaccttagagttagtccccgtattgcaaatcaaaatcatgtttttagaattttatatctacaaaatatatggggtacaaatattattttctaaaggttcgggaaataatagtaaatatctaaaatacagagttctttagatgcaaatgttactttgttctaaagtctaaagcgacgtgttggtgtcataaaacacttctacttgaatcgcattggaagagcatcgtcacgactccatcacacttatatattttgtttattcaaatcttctttcagatttttatacaaaaaatataaattaaataaagaatcccataaatatctctctatcgaactctctctgcttttacaaatctcagaatctccttcagcgaattcacatctcagctgcttttgaatccgccgtaactaaaaacaatcctccttttctcgattcgttaaactatggccccgccggcaggacaaacggcggcggtggctgaagcggctggcgccgatggtgctccacgcagcagcagcgtggatttggtccacgatttcggcatcgttagatcgcgtcttttggtat

SEQ ID NO: 38414 - DNA, 789 bp, Arabidopsis thaliana columbia
ctacaatgaaacgaagttgatcttgttggaaagctaagcctcaaagcttcagaacgatatgtagatgggctcttgatctgttttgaatcgttaagaatttaccttctaatccagttgttctcgcagttcgagtctcagatttgacagatgtcatatgttacatggaaacggtgataacgcttagttaacagctccgatttgggtgaggttgattttgttggacggataagcctcgagtctttctgttgatatgtaaatcgcttcgtggggaattatgttttgaagttggttgttctgacagaggagggtttgacatcaggattgcatccggtgaagagaagcgatgatagctcccaatagaaagctcggatcgaggcaaggttggcttctttggaaatctgactctcagggcgatttgtagataggtatatcgtaccttagttcatcaggagtttccaaaaaaacgatcccgtagctgactggttttatagagttgggtcttctgacagattgcacttgcctaagataaacgtttatatctttcaacacatatcttgttggaagtgatcaagtcatcatcctaattagaagtgtcatatattatatagttaagtaactgatttatgtatattcgtatcacaaatcgaagagatacgaatagaaattgttaactgcaaaacagttacatgtgtatgtgtcctgcattaggttgtctctagagacgtgcccgtagcaaaatttgcatgtaacctataaaacagtttatatacgaataaagtgttggttttg

SEQ ID NO: 38415 - DNA, 813 bp, Arabidopsis thaliana
tttgtctttctttttgtacataaatgtaaaatatattcaaacaaaagcctttgttgttgttgtttgataacttcttcctcctttttatttttcaaaaaaacaaatacaaaagcctttgttccaaagaatgcatccttatttagagagttttgaacttaaaacagagtgacagagagagaaaaagcagagcttctctacttgttatggccgagcttggaagcagatgtggaggccatcatcaagcttcctcgaaccaagttgttacataaatgagattctatttcggaccgttctgtctatggtggatatgagtggccgtggaagatctccatttcgccttttatcaaagatattacttcattgatttcaaatatggtacacaaagttattatagaaaaactgttacataagcaacatatactgaagctgatagacaacatatcatgggacgacatgtcactcccacaaaccaagcaagatcagctcttgtgccaataatggcaaatacaacactaccaacatcacttaaggatggtaaagacttcatattatccgtttggtctctttgctcttcttctatgagtgctaaagaaaaaagttcaaattgtgtcttctgagttccctcaaagcgtaggacgtctttagggtgtatgcaccttccaactggtcacccttcttcgccatggccatgtagaacccgaaacaaaaatctacatggcttgcgttttggatgcacactgtttgatccaggcaacaaccttctccctcgtgtccaagctcttgagatgggtcgtaggtgcgttgttgacggtg

SEQ ID NO: 38416 - DNA, 767 bp, Arabidopsis thaliana columbia
tgtcaatctatgaaacaggatggcgaaggtgaagctggacagatattaaaataagaattaccacaaccacaatttgcctcagtccaaatgatccctcagaattctcatataccaaggtatttcttatgcatagctctagagatgttttgctatatagaatatttatcagtgtttgtgcgacgaatttaatagattgattttgtgattttgttgtttgtagagctttatgtagcaagctattgagtatgagaaaggttcgttaatcactacttaattttgaactttatgatagtaacttaataacattagtcttattcatataaatatttagctatatagtaaatgccgaataatactataatataaacagcaaaacactcgaccaacacagctctgtgtagagcactgggtgtggtcgagtgacaggtcgagtaacagacagataatctaacagggatactcgactgcacagtctgttgccagacaactgggtggtcgagtattaggtcgagtaaaagtaaagaattgcagaaactaagcaacaaattacaggatgcagtacacaacagtagagtaaacaataaaatcaatcagataaagaattcctaaggatggggtaattgagtagtttcgtttcctcggtttacaggtgattgacatgctcaataaattaaccctagacaacaagttcattaaccaaatctaagtgccaccgcaacagagactcgcaagctaacctagtcccagactcaatcaccattgacgag

SEQ ID NO: 38417 - DNA, 653 bp, Arabidopsis thaliana columbia
tcaatcataaaatactaccattgatctcttatttgacagagtagttctaggtaatttgaaccatatcattaaccattcaaataggctaggataccactctattcgattaccccatccttaggaatttctcgtctatctgatttctatgttttatcgttatcgcttaatcgttctcattgcctgtttcttagtttttgcaattactcgaccacacccaatgtctggcaacagactgtgcagtcgagtacagttgtctcgtttcctgcctgttactcgacctgttactcgaccacatcctgcttttggcatcagctagttgtggtagagtgatattagtaattttattataatttatgttttctgtatgttcgcttaggactgttagaaaccccaaaactgttattgcttggctttggcttgacttagtgacttctgatcacatctgatctgttttcatcacacccatttggatttacaacctttagtactacaacgacatgatagtgctttaggattaattgatcttaaacctattatcaatttggcgccgttgccaattgggtgcttatttgctatatttgagattcagaattgttaagatcaagttcgtttttgttataagagtactaacattgtgtcattcagactttgta

SEQ ID NO: 38418 - DNA, 596 bp, Arabidopsis thaliana columbia
gagagttacttagtgaacaataaaaaaaaaagtaaattttatcctaattttccgactacatcaatatgttgcacatgcatctaattgtaattatttatttttcatgttttacaattatgttatataactcccttgtcttacatgtttcagtttgcagaagaagaggaataagacaaagattgatcctataaatcagacaaaggtgatgacaaacaggagaactttaagcaaaaaaaagggaaagatatcagaaaagcggcaacttgtgaagaactaactcgtttcttattgtttcataatgaggttacatcacatatatatacatacttgaggaggttacatgtctaatgggttaggtttacaaaaggctcataactacttaagtctatgaccgacctatgtctggtccccatgggccggacctactggacggaccgactgtggcttctctccatggaccgggccgatggaccgccggtatggtgggccgactggccgatgggccgtctcaccactgggctgacggacctaaccttaaaggacatgggccacggttatggagatcatccatcaagtggtttacacactcccccttg

SEQ ID NO: 38419 - DNA, 420 bp, Arabidopsis thaliana columbia
  unsure (1)..(420): unsure at all n locations
tacacgcgtaattttgggcatttctaagaccctgataatagatatcaaatgaaatgatttgatatttgaagagagacataacacatcttctgttatcatatgattcgagtaaccataagtttgtttaaaacacacaaactggatcggtgacaacatgaaaaacataaaccaatatgataattaacctcctagtttaaatcaaatcaactatctctatgaaaagggcaaatatgtgagaatatgtgataccatcatatcttccagcttggcnaacgagcttagccaagtaaatcagcttttctctctcattctccataactttgatctctaagttctctcggtctatgtttattatgtgagttaagggatgctcgatgttgatagaaatgtaatatatatggtgacaaatatatatatata

SEQ ID NO: 38420 - DNA, 530 bp, Arabidopsis thaliana columbia
  unsure (1)..(530): unsure at all n locations
gttgtacctactagtttatcctcgttatatttcttttgtaaatgactaataaataaatggagagtagagtatacattaaccttaagagtttatagcttgactgtaattaggttatacataatctttctactttgtaattaagaagagcaccaaatgactaactgtgaccacttggtgctgtttaattaagagttactctctagttggtaaaagtttaacggattcatcaaagttaagcttttaattagcttaataagctaagataaatactgaatactgatagatacacctattagtttaagcttttgccggcaataatctgtttacatagtcaggaacaaggcaactaacaaaatcctagcaagtcttcaacaaaacaattagttctttaaaaaatataggagcttccagtttcaacaaaagtctctctagcttcctatgttaggacctaattttgaacctagactcaaacganaataaaaactagcagaacctaagtcatgagacaacatcatccaaggttagaggag

SEQ ID NO: 38421 - DNA, 567 bp, Arabidopsis thaliana columbia
attgctaacacttccaaggaaagtcctgtccatacacacacacacacatagaacataagacacattatcatctccaaaaccatcaaagtttaatctacgcagtacacacctttgtaatgctcctttaccatggcttccaaccacaagcatatcaacaccaagcttctcagcagcttcacatatcgcttctttaggatttccaaattccaacacctttcttggagtaacctaatacacaacaaccaaaccaattagttccaaaacacacacgaatctgactaatttcatataagtgaagtcaaaccccagtctcagcacaaattttggttccttcatcaagacgattcaatccagcgttcttatgactctcttgcaatgagtttataagctcaatcgctacaacacataagaccaaaattttcaaactcaatttcaaaaaaatccaaccattatcaacaaaatgaaatcgccggaatccgatgaagaagattacttacgagcggcgccataagaggaagcatagacgcagctgagatcaagatgaggttgagcagtgaagaggatgat

SEQ ID NO: 38422 - DNA, 618 bp, Arabidopsis thaliana columbia
tttaaacacttaatcgttttgctctgaatcgaataacaaacctggaacatccagatattttctaaaaaaatttattgtttttttttataaacatcacagagacacacacacataggtggaaagaacagaaggaaaaatcaataaacatggacacgcacggtttgacagaatggcaggtgagtcaaaaaagtcaaaacaaccctgaaaagtaaacgttttacatggtcgtcaaatagtaagtcgtcaattttcgtttaattcaccaatcccatttcattatgacgccatcaacgtcctaatttgatcaattaacttctatagttaaggagagaaacttgtgtgagaataaaaagtataaaactcaacaagtacgtaaactgtacttttttcatgatcaaagacgactacacagcgtttgaccaataataatttcgctagtcaaacataagactagcgaaaagtcaataaaaagtttatgatgctattttgtaaccatagaattggtctctaatgtgcttagaaaagagctagaatttttggacgaggacagagttggcgatgcagccttctcgatggtttggtcaagtcgacagtggtgtaggaggagacccatgatga

SEQ ID NO: 38423 - DNA, 602 bp, Arabidopsis thaliana columbia
cgagtcgaatttggttccggtaatttggataggagaattctttatatgttcggtttcggagccagattattcatatcgttttacagtttccagtttttttttttttttttgtcggcttatttcattaaatcccaaatgggcaagttacacaagtccatagaggaatacagcaagttaggcccagacccaaaatcaatctaagaaaagataaacattaacgcaaattgatttaatgacacttgcagatgacgtgtcgcgatccacatcatgtatcaacgatgtatcacgatcctacgccacgtgtctaggcattgagctccaccgctgaaattaccgaccgccgctgaaagtccgatgatccaccgtcaatcggccaaatagcgataaaaaacctccggccttctggtgatctcaaacccaaggctaagacatcgagaatctctgggtcgaatgaggattggcttcaaaaatcttcgagcatatccaaactccaggaaagctccatcattgacaacaccaaatttgatgtagttggttctttggccatactctatgggcataaggaattgatgaagatattactcacgaaatgttggtgagat

SEQ ID NO: 38424 - DNA, 483 bp, Arabidopsis thaliana columbia
tttaccattgatcctacaagagctccatttttataagcattgcacgctttcacgatgtggtgagaccggacgaggaaatgtctacgaacaaactctttgaaatgctgttcattcatcacaacaacagtcgttaattagagtgctgcattttcatcactagtttgaaccaaattttgactaagtattttacctgtggttgttatctcatgctgtaaaccatagtcttgaacgacaataagaatgtgtcctcattgtaatagaaacgctataaatacctttgtagagtcgttcaatattattcatacaattcacatctggtatatcaaaacttcatgcatcgatgataagcctaatgcgttgttctcttttcctcgcttcgggctaccttgagcctcggcaacttcgtggcggttcatcggtgacgaggatcatacactatcattcgtatcaacgtcaggtatcgattgatggtgctccccacac

SEQ ID NO: 38425 - DNA, 833 bp, Arabidopsis thaliana columbia
taagaactattatattgatgttgcacatggatatgtcgtcagattcaagtttatgtcgcaacacaaaatttggtagaagggtcagtttataaatcagcacacatccaaggtccaaagcccacaagaatggcaacactctattaatcccacaaattcaagctgtcctcgtttttgtttgtttagcaatcgatccaattcacatcgaattcaaccgggtcaagaacaagcgactattttgattcacagattccaaatgattttgctcataattagccagtttcagacaaatgccaaatctggaaaacaaaaaacaaaggcaaaaacgaataaatgaaaatgaagtggtttagcggataattttagaggctaaactatgatgaacaagtatgcctccacgttaacaccgcagttcaatatatgcctcgaagactagctttgtttccgtggttttatatcgaaaacaagctaaaggtgatgtgaggcaatctaaaaacaaatcctttctcccccaaaacagtaaaaccatgtacacaggtgaaaaataactatagaaatcgaacaatacaaagaaaatgcggactaaatgagatgttaggaggaggaagaagaaggtggtgacgctccgttatatagggtcattgtgaagccctaattacagctgaaatctacttagatggcttctagctaagaaatagcccaccaccagttctcgaaatgggccgtattaactaacattatccaaacagagaaacaaaacctttttcttgtatcatcaaaaatttctcttcaaacattggggaaaggtacaacaagttacacacaaactagttttg

SEQ ID NO: 38426 - DNA, 928 bp, Arabidopsis thaliana columbia
taaaaagactattgttgttagcggccaccatgggaaacttcacatcgatggcttgagattgatcatcgatgaaggtggtggatataccgatacacctttggctgcaattgttcttccttctaagaagattatccgcgacaccgataatttttccaattaagtatatcatgtcttcatattaaaattgaaacttctagtagtttttgtgattgttctgttgttactttttaattagtgtttcggtcttttccgctacttgtataacttgataatttttttccaaaattagaaaatggtataactacttaacactgttatgaaaaaaaattttgaaacttgtaaattcttttgcatgttgttagcttatgaaccaccaacttagaaaggagataagaagaagctaagaaaaactagacgaccaaaaaaacatgttattatttcgaaataatatatatagccaaaggcccatgaagcccacaagtacattatcatcatttcaagaaacagagagagactaatggcgcaaaaaccacgaacggtgatctgcgtcggagaatccatggatacatatcaaagctcaataacctctggcttaatctccaatctgccatcgacccatcagatttcagctcagctctcgtcatattccttggcgattactgcgatcgtggaccggagactcgaaaagtcatcgatttcttaatctctctgccggagaaacatcccgatcaaactcatgtctttctcgccgggaaccatgactttgccttctctgggttcttaggtttgttgcctcgtccttcagatggatctgatttgaaggatacgtggaaggagtactcaaaaagtgaggagacagaaggatggtatacaggtgaagggttcgaagatatgcatcttcaaggtagaagatgggctggtaaaatta

SEQ ID NO: 38427 - DNA, 584 bp, Arabidopsis thaliana columbia
ctctagatccctataaaattataaaaataaacgtctttgaggttttttttttcacaaaacttttttagataactgtttacacgacatcgtttttaaaatagcaatttgtgatctgccacgacgatgtcgcgtactatccacgtcagacaaacgaatatgatttcttcaatatatttattttttaatatatgcttttttggacaaactaatattttcgatttttatcatatagttttgggtcaaacagataggtacggtcgatgcacgttacgtgggtcccgcaagtggtgcagacctaacttcggtacagttatgtaataatcacctgctccaaatcctctgctcctaacaataaagcctccataactaaccactaatatatatccacgtggataattaaccacgcgtaaagatctcaaactccaaaaaccaaacacattgtttccgtactagtaagattaggggtgttttcgtcatttcgtgttattcctgtcacgcttctttcttcttcttcgtcttcctcatttttatcttctcctttatatatcagaaaaaataaaaatttagagagaggttcggttttg

SEQ ID NO: 38428 - DNA, 942 bp, Arabidopsis thaliana columbia
cctgattggatttcaagcgaagacaaaaagacgtgagatgcgagtggttagtccagatgtaaacccacccggatcgggtcgggtcgggtgtcagcgggatccgcgggggatgggtgggaaagggaagaatcacgcccacacgtcctggtttcagattcaacctacatctctctcttcttcccatgcggtcaacacacacattactctcctctctctctcttcgtgattactaaactacacgattaatatacgaattcgtattctatattaattcagtgtagtatgatttaagaagacaccttatacagaactcttttttttttgtatatagtatggcaaaagaaaatcaaaaatgaaaataaattttgtttggatttactagcgggtgatcgccgaaacgtccctatgtgacatatgttcatgaatgttataataaaaaatgtgatttggtatagatgtatatatatacactgaggaaaatcctcagtgttgttccccaatcatcatatctatatagtaccttgtttttaatcattctgattgaatattttttttatataccatgtatataatatgaaatcaagaaaaaacaaaagcaaaagaccttttggtagacattatgaaacttttttttttagttgaaaaaggcttaaacattatgaaacttgtaagtgatgtgtataatattatgtgtgtacataattttatatgtggacgctgtattattaatatatgatccgacataattaatgaatcacataaaaatagtaagctagatacattaaaaatgaataaaactcatttacagatcgtaaattttaatgctggcctaactgccaagcgtttaacaagcttcataatccagtatccaacattagtttagactatccggtaatgaaattaaaattgattaaatctttaccactttattaagcatggtag

SEQ ID NO: 38429 - DNA, 773 bp, Arabidopsis thaliana columbia
actatgtaaaatgcttatgtttgttttttcgttttcttacgtaattatttcatatttgtggagacaaaatacgtaattatagactaattaggagccgtactgtttagacaacatatatgtctataatgacaaattacttaggcctagaaaaacaaatgcctcttaaaaattttaaattttttcttatagatggatatatatgtgatatagcaatctgttaaaattattgtccgcttttttatattattacatacaattatgctgtctcggtttagcgaaacgctgagcttcgagataatactacacacaacagtccatagctttttaaaagatattggttatgtcttatatgcacaattacatcccaaatgaattactacatgaattaaaattcgattttatagtggaaatagtttgatttttaacgtcatttaaagctatctcaatttgatttaaataatctctatatagagaataggaaaatgtaagatatgaacattaatgagcatatgcaattcactgagctaagagattatacacacaacagtccaaatgtctagttattctcaaatttcttgatatctacaaagaaaagggttacataacatgttaattaggctttagtgagtaatgatccaagtgaattaatggttgcagattttgtttttccaaagagtaattagtgtagaatatcttaacatgggattcagagccacatggcccatcctgattggatttcaagcgaagacaaaaagacgtgagatgcgagtggt

SEQ ID NO: 38430 - DNA, 793 bp, Arabidopsis thaliana columbia
tggtaaatttatttataggtaacttagagagtcttctcattgaagtgttatttatacacacatgctagtattttagcatttacatttctctcttttcttgtaaattttttattaataattgaggtagcaactcaatacaaaactaatgattgatagttgacaaaggatctatgtattggattttttttgtaattaataatagatataagtcattttcgcttaaaataaaaatgttattgtttgtacttactttcttatcgttttatgtattttgagtaatatgtttttgtaaaataaaattattgttaagaatgcacttccaaggctactcctttttaattttaccccttccattttcattatacagcctgaattaattaaattcataaatatttcacaaacaccttcatatatttgccagtcaaggtaataatagtttaattttggaatctaatatttttagattcaattaatgcatgctgtagacatggaggccaggtaaatttatcttccaggccatcttgacgcgaccctgtaagcttggtttgttaaagtactttcttaaagtacgttggtagatttgcaaaattaacctttttttactacccttttgcaacaatactctttgtaacgcccgtgaaccggaaaatcggttaggatttgttttttaaatcatccggtttaattggttgggttaattggaaacctagagtgtgctataaaagaaggaactcgagattagggctttggttagcacttttcgttttataaggagaaaagagagaaaggagaa

SEQ ID NO: 38431 - DNA, 920 bp, Arabidopsis thaliana
ttaacctttttaatcactatcatatcgttccatacttttgagtattgccttctcttctttggtttcgatgactttccattgtcctcatcatcatcaacatcatcagctccattgtccccatcgtcatcttcttcatcatcatcatcatcttccacttcatcactaatctcaaacacttttttcggttttgtagatgcttcagcttcagacttttttcttctctctgttttagaggcaaaagcttcatcacccttgcttcttctttgggtttttgatgcttctggttcacacacttttttcctctgcgtcataggtgttcctgtttcatctctcagttttcttttcagctttttagatcctcatgcttcatcattagcttgttgttgttcatatctagcttgtccaactcaatgactctccgagattccacgtctaatgatctcaaatactcagcatcaacagaatccaacggatcctatcattaacaaaatacaaaaactagtcaagactagcaaatcaatcaaacaaaagtaaaacatctaattgtttatgtgtagtcacaaataacataccattacaagtgttagatgctctgttttgatctgaaatctgaatctaagaagcttcaatgatcgtaaaaaagaaacttgaagagatagagaatgacttttcagtttccttgttaagcaattgagcgtgaactactacttttagggtttgaactgcacaagaaactctaatagagagaaaaagtttgaaagcctctatgagaaatgaagggttttaaaagagttggtttttctttcgtgggctaccgcatacccgcagtccgcaacgggcttgtccgcaacgggcttgtccgctataatccgcagtccgtaatgggcctgccgcgagacccgctaatttgtggcaaaaaa

SEQ ID NO: 38432 - DNA, 754 bp, Arabidopsis thaliana columbia
tcggaaatccttagagtatctttggtctttgaggatcgacctcgaatattctacttaacggttagatattttgggtaattactccagcaatcaagttggcgccgttgccggggaccaattgtgttacctaaggatttaggattagtttctagtctaaaacatttttatttactgttactgatattcatttccgtattttctttggtgttttcaggtgtatgacccgtagcaaaggctcatcacatctagtacactaccacaaagatatcggaaggtttgaaagagagaacaagaaaaagaagcagttagcgtttcagagagaagctgagatggctgcccgtgacgctgctagaaattttgtgaatgatgatggacacccatttgaagaagaacatcatggagtgtttcaggatccaccacctcctgaagcaaatcttcctgctgatggtggaaacgctgcccatgcaccagctgccaacgctgcctgtttagctgctgctaatgctgctcgtttagccgcgttgaatactaggcatgcgcatgctcaacaaactctaagagatcatgatgctcccaatattgaatttttcagagacaggaacaacaggtccctatcaacatgaatgattttgagatcaagattgtgttgttggctcttgtgaagcagaatcagttttacggtcattcgtctgagaatcgtgtctatcacttggataatcttaaagatatttgtgggacacgagaatgaatggag

SEQ ID NO: 38433 - DNA, 776 bp, Arabidopsis thaliana columbia
ctgataacgtgttataaacagagaaagagatagaagaaatgagtgtgttattccattgagataaagggttctttatataggagtacaagaaaaagggtaaaaccctagaaacatctagatgatgggcttagatgatgggccttataatgggcatccttctttattcataacattttttttgttgttggggcaaattggatccatacactggattaaaaataaaataatgtttatgtcggagataaatttacaattggaagaaagaaaaatagtaaaggacaaatagaaaaatgggggatcacatggggacaagaagtaaataaatcccgccaatgtatgataaaagccttcttggttgttgttgttacgtttaataacgtctccatcactcttttattataataaaaaacctctaaaacccctcaaaaattaattaacaaatccgagacaagttagagaagagaagagcttgacgacgatgaatatgatcgaccctttaaataaccttctcttctcgtcaacgcgtttccttcttcttctttcctcgtttttctcttgtcttccaactccaccacctcctctcctgttcatggtggatgggagtcggagatcctcttccacttccgccggaaaagaaccgtcgggaggttaataaaccgccggatattgcgtcgacttcctcctcctccgcttcggcggtgaataatgctcggttgtccgatgctccgattcttttgtttgtttatttccataaggctttccgtgcgcagtagcgg

SEQ ID NO: 38434 - DNA, 1174 bp, Arabidopsis thaliana columbia
ttttttataacggcaacatgcttgtaatgcaacaggaaacctccggctctataactaaacgttgacctcatctgaaatatatggactgctaatattaatatgaaaataatacatttaaaaaactagatagttgacaggtagtttaaaacacacatgtatttaatcttgttatgacttatatgtgattatgtgtacatgtaatattaagaaaatttccaagagttaacaattttggtctcgggtgactaatcggccttgcacaattgtagttctacttgggagtataattttgcatggattaacgtaaataccgttatggtaccttgaattcgaattacttagatagattgctaacactacaaaaaaagttttcagcataccattatagcacggattactcaattgctattgaagatgtcatgtaattttcgttattatattacaatagttgataaacgctaagatataattttaatattacagcattttataaacgctgatataaagttttaatgagcgggaacacaaaatacttattccgccaaataacacttagtcattttcgagaaaaaaactcaaacacaaaacaacttttcgaaaaccctaaaaaagaaaactctctcagtcctcagccgtcagtccgacgaactcattattccggccaccgattaaaccttccgttgcctctccgtcgccgtcgtgaatgctcttcgtgcaactggaacctctgccggcactcaatccgctctatatctgtccacttcgagatcgaatcgaaggcaagtcattttctatgttttttttttctcttttgacactcaattcgttaccctagatctgttttcatcaatctctgagactcaataaccgatgtttgtgtgattttagaattcgttaccctagatctgttttctttatcgattcttaaaattttgtctactttgcatgcctttgtttattgcgaattcatatgaatttcgtcttagtaatgttaacctgaactgctttaggtgcttgtgaacaattttgcattcgaaattgtgtatttatttgggcattagagttgcaaattttggattttggctctgtaatgtttaaatattaattgagtggtaaaacttgagaatttaattgtgagattgattaaacttcgtctgtagtctgaatagtgttg

SEQ ID NO: 38435 - DNA, 694 bp, Arabidopsis thaliana columbia
catcgcaaatccatcgcaaattttgctagggatttgcaactacaaaaacagaacctcgcaaatccatcagaacatttgcgacgaatgagcaagacttagaatttgcgactacttgttactaacaaagtccctcgcaaattgcgaggaatgagcgagaccgcatatttgcaactaatttgctaccgattgtgtccctcgcaaattgcgagtgcttcgcgaggcatttagttcgttgcataatttgcgaggaatttgctactgatttgattttgggacgcgcgttttgcgaggaacagttgttcgtcgcaattccctcgttatctgctatttgtgagggattagcgacggtttcttccctcgcaaaagacatgttttcttgtaaattcacttaattttattaacatcacgtttaaaaatgatataaaaatatacatcaataaaaagtgatgctaataactttttaagtattttaactatagaaaaaaaaactaaccataatttattgtagaatgaggaggaattgttattaccacaaataaataatcataatgagtttattatttattattaatttctacatttctttcaaatcatctaactaaatacatttgttttcttcactacaaatccttcttttacgctcacaatttttgttttactatgttatctccaaaaacgtttttaatatctcata

SEQ ID NO: 38436 - DNA, 722 bp, Arabidopsis thaliana
tcggtaaagatacatgttcctcaaacctcaaaccgctctcgatttcaatcctctcccttctctactcaaattctcaacaagaatcctaatctcttctttctcagaatcttttcttctccttctttaaccctaaccctaatgccgctgaaaacaatgctgagaggagtaggaacgaaggagaattcaacgacggaggagcctccgccgggaacgaagccaatcgatgctgtcacaaaggcaacgacggagcctccgatgacgacggaggagccatcagcgtcgaagcaaaatccggtcgtaattgagggaagaggagttgaagaagaacaaatcccgaccataatcacgaccgtagtggaagaaggagagaagtctgacaacaatgaggaagaaaattctgagaaggatgagaaagaagagagtgaagaagaagagagtgaagaagaagagaaagaagaagaagagaaagaggaagaggagaaagaagaagaggggaatgttgccggaggaggatcctccgatgatagtagtagaaccttgggcaaagagtcctcctccgatgagaatatggatgatgagactgcagtgggaaagcaagtggatattccggcggctatggtaaggatttctcaagtatttgaatggtgtgaaactggtagaacaggataatactatgatttctgtagaaaactgtcattactaggatataactatgtgtatga

SEQ ID NO: 38437 - DNA, 177 bp, Arabidopsis thaliana columbia
  unsure (1)..(177): unsure at all n locations
nnnnnnnnnnnnnnnnnnnnctaaagggtacacagacaccaaggagagcaccggaaatgagcaagctgctggcatcgttgatacgtccaccaccactgcacaccattggcaagcctactaagcgaccgatgctttcaggaacaggctaggagtcagcgagcattttagttgggcgcc

SEQ ID NO: 38438 - DNA, 520 bp, Arabidopsis thaliana columbia
caggagtctcggaaggtaggcatggctatgaaacaatggttccacttgttagcaaaacacattttaagacacttcaatgacgtaaagaagaagatatctcacttgacttctaaagataatcctggcttgaggattatcattcttagagtgaatccaagtgtatgcagggaagagaatggtgtcagtggaatcttcgatgataatttctgacaagcaaatctcagtggaaagaagattggtgacaagaatggcaccaggtttaccaaagttaatcgggacagtgaaatcggctgtgaatacgaggtatctcggatctgtcacagcctttgggagtcccatcacaggagattctaaactctttctgcctgtaccagtttctgcaaaatatcaagaagctattcatatacatatctaatctctatacggaacatgtaactaaaagatgtggtaagcagaacaaatatgcattacatacattcggtgacgtgggattaagaaaagggatgatgaaactatgaaa

SEQ ID NO: 38439 - DNA, 495 bp, Arabidopsis thaliana columbia
ttccatagaataagttatccgcctcgtcgcatatcgagatatataagtatccatcatcgattacacttccagctgcgaaagaagacggatatacaccgtattccactatatactttgatttctatactgaggtagagatgacatctcatgaccagttgcaatcgggaaatcccgtcatgagttatgaggcaaacgcttcatgtatctcctcagttgctgatgattatgaatgctctgattacgtaagttttaccacgaatctgtgacaaactttatctgaccgtctctttcttcaaatatctgatttctgttttcttctaaaagcaggtaaatagacgagctaactgtagcagcagtagtgattcaaagctctcggaagaagtagcatgcagcagtagcaaaaaaactcggttcttccctgtggttcaagatgaacaactagttgcggatcaggaaagtgatggatctgattccgagtgttttagagtcaaacgc

SEQ ID NO: 38440 - DNA, 581 bp, Arabidopsis thaliana columbia
ctcttctaattttcatttgagaacttagtagctcaagttcattgaatcaaagaaacgaataaaatatctttatcaaaagagtttttttagaatacaaacaaatagttgttctccacgatccataattgttcctgtctatgtttttgaacttttcttaaccgatcaaccgatcgacgtccatcaaatttcattgcaaaggtggttcttttgttgatagaatcgatcagcatcaagttccatctttgtttttcgataagcttgagagtagaattgtatgtaccatggtataaactaggagagcacatggaatattagagtggaatgactgattgagccaaatcgtagcttggaaataatctggaaagaacttagaactctcaaccatagctttaggtacaaaaattttgtttgtcagaatcaaacgacatgctattggcttgtggttccaatattacaagataaaatcatatgacttatctgttggatactatcatactaattaagcttaaggaatgctaactctaagaagtggtatgcaacgagacgatgagcaagatgaaatatcagctcttgtgagtagt

SEQ ID NO: 38441 - DNA, 480 bp, Arabidopsis thaliana
  unsure (1)..(480): unsure at all n locations
atcgtctattgttatgtatgtaaaaaagaaaaaataaaaataaatatataaacttatgaaatttaacctatttattttataataaggaaatgattcgatgattaatgtgaaaagcgttaccctccggcacatagggttgcgtgtggttagttaaaacgtgtgtacatggtgtagttgtggaggtgtgtgttagtggtatgtgccgtgttattgtgggtatttaatgtgtgttatgtgtttactgtttggtgtcggcgttggttgtgtgttttgagtattgtggtgggtgtgttgtttgtcttttcgtttgctgtttttgcgttttggtttggttgggctgnggtgcggtgggtgggttttcttcgtgtggcntgcgtggttgtcgctcttgggggggttgttttgtgcgtggtntcgttcgtgttcgaagtgggttgtctctgttggggtgtaacggtgngcgtgttggtttttggtttt

SEQ ID NO: 38442 - DNA, 573 bp, Arabidopsis thaliana columbia
tagtgattcgtaccaatatgaatgataattctcaaccggtgacgttttacattttgtgaaaccgtcctttaacattttgttaagtgaatgaatgtggtgttcctgtaataaagtagaaaactcaggggtaacaacgtaattaagtggaaaactcaggggtaacaacgtaattactatcttttccgttcctaactgacagatttcttcaaggaaaacagcaaaacaattggcagacaaacacaaaacacccaggattgctctcttctctacctcgttcttcttcttcttcacgacttcggtcgggaaaaaattcccttgccgtaaccgcattttcaaccctaatgactgacccagaggtaaaaatctcattttcaatccctaaatttccgccgtgttcgacttcacattcccaattaaaaaaaaaacaagtttttattgtatcttctctgtttctttcaggtttcatttctctttatataacggattgttgtctctgatttcgtttattgatctggattggcatttcggatatgggttttgattatctcgttctgggattgcgatgcattgttt

SEQ ID NO: 38443 - DNA, 572 bp, Arabidopsis thaliana columbia
tagtaacgacagaatattcttaaatatattctatctctattttattattaattatgaatattaccttttactatataaacttatgaactttaacctatttattttataataaggaaataattcaataatttatataaaatacattattataaagaaaatcacattacatataattaattaaaacatatatctatggtataattgtagacatatatgttagtagtatatgttatgttattataagtttttaatctatgttatgtctttaatatttaatgtcagcattaattatgtattttaagttttatgtcagggtatgttatttgttttttcatttaatatttttgcattttagtttgattggactaaaataaaataaataatttttttagtataaaataaatacttattataatttgccagattattttgtaaataataaagttcatattcaaagtgaattgtatatcttcaaatataaagatacactattcaatttttcattttgaagataaaaataaaacattagaaagggtctaagaaaaccacgaaattatatttcctttttgaaa

SEQ ID NO: 38444 - DNA, 597 bp, Arabidopsis thaliana columbia
gtttaaaacgattattcgttttttctataactaaaattttaacttttattcgtaaagcttattatattagtttttgttagtcatataaatactatgatatttaattcatgtggatcatcatattacaaaacttatttttggttgtaattgattaagtgtgaaagtcaaaattaagcatggacatgtaaatctaaccgaccttttcaaactaaaccagagttgtaggattatcagatgtccaatgcaggtacaaattacccaaccagtggcggacctactaaaaaggtagggggttcagttgacccaggttaaatttacatattagttttaatgcaaaggaatcctaacggagaaagtagcacagttgataaactcctcttcaatgatccacctttatctctagtttgatcctcccttcttagacttttggtgtaatttttgttctattacatgatcaaaaaaaatatatgaaccaggtaaaaattaatcctggtccgccacctgtaccaaaaagtattattagtcgttgacaataaaaatttttaagaaagcatatatattattgatcgaaaataattcatgaaattatgtatatag

SEQ ID NO: 38445 - DNA, 1216 bp, Arabidopsis thaliana
tgtaattccatttgcaatgcattttgcagttaaatatcagcttccttcaataaaacaaaaaacaaacatttcacatcgtgaaaaacaaactaaaaataaaccggagatgcatgaataatagatccccaaagaaacagaacaagtagggagaaaaaaggggtaattttgctcaaggtcaaagtgaacaaaaacctacctctttttgtgtatctccaatatgaggattcatagaacattttactaaaattccctccttaacacacacaaaactcttagaacacataacagctgattcattcattcctctctttctctcaatatggacgagaccggtttcccccatggtggtttctgtctggccctgaactgtagttgtctcttcttctgtctcccccaccaccaccatagccaccacctcctcctcctctacccccacctctgcgacattcacaagtttgcaaggacaacattattagatcagacacagacatctctaattaaaaccagcttactacgtaagatgaagtgactcaacacacaacaaagacgagtcttatagagcatggaaaaccagataaagatacaacttatatggggaattactaggagcttataagaagcatgaacaaacaacagatctcttcacaaccaagagcagccacagctataggttacaagataactacatagatttatttcctatggcatgaacatagacctaaggcataatttgatgacatacgaactcccaaccctttctgtcatacccagatgagtgtacaaagcaaatccccagtaggatacaagatccaaacagtcttcagagacaaggaacataaacttagcattgcaaaaactcatattccctactaaaattataaagctaaaagcctaaaacaactagagtacaaacacctataagatggagcaggtggtaacagctaaatggtaacaaaaaagaatgctgataaatgatcaggacagctacctctggtcaaaggtaggagcacggggcgcagacttttctgccatcgttacactaatcttgtccccctcatttcgtaatctacaaaacaatccaccaccattcacgaaacagaacttttaaacaattttaagctagacagcaattccatagtacatactgttgaaaaagccgcctgcagagtgtgcagcgctgggatcttcataagccagacaggcgtcacctttatag

SEQ ID NO: 38446 - DNA, 963 bp, Arabidopsis thaliana columbia
taatatcatgataaatatttgtaattttagtatttagatacccggaaatatttaattttatttataacatattatttctattattatctcagtttagttgctaataattttatgtgtacataatatcttaaaggaaaaaacaaataagatcttgtatctctaaacatattatgatttgagtcatttgacaaaaataaaatatttgatagaatgtatgtcgcatattttgttttggctatgtacttaatttgttatatttggtaaatgagaatatattggaatatatttataacataaatatgtaaacaagtttctttataattggttcttatgagctctaaataaaatctaatggcaaaaaacaaaacaacataaaaattattacttatattttattaataaaacatcccctatttcgccttaatgacatttgatttttgtcgattgtttttgttttatctctaacaaattaaaaaatacaaaatattttgatttatattcgaaataaatatattgatgctgaatattcagttatcatttaatattcagtgttgtttcctttttggtttttgtagacaagttgtgggttcagaaatccacactggagatttatatttaggtttatgtgaaaaagagctagatattcaataaaactttgagaattatattgctaagaacagatggatataacgggcgaaaagcgcatgacttccagattggtttcagacaggaatgacatcagcgttttgattatcgtcgcaggttatgattaagccatctgcgtaggttgggaagaggcagtgcaccaccggcacccactggagactgcttctgccggagaactatcatcagaacgttgtcgtgccttcttaccatccccatcacgctcactgtgcttccttcgtttatgtacacgttgcatcacacccaatcaaatatgattttaaatcagtagcaaaggga

SEQ ID NO: 38447 - DNA, 818 bp, Arabidopsis thaliana columbia
cacaactcaaaacgtaaacaaactagatattgatccgcggtacaccgagtatggatatgttcattagaaagttatagatatttttttataagaattattatttctatataaatattatattcttcacacataatttttatttatgtaaattttggataattcatattttatgatctcatatttgttagtttaatagtaaaattcagtatttgttttttttgtttgggttttttagacgtaataaatatataaaacttgtattatttagagattgacccgcggtacactgagattgataattttgtcagaaaattagatatttttattttaactaatattatctatatgtatataacatattcaagaggtagatcaaaagcatatatttttattaaataaaaaataatatttttgtctttaatatgatctatagatacgtgctgttggtgtcggatcccgcaccgtggactcgggaccggtcaaagatcgtcgcgtaagagggaagggtctaaaagaggaaatgcccatgggcttctttgagtaaaagtataacgcgagacgattgatcagcgaggtggactggacatcgatgtcaaaactgcccggattggagagtcgagtgggccagaagatgaagcccaggaaattcggaatcaattcaaattcgaacgtttgaatagttaattcgaagactgaaacggacacatttaatatagaataattgtgcgtaaatgggaattaaatgtattctttgagtataaattgtttgtcaaagaccatgtagaaacacacgcatttttgtgcaaacttactataca

SEQ ID NO: 38448 - DNA, 1011 bp, Arabidopsis thaliana columbia
cttgcccgttcttgccctttgatgttttagcaccgtttggacacacgtggtcaattggctttgcaatcgggcaaaattttctcattcggtcctttggccgtgcccgatgtccttatgcgggtcactacattctcccctccttaatagaattcgccctcgaattctaacctttggccattcccaacttccttgtcgtaattatacaattgcctgctcctcgaaccgaactttctttagtttgcctgtttccctgaagtatgctcaatctagatctcgagcccaactaagtttaatttctttcctccgattcttcatttgaccggatgttgttgaggctctttcgatgggtttttaaactcatctgattcttattcaagtgatttctcactcatataatggtcggccacacacaagcaagaaaatacttaacttatcatacattcaaaaggttcatacaagttataagtaccggattttagtcttagtcttatacactatttaacaagtcctaagccttagtatatttacacacaaaatttcgctatgactcagccgattctatacttagccgaaaagttaactatattttcctagatgatcttacggaccatcggtcaagggttcctacacttgggacactcacaccttacccacaaaaacgagggcatcccttcattcaaacacttctcctctgcccccgcagtcattaatggcccaactcctctcaaagatctttcgcccgcatttggcgcaacatacgggcagtacatggacacatgccccaatcctctgcaacaatagcacttggtataattatccatatatggcatagtcggtgatgaatacaagcagtcttcggtcagatgatctgtatggccgcatatatcacacgggcgcttagccggagtggccaacttcctcccaactgactttctcgctgttgcccgtattctgggcttaacttggagttaatccatatccgatccaagtgaatgcgggtttatccaatga

SEQ ID NO: 38449 - DNA, 524 bp, Arabidopsis thaliana columbia
actctatacccagaagataagagacaaaaagtcgtccacggaggaagatgaccttgtgggatacgtgtgcggggtcctcggaagagatttgtcggaggaccgatggcgagattttcaggtggagatgtcagaagcagttcttgacgtcgaacgcctcatattcaaagatctcatcggcgagaccatacgccagttggcttttcttaacaggtccgactcgctgcgtaggaggctgctcttttgatataaaactagactaaattctctgacccaagtctgaaactaaacccaacctacgacctataccatgtctaaccaaacatgcgagagtgatagttcttttgtgtgtttttttgtgtgaaatgtgtgatttatcaagtttgggacttggcgcctgttgtctaaaagactaaaaccatacactcttttttttgctctttctgaatcaaactgctgctcatttgtgtggtgtattcggactaataaagactttaaaagtgttatgggcttcaagtggacggttt

SEQ ID NO: 38450 - DNA, 735 bp, Arabidopsis thaliana columbia
agcaccattccagagatgagtctttttaagcatgtcaggtacatgcttcacgttttgcagagtaagctcacgtccccaagtcagcttcagaaccactttgcccttaccttccatcttagacatcaccgttttaaaaaattcaaaaaattctcaatccgtctaaagcgataaggtaaaagtggatttattgaattaagattgtaggagcacaaacactgaattgagaaacaagtacgaattttattaaataacgataatgataaattacaataacagtaattaagcacataaagtaaatcacggaggtaagatatgatatattttttcttaattcaataaatcggccgtaaatgctttttggacatcacgatttatgaatcccaggatacaaccgatcacaaactaatacccgagcacaaaagtattagactcaagcgaacttgatctacgatatactctgacaactactaaactaagaacttacttttaagtagcaagagagaagagagactttagaatttagagtgttttgtgtttgggagcttgagaaataattagaggctgggtctctttataacaccccaaaccgtacatcaatagcccatcctattgttttgtcaaaaaaaaaagcccatggagcccacttaaattcaagtgaagcaaatcaataatgttaaagggttttgttacgtgtattgttggttgcacatatatattggtatatctatctccctc

SEQ ID NO: 38451 - DNA, 959 bp, Arabidopsis thaliana columbia
taatcgtggattagttaatgatttgagtaggttattctcttaaattgatatttatataataaatcaccgaaggctataatacgtacaaagctccatcatcaaattcttaggtttctagaatcgaacactaacttctattaaattagtttaagatgaacgttatttatgaattatgtgtatgatgaaatattgagaatgtttttagaaaaaaatattttaatactaaaaataattttttttgcatgagtgaatgattagataaataacaattatttaaattaaacgatacaaaaaatccgaaaaaaacacggcgtacggcgggtgatcacctagtagttttaaacatgaaactagtgaagccagccttggttcgtgttgtccatagacccggtgagtctttgatgcctcgacttctcttttttggtcctcctttgcatattttttcagagcatggcttattctgtatgcattttttgcctctggtttctcgttgaacattgattttatggaaatcatgtctctgttggcatcttctgcttgaggacaatagcaggattattaggagcgtgtatttcttgtggctggtcaagttctctcgtcgatccggttgctgttttgcttcgttgagtagttgttgtgttgttggataagttgaggatttagctatcggtggtagctagctttcctctccttttgagagctccgcaagtatttcttttcttgggttttgttcatggcttgttctctgttatggcttcctgttgttagtgttgttgtttgaagaatgctttgatttgcgtactcgcttattccttgcgtcttggttttgcattagaggagctagtagggctaatggctctcgtgtggtgctgaatggacttttcttgctctgcgctgctgacttcgaggaacgaacttggtagagagacttgcaccttttgttttttttggcgtgtgag

SEQ ID NO: 38452 - DNA, 845 bp, Arabidopsis thaliana columbia
atacaaaacgatagagaaagagagagagaaggtgatctccgagctcaagggtgcggcggcggcgagttggcagctcacggcggcactacgggtttgcttgtgatgagggcacaccttagagttaggacttagaacaagtatttatacttggggacatgtctctactcttcgggccataactcctaaacagcttcaaggattgcttcgattcgactttgacgttaatcttgactcttctagctttccatccataccaatgtatcttgataccgtgattaggaagaccttggacggatgccacacatccgaagcactggaattgatcgccttttgatacttttttctcggaaactctaaaaatcttcttgacacctaaaatacgtgtttttcctcatcttggctctagaatggcaccaaattctctctgaaacataagaaaacaatagctaaaacggcccaaaaaaccgtgttatcactaagaagagcccaccacataattacatcgaaagcaaaagagttttatcatttgggttctaacaaatttacgtgtcatcttgagattacaaccgtaacacgtgttgatgagtcatcagaagtgtaccgacatcctctttcgttaaaaatttacaaggatttttaaatacatttttttggctggggaaaaaattgttacggaaaaaatttaggcgggaatttgtttttgaataattcactctaatgccctttttttattgccccttttcaactctaccctttttcccatttttatttctacccgcatctaataggtttattcccagaaatacccttactgaactacgtacacttcatcgacctaattcatt

SEQ ID NO: 38453 - DNA, 637 bp, Arabidopsis thaliana columbia
catgcctatcttctttgaattccaaaccctttactagactaacacttttttgtatcccccttaagaactctaaacaatttttttttccttttctttttattttcattctctttctcattcccattcaatccattcacaatcccaatcccaaatacaagtctccacctagtcctagataacccaaaaagcgtgggctaggtctacatgaaagactgctcttgtcggctcatagctaacacgttataccaagctcaatcgaaaaagacctcacagtcagacacaaatgatctttggcataaaataaggctaggctaagggtatgggaaactgctctaaaaatgagagacatctacttggattaacagagggtggtgaagtgaataagataatccaagtatgtatatggtagccatgagttcacaaacaatgcatagacatgataattacaaattcagttcaggttctaatagatagggaatgacatcagataagcgagtttcgaatcaaagtagtatagtcaagttacaaattagaagcagggtgcagtcttacttcagagatacaatcggttatgcatagagaactaacaacctgggcattgaacttactttattgaatcaaaacatgcttatcggtt

SEQ ID NO: 38454 - DNA, 505 bp, Arabidopsis thaliana columbia
agcagttagttgatttaagaggggaattgaagaagcttacctgcgactgcgagtgaaggcggcgaagagcgaggaagaacaacaaacgccgtgaagctagcttttttgggtttgggccaaacgagattagtttctaacagatgtttttccggacccggaccggtaatacccacgatccgcttaattatttggtccctgtctagctctaaaatcccggtgcaaacgaaccggcaaaaccaacgacctagcggttcggtattttgtttctgaaatctgaaccctccgatttgttcttctttttttttttctttttataatgcaaacaattgatgaaaaaatatattatggtccgaatggtaacctcggtttttaatatgtgagaaaagtggtataacattgcagtacagttcaattacggtacgtgcgagaaaaatatatttgcgggacaaatatggtgtgtacaaataagcggtacagaataatgtctgattgatgaaaaattatt

SEQ ID NO: 38455 - DNA, 511 bp, Arabidopsis thaliana columbia
ccataaaagccaaacttagttccttcaattttgggccaatgaaattcgaaagcccaaattacataatgggccgaaccatattattctctctctcgctctctttctttctctgtgctcttctccttcacggcgaagtgactcacttccatggattcctctctgctctcggcggctacggccgataccttcaacggcaatgcggcggatcaaattcctcctccgttacagcctccgggaacggatatgactggaatttccttcagggatcagctctggatcaattcataccctcttgatcgtaactacatcttcgattacttcgctttgtctccgttctacgatacaacttgcaacaatgagattcttcggagaagatccattcaccctctcgatctctctcacctctcgtaagctcctcctcactgctctacagatagggttatgttgaactcatatagggttcaactttaggtcgaattagggtgtggtctccctgggatactgctagaga

SEQ ID NO: 38456 - DNA, 499 bp, Arabidopsis thaliana columbia
ctccatcatctaaagttgacaaaaattaagaaaagtacaattaaaaaggtttgaaagtcagatgaagatcggtcagatttgaagatttacgagtaagtaccaaccgtgagtttggtgatgagacaaataaatagttttgtatagaagtgggttctggagaaattcggaacagccaatggggcaacaaattctcaagtattaacacttaaaccacaatggcacgaagttgctggtagtacacttcttcggaatcctgttgacttagtcgagtgaattaataatcgagcaatcttccatgttgccccattgacatttctgagtttcaccaaaacccacatgtaaacaaaaccatctcttatattatattggttatgtgccttaatcctccctatcaattatattactttcgttgctaatgtactctgctaacatgaatgttttatacatagatgaacaaagacgttatggatgtgcttgaggacattgttacgaattgagc

SEQ ID NO: 38457 - DNA, 311 bp, Arabidopsis thaliana columbia
ccaaaatctacaatgctctgttgggtctgttgcagatataagtcaaggtttgaatttgatagaactgacacaataattaatatagataaatggttctagtttctagataagaacactttattctatgcaacacatattagaactgatattgaacaaaatcatattataatctatgtgttcgacttctacatttttgacaaaagggactattagggtaaaccattccccaaaagtgaactttatatccaattcacatgtgtcattgaaattctgtgaatatgttgaaaatagataaccatgagaactaatct

SEQ ID NO: 38458 - DNA, 510 bp, Arabidopsis thaliana columbia
gatataataacaataaagtagtaaatcttagtgctgtagacgaaacgtttagtcattctgcgacttgagataagagaaaatgtttacttatttttggtttcttttggtggtgtaaaacgtttgatgatgggttaaaccatacagatttgaaagtattgaggttaaacgtatgaataaactttcccgttacatttctggtaaatggactaatttgaatatttgtataatactggggttattgtgaaaagcttttaaagaaagggaaaagaaaagagagctttttgagaaacgcattaacacaccataacttcatcatcaaccttctcctctttcttacgcaattacaacttcaacgcctctctatctcttcgccgtgaatgtcgagatagtcgtaagctctctgcttttcaaatttctctcaaattgaggtagagagagagggcacagagatagagagagaggggcataggaaacggtgatttcccagttcccggagaacaatcggctgat

SEQ ID NO: 38459 - DNA, 356 bp, Arabidopsis thaliana columbia
aacctccgtcgtcaccatcggtagacaagacttagattttttttctttttttccaggtgttgggttttcgtatgaaactatgaatgctactttacaaagggtgaattttcacaaattgttaagatatttatggttatttttttaaccccaactctaaaataatttaaatagatttatccggattattagatttgagcataaaattttactagattttaacccgccatccgttgtcagtctatttttacttttatgcttccatgatcttcattgtcgggttgaagcttcttgtttatgtttcaggagttggtaggggcgcctttccgtctttggtggtgtggtttcgcactgatgta

SEQ ID NO: 38460 - DNA, 1095 bp, Arabidopsis thaliana columbia
ttcatcgtccaaagaacctctaaagagccgagtagtgtgatttacaagagcaaagactcaagagagtgagaaggttttgtaaatagagagacgagggtaaaactggaaaagtgttgtacttgctaggtacacgggttgacatatatttttaattttgtgaatgaaagtagacaagtccgattcaaaagaaaaaaagtccagtcataaatatatttatttcttggtttcgtggaaaagaggtcgtagcgctctgcatttgccgtggacaataggaaaagttgtgaaagagatgttgcgtggaaatgtatggtataattcataaatttaaatagataaatccagtctgaaatgtggttatatatttcaacggaacataaaagaattaggaaaagagaggcgtaaattgcgggggacgtacttggagtatacgaagcagggacagtacaaaaatatgtacaattccgtgactccgaatgtctcgtgcagtgtcaatttgtcactattcttttctctctttttacagatttttagaaaccatgcatgattaatgttcttttaaaaagttgttgcatggttgtttttattattgcaaacgtagtagaaggaagaacagtgtcaagtctattagtgcatgcggttatatataatccaaatgataaatacggatatagtactgctttctaaagatgagttagtgaaattaatgaattttgggggaaataaacgccgtactatggtccattcgtacagaatgacccaccaactgactttatatttcttccatttacgtgtcataccaataataccaacacgacttttcttctaaaattaaatgcatgtatctgttctgtgaaatgatgattttcttattaggtactgcatagagaacaccactatttgcttcatagttcatacaacgttttaaagtgaagtttagtttggtaaaagttgcatttacatactcaataatttaacagacgttgtgctacttgcgagtaatcactactggtcaattaatatataactcttccggagttactcaaatagtgtgtatagatatatagcaaattagcaatggtttaaatgcgaaagcgt

SEQ ID NO: 38461 - DNA, 598 bp, Arabidopsis thaliana columbia
taaaaatggaaggttttttttttttttttggaatgcgatgaagacaagtccccgaccaactaatgtcatatttaaaagactttgctttgttgacatctgcaatttaggactagatcgtggtccgtggatagagatgtccaaattccaaattccaaaaaaaaaaaaaaaaataccacaaaaaattaaataatgtttttaagtaattccttaaactttccgtatattctctgcttcaaacacgggaagcgttaccatgtcacatcgtcaatatatcaaagattctctcattaaaagaaagtcaagaaaatgaatgaaatgaaattgtaataataactaaaaatatgcaactataaataaataattataaggaaaatgtatttttagagaattagaaaatagctttatttgatcattcaacttttattgagttagtaatacacaatgaaaacgtaatatgatccttttttcagccaactattggttttggttgatatgctttatcatctctggaatttcttctaggacaacattttttaaagggtagttcagggttatgatatagagtggtatggtgtggctattctattaatctacagtg

SEQ ID NO: 38462 - DNA, 677 bp, Arabidopsis thaliana columbia
tcgactcacccctctttcctcattgagaccctgtaccaaggtattggttactcgatctgatactcgaccacccagttgtctggcaacagactgtgcagtcgagtatccctgtttcatttcctgtctgttactcgacctgtcactcgacctcacccagagctctgcaaagagctgtgttggtcgagtgttttactgtttctgtttgattttctgttttctacatgttcacttaggactgctggaacacaccaaaacctgttatgcttggcttgacttagtgacttctgatcacatcttgattgttagcatcacacccatttggattgacaacctaaatactacaatgacatgattggtgttttaggataattgactaaaaacctattatcacatacacatgacatcaagtcatattcgactccaaaacactaaccaaccttcttcttgcgtctcaaagatttcatggtgttgccaaagttcgtataagtccttggctttgtgtcttctaacaaggacacactacttaggcttataagatccggttgcggtttaagttcttatactcaatcatacacatgacatcaagtcatattcgactccaaaacactaaccaaccttattcttgcttctcaaagcttacatggtgtagccaaagtccgtatgagtctttggctttg

SEQ ID NO: 38463 - DNA, 709 bp, Arabidopsis thaliana columbia
tgtcgagtccttgtgaggatctcatcagaacatcaatgtggcgtaaaccatatccccatgatagacgtgattacctagctaagagagattcaagagtcagtaatcttagaggaggcgagctgaaacgtggcactcgtcgagacccactactatccaatcccatccaaacctacaaaacaaaactaaggtcatctctagactatggttatgagtattttggacctgaatcttttgagttttcaggacgtgagagggagtatctacaatgggaactcaacatggataagtactttaagtactattccattcctaaagaagagcagctctactattgtcttgaacaactcatgggaaacgcaaaacattgggaatcgagaagagaaagatagactgtggtataaggagcaatcactcaaaacgtggggacaactaaagttgcttatgagggagcgatatgcaccacacagtcttctccaacatggtcgacacacttaccatccaaaggaactaagccgagagaacactacacatcaacgtgttagttccaatcaaattgcgaatcaagctccgccaagaagaatgagatcggtaaatgtgcaaaagaagtcacaagccccataccggtacttgagctagatgttgaccacatgctaaactagagcaaggtaagtcctatgattctttaaaatcaaatgaaccaacatgttat

SEQ ID NO: 38464 - DNA, 1104 bp, Arabidopsis thaliana columbia
taactcaacttttttgtttagtttatttctggaaaacagttttaattattttaactagaacaaaacaataataatcacaaccgctcttcttcccaagttctctgttttcataacttccaacgtgattgattcactccaactgattttcgcaattactcacaacttaaaaggtatttgatcaacactcttctcattttttatctctcacattctgcaacttttttccttcgtccatctcaagcctgatcaaaaagcttttgtcgaaccaggtaatatgttattcatcaaaattatttcatatttaattgcttacatagtctacactctaaagtttcattaatttcttttgcttgaacagtatctgaagatggagactctgacaacaacgagctgatggagatcagggagctgatggatatcaggaagctacatcaaatctacatcaaacgtctgagctgctgacatggacgcgtgactgacttggaggagctggagtggttgatgtgacgagccaagaagctgtgctgacttggcgtggtgatcaaagacgaaagtcggttgagaagatttggtgaatattcttctcaacaagttaagcaaagagatagacttaaatatcaaggaggatctcaaacaaggaaagagataggcttgaatatcaagaaggatctcgaacaaggaaaaggataggattggcgatcaagaaagattcctttagtgattctcggagatcttagggtttagggttctggaaaataaggtataagtattctatagctagcgtggagtcgctttaagcactctagaatattgccatacgtgtatagctttcgaagcctagcaaaagcttagaaaagtgtgtggtttgtaatccctcctcttcacaggcgtgtgataagaaacagaggagtgattaggcttagatttgttcttagtcggggttgatcattcgggtagaataggtcaagtaattgccgagataatagaatccttgtaaaaaatttattatcaataagaacaagtaaaaagcgtttgtttgacgcgtttcaaacaaaatcagcgtgttgtgtacctctaaacctcttaattggtatcagagcagac

SEQ ID NO: 38465 - DNA, 498 bp, Arabidopsis thaliana columbia
gtgaataaatatcctgtccaacaaacaatcaaaaaatcaaatcaattgttgattataataggaacaactaaaaatcatattaacatttttttcatcttatttttttttttttttttgaaatccaggaggttctgggccaaagcccgtaatctcccctaggcccgaaaccacatcatgtaatattagtttcgtcccaagcgttactcgaactgccgacctctaagcttcgcctagggtctttaccaattgagctaacgacacttagtcacgcttaactgcggagttctgatgggatccggtgcattagtgctgatatgatcgcatcccatcttttcttttaccttgatgatcgcaatgtattccttttgtttattgtcttctggatacaatagcacaaagtctttctacaaaacagaaaagaaaaatctaatgtaaatggtactaaaataactacacagatagaacttttattcttatcacacaacttttttctttttt

SEQ ID NO: 38466 - DNA, 696 bp, Arabidopsis thaliana columbia
cggtccttgcactcagtcggattgcgatatatacactggagaaacagtggaaaaatcaatcagccagtaacaaataccagttgttcactgatacgagaaagcaataacctggacaacaatatccaacacaaccattcactagaatagaaaaaaaaaaactattgaattatagctctgccactcagttcgaaaggtaccaaagaaagaatcccaagatttttcaaaacaacaggcacttaccttaattttaagagtgctgttcattgcatcactaatgagctcccagttaggccccatatcatgcaccaggacaacaagcgcctatatggtaggaaaaaataaattagatactcataaagcaaccaacagtacatcgatgttaatgaaagatgacgaataaaaaacctgatcctcaaatagtgaccatggatttccagaaccatgctgaccaggagaaatctgagaaaaacaaaattctagtttaaaacagatactttaaacaaagtgaatggagttagtaaaccttcaagagcataccttcaggccttttatttttctgcccctatcacgacctccaataaatttgatagatttgttggggttggacatattgctcatctgggaagcagccggagaaggaatcgatccagtgtgaggaatagccatatcagaattattctctaccaattgcttggt

SEQ ID NO: 38467 - DNA, 776 bp, Arabidopsis thaliana columbia
gtgactttggagccattcttcccatccactcgaccaccaggtcgagtaacctcagctcaggccactcgatgacaatactcgaccccctggtcgagtatcacttcgccacaccatcaccatcactcgaccattcgctctaccaagttactcgaccccctggtcgagtatcaacactcaccaccataagcatcactcgaccggacactcgatcacgtcttcacagtctactcaaattcgcactcaaccagacaagctgagcacaaggaagagaagaggagaagacaaagtgtttggaagcggcctggacctccatcggatcacgaagcccatctcggcccattatctctctatgggccgagcgattaggttattggcccgtctactatcattttatttcgttttgtataaatagatgtcttagggttctgtcctcagatatccggtcgacattgagtttttttgcttcagttttattttctgttttactctactgcgccggttttgcttctgcaacctgtaattcgagatttttccaagttattcagattccgcatttgatttcatctgtcatcttgtttctctactctttatctctttacttatgcaatattatcgtttatctgcgtttatgtctttgagcatgttgtctgagtagtgactttgaattcttagggatgggatagagtagttgtggaatccgtagtctgtagaatggttaagttttagaattgattaaatccctttaggactagttgcgtttactgcttgtttctttc

SEQ ID NO: 38468 - DNA, 666 bp, Arabidopsis thaliana columbia
cctttttgcaaaacttaatggttttgattcttgatttgctttgagcgtatatgctcgtggcgccattgttaaaacgttttggatatttggtgtacgaaatttagatgttataaacgattattttcatatagagagtgtgtttcatgcgatattaatcttgtccggaataacataactcacgatcatggcaaggattgaaaagcctaaaccgcgttcgtgagggatggttcatgtgcataatccggctaaaggtctaaatccgtttggaacctaagtttggttgtccgtgtgagctatcaatgtggcgtttctgggttgcccttggcttgttttcccatagagggattcggaggcgttacaaggagcaggccctagaagaccaggctgcaaattattttgggccgaataatttggaaagagtccatctgagagaattgatggctggggtacggagacatctccgacatcaatgggtgatacgtcggagccatggccaacttggattgaaggtttgggccagttggtgttgtatcagccacaaccacgattgtgatggcctcgatttcctctgcggccgttgttgtagttcctcagccgccgttgtttggttgtcggtgttagtcagaggacgtgtagaggacgcaaaagtagaggttgtgttgttgt

SEQ ID NO: 38469 - DNA, 1064 bp, Arabidopsis thaliana columbia
cgagattcccgaggtacttgtgactcgacttgtcttgtccaagtaattggatttttggcttgttacttgctttattaaaacgagtacttgatctagtaagtacttgtctaaattttaattacttgcaagttacttgatccgccttcttacttgccaaaattaaatacttttacttgaacctaaaatatttagaataaaaaaaactatttcatacataatatttaaggtcaatgagtttgttacaataaatttaaatttttagcttttataggccaaaccagaattataaatctattataataatttaagcattagtattttagtaacaagtatacaatgctcaacaattaacaaggtaagtaatagaaaaaaattatatccagacttaattattactgatcccacaagtcacatgtacaaataacgagtaacaaagcaagtaaaaagacaagcatcaaattgaggcaagtaacgaggcaagtaacggggcaagtatcaaaatgaggcaagtaacgaggcaagtatcaaaaaaaattatgatacttgatacttggcttgcacttgcaagtaataaaataaaccgacttgttacttgacttgcctatgacgagtacttgaattttcaaggcgaatacgaaccgagtagcgagtaagccgagtagcgagtacttgtgcccaggcctattatatttgggttttttatttccaatttaggttatatattttcactatttaattttttttgattcaatttaatattagattagtgtttgctctcatttttatttgggggattgatacaaatgataataaaaaaacttttttatttaatcaatttatagaggattaaaaaaattttatgctatttttggaagtttcaaaagaaggtgcaatttttgggataataaagttttttagtgccatttgtgtcaatctccgaaaactttattttaattattttttggtacaaaatagtagaattttattcctacggggggggtggtatatatactacagttaaataataccgatggagatatatatctccattgctcacatcgctc

SEQ ID NO: 38470 - DNA, 575 bp, Arabidopsis thaliana columbia
taaaaaaatccagtccccgaagtccgttccttacaagttacaaataaggaagtaatagctagcacctagctggctagtttagaattcagaaacaacaatccgaaagtagaatcatataaagagctaatcactactatacaagtagactcaatagctttcatataaatgaaatcaaactaaaaatggaaaaccagcccattttgtcaatagttttaacaaatttaaatcatcattaacaaaaatactaataattaaatagataaatccattaatcaaatcaatttttatgggaagtgaattaatacgtgagtcaaatctcacacgtcttcttaacataaatgccttcaattttatttcacaactttcaaaattattattaccttaccaaacaaaatctctttgatataaagaaagaaagtcttctgtcactaatcttcgtattccatttttgtaaatttcagagattttctttgattcttcgtaatctcataagttcctatatatattcattacataacttcactcattccacaacacaaacacaaaagacaaaacacaaaaaccctaattttcag

SEQ ID NO: 38471 - DNA, 549 bp, Arabidopsis thaliana columbia
tagtaacgaaagccaataaaaaaccataagaggaaaaagcttaaccccttaaaatggcagttcgtgtcgaagctactacaaacacacttgtcgtctcttctctctctcgcagctcttctctattttcagcaatcgcctataatattaggtaaagcttccttctttttgtttatccgttttcgttttcttttcttctcgaatctgtctttgtcttatcacatcccctgaagtgttatactttttttttttttgggtccgattcataatatctgttttgtcttttttttggttctatgttctaaatcaagtagtagtagtaatgaagtaactattcctaaagaaattaaaggataagacttttttgtttttcttcttgagggtttgtgtgatcttgcttttactccagaatcttttatagatctatcttttagatacattcaagaatggtcaaagttatggattttgatccaatcttatatttctctctgaatccaaggatccaatttatactctctgtatacacacttctatgcatatggttgtgattga

SEQ ID NO: 38472 - DNA, 572 bp, Arabidopsis thaliana columbia
caagttaacattttcaccaaacgcaaacgcaaccacaactttaaccgctctcaaacatcttgttgatggagatcaaatataatttctgtttgatgaaatttctttcaggttattgcaggtgttagtagctacatttgaatctttgtaacaaagtcaaatacctaaaaacaatagagaaggtgatcgttcatatcagttgcagatgcgtgactctatagcaagacatgcaagagtgttcacattacacatttcactcttttcaagatattttgaaattccttcaaaaaaaaaccaactgtacattttcattaacacaaattacaaactaaataaagccgaataccgattaaaaacataaaaaaggaaaatgaaacacacttaaaaagagtttaaacaaccttctttcaaaaaaaaacctactaaaccggaccaaagcacaaaccgtactaagagggattaaagtaaattaacaaccaaatctcatcgctaataacatttatgaaaagacaaatttaccccttataccggtccctaaattaccgccgtgaatcagaaactctcatagattgagt

SEQ ID NO: 38473 - DNA, 535 bp, Arabidopsis thaliana columbia
ctcgtatatcatccaaactccacccgatctccttcgctctctctctcttctctacagtattctcgttggtacaagatcttttcaacgcctagttgatgaactgtgtcagaaatttgctgggcttgagaacaatcattcttctttttgtgtttttttccaattcacattcgcctaacaacttgttgggtcacttagtggggtcgatttcaaatgttccttttggggctttaaggcctcttcaaagtctaatgattttaatcactgtaattccttaaattagtgttttgttacttacagggttataaatgtaagcttatgctcgtggcttgttgctttgacaaaaaataaccaggacttgagaacttgaaggttgagtttctgttctagctaatgtacatgaatatgactatacaacaacagaaagcgataccgattaccgcttttgtctacatattaactgaaacaatgtacatgttattagacattacagaaattgataagcaactagtaagccatagggatgtatttgctgaca

SEQ ID NO: 38474 - DNA, 517 bp, Arabidopsis thaliana columbia
aaaccttggaaagtgtcgtcaaagttgtaagaaaattgccgagccacgtatctctaagagatattgccattgtcaaagttcctacccgagttgcagaagattacatcaaggaacatattgatcccatcttcaaatcaaaagggaacataagggttaaactatttccttctgtgaatttgaggaaatcttcgcagggtgctgaaaccgaccctgtctcttgtttggcaatgtttggttccttggaattgcaacctgcagtgaatgaattggttgagtcgatgattcagcggttgaagacacatagcaagaaatccggtggccgtttcatagccatagacttgagggttgagatacttgaaaagaaaaactgccatgaaacaggtgcagtgggatccaaaacatgttacaacgcacaagagattgcattgttcttgaggaagcttggatttgacagcgatacaactatatatctgactcagccaagatgggagagcagctcaatattcttaaggacatt

SEQ ID NO: 38475 - DNA, 513 bp, Arabidopsis thaliana columbia
gttcttaattttaaaaataaaatggataatatcagtgttcttaatttgtatcttattttaaaatgaagaaacacttttacaattatgttattatccattgactgttatagatttttttaaatatttattattataaatgaccagtatatggtatttttgctattacatcatagcaagatgggaacatgaaatagtgggctatacagtgcagtccatattatcgcatcaaagaaaagcaaaaaagaagagaaactgccaaaagaaataatgaaaagtcatgatatgatccgaaaccaaaaaagaatatcaagaaaaaagaaaaaaaaagatatatacagctgcataggaagtgtttgtggggatgcatagagattagagatgatcgaagcttaggtgattgagatggtccaataacaaatttgttcatttgaatgatactgaagcctctagatcgaccacatatacatcatattgcttttaaaccgcgagaatatcatagttttgatatgaaga

SEQ ID NO: 38476 - DNA, 505 bp, Arabidopsis thaliana columbia
aaacagtgtcgagagtgccgagaacaacgtcacaagacgctagctgagcctggagattgggaatgcccctcgtgcgtctctcttcctctctgtctcttatttagtaatttgttatcttcatatcctaaaccagaccattttgttcccgtggctcattttaattttgcagatgcgacttcgtgaactttaggagaaacgatgcttgcaagaaatgcgagtgcaaacgacctagccaagccaataacgatcaagaagaccatacatggaaacgacccgccttagtgtaaacttatgcttttgtacttgcaagattcactgcttgctatttcctttcaacttgttgtttcttcttctcttgttgagttcccaaatttctaaacagataacaattttgaagcagaaaatggaaacctagtttgtagtcacattcatgattcatcgttaaagctatattttatgtagtcaagtacaaactatggcatctctaatacaaaacaagccatga

SEQ ID NO: 38477 - DNA, 353 bp, Arabidopsis thaliana columbia
tatacacctgaatataaaagatttccgataatatctaactattcaaatataagattttctaaaattcattgtctgaaaaaattcaatgaaaaaataaaatcagttttttttttgttagaaggtttcaaattttataaataatgtcaatgggctatttctagaaatagacccatacaaatcctgaaaggcccaacccacaaacatcaaacccaaaaaataaataaacctagaaccggcccgggttcactaacccagctaacccggccaagagatgaaaccctaatctctgttcaaaaaacatgatcaaaatcaaatcagtttattcgtctagttctcttgattcgtccagtttt

SEQ ID NO: 38478 - DNA, 468 bp, Arabidopsis thaliana columbia
tgctttatacggtaatgcttctccagctgaaatgaactatgatcgcgtggatatacagcttcatttaaggtatagaagtgactctacggtcagattaatagtatggggtatacgcctcatcgaggactgttcatcatccgagaaccaacttggttatctaaatactctgtagcatgttcgtgaagacagtgaaacggtgagagtgccaaaagttccaagaggctcaagacattgagataggctatgagactgatcagagtgaagagcgtggatacagagtgatgatattggtatagacagtgagactgatcagtttgaagagtgtggaaatagtgatataggccatgagattgatcagagtgaagaatgtgaagacatggacgatactggtggtatatgcattgggattgatcagagtgaagaacgaggagacagtgatgaattagtgatagtggcagtgagactgat

SEQ ID NO: 38479 - DNA, 506 bp, Arabidopsis thaliana columbia
agagatcatatgcaacccgtttcgtcaagttcaatggtggctttaacatgtttttgaccttctctcttttcttaaccaattaatattattatccttcaactcgattacattctaaattatctaaaatattctgcatcatttgactcagtccatctcctcattggcgtgttttttttttttttctccttgaatcttaattttcttccgtatattatttaacagtttataacacagtcgttttacctcgatgtgaatgtttgtagttgtttttttttatcaactttcttctgtaaattatttgacagatagtagtcttctctatcttaaatttcttccttaaatgatttacaataaaaacgaaatagtcattttatctcgatgtgaatggttattatgaaaacaaattgttattaatcctacttgctagtaaactttaattttcagtttattgcatgttagatagagattgtgggtgaaacgtgtaaagatgggacttctcaataaaa

SEQ ID NO: 38480 - DNA, 450 bp, Arabidopsis thaliana columbia
tgagaatatctagcactcaagattcagtgcaggttattgtccttagaatcaaaataaaacctacataaactagtgaataacttggaaattttgagaagataaacaaaaccatttaaacataccatagtgacaggatatactcgtatagtttccacaaatgcggttatatcgttgggatattacgtttttctctgtggtttggcagacgattcaatccgttttcttggtattggtttccaggaagatagcattgacaagagggtaagagcatcgagccgttgtatatgtcccgtgtcgtaaacatgcagtaagaacagcgtttgaagctttaatcggtaaacaaagcacccgagcagtaagtactcgccgaagcgacctgtccgcccggaccgttctctcctcgttgtttcccaccctctccgctgttggctggccgggttgctttccgtg

SEQ ID NO: 38481 - DNA, 453 bp, Arabidopsis thaliana columbia
agatccaatcgacaggtgcttcactgacgggaatctagtaactggcgcagcatggcctggacacccggagtttgttcacaactaatggctttgttgggcattcaggtttcattctaagttccatgttatgtaaacatcgttatcaagcagaacccatccaacacacttgtctactatggtatatgttactgccatcttttctatctcgtcttttgactagcttactgtcaagtcaatcacttgtgtttcataaagaaccccactgttgatgctttatgtaaagaatgaattctataagacttgtgctagttctcacaattgtaattcataactttcaaactatatccccaattaaaaatacaaacttgctagtgcacattgcaccgaatcttccaaactcagttccgaattgcttagaaatccttcagaccgaatcaactggaaacctaaaga

SEQ ID NO: 38482 - DNA, 454 bp, Arabidopsis thaliana columbia
tccatcgaacaccttctgggtacgggaatgctttggatcgaattctagttgatcagaaagaaataagcagtaaacacaactagtctagaagggattcaatcaattctaaaacttaaccattctacagactaaggattccacaaccattctatcccatccttaagaactctatgtcactactcagacaacatgctcaaagacataaacgcatgtaaacaagtatattgcataagtaaagagataaagagtagagaaacaagatgacaggtaaaatcaaatgcggaatctgaataacttggaaaaatctcgaattacaggttgcagaagcaacagcggcgcaaccagagtaaaacagaaaataaaactgaagcaaaaactcaatgtcgactagatgtcccaggacaaaaccctctgacacctatttatagaaaacgaaataaaatgatagtagacg

SEQ ID NO: 38483 - DNA, 480 bp, Arabidopsis thaliana columbia
agaggaatttggtaaaattaaaaacaaaaattaaaagcacgaaaaaaatactttcggttttgttcttcttcttctctcacaccatctctcctcctccctctctctaacatgttttgaaatttcaattttctggattatattcgacggttagatttgcgtggcaatctcatcgtacggttcttgttaaatacgatgatccaacgatgtcaattcataaatgctttaggttttgtctctttccaccgtccgatctacggtgaagcaaatatccaaaaagcccttttaatatgcgtgtatttagctatcacccaataaaaaactgacacgtagatagaccactcgtgaactcatagtacgcaccttctcaagcggaagcgaaacggaaggggaatattaagaagaagtatatttcttgtttcggccctaaatgtttctttaattacgaaagagcaccaaaattgcttctcatttgtttggttt

SEQ ID NO: 38484 - DNA, 804 bp, Arabidopsis thaliana columbia
gcagattcaacctttctaacacagtttaggggaattgatatgtcccggtttttactgatttctaacacagtttcagaataatttttagagatctctctagtctttttcgtacgatttaagtcattccaggtacactcacacatctgggaaacatggagcacaataaggaattttggaagcttttcagcaataaagatcttgaaggacgtctttcagaagctggtgtcgatcgacaccacacctgtgtcgatcgacactcttgtcgctgccaggagaatattcattttacaccaagtctttgagaagccctgaagttttccttattttcaaaatagtccctgcacgtttttagagttaaatacctaatagtttggtcattgttagacctagtttttgttcttgagcttttgttacactttagagaaaagaatccaatccctaaaaagagaggattctgaactcctttgctattattcttaattcatcaatgaaaactattcagattatgatttgtgtttctattgtaatgtttgagtaatcaccttgttgggtctacggagtctcaatagggatttagatggattagtagatcgaaaaccccttaggattattcttatagttcttcatcttgattattcttaatgctagttttagattgatcacctagaacttgatattagataataggtattcccgccataggtatttgttatttgaaccatcatagatgagcctaggcatttaagaaaaaacaggtaggttcatagaagggctctggtttagatactaggtgaactaggggat

SEQ ID NO: 38485 - DNA, 763 bp, Arabidopsis thaliana columbia
catcatgagtaacctagtattactcaattagaccgtgatctctagggtttcacctataccgctatcggaacacctaactataccaagcaatttacaatcaacaagcaagactcaatcgacaatgttgtcagaacttgggtagcacaacgtttatactacactttaacattatgcaatcacaacaaaagacaatgcatcacacaataattatcacttagtatgatttactaacctcctaggcaattataagtaaataaaattaaacacctaaacatgtgctacttcacatgtccgagacttactggtgatccacgcatcctcgggaaacggccatacctaccccctcgaatccattggttccttctcttactcggttatctagcaatccacaacctaactctattaagtactaatctgcggttactaaaagcaactaaggtcggaaaacttaccgacttccaaattgggtcttttcgcgggttctcctctggtttactagtggccgaagtacttatagtgggtttttattcgaggtgtaagttctaaggatcaggaatgagggctatttataggttttcggggaagttggttagctaaggtgcttggggagacttgttacggccgtcaccaccaagccacgctcgataggcgacccacggactggacacgctgtgggagcgacacccagccgtgagtcaccggagtctcgccactaatcgcatcctgcccggcgacacatggcgctgagtcacacccaagacac

SEQ ID NO: 38486 - DNA, 631 bp, Arabidopsis thaliana columbia
ttccaattataattttccaaaagttttacatataatatggatttcaggataataaaaataattaaaattgttgacaaaaaaggataatttaaattacaaatataataatactattcctacaattttgtatttgtaggtccaatttcctaccaatttactacaaaattatttcgattacaattttcgtaggaaattggtagaaaatatttcttatccgtttactgcaaaaacattcctcatgcttttcttgctaatttcttacaaatttttctacgacaatatattttcttacgaaagtctgacgactagttttgtaggaaatttcttacgaattttctttgaactatatatttggtgacaatttcgtaggaattttgtaggaaatatttcttaccaaattttaggtcagaaatttggtaagaaaagcttatgttttcttaatttttccggatcgcacttgtctccctctctttgcggagatcacttcctctctgtacggaccaaaactacagtcgaagagagagagagaggagagagagagagagagagagctcacgtcgtgtgagagagagagaacagctcatgtgacgcgtaaaatgatccactacaatttccccccatttcccggtgt

SEQ ID NO: 38487 - DNA, 677 bp, Arabidopsis thaliana columbia
gcaccgctacggccgatcggttcgccaatggattcgtttatcccacgaccattccgcccatcccaacgaccggcaaccccatccaacacccggacgttaattgcccacccactccaccctttcggccaagcaacgcaactgtcctaccatccattcacaccatccgtcaccacaaatttgatcttattcgtggcaatatggacaacaaaaagatcaatctatcttaggtatatttttatttattttgttttgttctagctgttggtggttttaggtttttgtttcaaggaagatgcgtatggagattaatataatgaaatttgaccatactaagccgataacggccaatgttaagcaagaagagagttcatctggttagtcaccacaaccaaggtgacattgtttttaacccatctttctcacggattcatccctatacttattctcacactggggacggtgtgaagtaagtctggagggaggacaatgcgtgggggttaatgaatccgttactaataatgctactctctctattttgttgacttgaaacctttttccactttttacatcaatatgttctagcaaagcaaaacgtgtttctttattatcgaccattatgtgtcgggaattgtccctgaggaaacttacagggtcgcaaggacgacacccttgaagac

SEQ ID NO: 38488 - DNA, 945 bp, Arabidopsis thaliana columbia
ataatgtccgaacatgtaatttttgccccgtaatatagcaaagatcacgaaaaaggcttgaaaaaatacattaaggtcaaaatttagagtagaaaaaaacaaagaaaagaattccattgtgcttcctcattcatcggagagctctctttgggcttttcgaaaaggtatcacatgccaagtttggcctcacggtctaaaatttatagagtcatatacttttaacaaaacaaaaaagagaaaaaccgagaaaaaaagagggatgcaacacgaggactttcctggaggtaaaccatcgtagtacaactctcgcccaaacacgtttaactgcagatttctgatgggatccgttgcattaatgctggtatgatcgcatcctttactacatgcaattgaatcgtatctattcttttttgaagactttatgatctatttgccgtggggcccaccagctatgtaggaataccctatcttgtctatatgagctttgataaacgcaaaatattcaaaaataatgtccgaacatttaatttttgccccgtaatatagcaaagatcacaaaaaaggcctgaaaaaatacattaaggtcaaaatttagagtagaaaaaaacaaataaaagaattccattgtgcgtcctcattcatcggagagctctctttgggctttccgaaaaggtatcacatgccaagtttggcctcacggtctaaaatttatagagtcatacatttttaacaaaaaagatagagaaaaccgaaaaacaaaaagagggatgcaacacgagaactttccgagagatctcccatcctagtactactctcgcccaagcacgcttaactgcagagttctgatgggatcagtgcattaatgcgtggtatgatcgcatccgtgactacatgcaatgcaatcgtatctattattttttgaagactttatgatccatttgacgt

SEQ ID NO: 38489 - DNA, 374 bp, Arabidopsis thaliana columbia
atagtttactaatacagcaaaggattaagctaataaggcaagtcgaaagtgcagcatgatggagcagcagccgatgggttaaggctgcactttgtaaacaggttaatggtgttcagtttcttcaaccacttgaatccaggcttcttctcttcggttttgttctccttcttctttttggtcttatgcttatccaggccaaagcatccgtatgagaccttatcagagacgggctctgagttcctagatgcctgaagcgagtagatgcggttctggagaatgcagaccttgtgaaagtggtcatctctcatcttaagcacacacctagcaagcccaacagcttcgttcttcaatgaacaatgcctcagttgctagct

SEQ ID NO: 38490 - DNA, 579 bp, Arabidopsis thaliana columbia
tcgtcgagttgcatttgctgaatctatccaaaacctctgcatttttttcaaaacagaatcctccaattagtaagttcgtgatgctttcagcagagaaagtagcacgaatcacttcaaaatcggaaaaaaaaaatcaaatcagaacagtaccatgagctcccaagtagttaatccgaggaacattaggcttgacgaaatcgaacgtggaaggttctcggagattttgagtgtgactcgcggcgtggtgatggatctgctgaatgctacgctcgttgaagagaatcataaaggtgacaacgagaataaagaggagacccgctaatggaagtctactcttctttctactccatctctgcgacatatcggagactttgtttttagagaaaatgtcaccaccacagtaagaggaagacctcgtctcttcttcttcaccaaaacttgctttgatgcgactggtacaagtttggagctatgatgatccagtgagtagaggcagagagagattaatagaagtttaatttgttgctgttatctgttttataaaatataaatttgtaatttgactttgcagtgttttgt

SEQ ID NO: 38491 - DNA, 562 bp, Arabidopsis thaliana columbia
gacttaaggagaagaagagagcgctcgagatgggacttggcatggttgacattgtgagagtaacggagtaaaagagcagccaaacggaggcgagacttgacttcaacaagaggaaggaaagagatttgactctggcagatggcttccaagcactttatggtttttccgatctcaccaagcttctggtggtgatccgctaatccccacagcccttccgccacagcagcaccttccatagctttctgctactggtcgagagagaagccaaaaataaaactcatccgactcaacaaaaccaaaacatgcaaagaagtctgcaaaagaaagtatcacataacaatgatcagaaataattagctcttgaaaatgtacaatgatttttatttagctcaaccacaagagagaaactgcaaatgctcacacagtttctgcgaaacacaaacaggagaattagctcccatgtcactacttttaaggagataaagttttctactttgttcattatcaattgaccaaaactctttcagaagtttcatcgaacaataagtacgcacaacaaaac

SEQ ID NO: 38492 - DNA, 624 bp, Arabidopsis thaliana columbia
gtgatgaaatcttcccaaaacagagcgacgaagagcgtggtgtagctagaaaacacaaattggttgacaaaaataaaatccttggtgcagctgtcaattgaaccttgaaatctgcacttgagtctacttcttctgaaccgttggggaaggatgttgattctcaaccccaaaagaatgactaccaaaaactctcagaaactgggactgcagttaagggatcgagttcaaataaaagagaagagctcaaatcagccaaaagctcttctggtggtactgaacatatagagaaggaagaaccatcaggaaaggagaattggatagagaaaactaccatgaatttgagcctgttgttgaaaaactgagagcaggatttagggataattatatggctgcaagagagagagagaaactcaggagcctggtacgattgctgatattgcagaactttaccgtagtgaatataatgatgagcttgagtggatgaaggacgaaaagctaagagacattgtcttctgtgttcgagataatgagctggctggtagggatcatctcacctgattgatgctgaagataaagctatatttttgcaaagcttggagaagaaagttgagaaagaaaatgaga

SEQ ID NO: 38493 - DNA, 783 bp, Arabidopsis thaliana columbia
tagttttttgagatccaatttgaatatttaaaatagtgaatttgtaaaatgaaattttatatttatgaatttatctatgaattttttgtatttttcttaaataaatttattttagtcactatattaccaaataaattgatttttagcataaataatatttataaaaaatatttaataataataaaaataactatgacagtttctaaagtttcttttgtaccaatcaattttaacagtgcaagtctctagagtcaaagtctctgtagccaaagtttttacagttaatgtcgtaacagccgaagtctttacggtttaaattaaccgccgttaccaatcgacccctacatatagtgataataccttcataagttttgcatcaaagttaccacttaatacaaactggtatgttaatacttgtgttatcggctaatatcataagttcttagtgatttcagatagtttcacttttgttatgaattagagttagcacctaatacaaatgttatgttaaccttttgttaatagctaatatctgtttacatatagtgataatacccttagaggtattaaaaatttaaattcataagttttgtatacgagttaccacctaatacaaactggtatgttaatacttggattaccggctaatatcataagttcatggtgatttcagatagtttcacttttgttatgaaatagcgttagcatctaataaatattacgttaacctttatctcttgtattgtgttttaataaagaaaaaaagagatacaggggatcctc

SEQ ID NO: 38494 - DNA, 533 bp, Arabidopsis thaliana columbia
aatacaatgttgctccaatttctaacaaattaagaaaacaaaagtaaaagtaaccagacatacaataaatatgtcttcttaaataaattgtgtgcagtaaaacttggaccaaaaaatattgcatttagattctaactttattatccggataatattatttattaagctctatattgtctgtctcaaacactcaaaccctcataatttatgaatgtaaatgctattgcaaatcatgtctccataggagtatatgataaatactttctatataaaaagaaagggggaaaaaatctataatgttacagtatcactatcacatccactaatatctgatacgcatttatttcaatttcttgagtgacctttacgatagattccaactcattttgacaatttttctttggtccaactcttacatattaacattcaccttcctttttgattttcgtcggttctacatgttaaacccttcaaaaattaaattataataagtatagtgaagaccaataagcagttgcatggaccctgattga

SEQ ID NO: 38495 - DNA, 634 bp, Arabidopsis thaliana columbia
  unsure (1)..(634): unsure at all n locations
ggactgcactagtcatctccaacccgacacctgaggtgcccaatgccatagctgctacatctgctagaataggagctgacgcagtccgagctcaaggcaaccacttgatcctctccatctcaagctttctaagtctataataaagtttactttgggttttgggtttataaggtcacaaacatagacaatttaatgtttgtgaatgtataactattggattcttagattattatatgaatatgcttctaatttcaattttcaatttcagtttaaggattcaaatcaattttcaaatagaaatttaagtttaagatcaaattaagaaagtaattatagataaactaaccttactaacgcaaatgaaaacacacagtgacgtaaataaatcgcacatccatctcaaaatttgctagagatttgccactacaagaaaagagcacgcaaatccattgcaaaatttcctaggtaattgcagtaaacaaagagctacgcaagtccatcgaaaactttgaaagaaacaagcgagacctaccagttgcaactaattgacctaccagttataactaaattagttgcgactggtaggtacgcttgatggctagtgatatantcaatttttactgattttagagat

SEQ ID NO: 38496 - DNA, 377 bp, Arabidopsis thaliana columbia
ttccctaaacgacaagatgatgaaacaaagacaattacaccatactgacttcttagctctaaaaataagatctttcgaccacaatactagtgtaatagtcagaagtatacttgttcaagctcagatccagaagatttttttttatggtatccttatatctaggcctacttatatctttccatagaagaatggtaaccaaaaggccataggagatttacaccaaaaagctactgagaatccaacaaattcatacctcgagcaaatccagtcaccacgtttcatctcaacgttattctgaaaagacctgactccttgtccatctctatctgagtactgattttgcatcgtgtcatgaacattcgactcaggaggacgca

SEQ ID NO: 38497 - DNA, 504 bp, Arabidopsis thaliana columbia
atttatagtggatgtgttttctacattgacctttaggtactaatgcaccggatcccgtcagatatccgcagttaagcgtgtttgggcgagagtagtactaggatggctgacctcccgggaagtcctcgtgttgcatctctcttttttttttggttaaaactatatgacttgacagcttttagaccgtgaggccgaacttggcatgtaatacctttttagaaagcccaaagaaagaccttcgatgaaagaaacaagacaatgggtcaaagtaccattgttctttttaggataaagttcgtcttaaaacccagattttataatataaataaaattatatatctcctgttgtacaaagatataactttgaaagttattaaagagtaaaggtataaaaaattatatgattaacacttactttattaaattggatagaaaatacaagattcaaaatacaagaacaaagattaaaagctttgagagtaagacaagtatgaagggagtttg

SEQ ID NO: 38498 - DNA, 631 bp, Arabidopsis thaliana columbia
cagagccagttatgcctgtagttggagttgttattggcggtgggtatgtagatgatggtggggaactaaaatctggtggactcatttgacttggggggcttgtgctgcaattggcagatattaatcacaattatttttctcacttttttgacaggttaagaagttgatttgtggaaaaagaaacacatacctgactgttcctgatgatgatgagaagtgacagcttcctttacctggagcagtataagagcagatttgaataccagtctcagatttatctttagcgttgaaaggtataaactctagttattatcagattctttgacccactggaatcatatggtgggctagtattactaggttcaggaactatttctagacactcaacatctatcagttgtggaggtctcaagtagcttatgccgctcatggagacagcaaagataaaagctggaaatatggaagctagtatgcgggtaacttaattctactttcccggttcttatggtcaaatctgtgtggactagtacataaaaagttaagatgtcttacttggatctgtgctagtaagttgtgctgccctccaaaattgcagctgtctgaaccaggatgcttctggtaatactattga

SEQ ID NO: 38499 - DNA, 569 bp, Arabidopsis thaliana columbia
tgtctcttaattagtttctcttaattatttcaagtttccatgaaacggtccaattaatactaataaattttcggaaccgtagaatgtcattgctaggcagagattcgtttctgtttctgtcgttaaggctgctgtgttaggcgagagaatcgtgaatagtaaggctaatttctcaaatcaaaactttggttttggctgggttcactgttacaaattataaagtttacaaaaactatcacaaatgttaaactcaaatctgcagagtatgaatactaatttattcacctctattgatatctaaagcaaaaacaccaaacattcaaaaatataggatggatctaaatgggtttgaaagatggacctgggtcatcttaatataagtttgcccaccaccaataaaaactgaggggtatgacaatggggactaagagacacctacacgtgtgcagtgcctacaaccataaatttggcagtaattcaggtttccggagtttcatgatgaccggtttaatttagcggtttatcttttttccgagcaccgacattttcaaagtgggcctaactatttg

SEQ ID NO: 38500 - DNA, 390 bp, Arabidopsis thaliana columbia
tctttctaaatatgatgctatgttacagaggtatagagtgattgaccatcattgctagaacagattatctatgctttgtagttgcagattatgtatcttgtgtacttcttttttgtgtgtcatgaggtccacaggtttatatattgccgtacctatcgatgtgtgagtttgaattgtcttatctttctctaattatatatatacaagtacttcccctaatcatcacataatcattgttcttcactaaattcatcatcacacatacacatatacatatactattcatctcataaagtggattctatggactaatagatcgccaagatcatgaggtaacatgggtccgaaaccaacaccactgacagtccgtggagattccacaagattatc

SEQ ID NO: 38501 - DNA, 544 bp, Arabidopsis thaliana columbia
catttgtcatgcatgatggtagatggatgaagataccaatttgtttgtttttttcttaaatagaaaagatgaaacatactattgatactataaatcttgtattggtgataagttttgtgacaattttgaaaaacgtatgcagtcatttgaataggaacacacaagtcttacatgcgatttattgtccattgactttgaaaaaggacgccacttgaccttgatattaccaaatccacatttgtttttcactttgataacttgtgtttcctttgttaattttgttaatccctactacattatagcaattcatcctaattttgggataaatacaaatgtaattcacattacgcatgctcacatatacgatatagtaattcatgttccgttaagtttaactcatgataaaattgtgaggaaaaagtttaagaagtaagaacatataaacacgagttattttcattgacgataaaactaaaaagaaaaaaatactaaaaaataaaaagaaaaatcgaatggtttagcaaaattgaagcactttggacac

SEQ ID NO: 38502 - DNA, 845 bp, Arabidopsis thaliana columbia
gaacaatttacgagtgttaggaaaaaagagaggatatgttttatgttttttcatcatttttttggagacactccgatgcagttagagggtttctacttatgcatttcgtgatgattgcgtcatttgtttacatcaatttggcaatgtgatgatatgtgtattcttgtttggtgggcttccacatatactttaaagtttatgttcaatgaatcttgtccctccttaactgctatgtgctcatcacatgaatctaaagttgtgtgtgtgagtttgaattgtcttatgtgtccctccttcatttcgtctcttactaaatatgatgctacgttaaagaggtttgagtgtttgaccatcaatgctggaacagattatcactgatttatagttgcagattatgtatcttgtgtacttctttttcgtgtgtcatgaggtccactggtttatatattgccatacctatcaatgtgtgattttgaattgtcttatttttctctttgtagaaggtacaccatatttgattccttcaggtgatatgcacagttatttatcacaggatgaggatcgaggtatcccccattcagtaaaggatactagaagtattggatcagcttatgaccgctacctgcagagtatggtataatccttattcacgtggtctcttcttcgttttttttctcttctttcttcagtgtactgaaaccttttccctgttttgtagcaaacgttttttgtgccatctgaagaagctggtccatttaatggtgttggcatggtacgacaaggaggttccaacatgatgcctggtccgtccatgggtgagctcatggctgggtgtggtgggagtt

SEQ ID NO: 38503 - DNA, 565 bp, Arabidopsis thaliana columbia
cttacagctttctctcgagttcctggctcaatgtggaatccacgacgcgatattgataaagcatcacccgtcttcttcaataatttcgtaagggaaaaaattgtcacaaaaatcaaacaaaattccaacaataatcgattaacaagatttgatccaaacctgtgaagaagacgagcgtaaatgagatgaaattgaagcgttgttgagcaaaaacgccatgcccagacgagtatcgaagatcgctcacagggaaacagcaaaaccttttcttctggaattggaaagaattttcgagcttttcaacatgggctctatactctagaattattccattttgaccccaaaactattgtatgataaattatcaccctgattgtttttactcacccaaaatcttcatactcagtctagtgttctttgaatctcaaacacaaaactctagaagataatgtaaaatctcagttgattcaaataatattcattttattcagtttcacattacctgacaaaccaagaaaaacgtagttctgcaaatctgcaatttggtactaatcacagagattat

SEQ ID NO: 38504 - DNA, 838 bp, Arabidopsis thaliana columbia
gttgcaatatttaagggttaaatttcgtcaaagttcttttgttcacacaataaattgaatgtcaagattaaaatagaagataaatagtaaaataaaaggtaaataaagtaataagaaagtagattgattggttgtgaaatgataaaataaaaagttaggcttagggtattcttaggaaactattggttagtagatctaatgatagctagattgttatcgaaccattcttaaattcaaactctaatttttgagttaccggtggtgttccgcaaaactccctatgtctattgctaagaataaccagagaagccgagagattttatacctaaacatgcattctaaacgagttcaattgttcaccttagtagataggccgattcttattacacacctataaataaggctcatcaaataatagatccaactacagatacctatgacggatatatctattgtctggattcaagttttagttaattactctagatctagcattaaaaacaattaaagatgaagaaattctacagataacctagcaaagggggcgatctaataaaccatatgaatccctaatgagaaagcctaaccctaacaatcaaactactcatacttggtgattgaaacaagcaacatagttgagtaagaaagcataaacacaacaaataagaatagagtatgaaaggatctcttcactgtattgaaaactgaatgaatcactgaaaacaggggatgaatagcttatgtctctctttgaaaacttgataaaaagcttgataggtctaaacaatgacctctaaaactatatatatgacctaataaacattcaaggactaataat

SEQ ID NO: 38505 - DNA, 471 bp, Arabidopsis thaliana columbia
ctctcggactatcctaaggctcgacgatctctagcttggactctctctctctctctcgggttaagggttcggacgatctctctctctcttgggtggttttaaggttcagacgatctttctttctctctcggtttgggcagagttttggtgcgaaacttctaaggtttaactaagggggttaaggtcctatttataggctcaaggttcggacatatggagtgggatgagacttggtcactaagtcggctttgggatgaaacttgctcaccaagttggctcgcccgggtggattcggctccaagttggctaaggcgtgggttcgaagttggcttgcatcgctcgggacaaaacttgctcaccaagtcgtctctgcccgaatggattcggctccacattttcgagacttgggctcttctctggcttccgcgaattattaatactcggccattcctctcatttcacgcaccattc

SEQ ID NO: 38506 - DNA, 765 bp, Arabidopsis thaliana columbia
ttctatatagagtgtttgcatttaggattgctcatttgcataggggaaaatgatgatttcaaaacgttaagcatgttttgatttaatgaagtaagttcaatgcccaggttgttagttctctgttgcataaccgattgtttctctgacataaccgattgtttctctgaagtaagacttcaccctgctttgaatttacaacttgactatactgctttgattcaaaactcgcttatctgatgtcattccctatctattagaacctgaactgaatttgcaattatcatgtatatgcattgtttgtgaactcatggctaccatatacatacttggaatatctcattcacttcaccaccctctgttaatctaaggagctgactctcatttttagagcagtttcccatatccttagcctagcctaatttcaagccaaagatcatttgtgtgtgattgtgaggtctttttcgattgagcttggtataacgtgttaggtatgagccgacaagagcagtctttcatgtagacctagcccacgcttttgggttagctaggactaggtggagacttgggattgggaatgtgtatggattgaatgggaatgagaatgagaatgaaaaaaaaaaagaaaaaaaaagaagagagtacaaggtttagagttcttaaaggggatacaaaaagtgttagtctagtaaagggtttggaattcaaagaagttaggcattgtgattcaagaaaagggtaaacgccctatgtgctaagattagaaga

SEQ ID NO: 38507 - DNA, 780 bp, Arabidopsis thaliana columbia
tttacaattgaaatctttactaactttttcttctacaacagtacatagcaataacctcacattttggaatttaaccaaaaacgagtaattatatttattatactatacgtaaccgtggttcaatattattaaagaaattttttattataaatataaaatagtaaaacacctttaccagatttaataatatattgatacaaaatcctatgaggtcatttttgatgatacctacaattacaagccccctataaaatcaatctaaaccacaattacagtatacaaatcttggtaagaaaatacaaagtgaaaaataatttaccccaaaactcggaaaatagaggagagagaaatttgagaagattccattttggcacaaacagaggaaaaagtatcaataaaaagaaaagaaaataggtaaaaaagaaataaatcgaaagaaatatataaatgttagaatggctccttgagattgacaagcagatctcatcaccagacaaatataaaataaagtaaagaaattaacttaggtatttacaaaactctctaacaccataaaaccctgcgcccagagatttcactcttcttcctcatgtaaactctctctttctctctctctctttatgctcccattttttttttcttctctaaatttttattttttctcttttttatttttcatttctgtaacttcttctccgtcaaagacacagagagtagacaaaaagaaaacagaggacagattaaaaaaaaaactttattaacgatgatgcactgggtggt

SEQ ID NO: 38508 - DNA, 577 bp, Arabidopsis thaliana columbia
gcttcgtcctctggcccacccgactctccaatccgggcagttctgacatcgatgtccagtccacctcgctgatcaatcacctcacgtatacttttttactcagaaaagcccatgggcctttcctcttttagacccttccctcttacgtggcgatctttgaccagtcccgaccccacggtgcgggatccgacaccaacacttgctatcatattccgctcctcgatgcactttaataagaacactctataactcgactctacgttggcatgtgtattgttggtgcaggaattagcacctccgacaataccggcttaaaccggaggaattgtgaataaaatagggaattcgattaaaccggggtatcccggttaatgggccgaagtcatgaggtcgtcagaagatctaattcaacaattggagatcgcccagccgacttcctaaatctaagaaagaggagacttccattttcagagaggagtatctcgcgaagaatagaaggaatgaagattcaagccttagataattagaagttttgcatattcttagacggtcaaagtattgtataaatagagggatt

SEQ ID NO: 38509 - DNA, 646 bp, Arabidopsis thaliana columbia
taactgttatatttttgacttttttttattacccaacgtgcccctactaaacgttaccggaaaaaacgtaattacagggaatgccactgccacgtcagaatttgctgacgtggattaaatgaactcagccgtaacgcgatacagcggcagttacggctgagttacggtatgttgccgctgacttacgtcaaaaatatatgagtcataacaaaacggcgaagtatgagtataactcagccagacgttacggctgagttgtaaaatgttgactgagttatagtataactcaggcaacggtatggttgagttaaggatggtcggccgagttataagaagttatacgataaccgggcaacaatatggctgagttatgagaaaaaggctgacttatttcctcgacacggccgagttatagttttgaacggcttagttatggaacaatgtgacggctgagttatggtcgagtgttacaaatcagccgctaataactggattacgatataactcagccatgttatggctgacttattttcaaaagattaattactataatatcatgcagttatggccgagttgttgaatgttacggttgagttagttgagttacgacataccacgactgaattaactttgtttttttcctgtt

SEQ ID NO: 38510 - DNA, 119 bp, Arabidopsis thaliana columbia
agcgcgtcgggacctccttcggccgctggaatcgcgcctcgaccgtcttggccatcatccgccgcacgaccgcgtcgaacccctcgggcaggtccggcacgagcgtcaacagcggatcg

SEQ ID NO: 38511 - DNA, 563 bp, Arabidopsis thaliana columbia
aaaagtccgatcaaactgtaaagagaagggttggtgaggctgagaagcaagagaatgtggtgagataagatcgcgaatttgaaacgaattctgggtttcgagcttgattcaaatgaattaggtaaatctaagcttatttcttaaatttgagagattgataatgacgagattatcaaacgaattctgggtttctcgaatcgaacgaattttgggattcaaacgaattctgattgagagctaatctgctcaattgattcaaacgaaaattttaagagctaatttcctcaattgatttgattatttttttaattgaaatctttgggttccctataaattatctccttagggtttaatattattccattaaaaaacttttaattgattttttgagtttatcagaaccaacatttagatgccgtgagttgtcggagaagatgactcaagaagatggcttttgattgagtgaaattgtagggcaggggtaatttcgtcaacccaactcaccaaagtacctttcccataagtccattgtaaaaatgtccaatttttagtttttgggttag

SEQ ID NO: 38512 - DNA, 552 bp, Arabidopsis thaliana columbia
aatcaaaacatcaatttttatgaaacaagaaaatacccacaacatcaatcgtcacagaacaaagagagtataataggtgtaaacaaatattagttttgaaaccaattagccaaagtattctcaatcagatcatctaacacgaaagagagtataatatgtgtaaaccaatttgtcaaacaaatcacaagatttataactaaataaagtaaaactcagtatattcgcaattaacaaagaaatactccattcagaacatacaaagtaagggactcgtagatagccctatatattacagacactctacgagtcatgtgagatgggctcaaagcccgttaacgtcacacatacattacaaccgatatacatatactctaaccataatcaaccacgtaattccaacctaataaaagaaataacaaagattaatttagggtttgttcgcactttcaatataagtttattcaatatatgcatttttaaaagtaaagatatttatttcatctttttgaagaaaaattggatattagtacccattcaactctctgacactat

SEQ ID NO: 38513 - DNA, 540 bp, Arabidopsis thaliana columbia
tcaaggaagtactacggctgtgcaatcggacagcaaagtagaaaaaaatggtgctcagaaagaagactctaggttagatcatgctaactcgaaaaaagatggtcaaacgaccttagggttgcaaagttatcagtcaaagctatctgaagaggcctcaagttcacaatcatctttgatggcctcgcgaactaaattacaactggtagatctggtttcagaggaaatgcaaggatctgaaacgacactgattcctccttcttctcagctggtaagcagaagatcaggacaaagctacagaactggtggagtttccattcaagaaatttcccatggaacttcagaaagtggttataccacagcctttgaacatccaagagcaggagcttctgttaatagtcagtctgctggagaactgatgggatttacgtcacatgaagatgctatgggttctgctcatcggttggaacaggcatcagagaaatatgttggggagtttgtgaaaaaggccaaacatggagttataaatccggagactgagga

SEQ ID NO: 38514 - DNA, 324 bp, Arabidopsis thaliana columbia
tcttattgacatagataacactaaaatcgtgatatggaagtcaaataccagtaaattgcttctcatctgatcggctaatccaaacatcatttttactcccactatcgtagacataataaccttcctcctgctttattccagggtcaagcatccagatagctttgaaaccattactatggagatctttaggccaagacacttgagatccggaaaacgctcctaaacaaagtattcaaaaaaatgtcctataatgtcaatacaaaacttctaaggcgtctatgcaaaccatggtaagcacagttaataaaatccacttggaatgat

SEQ ID NO: 38515 - DNA, 560 bp, Arabidopsis thaliana columbia
tttcacctcccccaaaaagagcatgcgcgagaagcttcaaggtgtaacgaattaccagattgcggacctcttgatacttgcgttacaactgaattttccgcttgctagcttgccccaaaggaagtgtattcctttaaatttcgggaagctcatctcgcttttgttctcaaatccataggcttcacaaaggtcgagaattgatatggagaaagccttcgttttgaccttgaagttgatgattccttctttagctagtggcgtctttgggttcttaaacgtgtacaccatggtgctaaagaaataatttgtaggctcactgaatgtagcgtgatccatggaggtgaaagcgccaagtcccatcttagtgaagaactcgtcaatagtctcgagcaaacccatcttctttaggatctcgcgatttgcaaaatgcgttggaaatgaaagaagtggagagatgactttgagagttttcttatcttccttagtccaatgagcaacgggttcgctttgcattcatttgaggtcattgtcttagaacgtttggggttcttctctttgtg

SEQ ID NO: 38516 - DNA, 1928 bp, Arabidopsis thaliana columbia
taataataataataattccttctttttccttctctcacgacctcttcctctcacttttctctcttttttcaaactcactctctcttttgttttcaaacacacttgcttgtttttagtgattcaaatctcttgttcacttttttttctccatagaacccgaatttagcatctccactctcagattgacaaggcacaatggtagaaggcacaaagagaacaaaccccaaacgttctaagacaatgacctccactgaaccgcaaagtgaacccgttgctcattggactaaggaagataagaaagctctcaaagtcatctctccacttccttcatttccaacgcgttttgcaaatcgcgagatcctagagaagatgggtttgctcgagactattgacgagttcttcacaaagatgggacttggcgccttcacctccatggatcaccctacattcagtgagcctacagttgatttctttagcaccatggagtacacatttacgaacccaaagataccactagctaaagaaggaatcatcaacttcaaggtcaaaacaaaggctttctccatatcaattcccgacctttgtgaagcctatggatttgagaacaaaagcgagatgagcttcccgaagtttaaaggaatccacttcttttggggcgagctagcaagcgggaaaattcagttgtaacgcaagtatcaagagcgtccgccatccggtaattcgttacgccttgaagcttctcgcgcatgctctttttgggagaggtgaaacgagttctactacggtttccgagatgtgctttctttttcaaggagtcaaagaattgttggtagaagacgcggacgagaatggcgatggaaggttggtacatgatgatcttggaaatgatgtgaactatgggtgcatctttgcttcttatctagaggattataagaaccggctaatcaagggcaagacgaaatccatctacattggtggtactctcacaccactttttgttaaagcgggagtagatctttctccattcaatgctctcccaaagcgtgaatacattgactatgagaacttggtgcgttcttgctctttaaaacgtagcgatgatgctttcatctacttgtacacggatcgagaggataacaagttggaatgcatactaccctcaaaggagatcacaaatgtagagagtcatgaagacattatgtttttgccaagtaaggaatatcaagtaccaaatttggagcaatttatggagattgaagaagaagacttgccaccatctccacgagatgacccttacaacctcaacaagtgtgatcttcccgaattcacatttgtgccaaagaccaagatggagaagtttcttcaatccgtcatcaagtctcaaaggaagataaacaagtggaaatcttatgcaataggaaagctacttaagaaggtgaagaagctccaaccaccggattatgtctcttccgaggatgaacttgtttttccttcaaatgaggaggaagatagagacaatattttggagagtgatgagaataatgaaacgcccgccacttcatcacactcgtctaggaggaagaacgcctcgagagaccactcctacatgccttagccactccacggtatcacttgtatatacgactttatttcttttagttctatttatttattttcgttagtcttttcctcatatttttctctcacaccgagacggtgtgaaataagtttgggggagaaactaaccatctaacgttgtgttttgttttgattttatttctttgagtcttgcattgtcaatatctatgttttgagaaaaaataaaaaaaaaatctgaaaattttgaaaaatccaaaaaaatcatgtaggtttgcatattaattttctcttttagaattgagtctagaagcatctagtgtgcatttgca

SEQ ID NO: 38517 - DNA, 922 bp, Arabidopsis thaliana columbia
atatgggcatgatgcacatccgccatgaatagagcaaccttcaccacctgctactcccggtacaaccggtagtgccacatcaccaactttaatggagtttgaactatctgaagaagtttttgtcatcgagtctgatgagacaggaaacactacttccaccttcaatttcgagttagcagaagaacctagcagacttctgatcaccgcgacaatcgatgttaccattcctgactctgttccaagaacaaactggaggtggtcatcaacattccggtccactgcttcctgaaccttctgcttgatgaagtctagtatgttttgtgttgatccaacaacacccatctctcttttctttgcttccattgctagtgaaaacatttcacctggaacctcaagatgtgctgtaagaaaggcgtcacagtacatgtactttattctctccactacctcgtgaccgaatagatgatgtacaatgcaggttccttcctggaacacaatcatataagcaaaccttctattgacacttaaatactaccacgaacaacaaaaggtaaaagttacctggaaatagtgaagacggggaagcaatgatttaatggaatctaagctgtgtttagggtgaatattggcgatttcttcattagtcatcaatgtcatctgctggaataactttacaatattcgctcccatgtaagaatcaggaccataccaaacagttaactctggcatttgagcaaacgcctattgacaagagagaagagaaatagctttaaaaaagcaagatgaagaaaaaaaaaagaaaagaagattgaagaaagcaagaaacaaacctgcagaatcgtctgtacaacattagatgaagtgcaagtaatggtaggtacaagctcatgagcaaaagcttttgtctccaaagatgtattta

SEQ ID NO: 38518 - DNA, 570 bp, Arabidopsis thaliana columbia
tataaccttagtaggatcatttatcgtttctcctcggtttcacttaaccctagcacgagagcatctgggtttctacttgagaacgcttcatcaaaaatcttacaatctgctacgaatcgagcattttctgcaaaatcaggatctgatggagttggaggcgatgataacggctggaatatttcaacaggaggatcatttggtggtacaggatctgctgatcttgattgggacaataaatctatgtggtctactggtttaactaaggagcatttcgatggtgtctccgttggtcgtcagaagaacgcggcgaatccttcttctgataacaccccttctgattcgggtgatgtaatgagcaaattgggtccaaaggaggtagctttggttaatgaaatgaatgagtatgatgatttgcttaaagagattgagcaagataataggcaaggcagggcttttgttgatgggattaaacagagaatgatggagatcagtgtgttgttgaagcaagttaaagagccaggtgctagagggtcttatcttaaggactctgagaagactgagatgtataga

SEQ ID NO: 38519 - DNA, 633 bp, Arabidopsis thaliana columbia
ttcattattattatatcaaattgtttttagaccgtttctctatacatattcgctgttattctctttggcatatttcctgaattattttagttattttccctctatttatcatgatattaataatatataaaagcaaaataaaataaaatgggccgaggccttaagcccatttttaagattgggtgaagcatttatagtggcctcgagttggaaaaaaccagaaccaaaccaattatgaaccgtttgattttcatgaataatcaaaccgtataacattttaaagtttgggtatattaagacaaaacgaaactaaaagagggaccatacatgtaaatatatattcctttagaactttcgtctccctaaatttttggtcattcactctctctctgtcgcctctcgctttgaaattccccgcgcctgtctctcctaatcatagtctcgcttacctccgtcggattctctctatttccggtcaccggagctccgtcggttcactttaatccgtttgaatccaggttagggttctatttccacacagctgagaaaatgcgagaactaaagaaatttctcgaaacagtcctagtgattaaatttggttagtggctttcggatttaggagaaatctttagt

SEQ ID NO: 38520 - DNA, 610 bp, Arabidopsis thaliana columbia
tactctaaaatatagtagggttgaagatgcccttaataattaagactaaatttagatttttttgggaaagataagactaaattttgatgaaaaagtactaattatgactcataagtcctaactaattgataattgtgttatagataacaaaaagaagatggttatctaaaaatgacaaaataaaatgggggcgtatgtatcggcatctttgttcaactacttccattgtcatattgtttatttttggttgtgttaattgtcatcttttgaaggcaaaaatgggcaagcatgaaacaaacacttccgaagcaaacgtctgcatatccaatattgttgtttgtccacacaaaaacttcgcccacgtgagtgttgctacttcggtttctttctagactaggtgagactgagagagtgtgacttggtttggttccagaccatttcacaaaacctaactcatctctcatgagtaatttcggttcttcacaattttcggttcggttcggttaaccaaagtataaccgaagttatttcagaaggaaactaattgttttttatttctgaagattagcgattttggagagtgatcactcttgtgtccctttgtggacaa

SEQ ID NO: 38521 - DNA, 814 bp, Arabidopsis thaliana columbia
gatgacgatataagcatatatacatacacatgtaacaaaacccttattattttgtgacttgcttcactttggcttcaatgggttccatggacttttgtttttaacaaaacaaatagggtgggttcaagggattgggtttcgggtgttacaccacaagacaaagagtacccgttttgcttgtccgctaaagtaatggtgtacggaggaaacaactcttgtcttgtgtgtgaaggcaaaagagcgcgttaagcctgaaccaaagcaggctacaagacaagcttggaggctactgcagaggagcgtattaaggagaagaaccgagaaggatccagaaggagactaagttaaaacctctaagtctatataagctgagcattgtagagagagaaaggttaagaaacatagaggcacttaatcaagagtaaacttgtattgggtgtacttggggaaacagtgagtgaaagagagtgaatctaagtaagctttgtaaggggctgagagggtaagaaatctctttgtaaatatctaaaggttgatatagtggattctgggagaaaattcccggcccagacgtagcaccattggtgtgaactgggttaccattgtgtgtgtatactgttctgcatttctcattacaaaggttctgtttttggttcaaagtcaaagttggttctcaaagctctaaacgtttttagtttgtggtgtgttaatcttcacatttagaataggatagccagaaaaaagaatgaagtttttcacacctttaatttctgctgatcattttaagtgtatcatttactgttgcagcaatcac

SEQ ID NO: 38522 - DNA, 946 bp, Arabidopsis thaliana columbia
gactcatccaggatccccattatctaaaactattatccaaaatatattttaaaatacaatatttaatgaaaaataatgttgatttggatctacatagtccatattttcctatgaattccccacacgtcacattgtcaattacatatttgcttctctaatagacaccgacataccaaatcaacaaatcttatcatcatctccactttcactcagagaaagaaagagagcgaccatattttcctctgaatagaagaataaaaacgaacgtattgatctttttatttttcatgactttctcttttctatgcatactccgaccaaagccagctgtttgattctgtaaatcaaataatgaatttgtactaaggggtttagacaaattcacttctttcttatctcacaagtaatcaaaggaaaataattaggatgtttgaataaaaagttagggtttgctctttaatagtggtctcttgaattaggttaaagatggatctaatagatggcaaaacccttctatttatacaatgaattcaatatatcaaaatatgataaacttctaattatctaagaattaaatcttcattacttctattctgcacgagatcctcttctctgaaatggaagtcttccctttacaaggtttaggaagtcggctgggcgacctcaattgtcaaattaggtcttctggcgatctcataacttaggccgattaacaggctaaccggggtacccggttaaatcgagttctcgattttatacacattttcctccgatttaaaccggtattgtcggaggtgccaattcctgcagcaacaccagccatgcatttcaaatgagataatcctttatgaatattttcgaatgtcatgcaagatctagaatgagcattaggtctcaactatggcttgtacagggcagaatgagtaagccaaaagagtgtgatgtg

SEQ ID NO: 38523 - DNA, 531 bp, Arabidopsis thaliana columbia
tgattcctctaacctttgtaacagtctgtgtatgtagagtcttgaagccgaataaagttgctctcaacagtatgattctttcagctatgaggacttgctcaatctctgggttccatactcatcttccgaagtcaagcggttcagtttcttcgagaaagaggttttcttctactgctttatcactcatcactcaaaccatttcaccatttgctcatccccgttcatcagtaattgtgtcaagccttctctccccatctgatatccctcagaaatctgaagaatggtttgctttaaggaaagacaagttaaccacaagtacattcagtacagcgctggggttttggaaaggaaaccggcgtgccgagctctggcatgaaaaggtttatgattcagatgcacgagttgttgaggagtctgcacggtttgctatgaactggggtgtacaaatggaatcatctgcgatagaaaggtacaaaagaataatgggttgtgaggttggaacaatgggatttgctattcactccaatgagg

SEQ ID NO: 38524 - DNA, 439 bp, Arabidopsis thaliana columbia
aggtatggatctcttagatctaatttagttgcttgctcttatggcagaatcgttttcctctgttttggtttgtgaacactgtaatttatgctgacatccattgtaatattttaggctttccggcagcttgtagaatctcctcaccaaggaaagctcttgttactgatttaaccaggcggtgtggtcggaatagtcacaatgtgtttgttaagaatgaggcaagtaacggatcagcttgtacaagtccaccagcttcagaacctgtcaactgtattttgagcgggattgagaagaacacttctaagtggcagctgaaaggaaagaggaactcgaggcagatgagtaagaaacaagaagagagaagaaatgtgtacggcgaagaagctaataacaacagttctacgcctcattctacgctgtatgaggtgaagattgaggt

SEQ ID NO: 38525 - DNA, 552 bp, Arabidopsis thaliana columbia
ctgtctcactagcaggcttcgactcagcaggttcgttctggttttcagtatcaactagaacatatagataaaaaatcacaatactgatgaagtaattaatctacctcaagttgcagcaaagggcaactgttacacaagaacttgttaaagccataaacttgttcaccattggccatgagcttgaaaatcaacaaaaagtagcttcctaagttaactgataaacttaagactattgcaactaagcacacttgcaagtctacaaatagttcatacaaacaacatatatatctcgtccagtttcatacaaagccatcgatcttttggaagagaacgaaaccttaccttgtctaatggtctccaatttcgatgcagcatcagtgaaagccttggatatattataaatagtccgactctgattcaaacatacaaaatgagaaagagaagaaaacaaaacgtttcagaaactagaacacgcaactatcatcagcaacacacaaatcacaagaggaagacacttacaactcgagctgcgaagacactacaaagctgagg

SEQ ID NO: 38526 - DNA, 358 bp, Arabidopsis thaliana columbia
cagatctcaggaacgccgttacccaaagaacttacaactcaccccaccaggattctatgcctcgattcctccactcaagatatacgcacatacttggcccgggaaatgcatcaagaagccaggttgttggattgtaaacaagccagcgcgacaattcacttcatcaaaatgactcgcgcaggtctttcattcactttgcatctgcgagcaccttaccaggctggtaaaaccgcaaaaaaggtaacaccgtactaaccaaaaggttcaatgtcggggctcattgctttgaagaagcaatcaactcctctgaggatgtccctcggctatgagtttatgaccatgcctgattttggcatac

SEQ ID NO: 38527 - DNA, 535 bp, Arabidopsis thaliana columbia
tgaaatgatagtactttggagcagatttcattcatgatggaagtagaactccggtttcaccaccaccttacatcgatccatatgctctgttggaggatgagaggatatcagggatggatcctcgtctaaattagcaggcaacaagttgttctttattgcataactagtgtagagcatatatttgctctaagtatatatttttatttacagcctttccttttatttattttccttacggttgtaaaaagaatcgttgcttctctattgcttctctgttccaaaaatttcaatctttcaccactcaaataacaatttgacgtttctatttgtttagattttggacaatcgatttaaaccaaacccagcttaaattcagttcttggagatgaaaatattatcagaaacaaacgaactagaacaaatggctaccgccacaagcaagagatagaaatatggtttttgaaaacacaagtacgactcgtaagagtttcgagcctattcacacaaacacgagataatagaaatccacataaaa

SEQ ID NO: 38528 - DNA, 428 bp, Arabidopsis thaliana columbia
ttgtttattagcttaagaacgtattagaagttcataaaatgattaaatgctctcattattttttatatttggaactaatatgttagttatgatgcataatgaaagcataagttttgttagcctcatatcctaaaagcatattcttcatctcaattttgtaacgaagtggtcagcattatttttggcgttaagcggtctaaattaatcaaaattctttttctgatcattcagtcaagttttttgtttgtctctgtgtacctatgtttatatctttctaacaatgccttagctaatatataaaccgaacttaagctgctgacacaattattagtccagttcatatattaaaaagatgtagtcgttgcaacatgacaataatttatggagccttgtaactaataaagcatatagaaatatgacaatatata

SEQ ID NO: 38529 - DNA, 567 bp, Arabidopsis thaliana columbia
tggatgttaaaccaattgacctccttttcttcttccacaaggcaatgaagatggatttggactaccttgtttgtggatcaacaagattggcagccgactttcgtttcctcgcggagtttcagcaacggttccatatgataaagtttttgtatcagatacattctgatgcagaagatgagattgcatttccagcattggaagccaagggacagctaaaaaacattagtcactcgtttagcattgatcatgagctagaaactaaacacttcgacaaagtttcgttcattttgaatgagatgtcagagctgaacatgttggtttctaccatcaataccactgcagctgaccacgaccgaaaaatgaagtatgagcggttatgtctcagtctccgagagatttgcaaatcaatgcacaagctattgtctgagcatatccaacatgaagaaactgagctttggggtctattcaggaactgcttctctattgaagaacaagagaaaatcataggatgcatgctcgggagaataagtggggaaatattgcaggatatgattccttggttaatgg

SEQ ID NO: 38530 - DNA, 625 bp, Arabidopsis thaliana columbia
  unsure (1)..(625): unsure at all n locations
taccaaatcttttaggttaccttcaaggcttcaaatactatttttaaacttgataactggtatgcttaacatttgagattgcatgcatgcttttgcttttgaacttacatagtagaatctgttattacagtgacaaattctccatagagtttaaaggaaaactaagcgtttattgaataatgatgattacttttgcttcctctcaatttgttgcctacaccttaactcactcagaagataacatttacgaatacatcatgtttcttggttttgtgaactagtctacacatctgagaaaacattacgtgcagcatttgaagggttttgtgaactagttgaaggtactcatgatttgctatccaattcaaaagtaagaaaaataatatcattgggaaaagatagataatcacagccctataactctcctctgcagtcaaaattattatggacaagatatcagaaggctatgcctttcgagctagagtacacgaaaaaggaagccgcaagagctgcattaaaagagctanatggaaaggtanagctagattccaaaccgatcagcaatactgaagtcaccaagtttggggtctagtacgagtataggtgatgcacatggggattgaga

SEQ ID NO: 38531 - DNA, 465 bp, Arabidopsis thaliana columbia
gttggacccctaacactctgtctttcaataaccggtggttcatcgacggtaaccatcggtttatgaactctccgataatcattttcagacaattcaaacccgtcgtcgttgtaatacactttggtcggcccgtttgagctcgtaacataagtgtattcctcatccgacagatcaatctccgggcacctgaatctcccggagtaacgaaccggatcatgccggttaatcccgttgctagtttcctccaacgcagcaacaatacccaaaccgacaccaccagaaccgatccgcttcgagtgatccgtggatctgaacttcatatccaacggacttctcggactggccgtgtactctcgtgcattaatagcagcagatctgcttcttggcaccaacatctcagacaatttacggatcattagatgaggtctcttgcttagtatcatcatcaagaattgagaaactact

SEQ ID NO: 38532 - DNA, 526 bp, Arabidopsis thaliana columbia
atcatgtatcttggtttaggactgtctttctacacatctgagaagacattacgtgcagcatttgaagggtttggtgaactagtggaaggtactcatgatttgctatcctatccaagggtttaaaaaatttatcattaggaaaagatagataatcacagccctagaacattcctctgcagtcaaaataattatggacaaaatatcgaagagatcaaagggctatgctttctagagtacacgacagaggaagccgcacgactgcactaaaagagatgaatggaaaggtaaatctagattttcgagatcttaaagcaaaatctttgttatcaactcaaagtaaaatctaaacatgaccgttgattcacagatgttatggtgtttcttttttctctgtgcagattatcaacgggtggatgatagtagtagatgtagccaagaccaaaccgttcaggcaaaacagaagtcaaccaaggtttcgggctctagaatctgagtgttagggtgatcaaccatggggatttaagat

SEQ ID NO: 38533 - DNA, 342 bp, Arabidopsis thaliana columbia
gactcctatcttctactctgagtcctctgtttatactccctatatcaattcgtagaccacttgctctcaagataacagatacgagtcacaagtcaaatacatcgtcatccaaaccatgttcaaagagtccaatctccggggacggatgtaactacgcttccttctgtgatcgatcaaagtacagattgaccaacacatagtaactcggattacatcatgatgtagtggcatagtagtgatgtagcgatgcccgagaaaactcatttagagatagcctagtcagcagcaacaagattcatgttcccagattcctacaactgcctctcgacgtcaagaataagc

SEQ ID NO: 38534 - DNA, 577 bp, Arabidopsis thaliana columbia
  unsure (1)..(577): unsure at all n locations
nnnnnnnnnnnnnnnnnnnnnnnnataagattttcagacagaagataggctttgagtttggtaagagagaagaagatgagaccggtgtaacagcagaagcaactgatctactcagcatttttctctctttttctctgtttccgcttcttttggtattttttttttttaaagaaaaaataaaaaaatttgattctgtttctttaacgtgaatatggatggtgctgacgtggtgaattgggtggatgtggtaaagatatcatcctaatatttcttagccaacaaattggatgaagaattgttggacacacattgtggaaaacaaaaaattattgtacaaacattgaaatgtgacactttatcaggaaaaaaaacattgaaatgtgacatgacttgcactttacaagcaccaaccaaattaggtctggacgtttacttggttacgaaatcggttatatttcgttttggttctttcatttttttagaatttatgatctatgtaaggtacacaaaaaaacttggtttggttcaggtttgggtccggtgcttcggctcacgagtttatgaccatttggatatt

SEQ ID NO: 38535 - DNA, 684 bp, Arabidopsis thaliana columbia
aaattccaaaaaacttgagtattttctatccgaatctatcgaaaagtaggtaaatatccaaaatatatacaaaatctaatattttatgcacttaatagttgttgtaaatatgattattactaataaattatttttatgtatatatatttcagatatgttcagaaacttgatcggattcgggttttgtagtttaggatctgattaggtattttaaaattttgggtttgaattcagatcgggtttttagggtcaggttcggttcggttcttcgggttcgggtattttgcccacgcctaccaaaaacatttctaatgtagccgtttcagtttcctctaaaaccaaacgacaacaatgctaaccagtttactttctgataacaattgagttgatataggcccttcaagaggcttgacaaagagcaatgaaatagctgtaaatgtgcatataaattaagtgcagatctgaggcaatcaaatattttgacgcttggggatagtactacagaaaatggcaacaactttacatgaagcattcactcgaagggaatgcaccattttacaagtaacataaaatacaacagtgggtatcatagtacaactccagagatgagtccgggttcgaatatattcgtcccatatattacacaagtcgctacaacaatcaccagataaatgaagtccaggt

SEQ ID NO: 38536 - DNA, 549 bp, Arabidopsis thaliana columbia
ccccattataaagtctacgcgtcaataattatacatcgttctcttgatcatgtcacgtttccatttcgatctaaactaaaatatataataaagacttgttagatattcttgaccaatttatcttatatcttttcctttcttttctaattagactgatgaacgaaccgtgtgatgcgacaattataagaagacctaaatgataaaattaaatacccgattttggtcttatttttgttgtttcttcatataaatattttggtcttaaataatgaagctaatatattattgtagacgactccataagcacggaagggttcaaaacataaaatatcacaaaaaaataatgctacaacatttcatgaaaaagtcaaaattagaaaatgtaagtatatacaaaagtgtcaaatcattttacttaaatttaattttacactatgttatatttgttcattgagaagaatccattgatctcctaatccaaatattccgttagaaaatatcgatggaaattatcgttccaaaatatcgtgataaattgtgtttaacata

SEQ ID NO: 38537 - DNA, 608 bp, Arabidopsis thaliana columbia
ctaaaatatatctcatcgattcatacctaagcccaatcccagagccatccctggacctcgaattaaaaacatctctctcttccactctacaatcacaaatgatatcaacaaaacggtcaaaagatttttgttttccttgcgacaaatacctcgaaaccaaacctacggttgcaaatttgaacgttacctctgctactgcgggacgtatagaaattgcggcactgtaaggatttcgtcttgatcaatagatcgcacaaagaaaagaaaaaacaaaagggataatcatgaaaaaatcttcgatttacctgagcgattacggatctcagattgttgttcggtggcatgatcgaaaattagggttcgcctctgatttgtgattttcttctcctcttcaaaaaaatgggtaacattgtcgagagtaacattgacggatatctcgagagttcagtggttcaatgggcttatactattgtgccctagctgagttactctcattgtttatttcatcacaatcagtttatatcaatttaataatataaaaaaaaaacttgaatccaaagtctgtccattgtactcaataatgtcgcatcactgaatttatatgtcag

SEQ ID NO: 38538 - DNA, 683 bp, Arabidopsis thaliana columbia
gattagtaaatccaaaaattgcatatttacaaatcgatttaacgctaaacaattgccattaaaactttcctttattatcgataatatacattcatttcgaaatatatgagaatatcaataatttgattttatatcaactaaccatatctaaatttctatttatgtaaaataagtatatacttgattttaaggaatattagtgtctcacaatatcataatcttaccacatcaaattgtttcacaaatctttgccaatattctcggaataatctttctaaaatatctcaacataactaattgctctacactacaaaatattcatatatcaaattttatagaaacttttaattattattacaaatcgcatttacaacatataactaaaatattctaattatgtatattttattccattttagttaagatcgcgatttaattttgcttgctcaccaaaaatattgacctaatcattccaaacctatatatattatatgtttaaatctctcatcacattatcaaacacacacatcatgacattcttttttggctattttttcgtacgtattacccttttttaagaatatgatgtcaatgtattgatgttgatttctgtataaacgaacaccaatcttgagaattgtgtatttttattttctttttggtaacgagtggtgtattattgt

SEQ ID NO: 38539 - DNA, 580 bp, Arabidopsis thaliana columbia
tcgactcaacagtcgatttcaggtgttttggtgatttccgacatgctgatgtcactagcgacgacgatgaggaagaagatgatgatgatgatgaggaagaagaggtagtggaaggagaagaagaagagaattcaaagactgttttctctaaatggtttatggttttacaagaggaacagaacaacaaagatgacgacaagaacaacaacaagtgtgatgagaaacgcgatcttgaagacacagagacagaaccagcggttccgccgccaaacgcgcttttgttgatgcggtgtagatcagctccagcgaagagttggttagaagagagaatgaaagtaaaaacagagcaagaaaagagagaagaacaaaaagaggaaaaagaaacagaggatcaagaaacgagtatgaagacaaagaagaaggatttgagatcattaatggaagaagagaagatggaattggtgttgatgagatacgatactgagttttacagactctcttcagacatagctaaggaaacttgggttgtcggaggaattcaagatcctctgtctcggagtcgaagctggaaaaattgatt

SEQ ID NO: 38540 - DNA, 477 bp, Arabidopsis thaliana columbia
actctagatcccgtaattggttatatcaagcaaattgataaatctgatgtttgtacgtcatgatacacctatcgtaaaagaaatttttccttttgttaaaattcacataatagaatgtgttaactacgatttagaactcaaatatcagagattaaaattagcatttatttcttacacccccctatttaagccggtgttatctagtatataataaattaaagttatctctatatacaaggtgacatgtatcttcttttatgtgagctcaaatttaatatattgatgaataaataaaaatattttggagcttgattcatgtggacgcttgcttgtacttagtagctggtcaggatcaacaattgtgtctctagaggtctctacagagaatgcctgaccatcaatcataggtggttcctcatcttgtccatgtaaaaagtcataataacatcacacatatgcaaagcaatttggttgtgc

SEQ ID NO: 38541 - DNA, 510 bp, Arabidopsis thaliana columbia
gaaatatatttactctctcatttccaatatttctatatatacgtagtttattcaactctctttaaaaagtaaatagttttacataaagtattaagtattaaacgctatgattaaattttgaatatgacttcaaaagtttgtttttaagaaagatatatctttgtagaaagatttgactaattttttagtaagtatcacaccctataattaaattattatggaaagatttgacaaaattttaattaaatatgattaaaaactttaaaatttgcaaattaaaaatctagtcagcattaatcggtcaaatcggcaggtttagtatatgtatttttttaatataaatatgacattgttttgaataagtgaaaaaattaagtaaaaacaaaataaaaagtatttgattactaacttgttaattatgaattaactattcataaattttcagttattgagattgacttaatttagttttcatataaattaagtgtgaatatatatatatatatatat

SEQ ID NO: 38542 - DNA, 474 bp, Arabidopsis thaliana columbia
acaaatgattatttgatttttgaaaaatggaaaaaggtttgtataaatacgataattgttcaaaatattcaaaaatattctaaaagtaattctatattacccccataaacaactgaatatggtatatgcatgtgttttaaaaatttataaaatattcagtgagaaaacaaagtatgtgattctatgatggtatataatccaaaaataattaacaactgaatatgatgtattatcatccaaaaatgtcaatgagcaaaattgttcttttactattcaaaatccaaacacaaggaatacaaagctattacgtatacaattcaggaatgtcctatcacaatatagatacaaccacactttgttcctacccttaacagactttagaacacatgttcacgacttaagtaatattgtatggaggagaagagacttttgactctttcaaaatgtggttcattgactaagagacagaacaag

SEQ ID NO: 38543 - DNA, 452 bp, Arabidopsis thaliana columbia
gttattttgccaaagttaaaattggtttacttttacaaagattttattttatttgacaaaagggaaagaatccattttgttgatgttctctagtcacggaaatggtttcacacgtctctgtacatcatctcacaagcaaaacaacccaagtacaaggcatatagacaaaatctcaacctcatgatgttccgtatctcgttcgaaatattgtaatactcatcgttgttgtcgtcaacatatagcttgatcgtcttccccttctcaactggttaatcaataatcagctctcgactattttattgagagtgaaagagaagacaaagatggggagttcaagttacttgctacaaacgttaggccttctgctgctctgctgtaccgtggcagctaataaagtaccactcgcaaacgccaagtataaggacccaaaagagccactgggagtcaggatc

SEQ ID NO: 38544 - DNA, 549 bp, Arabidopsis thaliana columbia
  unsure (1)..(549): unsure at all n locations
acaaaaaaaaagaaaaaaacgaaaaagagggattcagcacgaggactttcctcggaggtcacacatcctagtactactctcgcccaagcacgcttaactgcagagttctgatgggatccggtgcattagtgctggtatgatcgcattagttactacatgcaatgcaatcgtatcaattctttttgaagactttatgatccatttgccgtgggtcccaccatctatgtaggaataccctatcttgtttgtaagagctttcatacatgtaaaatattcgaaaacaatgtccgaacatatgattttcgccctgtaatatagcaaagatcacgaaaaggcccgaaaagtacattaaggtcaaaatttggagtagagaaaaggaacaatagaagaatttcattttccttcctcactcatcagagaggctctctttcgggctttcgtgganaaaaagggggggttttaaaaatttcccccaaaaacccccaaaaatttttgggggggcccccccccaaaaaaaaagggggtttttttttttttgggggggggggc

SEQ ID NO: 38545 - DNA, 550 bp, Arabidopsis thaliana columbia
cagtatgtgagaatcttttaaatttcaggacaacggcatgatcatgaacatcttttccaaattcgacaaacaaataactgaactatagaacacaaagaagttaattgtatagaaaattcctcacacagttagaatagtctttaaaaaaaaaaattaaacaagcaattgcaaaagaagatttgttgctcaaaatcgtttttttttaaatgggttaggccgaaaagataaaggccacattatcaaaaaatcaatcacacagttcttcaattgtggcttaagtgatgaaaatcgagtcctaagagtcacaccaaattaccaaatattaaacttgagtctaggtccaaagcaaattataattaatgtttgtttcgccttgaagatcaattaccatttacccatttgttctaactccaatttcgcctcttgtaattggttcatacagctaaatgcatcatcagtcaaggcaatatttgcatttaaagatctttttttgatgcaaattactgcaccctaatttacggctaataaatatataaacattttctattta

SEQ ID NO: 38546 - DNA, 570 bp, Arabidopsis thaliana columbia
ttgactttttgggcttttgatttttcgaagttcttaaatgaagcgaaatcctgatttgtttttggacttttcattcggtttggaacgatatttatatgggatgatatattacgggtgaacaaatatcaaacaaaaacaaaacaaataatataaagaaatacaacttaaatttaaaaattttaaaaaatcgattattggtgtactacgggttatggatataagtaacaacattctttataatatttaccataataaaggttactgtttaaatttattttcaaagtacaaaaagttttcgattcaatttgattcggtaacaaaaaaaagacccggttttgtttattccagattcataagatcataaaatagtggtttactaaacaaatttcaattcaatttcggttcgattcggttacgtatacaaaaccatagcttcgcatagaaaaaccattattttcaaaaattaatatttttaattacaaaaaaaaatgaaataaaccagagaccacaatccccattgtcccatgaccagaagaagaagaagaactagatggcgacgacgacgagttg

SEQ ID NO: 38547 - DNA, 522 bp, Arabidopsis thaliana columbia
gttgcaatttaagaagaagaagcaataaccaaaaaaaaaaagttgaagaagaaaaaaaaatgaaaatgaaaaaattcgttcttccccagtttgacagctcgctgccactcaacagtaggacccataggtttcataatatttacaagtttgaccctagtaggggtctacttcgtcctccacctctataaccctagaggttctccgcgttttggtctctctctcagattgtggtcacgtgacttgacacgtcacctgcttacccttcgctgacgcaacgcctctctctttgcctttccagtttccaccattacaacgttttttctttttctcatcttatttaatttcgcatttaagtttatgattgattgcatttaattttaatcaaatttttatccacggtgttgaatagttacagatttgagctacatttatatttaaacacccgacttgtattgtctgatgtatataaaactcaagataagaataacaaacaatttacaaatgaatgaaaaacttgacggg

SEQ ID NO: 38548 - DNA, 547 bp, Arabidopsis thaliana columbia
gagtgagctaactctaaatctgatatatgagagagagactttggtatttacttctaatgcagagatcaatttatgaataaactatagagagttttgtcttctaattcagctctaacttctctatactgaaaacaccactaatctttcattggaaaacaaaactctcttgaaacccaatgatcaacaaggcaaattaaataatcaataaataaataaataaaacaaaggaaaaaaatatctgcaagactaattgattaataaaaccatgcacatgcactggctacaaaatgaaaactacttactacaaacttccaaaaatcatcctaagaaagatcaataatctataagaaaacaaatcacattcaaaacccataaaattcaaagtttataagaaatgagatgtactagtcaaataaagcatctctatgttattctctatgtttaagagtaaagaaagagagagagagaggaaaaaaaaaagcgagaaattgtatccgttacagagatctgaaaagcaatatgagaccgtttggagtgtacgtgcgta

SEQ ID NO: 38549 - DNA, 525 bp, Arabidopsis thaliana columbia
tatataaaacaatatataatatgatatcatatgtaaaataaatatataaaagatatctattacaaataagatattagatcataaataaaaattaaacaacatatatatttaatttatattaaacatatacgaatatttataactatgtatatgaaaataaaacttcgttcgacattggaaaatacaaaaaaatgaaatttatacaattataatcggtctaaacggtcacatctgagttcctaacgtttatactggtttttacaacactcgtcatgtatgtgtaagccaacgtgtcttttgtggatatattgccgtgccttgcgtgtctatggactatgatggtattgtgaaatattaataaaacgagacttggaggaaaaaaagattgagttctcccacggcagccgtaatggacaagtcaaaatcatagcaacaacaagatcatgatgatgatgatgatcctttacttctcataaacctaacaagttcgtcaacataacgaatattctcatccatgtcccaaac

SEQ ID NO: 38550 - DNA, 510 bp, Arabidopsis thaliana columbia
aaatatcaaacgaaagtgttgaccaaaagagcggtgaagacgctgacgctgagctgcgtttgagtaatgtcaaagaatcaaaacgtcacgtagttttgtctttaaaaaaaacaacacgcatgtttgggtattttcgaatgagatcaataattgggcctagtttagtattggcctaaagcccataaagaaaggagcgaaatctgaaaagtcagaagacatctccttgcacctttcttctctcttgctgtttctatggtggtggtattagggttttggaaaacccctaatctcacctgagaaaagcttcatccttttgtgacttttaaacttctcttacaagtcttcttcgtcatcctcctcctgggttcagcaattctcgccgaaatcgtaacctccgagctcacagttctgcaacttgtgggtgtatattgattcacaccaagatttagggattaagggtaatggtggaaacagaagagaaaactgataagcttgagaagattaaagtgg

SEQ ID NO: 38551 - DNA, 550 bp, Arabidopsis thaliana columbia
cctaagaaatttgtttttgttatatttactgaagattaatactatatacttatatgcaacaaaaaagccaaataaaatgatgattcaccatttgttgtgtgcaagtaattgcctttctttcgagggacatgagcgagagacaataattggagttcaatcaccacgtggatttacgaaagaccacaatcacagcaggcgtcattgtcaattgtattatttcattggaaacatataaacatgcaaaactgaaatgttttcccaacaaggcaagaacacaagtttttgggcagattacggttcaatgaaagttgtcccaagctatatagataaccaaaaaaatgattatagtttttgaattagtaattaaatgtataattctcaatttaaataacaatgataagaatatttatccttgcaggtttagtagaggataaatttattttaattctataattacaatgctagagtttaaaaattaataaactcctgattgctgctggaaaaaataatttcatgaacaaatacgagaaacacaaaaaggtaagaatgt

SEQ ID NO: 38552 - DNA, 865 bp, Arabidopsis thaliana columbia
tcctttcctagcatgcctcatatgttgttggtaattttgtttttcaaaataaaatgcaggccagtaattgaccccattgccttaatctttcaccggatgctttgtggaagatcaaatgccaccagtgaagaccatgattattctaccagtggtgcaccattgccaggttctgattctgctgaagcatccaggaggaggtaaaaaattattttcttttcctttttctctctttcctgttccacttcaaatcttcaatggtagtttagatgcaacgatcttactaaattccctgctctttaggggttaatgcagttcatgtcttcaaaaattagtatacaccgttttttattggcttgacactgttgaaacataatttaagatctagttgatgcaagagataatgaatgatcctgttcacttgattctaagaataaatagtaatggctcgtcatcagttttaatcaaaatgtaagagttagtcttacgagtgagaaaactagaaaggcaaaaaacttgttataacacaaaagatgttgttgttgcagagaaagaggggcaagagctctagaggagagactaggaacggaaagattggttcctgcaaggaacaaagatgaattgcagagtgatggtttagataacgtataagtggagattgcaataagcattttgaagaagctgttgttggttcttacttgtgttcatgtggacagtttttttttgttttttttttttgttaatgaaattggcgtttatacagaatcagcttcgtaaattcctttgacagctcagaaaggtagtacatttccttggacaaccaccaattagaaacaattttcttggacgagaggatataaaagtagtt

SEQ ID NO: 38553 - DNA, 616 bp, Arabidopsis thaliana columbia
cgactcgatcggctcccccttgaaaatctttcagtcgatccacacatggcagcaaccatacacccagcacctagaattacgagtaagaatttgatgctgtgacaaccaagctgctattctgggcaatgaggcctaagagtctagtgaccataccaggccactcttgcagatccgtcatatgtcctactgcatcacggttggtcgcaatgaagagacatcccggattctcgcgtacacagagagtcccgtacctgccatttccgttattgtgttagccaaaactctcagaaactcaattaaggcaaccgacttgcatgcaatagtaatccatcttactgaagcttatagtagttaatgttggggtctagtccaactacaactgctcccacctgtcacaggaagtcatgaagaaatatacaacattagaacctagagcaaaagagaataagaaaaacgcaagattggagaaggaatcaaagtcttatggcccattacacttttatcatgttcacagagagagtttgatttccattgtgccttcttttcacatcttcctgcatggaagcaaatactgctgcagatagacagaggaatcaaattatcaattttggttggt

SEQ ID NO: 38554 - DNA, 291 bp, Arabidopsis thaliana columbia
gctataatgttaaaagaaaacgaaatcaaatccgtctcatttgatctacgactatatatagatttcaaaataattacccatagcagatcctgttttttgacaattcttggggacgatctattatcaaacaaattatttcaaagattataaatttaatcgacagatttgaaaacaaaaaaaactaatatatgatgcaacaaaaaacatacttctttatagaactaaatctgtaaagtatatacaaagtataacagagactaaaataggtggattatctgtgacatttgctac

SEQ ID NO: 38555 - DNA, 318 bp, Arabidopsis thaliana columbia
tgattttttataacatatttttgtcggccatatatatataacatttttatttttcttactaagaccataaatacaacatttgtttgctaattttagtacacagaaaagtacacattaagaattggatctcttgtttgacaaaatatactgaacaacattctttgacattcaaattaaaaatgattattaagtttgaacagggctagcttgttggactgttccaattatatcaatcaaatgtgacacttcatcattttcctatgtgaaatctacgaagccaaattttaaactaatgttgaatatcaaacgattacttcg

SEQ ID NO: 38556 - DNA, 636 bp, Arabidopsis thaliana columbia
  unsure (1)..(636): unsure at all n locations
catggttagacctcaaagcttacacctttataggcgtttcgttccagtacatgtttgtttatggagatttaggttctagatgtcttttacatgtaatgctggtgataatttagttgataatgactttattgattgatatttttggcagatatcgttggataatttcaagagtgggcgtctacacactctgataacttcagcattcagtcatattgatattggacatatcgtctcaaacatgattggactctacttttttggaaccagtgtaacacttcttttctcttgtgatttgtatttgttgagtgaagtactcttgagcctgtcgctgctagtttttggaaagttttgatagagagaatgaattgttttcttcaatcacttacttcttcatttcccgcatccttctcttgctagatcgctagaaactttggtcctcagttccttttgaagctgtaccttgctggagcccttggggcgtctgttttctacttgattcaccatgcttatatggctgcaacatcgcccaaggtagggagcaacagcattaatttttttgcagttagtttctttacgcaaatcatgctaggtctcagataagtagtnttccattgaatatgatgtggtgtgggaagc

SEQ ID NO: 38557 - DNA, 590 bp, Arabidopsis thaliana columbia
cgactctagaggcagtgtgctgtaaagcctcttccctaccaggtgggaaagtgaactttcattcactcatctctttcacggctccatccttcatctgcccccacgcccattaaatactgcttggggtactgaggcagaaggaagggaaattcaatgatgtggctatgctagaaagaagttcaaggtcagcccgggcagcttcttgaacctgggctctggtccttgacttctctgagtggccctatgacccacagcaggtcactgtccttccaggtcccttggtttctttaactgaagtgctacactttctattggcagtacacccttccttcaaacaaaatcttacataaaacacagagtcaagcccctcgtggtacggaggagcacaagttcaagacctgcctgggctacagagcaaacctaggcgacctaacaatatcatgtctcaaaataaaggatggctgagatggctcatgaaggtgcttgaagcccaccgggagacctgggtttggtttttttgcccacatggtagaaggtgaaatctgcaagttatgtctgacttacaacacacacacacacacacacacaca

SEQ ID NO: 38558 - DNA, 592 bp, Arabidopsis thaliana columbia
caaattaaagaagggaagtgtgtttgcacttgcagtagaacaatgaagataacacagcctgtctcctgccacaatctaacatgtttcttttcccacaccacatttcgattggatccaaatattctctaatacttttataatcatagatgactttgtctattaattatctcgtctaattataaagtctacttaagatgtaatagccaacgattcatatcattcaaaagacatattgactcgaatcaatggaggttttgttaccataatctcattttcatttctaacaatcttttggttggagtaagaaaagagggtaaaaactgataaagttgatttgattcaattaatcaaggtggcgggaaagttaaggaaagaagtcaacgaggaaggaagtactaaaactaaaacaggagagccaataaaaagtaggcaagtgggtggggacatagaataagaattcacagctacccgtaagaaacataattaaaccttggattaaaccgaaaggcatgtgatttcctttgttggttactaaatccgtatactatcgttgatatagacatgtggagggtttcacgactctgaacctgag

SEQ ID NO: 38559 - DNA, 304 bp, Arabidopsis thaliana columbia
aatttaaaccactagaataagaccttcagctgatctagcaacagagagcagaaaaaactgtaatttattgatccacaaatattttcctaagtacttgttatacattatcttttttcattatccaataatcctatcatgtaatcataattattctcattttactaacactgagttctagaatagattaaataaccatttcagatcaaatagttactaaataatggtaccatccaatacattctatcataaagatcgccatttttaaggttcaaatcgttaaaaatgagtgtttaactctcaaaac

SEQ ID NO: 38560 - DNA, 308 bp, Arabidopsis thaliana columbia
  unsure (1)..(308): unsure at all n locations
attgaactaagaagatcgactttatgttgtttattttgcgaatgcaaacatcatacatacacaagtaaagtaagcaattagaagatgaatacatttcacactaaaacacgaatgctagagggatatacatgttcaattgacgaaacgtccagatcatgagactttcggtctttgctaaaatctaacggagaaaaaggcatgagcatggcgtcaaatccatcaagaccgaatccaagcagccagctcgtgttcttagagaatatcctacggttctccatagtcgttgngagtcctttgtctgatcacag

SEQ ID NO: 38561 - DNA, 548 bp, Arabidopsis thaliana columbia
gtaacgagagtattatccattaaagttaaagatatggtgcagtgcaacctgcagatagttaactaaattcgactaaaaaacaaagcatgcatcaaagtttttgaaagtttcgtctaaagcatgtagaaaaggtcagactatgaagaatagacgtttgttgcgtgcaagctatgatataacatgacacacacacacactaaaacaaaaactaactctgaccacaaagtcatgttctattcctgtttaaagtctctatgttggatgtatacgtaagacatcttttttcttgacaagttgctgctctcttaaagttgattctgtatgtccccttctattattagtaaaaatctaaaatatcgttttttgtgtgtcacttgagatatgtattgaatctctaaattttaaagtctttttctaattcccatatataccttacctatttgttttctatttatactcgaaaataagtgtgatgcacgatctaaagttaagttaaatgaaatgaagagatatgataccaaaccagtggagatatctcgtggtgaggg

SEQ ID NO: 38562 - DNA, 439 bp, Arabidopsis thaliana
tttttttccaacatctggttcttgatgacaatcaagaacttcataagttgctgtttttgtttccataacttcctaatgcatataacttcattaccttattcatatatgaatgctgttttttttttccttttgcagctttcagtttcgcagtcagagagcggttaccattcctcccgtccagccagaagtagctctgtgactcgcccatccatttccacctcgcaatacagctcatttacttcaggccgttcaccatcttcaatcctaaacactagttcagcttcagtctcatcctacatcagaccttcatccccgagttcccgttcctcatcttcagctagaccttccactcccacccgtacttcttccgcatcacggtcctcaactccatcgagaatccgtccagggtcatctagttcatccatggacaaggctagac

SEQ ID NO: 38563 - DNA, 574 bp, Arabidopsis thaliana columbia
atttaatctaattaatgaaagttgagttgaaatttttttttaagaatataacatcatatatatatatatatatataaatgaagaaaattgcatgtgaaaggtgagaaaaaacaattttagtgtagagttgttggtgagatgatttagtgacacttagtttagttttcaactatttgtatacagggaaatttgagtgtataacaaaaaaaaaacttatattaactaactagctattctaactataagactataatattctatgtataatctataataatgccatatttgccccatgttgtaggatacatagttcttttatttattttttaatttattttaaatatttatctttcttcttcttctattctatcttaacaaaacaaaaattataagtatccaccatcacgaagtcataataattatttatcactgtcactgtcacaaccgtatcaccgcaaccacctcgtcaccgtcactattagtgccccactatcaccggttccgtcaatatcccactacggtttacctggttgcttggatccaatgttgtacccataaagtataatttttttgg

SEQ ID NO: 38564 - DNA, 973 bp, Arabidopsis thaliana columbia
tgacgtcatcctttataagtaatggcctttatggccaaactttcatctcaaacgcttcagcccactgtttaatgggcctaacgctaaagtgatcatcatatcgaaaattacaagtttgccactttctcgctgcttcatccctctcgttggttcgtcagatttgcgtccaaatccctccctaaaaccttgagtcagactcaagagatacgaaccagagaaatgtggaagtacggtttaagaatcgccgccgggaatgccaaattgaatcggaagtcttcgattctaaataataccgtttgtcatttctcacctccgacttcagccgccgtgggaacacttttcccgagtttagatcacgttcatcgatgcttttcatcttcgaagagcacgaaatcttcaatcaccaaaacgatgaaatctgaaggcaaaaaatccaaacctaaaggcggcgatcctggtgccgccggagctgaggaaggagagtttggagccgccggtggagacgaccttgaagcgggtcgtgccaagagactagctgatgatgagaagattccgtctctagatgttggtcctaatggaaggcctctctttactcccaaagatactacactatcgcagctgactcacaaggatattggctcctacttcaaattcgagtaatctcaattctctctttcccttatgtttctgtttatctatttttagaattttgtatgaatcgttttgtgtgtgttgatgtaatatatatattgtgggaatgatagtgaggcagcactgaaagcagttctgccggaaggattagcttcaggaattgaagatgagtttaatgaatcatggagacctgcattgcttgtcagaaaaagttacttggctctgagggataattttagacgcattgctgatcctcccatgtggccaagtgacagtaaaggtgtgttctttgtttccgttatgttgatttctaagtatcacg

SEQ ID NO: 38565 - DNA, 481 bp, Arabidopsis thaliana columbia
taattttaacttttaacatgtgtaaatttcaaacaaaaaaaatttgcagaaaattagataataatctttggtttatttaaaaaataaaaattctccaaaacgaaagtactgtaatattgttcttagaagtttgtcgggtttctgaaacaaaggtttttctctctcctaaaaagtgcgactttccaagcaattagggttggctccctcttccagtcgtcgtctggccctccgccgccggtgggcgagtctcctgtgatggtcacaaagaagaaacgccctcctccgccggtcccctttagttcaaagtttgccagggttttggcttcagcctctgctcctcctgttcctccttctgacctttggttcgttcagatctggttgatagggatttgattcctcctggggtcctttacgattattcctgattcactggtcgagatgcagggaacgcttcccatatctcctgtgattggctctgcta

SEQ ID NO: 38566 - DNA, 455 bp, Arabidopsis thaliana columbia
tagttcaaatgtcttaataatttatatttcttaattagtcaaccgtaaaatagcaaggtgtttcattcataatcatattaaaatccaactaacattgattaaatagtagtatcatacaataagaaccttatcaaagctagcagctagatagcctagagattgacatagaatgagtcatagataatttggattttaatacacacacgtctttttccaaatatcactttgcatcaacgaaataacaatatattaacacttatcattgattaagagttcaaacagaaatatcaatacgatataaatcagtattgtcgtaagaagcatacgcatcgaactttaggtatcatgttccgtgcttgccagaaagttgaccaatacggcgatgacagaaaatgttacgtaatacagagtgaccaatacagtatgtacaagttttcatatgaagcagtttttgg

SEQ ID NO: 38567 - DNA, 499 bp, Arabidopsis thaliana columbia
atactttcgttagcattttcaggatgttactaaaacctagtatatttcatagccaatatgatgtttcaatactgttagtgttataacttatgatttaccattaaaattataaaactaatataaacataaaagatatgtaaccatcattattaagcataccacaaaaaggaacaaaaggactagagaacaatgcaagctctattactgattctgctttggtatcaaaaagagacttaacaagacattatgggttaagacagataacgctttataggagaatgataagacataacataagactccacgaaattggaaccgggagagcatgtgggacgaacagaaacgggcattcagatactaacatctaacattaggacaacctttttgggaccatcttatggttgtggctttggagaaaaaacaattaaaacatcaacatccccttcccaccagaaaccaaacaagtttctctccaacttgtctagagagcacgaatgat

SEQ ID NO: 38568 - DNA, 589 bp, Arabidopsis thaliana columbia
cacatgcgaatttaagcatctaccaccaacaaacatgaatgctctttgtgagatcgacactaggagggagtctacaaaagtaaattttatgtaagttcgttgttagctcaaagcaaagtaaaagatattgtaagaatgtaaggtaagtgaagtttacggccacaccctcccttacttattgggagggatacacatacttatgtcttgtttcaatctatgtatctgtacgaattgacagtctctttaacgtttagaatctacacgggctagacttgttacattacgagtttacgagatgtttttctaacgaaaattcacccacaacatatacatacatcacgttggtggagatcattagcccaaaatgcgttaaagtgttcaccagaagtgatacagaaattacgtatacaagcaaacgtaacaaaccatgtacactaatcatcatacattgccacaagacaacaaaaccttttgaaagctcagtttttcgcatgtagacattcttgcaatgtgaaaatgtttcaactgtttttccacagcaatggtttgaaatctgagttgttatattaagcccacatgaatgaaagtg

SEQ ID NO: 38569 - DNA, 589 bp, Arabidopsis thaliana columbia
cagtttaacctctgaataagtaaagatagtttggtgaaaaaaaggaatttgaagagaaagctaagtaatgtggaaactacttaaaagtggggtttgttaaggaaaaaacgaggaacgaccaaaataaagtctcagatgttaacatgttccccacgaattacgtgccaaatgacgaaaccttgtttcacgagtatgttcgcgtgattgacgtcaaaattcacacacacacgttgttaataaccttttctatatcaattataatacttggaaatataattatatatagagggctcagagatctgcgaatcttactaactcaattaaaagttaattgggtggtttgagattggattaaggctttactttgtacaaaaactaaagattaataattgtgtgaacctcataaaactaaagtctttgttaggggtggagaaatgtcccatcttgtctaccttttaattatatcttccacgataatctacataattagtttttggttgtttccgctacttctttttaatactcttctcataccacaatagcttactatgaaaaacgacgggtgataaattgtaataaataagtttga

SEQ ID NO: 38570 - DNA, 343 bp, Arabidopsis thaliana columbia
gagaagcatttactaaacacaacttccaatcatgcatctttctaaaacctcattcacaaacttattcattagcttgacaatcagttataaagaaaaccttaacagtgactagttcaaactcacaatcacgagtagagcattaccataagtaagatcaactagaaatactttgaacatatgagatcacaacgtttaacagctgaggcattacataagatttctatgcctattacaacagatctttaaccgcgtacaaagtagcactaagagatcatctctactggaaagcgaggattatatatatacaccgaacggttcactggcatactgttaaaattttgca

SEQ ID NO: 38571 - DNA, 373 bp, Arabidopsis thaliana columbia
gaagttaggacacatgatcatctctcagactctgtttgatctctctaaattcatgttacatttattgtaaacaatggattgtttggttgaatataattttacatttaaaaaaaaaaaagaaagtcatcgttcaaagtcagcaacaacctaatggcaacaatacttgatcacattcatctcatgtatattggaggctttttacagatttttctcttaagaatcttctctacaaacagaacctaaataaaagaaatcaatatatcaaattatcccaaaataagtgaaaataacatagaatacaatctatttgatctgaatcaatcaatattgaaatacatgaaaaaaaatccaaagtcagataatccaaaattaa

SEQ ID NO: 38572 - DNA, 165 bp, Arabidopsis thaliana columbia
gatttgagagatgggtttgggagcttgtcaaggaggagtttcgattttaggctctcgagtcttcataaagggaaagctcagggttcttcgttccgtgagtattcgtcatcccgtgatctcttgtcgcctgtgatagttcagacaagtagatgggctaatcttcct

SEQ ID NO: 38573 - DNA, 548 bp, Arabidopsis thaliana columbia
gaaaacacaagagtctaaaaacacaaacacaagaaagaaaacacaagagtagtcagtttctgcacacgaacacaagaaagagatattaaagatgccaacggtgcgatcttaattctggcgtattctgcatttgtttgggttttgataagctattgtagcagccggaacaataatgtttcgaagaagattgctaccagaccaagcggcataggattaggaactggaacgattttcttcataatcttagccctaatggctatgatgttcttaaacaacaacgctggacgaattcaacacggtatcaatgaacaagctgatgggatttagattcttgtaatcatctttttctttctcttcatgctttatctcaaaggcggtttttgatttctttgttttagtttggattatgtattttagggattaataaaatatacattcggatgtgatcttcttcaaacttgtattaagaatttaattgaggtgaatcaaattagaaacttgtgttatatcaagggatttcaagagagaatgatggatgtttatgtata

SEQ ID NO: 38574 - DNA, 448 bp, Arabidopsis thaliana columbia
gaaccattagagaaagacaatacccgacccctcgtcgaagctctacaagaaacaaaggttccatgacctcataaagaaaatggaggcgctcgaagaggagcttgcgatggatctagagaagttgaaactgttgaaggaatcgagaaatgaaaagaagttagacaaaatgtggtggcactttccttcagaaggtttgcgcgtgaaagagctgcaagaaaggcaccaagcgatgctcgagttacgtgataacttatcataacttaactccacatcgattgtattctcttctattctatagtcttttttgaccatcagcttaagcacttcgaaagttgtagtcaattcctgcaacagcaatctcccacgatatttttcatgaacaataaatctccactccgtgttatcatacaatctccacatgctactcctcacatagatatgcataatg

SEQ ID NO: 38575 - DNA, 498 bp, Arabidopsis thaliana columbia
gaccctaaccaaaaaagaaaaaaaaacttaccccttatacatgatttacatatagtggatttggtactaaaagtctaaaagatacagagaaattgcaagtggttcgtacgtacaaatggaaattagtactttatgaaagttataactctttggtccaattatatatgttcttctatgagtgttcgtctactcatcctccactccaaaattttagttacttcttgtctgaaaccagccttgccatttctgtcgtctttaaatcgtagataagtatatacttttccatgtatttttgttattcacaattacattgttgacatattataataagaagagattaatttaagacattccttaatttaataaaaaaaaaagttaagataataatcaatctcctttgacgaccatagactggtgagggactctcttaatgtcacaaaggtagagtagtctctggtcataggctgttccatggctctcatccatttgcataaacgc

SEQ ID NO: 38576 - DNA, 386 bp, Arabidopsis thaliana columbia
tattatatgttaatcttataagtataccatcgggaataacgttgtcgggaaaccatcagaagaagataccgaccgattttcaataaagttctgatgcaatgcatgtcattaatattcgttagaaaattgtcggaaaatatttccgacgaggatctgacgatcatttccgactatgttccaaccggtttctcaatcaatgtattgtcagaaaagcgtagaaaaattgtcagaaaatattttcaatgaggatccgacgatcatttccaactatgttccacttccaactggtttcccaactaatgttattgttagaaaagcgtagaaaaattatcggaaaatacctcatcggaaacctgttgataatttgtaacacgtttgcgacgaca

SEQ ID NO: 38577 - DNA, 488 bp, Arabidopsis thaliana columbia
gagattggagtactggaggagtcggcagaggacaaaaagcgcctgaataactgtcagccatggtgatgggttttgttgaggacggtctgagaggtccagaaaatgcatgtcttcctgctgcttgctgctgatgatgatgcgtgtctgttgtagaaggccgagggacgcggccgtagaagctgttgctttcggcgtctttcccatctttcccgctttgtatcggctctaacggagatgagtgccatatgtttccggcactgtggtttgttggcctcggatttaatgcttgggaaaccggttttgagtaccttgaatcatttggtgttggtaatacgtaggcattaaaagatggattcgcctgtctcaacctctctgatacatcaggtttcttttctgggaacaacggagctgaatggctgctcgaatacttatcgcgggttgaaagtggatatccttctctatgatcagcatctacctgtgcaagagag

SEQ ID NO: 38578 - DNA, 551 bp, Arabidopsis thaliana columbia
ccgtatatgttgtttggtaatatagttttttttttctttgacatcagatgtttggtcaatagtttttatgaaataaaaacataaacttttgtcgttgcaactttttttttttgttgttaaccagggtactttcagaccgaataatttaaatagttgaagaattttaatccctaaactatacgcacatgaagacttcatatttcaaatggaaactactattctaccactacaagaatataggctctttccgacggacgaaatcgtcgaaataccgttaaaaatagccgtattcgacgacatttcgacaacatagattggtcgattctatcttgtcggaaatctgaatgtcgttggaaacgtgttacaaattaccgacgggtttccgacgaggtattttccgacaatttctctacgcttttctgacgataacattggttgcgaaactggttggaacatcgtcgaaaatgatcgttggatcttcgtcggaaatagttttcgactattttctaacgaatattgttgtcaggcattgcatcagaacgttgttgaaa

SEQ ID NO: 38579 - DNA, 462 bp, Arabidopsis thaliana columbia
tctgtcgtgtttgtgtatttggtgcgagtatttttgtcttgagaagagagacatggagattttacctgcctcttcatttgttctggactacgggatttgccttgacgactttggtaaccaaaagacctgtacacatgcatgaagcaagagaaatatcaaataagagactagaaaacagagaaaattatttgaccctttatgtaaaagaaacatgaggaacaacttaccttaatatgaagtatctaagaaactgtctggctctcccaagtcttcgagaatacgattccatacttaatatgatatcttgccccttaagtgttgaagctctgcaataaggaatgccaatatttttattgtaacttacaaattgagtacaaaagaaaatatgtgaagagacggatgaaactaactgatcttgcttcaaggtaccactagaagtagattatggcatatttgaaacac

SEQ ID NO: 38580 - DNA, 455 bp, Arabidopsis thaliana columbia
cgcctgacaacaatattcgttagaaaatagtcggaaactatttccgacgaggatccgacgatcattttcgactagtttccaaccggtttcgcagcaaattttatcgtcagaaaagcgtagagaaattgtcgaaaaatacctcgtcggaaacccgtcgataatttgtaacacgtttgcgacgacattcagatttccgacgagatagaatcgaccaatcaatatcgtcgaaaattcgtcgaatacgtttgtttccaatgttattccgacgatttcgtccgtcggaaataccctatcttcttgtagtggtaagattgaaatttggtttttataaaaattactaaattaaatagcgaaatgtgttgattatgatttagaattcagatatcataaataaaattaatatttagtcttataccgcttatttaggcaacatttatctagtaattatatatata

SEQ ID NO: 38581 - DNA, 564 bp, Arabidopsis thaliana columbia
cctctttaaacgcatcactattggctatggtaatgttacatcaattaacacctctctattgtctatgcatcttaactgcttaagatgagatatattgcacatttacaaggcagtgaaaagtgtaagtctcctctgcagaacacaaaagattagccacaagtcgcgaacaccattgctaaaccaatggattaaccggacacaaatatacatacagaagatatttaatcaggattttatgctccagattgggctcggtttccgatgttgaggattctcgatcgaataaacaagaagggctccatcttttgtccctgctaagaaacactcttcctgagttactgtcagagaggtgattattttccctgcgccgttataccgttttactacttcaagggtgttcatagaccgcacaattatttgtccttggtcaccggcactgaccaagaactctccacacttactaagttcaagacagttgattcgtccatttgactctgagctggccagatgttttccgtttatggagtagaggtgcagactaagatcatcatcaccgtatagaac

SEQ ID NO: 38582 - DNA, 418 bp, Arabidopsis thaliana columbia
taccttcccaccaacacggtttcatcatcaaccctgactcacaatttctctctctctctctcgttctcacaagatcaagaatatcaagaaacaagatcacttctcaatcctcgaagatgacattgacgcagagttcatcaacaagttattgcattttcatgctgtcaatactgctccggtgggttacttgcctgatccagcttccatcaagaagcttcaaatcccaacttcttcaaaggtttcgatgcttcaaaagaagaaaaccgatagcttcacaaacggagcaagagatcaggacaagttaggacccaagctatccgaaacagtatatagaaagctattcttgggagctaagatccttcacatgggaggcttagataagatgtataagcgactcttcaaggtctgcgataaagag

SEQ ID NO: 38583 - DNA, 1038 bp, Arabidopsis thaliana columbia
gttcagcttagcatgtggctaatttccttttttcaaaagtatgttttcagttatcattatggctgatttgattttagccttaaaatagttatttgaattcattcagcaggaccatagcactgcaagagaacaaagcctttttcgacagactttccaacgatacataaacggtcggaaattctcgacagttttgtaatgatattccgacgatcttcgcacgacatgtttcccgttctcgcactgcaaccggtttcgcaaccatagttatcgtcagaatagcgtagagaaattgtcagaaaatacctcatcgaaaacccgtcggtaatttgtaacacgtttgcaacgacattcagatttccaacgagataaaatcgaccaatttatgtcattgaaaattcgtcgaatacggctgtttccgacgttattccgacgatttcatccgttggaaatatcctatcgaacgttatagcatgtaataaaatcgcctttaaaagcgactaagcttgcacctttgtgtccaaaaaactttttatcaactagagataaaataggttattagtttaccttgccagaaaaataaataaaaacaatgtgaaacttaagataaaaggcagacgagattttttaggttctgtaagacaatcctttgctattttgttttgacatgcatagaagttaacacatactacggaaatgttaaaaaaaaaacgagatagtgtcgccatgataactgcaatgctgctgaaaccctaaactttattaatgaactaatgaagccaaatcatttttcttttatgattaaaaagttgccaagattcgtgctcactctgtcaaagacaacaacattatcatttttcaaacagtagttgattaaactaaattaaaaatgggtatataaaatgagttataacgataaagacaacaacgactttccctttgcttgattatttaaacaagtcctgataagaagaagacgtctagtggaaaataaaatgttacagaaaaggcgccaatacacaattgtggcgacattatgac

SEQ ID NO: 38584 - DNA, 820 bp, Arabidopsis thaliana columbia
cttcgaggtaacaacttcttcaatctgtagctttactttaaaagtgtaattcatatacttctttaacaactaagcttgatacacttggttttttttttttggtcaaaggcttggtacatttggttaacaattgagatttctcttatttggtggcagaatagagatgaacgatgttgggcagagaagctgctggttggaacttggttcaacgaaatcttcaatttagaatgaggaacaaacgttctatacggttatcactaaatgtgaattatatgttgcattagatattgcaaaaaaagtaacttgaagtttattattttaaaaattgtaacaagttgtgtgacttttttttagaagaataaaaaacatgtatttcttcaacatgattaattttttgttatattactcatattttaatcaaaagttcaatcaacagtttcagtttactagctatttttaccttttacaacttctggattttaaatcaccttttatcgtcatactaattgaaaatatgaaaaattttaagtgtatcccgtcggaaatacttcgtcgggaatccatcgggaataacgtcatcgggaaaccgtcgaagaagataccgaccgattttcaacaacgttttgatgcaatgcttgacaacaatattcgttagaaaatagtcggaaactattttcgacgaggatccgacgatcattttcgactagtttccaaccggtttcgcaaccaatgttatcgtcagaaaagcgtagagaaattgttggaaaatacctcgtcggaaacccgtcgagaatttgtaacacgtttgcgacgacattcg

SEQ ID NO: 38585 - DNA, 531 bp, Arabidopsis thaliana columbia
atcgttctacaaaatatgttttgaagtatttaatagcgttacacgattgtgtgaaacgatttttgtatagttttaaattcatgcaacggtaataactcatacacaatctctaatgtacatgagcaatcacatcgcgagttaactaatcatagatataatagtatatagtatagcttatcgcattatatgcatgtttatgatgatatctgtttttttttaaaattgaatatgcacgacgcaacaggagtggtcaaaaccaaaatgtagagaatttattatgttcaatagggaaacttaagattttacctctgtttgtctacttggtgaattatttagggtgaatattacaattattattatcatgatcatcgctgtggaaaattagtgtctcattaggtactgttgataaacagaaaagttagaccgtaagatatgataattctatgccaaaattaatcacaaagccataacgtgtacacatatataccactttctcttcttttatacgatcatttaattttcagttaaaat

SEQ ID NO: 38586 - DNA, 441 bp, Arabidopsis thaliana columbia
taataaagcggtgcggttttcaaaactttcttaaaaaatgctttcaaatcaccaatcacagtttttttttctttttttttttgcattttttataataagaagatgaattacgtgcacgattttctatacctcacaaaagtgaaatccacttttaattttctatcccgtatgcaaacaattatggtccaaagaaaatactttatactctctggttttttttacaacaaaagtattatatttacttaatattttaagaataaaataaaataaaatatatataattggatgtgtatatggatatatatatatatataaatatattgaagtaggttatctgtatgttggtacacttatatgtggtcattgtgtgtttctaggttggtgcatctatttataaataaatattatgtatatgatagtttagtacaactaatatgtggt

SEQ ID NO: 38587 - DNA, 424 bp, Arabidopsis thaliana columbia
aaattaaattcgttacatcaatagctataatgttttttactaagattttttttgttttgaacaaaagtaagattatttttaagaagcaaaactaaagtcctaacttctaacaagttaattttactacctttgacaaatgtcactttttaatgttaaatacattacatgcaaatttttggtattatgatagttttggagtgtcttcttaccttacaataaatcataatatatagttttgaaatcattgaacgtattgcatgaacttttaactttatttggagtgaagctatatgaactctctaaaagataaagatggatgagttacgtaccataacaaaacttgccgcggaatttgccatctttgaagtaaagtagtggatatcatctttgagcaattgagcaccatgaccataatatgtaatag

SEQ ID NO: 38588 - DNA, 810 bp, Arabidopsis thaliana columbia
tgaatagatttatggagaaaaccccaaaagatattatatctaatcaaaataaccaaaggtttctaatgtaaaaactcaataaatattttgtatgtcgcctttacaataaaacaaaatctaacatgtttatttctattttaaataatattttatttattatcttttgaagacaattcacgattagtaatatcatataaacatatgtgcgtaacggtaataatatatacgtacacggtagtaatatttacgtacacggtagtaatgtgtacgtacacggtagtaatgtatgtagtaatgtgtgtgtacgtataccgtaaattatatatacgtacacaattttttttaatgaaaggtataattgtaattttgcactcgtcttcaacctctgcaaccctaattttgcagccgcttgttaactcattaacatccgaaactcctcgccgccgactactcatcttcatctccgccatttgagtatgaacaataattcaagaaaccagaaaatcctctttttgttatcctttatcacgtttgtcgatcgaaatttcctcaacttaagcaacgaccagaactcgcacagagcctcaatcaaaatttcactttcgatcggagtttgtgtttcgtcggaattgttcttcgtcttcgacaaacagtttttgatttcctttggttccagaaagttaataacgtgtttttgatttaattttaaatttaaattttggtaaccagaaaaataaagaaacgaaactgaaccgcctcctttcatttctcgttccagagcaaatttgtccatttttggctgaatgacta

SEQ ID NO: 38589 - DNA, 546 bp, Arabidopsis thaliana columbia
gctgccacaaagctgattcaaaagacactgaacatgctctgagctaaatatactaggcgaacattttgtagaaagtatgcgcaagaactcgaaaagagaatgtttaacaccaatcatcttgagaaacttctcctgaaaaataaaaataaataacaacaatgagaaaatgatcacctctctaatatgtagtaaagttgaatatatccaatatactaaagcgactatttattttcttcattctgattaccaaatgcattttctgtaaaatactcttgctgatactactaaacagaaaagtttgaacttactttaataatctgggcatttgtggatgacagttcctccagcagtaaagttaagacatcaaaaattgatgcatccctcattcggtctaatttttcaaagagatcttctgcctcagaagcatctggaaagcatgctgacagcttaacgaagtagctctttttctttctttgtgcttcttctatattgtctactaaaacgagtatcagttaaattaataaaatgagcaaagtaaggtttgcg

SEQ ID NO: 38590 - DNA, 769 bp, Arabidopsis thaliana columbia
gctcttactcatctcggatgactccttgatcgagcttactagggatctcctgctgggattgagctccaattttttcctggtcttcagctattggtgtctcgttggctaagagagttatgcgagaactaggatttggagaactaagtaatcctcacgagtagaaacaagatttagtttttagtaaatgttacctgggcgtcgaacatccctagatggtagttacgaagtcatcgaacatccctagatggtagttacgaagtcagctagcatcttaagggcgtcggtaatggtttgatcggcaatgatggcttgttcatgtcttgaaacttctgaaacgcttgagaacttcaggtccccatagacggtgccaaaatgtggatgtcggatttacacactcaagtatttatattatttgtgggctaaaactctcgagtacaaaagtacaagacaaatgtgcataataaaagtataagagagtatatagaaatgtacgaagaatttgtacataaaaaatggtatagtatttcttgtataaagatcttacataaaaagggaagaaataatcttttgtgtatttatcagaaaataacaatgtttaatattaagatttgtggtgaaaatgtagattctctagctcccttttcttggagtcttcacctctcttttatagtctctttccttcttccaatgtgccattatttggctattaattatagaattaattcacaaaataacttccacaatcaattcataaacttgaatgacaagt

SEQ ID NO: 38591 - DNA, 733 bp, Arabidopsis thaliana columbia
atgactaactctgttgatttgtaatgcttgttaggttaactctcgtcaatggtgattgagtctgggactggtttaacttgtgtgtctctgttgcggtggcacttagattttgttaccaaacttgttttctagtgataatttattgagcatgtcaatcacctctaaactgaggagacaaaactacttaattatcccatcctcgggaatttctcatccaattgatttctttgtttactctgctactgtttattgcatcttgttacctgttgcttagtttttgtatttttctcctgttactcgacctgatactcgaccacccagttgtctggcaacaaactgtgcagtcgagtatctctgttacattttctttctgttactcgacctgtcactcgaccacacccagtgcttggcaacaagccgtgttggtcgagtgtgtttactattcttcttgaatttctgtttcttgcatgttcacttaggactgctagaacaccccaaaacctgttattgcttggcttcactctatgaactctgaatgcatcttgatttctagcatcacatccatttggattgacaatcttcagtactacaacgacatgatagtggtttaggattaattaatcttaaaaacctattatcagtgataaggggtggcgactagtgctttacccatgcttcttcaagaggtcccaaacaccttgttgatgaaatgctttccgcatcagtgatgact

SEQ ID NO: 38592 - DNA, 550 bp, Arabidopsis thaliana columbia
cgactcatcacctctcattctctaatctatttcttcgatagtgttgattctccgcaaaatcctctcgagagaatctttcccaaaagagattagatttggtggaagaaaagagttcttcgtcttcttgttgttgttgaggattgaagaagaagagaaatgaaccgacaaaacggtggagggcagcggctgagatccgctagacccaccacaattcacgattgtgctctctccggcgatcttattgctttacagagacttcttaaagacaatccttctcttctcaatgaacgcaatcccgtcgtaatgtccaaatcttgactctttctttatgtatgcattttgattccgggatgtgtttgattcggtgggtcgatttagattgtagctgaattttggaatctggatgcaaaatttgaacttttagatagggtctgatttcgaatctcgacaggattcatgatcttcaagctttgtatatgcatgtgaatctataaaaagcaaactttattgaaatgtgtgttgtattgactttgattagtattgcagatgt

SEQ ID NO: 38593 - DNA, 657 bp, Arabidopsis thaliana columbia
atcagtcttgtcccagattgttcgccagagagaatagaatcatcctcgctgtttcctatttaccatattgtttccaccaatcatcatcttctcgcatcagagccaatccatggcgctttctttctttagctccgtgtaatttctctattctgacaagtcaaatccctaaaaactcctcgattctcatggccatcgttaccggagatcgatatctagagaatctccagaggttccttgacgagaaagctgatttgcttattgatggtaccgatgtcctcaagcttaatcccgcgggtcttcactatgttcatctccgtctcgaatctcttcgtgaacttgagcttatgctctccggagctcccgttgactatctccgtgcctacgtctccatatatctcgcaaggttatcaatcacacctccttgaatcagaacctcgtaccctttcttacctgaaagcaaacacacaaaacaatcaatcatctctcaaatagttaattcacttacacagctgaacaaaacaaaaaggatagattttaaacgtacctggaagttctccaactgaagtactgcaagcaaacttcttctgcagttctgatccaaacgagtctgggtctatcaagaacgtctccatccctgtgaccttggtcacttttttg

SEQ ID NO: 38594 - DNA, 504 bp, Arabidopsis thaliana columbia
atctacacttgtcaattcacctcaaaaacctcaaatatatcattatagctcaacaaactacacaacaacaagatttccttaatcgctaacagacctaatgtctggatcacgcaatttcatcaataacatatgaatcagatggcaaaaaattcgcaaaatcataccagaaattgaacatcgtttctagaattcgccgactaacgaaaggaattgactttttcttgttctcttgtacttcttcttcctaccagatcgacaaaatttaacaactttacagaaacagagtttacagagtttcaaagaaaattcgatcttctctgtttcgtttcagattttgctacttgcttttaaaaggcccaaatacgaggaggcccatattaagttttgattaacaaaacgtagtcgttttatgcatcgtcgtccttatccacgcgtaacggttcgcgtttctacacagagtcaaatatttctgcacggaagcttcgaaaagaggtcatcaatgga

SEQ ID NO: 38595 - DNA, 434 bp, Arabidopsis thaliana columbia
tgctgtgctgcgaactgaagtcatataaaaataatcctaatgtaaacgactaatcgcggttggccatctcactatttaacatttgttaggttatgataattttctatattattttttttacggaaaaagccataaataaatatttaaaaatatggaaataaatatttaaaaatatgtaaatattcctaattataatcttatgttaataaaaacagaatattaaaataatcctaatgtaaatttttaattttgtaaagattattatatataaaaacaaaaagtctagatatatgaaataattatattactatttaaaaaaattcagattatgataatttccagggagattgacaaaaatagcatttcttttgaaaaatttcacaaatagcactacgggctttaattagatgcttggttataaatccacgccacgc

SEQ ID NO: 38596 - DNA, 168 bp, Arabidopsis thaliana columbia
tctaaagcactcctaaaattatataaaaatcacttgtaaatctatttaacgccaaaaaaattaaattgcgggaaatatatttatgcaataaaaattggcgtgaatttttttcggaaacttttggcgggaaattaattttggaccattttcggcgatcgtattgctgtt

SEQ ID NO: 38597 - DNA, 491 bp, Arabidopsis thaliana columbia
cgtttttaatttgcgatactcttccttcagttttgatgaataatttttcttatgaattatgaagtggttttgtttcattgtgtgtctaaaagtgtttacacgaaactttgttaattaagtgaatccaacgtttttagcgttacatgattataataacgtcttgaattgtagcgattggtgtgtttgagaaactatttttatttgtattgattagtatatacataagaagggactaattttttgtaaacaatgtatcactttgtaaagactagatatgatttataaaatatgttgttttttttaataatgattggtgagtttgatgaaaatggactgtggaggaaaacaaatagcagtcaaacactcgattagaacaccacttacgtacgtcttctaatcgatattttactgctacttgtgtcctcaagagtacttcaaactcacatcattatacaaataagattaatatatcttaatcatacttcttgaat

SEQ ID NO: 38598 - DNA, 561 bp, Arabidopsis thaliana columbia
taatttctgggtatgttaaagcctactccattttccgttatgtttcttacaagtctctgcttctcactgaaagtttcataaccaaacacttgttaggattctcggaaaggaaaaggtaaattcgaagccaaagaagcagaaaccagatcaaaaggacagtagcaaacacatcccaatacacgcattcttcacaaaaagcaatcaaaactcgtgagccttgttcatgttgtccatagttttagtaatgttcgactctctgaatggatgccacgtgtcatctatgttacctatattatctcatcattgtatttagtattttatctgaaccctctttcagtaacgaaacccagaggaaatgaagatggctctgagcccaccgaaactcattctctcaccgtccaattccctcggcgattccaattccctaccgtcgatgtcagacatcctgacgtcatcaaaagctcgaaagctagacttaaagatccagactttaggaccgtttttcagagtgacagggaagacgcagacacgggcggtgaggtgggaagagcagagggagtg

SEQ ID NO: 38599 - DNA, 461 bp, Arabidopsis thaliana columbia
aatacaatcaaaaccagggttgttttctactaagtgacaggtttctactaaatgatcaaatcaggaacaaaatttgttgccaatgacaggttttgctacaattgcttccttctgccacttgaataagtacgacgtcctttaacacagggaatgcattcgtgctggccaagacactgcagaaacttccaagctgaaacctgattatatttgaatctcatatccgaagtctgcattgctactattacttcaccctcaaaccatatatattacatgtgagagacatcacgctcatctcttgtcatattccaactaaattttttgttcgttttgctcacttagcagccgttgatggaagaaggaggaaattgcagtgaagaggatgagaaacgattagagagaaaatgagaggaggatctcatcaacgcaggtttgcctaggcacacttggaagcttggttgaaa

SEQ ID NO: 38600 - DNA, 438 bp, Arabidopsis thaliana columbia
ccgtcgaacaccttttgagcgcgggaatatctggattcatattccaattgatcataaaggaacaagcagtaagcggaactaatccagaagggagtctagtattctaaactcaaccaactaaaacgacgaagtagaccagaactacactatcgcttcctcagaaatacggttcactactcagacataatcaacgacaatagcaaagcgacgattgaaaacatgataacataaatgataaaggattaaaacgaaaacagacagaatcgaagacatagctaagcaatgattgaaaacatgatatgagaaatgatagaggattaagacgagaaactgaatatcgggtacttggtagtgaatacgaagacgcaggagagacactgcggctacgagggttgcgaaagatagaagttggatgggtaatcggatgccctagggaaa

SEQ ID NO: 38601 - DNA, 325 bp, Arabidopsis thaliana columbia
caggtcgactatccgagctggagcatttgcccttagggtaacttagcagccgtagcttctactgtatctcttccatttgcttcgccgccattttccgatccaactgattctggcgacggcttcaacaccgattcagatcacgagatctgacactagtctcgtcttctactctcacaaacttttgaagagcctaatttaccacattggctcatatgctcatcgccagcgtgtaaacagtgaaaacgatcaacccataatgaataagacaaaacctacttaagtaatttaacatcagtggacctaaagttttctctcaggactttaa

SEQ ID NO: 38602 - DNA, 571 bp, Arabidopsis thaliana columbia
taaagaatgttaagaaatatttggaaacgggtaaacgcccataagagttgaggaaggggtgttgtgtaagtgtaaaactatatcaatatttaatttatatacatataaaatgatgtttctgttaaattagttggtacggaaattatggaatggccacaaatcacattgcctgcctaaatcgcattcacacggcaagtttggatatatatatacatagtgccaaggaattgatttgagatggctatgataatgttctttttggaaaattgcatcaggtgttctattccgttactatttctatatactttaaaataattcattacttgagaatgtagaaatactacgtacaagcatacgactttatccaactcggaccaacgttatcgccgctaatttagagcaagaaacaccacggctagttcactgaaccatggcaaaaccaaattgtttcgacaaaaggaaagtcaaataattttgtaaagttattattgaaaaaaaaaatacatagttcactagaaaatacttgattaatgatcatatactatgtcaaatggtacatgaataatgaaaa

SEQ ID NO: 38603 - DNA, 571 bp, Arabidopsis thaliana columbia
  unsure (1)..(571): unsure at all n locations
tggaatgcttaatccatcaagaatatgtatcaaggaaaactagctaaagagtggcatcaataccttaaacaaataaataaatcctgtgttagtagagaagtcccttgcttctttcagatttacaacctgtaaatgaaaattcattcagagtactaattcttccagaaaacaattttcttacatcatgctcgcaaatctcaccttccaactctcattagtggtgtacagaacaaggttacgaattgtaatagatgccagcggacagccnctagatacaaagtataaaagcttagatatactatatacataagtaacaatccaaggcatttagatttaatccccgagtagaggacaacgaaaatgaaattacagtcaggtaggagtgtgaaagacataaattataatctaatcagtaatatgtatcaaagaaccctacgtaacgagattccaacaccccatagagatgaagctaaatcccatatatctagacaatgtatgcagtaaaagtaacttaccaggctgcccctccttcacggttggcacacctccagtttcaagaagaagattgaca

SEQ ID NO: 38604 - DNA, 611 bp, Arabidopsis thaliana columbia
  unsure (1)..(611): unsure at all n locations
cttatgtttataccgttactcgaaaataggtgtcacttagataaaactatgtaagttgaaaatgatgaacctaattttctgtaattgagacatactgagtacctagcatacaatttacgctagaaagttaaaaaccaatgtattgttttggaaagattgtgcgatttggcaatggtcaggtgagtcttctatacaatgtggcatagtcctgttctgctatttgcatttgttagtgtcccattgttgattgactgaccaaagccttttatgtaatggcaggttggttaattttctcttctcggcctcagagatggcgtataacgaggtctcagttttgtgtttacattctagtgctgttgtatgcatttagaagaggggcgcttattggcggcagaaagttttagggtccatttcacccaatctcttacaactgtgatcaacgtgtataccaatggtttgttatagtacacgaatattttattcaaataaagattttttttctttttctgaagggattccatacacattgcacgaagacacctgatattagcagcactaactttaggattgagaaaagtgttctcaaganatctaggtggaagtagtaatga

SEQ ID NO: 38605 - DNA, 540 bp, Arabidopsis thaliana columbia
cgctttggtacaggtaaagtgcgtttttaccctattcttgtttataaaaaaattaagtggtgtttacatttacgattgttatttgaattctggtggactttcttgtttttttttggccattgttagtataacattaggtgccacgtctcctttctggtatagctgtactacaccgtactcccttttctatttctgcacattaggatcaatgattttaaagtcctgtttttaaatggtgttccaaggtatctgatatttgttccaatggcaccacaaacttgagttttgtgactgccttggatccttatctttcctctttgagaatagtcttcataatatgccagcttagccattaaatacttaacacttttgcggtatttgcttggacaccacgtaccatgaaccaacgtaatctgggcacattaggaaatatacgtgcttcaacttccttgacttgttttgttccttgtgttgactctcccttcttgttttagcaataatcacttcctccgggaccaagcccaacgactgcatttgttt

SEQ ID NO: 38606 - DNA, 575 bp, Arabidopsis thaliana columbia
agttgttttctctcttaacttttgtgtgcaacaataaataaatccaaaagttttttaaaaaataattatagtagtggctagtggtgagtaagactatactagtatatcaaatttgcatgcgtgtgcgaacgatcatagatttaagaaccagacaagcttatccaaatatcaatcgtcttagaaaagcacagaattagaaaggtcgtcaaatcgaggaccctatggaccaaccaagtaattgtcactgaaatatcaccctacatgaatggaagctcaatgtaaacatctaaaaaaggtttttgaccatgaggaaaacaagaatcttaaaggtgcccaagcactattacaagtagaaatcacaatcaaattgtatttgattactagctttctacaaaattagcaaatatatatgtcatcactgttagttttgtcaactatctatgcgatgatttagataggtcttaataaggcgctgggggccggtcgtgagccatcatcatggaaccgctgtcgtatatgaagaaggatgcacttaatcatatacaaaatagatcaacgaaaggtttctaagattt

SEQ ID NO: 38607 - DNA, 1682 bp, Arabidopsis thaliana columbia
atcatttggaggaaattcctggtcagtaaattgcttatcacctcgtgcagagagagcttctttgacagccaactcaactgaacgcattctttgatttatatcttcttgtgtctccatcctgggtttcctgtgtctcctggcaaaggaatcgacactcattacaaaatcccgacctgatcttcttttcctcccactggaatattgtccatcccaatctacgtcatccctatcatagagatcaacatcggcaggatcactatcccaaccatcgacctggtaaaaagagaaaggaatcaacaaaaattagaataggttttaacattagccttttaacaaacatcggactgaaaaaatatgccaacagtcaacagaaggaaaacatactctggggggtgaatccgtccattgccaattgtcatcagacaaatcaatcatgtctaagtcagccatgccaatggctgcatgcaaagaagcggcctcttcttcacttaagcatttcccccaaaggaaaacatccataatatgcatctttgattcgacgccatcactatctgatctcccgaatgcatcaacatctataggtggcctaacacccaaccaaacttcagctccttgttcccaaatggcactgccaatacttagaggtaacccattctggtagccatcaaacccaccatctatgtaacaagtagcttcccccgcatcagcatcaattgtgattgtcactgtatgccacctgtgattgaaacagctaatatataaatatgacagaaatccatgataacatcggaaacttttgccaaaccagatcatgagaaatatggatcataaaagtcctcgaagtaaattttgcaatatggaaactgaggggaaaaagagttagaccttccatcagttatgctggtgcaccaatataccactctctagcaacggttgtctgcctctcaccttttgttatcaacctaagcccaacttggccagcctcaattccttgctcagaaccagcaaccagaatctcccaacatactttcttttgaaattcagtgccaaaaagacatacaggtccagaatcggattggatcattgctgtaacggaaaagctaatcttctgactttgacagacacttgagtccatttggccgcaatgtttaccacttatcattggttcatcatcaagaacacaaactgccccagatattccagtctggtaataacttttcttagttaattctccattaatcagcatcataagaaagaacacttgcagaatataaaaataagttttaacctgttgtgcacgtcgttctagttgagcagtgcgtatcctacgtgcaatacccgagaccctctctcttgcgaaggaatcctcaaggacagaatcacccccaacagcacgtattgcagctgccatggctgctgcctccctgctaccagcattaggaatagatggaataagggacgcttcaatttccttccatttgcgctcttccttctccaaaagagctttccttctttctttacctctcccttcttcttcacgtctctgcataaggctttcctcttccatctctttctctctcagataactaaaatttacaacacaaaagaaaatgataggcaacagtctaagagttcagcttcgtcaaaccacataattataagaaacatatacctctcttgaa

SEQ ID NO: 38608 - DNA, 651 bp, Arabidopsis thaliana columbia
atactcaaacacgacgattacacttaaatcccccattaatctttgatattaatatatatatatatatatatatatatatatatatatataattacatattgttatttacgttattatttgttttacgattatatttattttgggtttttatgcaaataaaagggtactacccatatttaagttccaaaattgaaaaatattatcaattaattgaaatttgccactattttgcaaatcacaattatacaatatgtcaagctctattaataatttttttttttttcagtcgaatacggataaagaatttagaaaatattttaatatattaacaaaaataatcaatagaattaagattaatagtttaatatattgaaatttccgttataggaaaaggaattctcaccttttttatataattttttttaacttatgcatatatttttttctgatagagttatacagcttttcttatatttatctttaaatatattaataaaaaaaaaattgagacatgatgatatcgtgatcacatgagttagcaacttgtaaaattcaacttataataagatggtcacattaaataaaacacatgtatgattagaaattccattttcaacctaaattatatgtccttttatacaataataataa

SEQ ID NO: 38609 - DNA, 873 bp, Arabidopsis thaliana columbia
attttgataactttaataaaatcatgaaactagataaatgaaggattataaactattgattgagagttttttataatcttgttgattaggttttttataatcttgtaaaatttcctaaccaatctctctatttttatgatactactttttatgactttattttgtgaataaaagtgtagaaagcataaaccaataatacaataatttaattgattaacattcaaagattcttttgttttagttgaataacataaaaaaatcagtgattttattaaagtatgaatccaataactccaaattaataaaaaaaattgaaaagtctttttacaaatcaaaaactaataacaagaaactttaataaagtttaatcatattttgattgaataacacaaattctaaataatatttaaagtcattaaaacactatttaaatcccaaactaataattcttctttagtagatatcatcaactaaagcgaaatcttatttgtcaaagtcgtcctatgcgttataactaaattgtcgttttcatggtcgaatacacattatttaagcatctaaaccaccatgtaaggatatcaaaaacgtgtttatgaattctaaaccataaactcatcctcatatcaaaaacatggcgacattgaaaacaacaatctttatcatcttcattctctatatctcatgtaagctttctctatatatactactactactactatatatatacctcttacattttgattattcgacctaaaagtccaaataaaatatggtatgtgtttgcaattaataggtacaatgtttgtaaatatctttagagttcaagccgatgcatcatgcttggacacaaaagagtgtgtggtgccgtgtcag

SEQ ID NO: 38610 - DNA, 558 bp, Arabidopsis thaliana columbia
atgagaagatattgccacgtggcttagatttttcagtttttttaagattacgtggcgtgttcattggtcagcgcagtcgttgacgcgcctctatggtttgatcattgtacgttttgtagattttgacttctatgtgaccactgactttgaccacattgatcagatgtatattaaagtattaattaattaggcttaaagtatacttaaggtatatttttcgtttattttaattttatgaaatcttatgtagtatcaggcgttcaggctaatatcatcttttttacgtgcattcaattcgtttatttattaagaaaatatgaacatgccaagccaaattgtaaactattttgtgaacgcgtccaaacataatgtatgcatgcgtataattaagcacgtggattgttgtgtactgtgtttggtaatgtaccttttttagaccggcaagtttgttatactcaatcttggaatctccgatgacttctctaatctcttccctgatcgtgtcttgcactcgggatggacgcaagaagcataaacgccacgttaggctaaaccgtt

SEQ ID NO: 38611 - DNA, 627 bp, Arabidopsis thaliana columbia
ccagagagattgggagtttctatgtttttcaaacctctttcacagattcaaccttttgttttgcttgagggcaagcaaaagctaagtctgggggagttgatatctcccggtttttactgatttctaacacagtttcagaataatttttagagtctttctagtttttttcgtacgttttgagtcattctaggtacactcagacatctgggaactatggagcacaataaggaattttggaagcttttcagcgataaagatcttgaaggacgtctttcagaagctggtgttgatcgacacagacttgctagttttagattgatcacctagaatttgatattagataataggtattcccgccataggtatttgttatttgaaccatcatagatgagcctacgcatttaagaaagaacagataggctcatagaagggcgtttagatactaggtgaactaatcaagcttattaacaatgcatgctttagcataggatttctcggcttctccggttatctaagttgtaagtatagagagtttcgtggaaggccaccggttactctagaattatagtttgagtttgagaacggtgcgataacaatcctgatattagctagatctacaatttattt

SEQ ID NO: 38612 - DNA, 551 bp, Arabidopsis thaliana columbia
aacttgtgcacacttggcatataaatccacaatggcgttacctaatctaccttctgaatctattccaagtatcaagcttttggaatggacagctttgccaattctcaaggctagtgcaagtctttgaggcatttcgtcgaacactttgcgactcttgaataatttgcattgccccaaacagatttctaggagacgttgatgtatctgatcatggctgggcaaaacatgtccatagattcgacgacccaaatccggggaataactcaaacgacgtacaaaggagaaagaatcaaacatggccgaggacggcgtcaagagaactcggaaatacatgattgagactgcagtccgacaaaaaaggaaccttgccggagctagaacagaggtctcaattcctctataaaccatgagaaacaaaaagcatccaaacgaacagggtcgtcgtgagtaaagaaattcgaaaagctgtttcaaaaaaattatactttttagcggaagaaaatgagaagaatcaacctgtttcgggttgacccgtaacccgccggttgttg

SEQ ID NO: 38613 - DNA, 1524 bp, Arabidopsis thaliana columbia
acacagacttgattgttcctcttaaaaagtcagcaaagcaaattgcccgtgaggttagtatgcatttaaggttcttaccatctgtagttgcttcatgatgtcatggtttaaactgctaatttcggtgttatgatccagaccacagttgtgaccactcggagagtccttgaaaggctggctctgagttatgtctcacagcgtatggcatggaaacttctaaagggtaacatcatcttccattacttttgcttccacaacaaacttgcgttgtaaaaaaagttagtagacatatttagctcgatgaactaatagagcggagaacataaatatattatgcagatgtgcctcagtcggctttacgcaaggctcagagagggttgccgacacatgtatatatctttaaagtcagccaaacaactcttagaggtataataaaacattttggtttctctactcttcgtgaccctcccatcaaatgctccttctttttccagatcagacattgtttagttctcctgaagcctatatgcatgtactgtctttggctgtgtttatgcaggtcacttcctgggaatcgcagcatcatgggtagttcaagtaggcattgaaatctacagatgtgtgttcccgaatgttaaacccgaggaagaagaagaagaggagaaagtcgagatatcacagcaagctaaggatctcggaaacaaagttgtgggtatcacagtacgatgtggcgcgtccttagtatttgctgccattggagccgggatatgttcttgccttatccgtccctccacgggccaatggatcggtaagctcacctcacccattattggaactttacagatagaactcgatagaattttaactttttggaccattgattgatgtgtattgtttgttctctatgtaggttgcgcgctgggagacttggctggtccgatggttgtttcggtttgcctgcagaagactcttcaagctgattattaagttcttgtgtggaaattgaattcttctacttgaatcttgatgatccaaatgaaatcatagagcttgttttttgtttctgaaatttcttattgtcttcactgaaccttaaaaacaatgatcaatagatttctcaaaatgtacctacttttgacaacagcacaataagtcaggtatttattttcctcggattttagttttgtatctgcgatttttcttctctttttacttttgtaagtagggattttgtgaactatcctcttatgcaaacgtgaaaaagaatgcttggaagaaaaattagtatttgaagtatggttcagctaaaccaaaagcctagcttgggattcgagatgattgggaatggagaactagtttgtttggtttagggttcgggtcaactaaagattcccataccggatttaatttgaacttcttttggactgcaattaggcttattttgggttcggggtcagttttggatttggccatttgggttagtttataggcctcaagtctccaagtccaactagacaaaactcg

SEQ ID NO: 38614 - DNA, 330 bp, Arabidopsis thaliana columbia
gtgattgtacatggctatacttagtagtgttttacttttataattttacaaataataattgatgaaccttttcttctatcttttttgttggtttcggtaatccagcttttaattcttgtctgaaattcacaataacatttgatggatctttatgtctgttgtcatcgagtatgcataaaagttgacctttgacgtgggggttttaaaaatagatccaaaaatagaaactgaagacatggcgcgtagcaatagatgtgtaccccaaaatagttccattgtccaaattccgatagaagaagtattcaagacgcaactcacgtctcggtggca

SEQ ID NO: 38615 - DNA, 247 bp, Arabidopsis thaliana columbia
ctccatacgagaaaatgctattagtaatttggtataaaaataattcagtcgcttggatttgatatgttggaagactttgttttgtggtagtcatttgttaccgtgtgactttgttttcgaggactatttaggcgatgacttcgaaagtcaatgattattagtcgttaccccacatgaattatacatgggaagcacaattactggcgaattttattgttttatcaatattctgtaaaggttatgtata

SEQ ID NO: 38616 - DNA, 481 bp, Arabidopsis thaliana columbia
tcaagaggaactccaaaaagacccctacttcaaggaaccagccaacaaacgagcacaagacttgattccagaagtacctcaagaagtactacaggaaatgactcaggcgacatctattgggcctaaaacgcattttggtaaggtttatttagtttatactatctttgcaggtccacacagcccagacaatggctagaatcatcaccaaccgtgctcctcaagagaacttaattagtttccttattttagcttattttctttctaaaaacaatggtttttgtgttttgattttatttgcttccttgttgcgtttttacatttaatttcggccctacggctagctgaaggactcttataaagtccgcctgcagcagttgtacgatttttcacctttgactatcaataaagaaccgcattttctcacttcttctctttaagtgttcttaagagaataagattgttctttgtcttatgtgtgcga

SEQ ID NO: 38617 - DNA, 355 bp, Arabidopsis thaliana columbia
gagataacaaagtcataaaaatggtacctttttggagatttcaagtgtataagcttaagaaatgagaattcagaagaagggttgtgatatctttttttgacaattcgattgattgatgtaagatttttagctgaaagaatcagatttgggatttgttattggaaagctataaaagagagagctttgagagaatgtaaaacgacagctaaacctctctcgctaatctacgccagagatatttatcgacatattacagaaattagaacggtacaataaccaagtatactataattggttttttaagttcgtattttcggttttaaaaagtttggtgtaggacgacaattgaagaagc

SEQ ID NO: 38618 - DNA, 476 bp, Arabidopsis thaliana columbia
ggactttcattcgtactataactaacaaatcaggcttaactactactcctttttaatttcatttgttttttttttgtttttttctttaaactactagatattaacccgcggtataccgtaggcctatattttcattaaataaaaaataattgaatatttttaggatgatttaataaatttatgctattgtttgatttaaatgtataattcaccggaagacgaaattttataactcaaattttaaagttttaagttgtatttgtttattttgtcaaatgtttaatattgtataattgtattttgattgttgtttctcggatttcacccgtagtacaccatcccatattaatatcgaatcaaacccgtcaattctaggatttcacccgtggtaatatttaattgtataataataacttgattgtcattctaggatttcactcctacttctatcgcaaattattatcaacccaaaccag

SEQ ID NO: 38619 - DNA, 553 bp, Arabidopsis thaliana
atcctggtgaggacatttcatttccacttggattcatgttgattgggtcttatatttcctctcagagttgtcagaagaagaatctgaatatgaattggagtatgaagtgctatcagcaggctcaggtgatccatgggataatattgaagaaagatgggtttctgcaagtgaaacgcattcacatgccgatgctggcggatccacttcacaggaaaacctccatgtagaaaatagtatggtgaaaccgaataaagttgatgaagagctgctgccgtcagggtcaaggttagagctgcaaaatgacactgacagagcaatagtaacagatgaaaaacctttgggcacagaaaatgaaaaatgttacgagtttgaagatgtggaacagttgatgtcagaaataggaaacatccgggacaacttgcgattgatgcctgatttccagaggagggaaatagctgcaaatttagcgatgaaaatggcttccatgtttggaggtgacactgatgacgaggaagaacctgagtgagtctgtttatatcagatattgtaaaag

SEQ ID NO: 38620 - DNA, 574 bp, Arabidopsis thaliana columbia
atttcgtgaaaattggacagactattgtcaaaataaaatgcaacacttttaattgtctctaaggttgatgtcgaattctatgccttttagaaaagaatgtctagattcgcccaattgttttaaaatggtgttaatttaaatttagtaatttggctttatggtttaacaactcgtatgaaccatttgcatgttttaacaagattgtattatattctcaaaaaatgttttacgatggatcgtgtatgcaaatataaaaagcgattggacaagtttaaatagacaatttatactagatacattatttgttgatttttctttcaatttgtagagatattttatcttcaagacaataggttgatgccatgagaatatgaccatatggtcattagcgcgtggacattaaatatgtgtttgtataagaatttctggaattatagaaaaaagtgatacacatgtcctcaagggcataatctcacgatgataagttgtttgcttgatcacattttgtggcttaattagagaagatgtagatggtgaaaaccgagatgaaggcatcaaagtagctagagaatat

SEQ ID NO: 38621 - DNA, 450 bp, Arabidopsis thaliana columbia
tataaggtttacggaacctaatccttgccggtttaggattttactcaacgtttggaatatattacatgtttatttcctttttcaattttgattcacctcttatcttgcaaaaaaacaaaacaaaaaagtgacgtttaaagatctctaatccttttctaattaactttgtgtatgatttttagttcttctaatttctatatatttttgttcataatatgaaaatttgatctctgttttaattattttggaactaaatacacatttttaattagattagtaaaagagttataattacaaaaagttgatctggttggtgtcagcagaacaaggataaaagagaggctttttcgttttgatcccctactcttcttcattagtgaaagctacttataaagtcctaatcttgaagtgcgtgcacggtgctcacgaatccacgatccagtgagcagc

SEQ ID NO: 38622 - DNA, 705 bp, Arabidopsis thaliana columbia
caactatcaccattttcgaccaaaaaaacaaaaatggtattgggtcttcggacaaagagccgtagagacaatggagtattcgttgagtatctaatctcaatcaaagagctaaaaccatggccaacaagccaagtccctgcacaatgcgtccttctcaaatgggaaaacggcgaaaacaattcaggctccttcatcgcggtcgtgggcaaagacactatcatgttcaacgagtcttttaggctaacattaacgttagaacccaaagttgggtccgacaataagttccacaagaatcttcttgaacttcatgtctacgacgcgaaaaagaaagacaagggcgtcaagaacaagcttcttggtacagcatcggtcaatcttgcggattttggcttgttgaccaactcggtccccgttggagctccgttcactttcaagaaaagctcaaggaacgacgctagctctgagatttacctaactgttgaaccggccggagaggaggattacgatgaaggaaataggagtagcggttcgtcgcagccgaagatgagcttctcgagaagatcggtagatggcagtgagtttagtttggcgtcattgacggatgacgatgatgatgcttcgtcagtgtcttcttcgacacggagagtttctttctcgagctatgtgtgatgctaattccactggtacgcattttcatattagtga

SEQ ID NO: 38623 - DNA, 559 bp, Arabidopsis thaliana columbia
cctgagatatagaaactgagaaacttggaaagagaagcaacagcaactggaagcgcttggcaagaaatagcttcatgcgctgaaagggaaagataatctggagaaaaatcaaggcaggacgtcattgcatcgatctgaccaatggcacaactgtgttccttcttttgcaggtagatcttgaactgcaagaatcagaagcaaagagaagttgctgaaacaatttttctcaaacaatctccagatacatatatatggcgaggtagccgaacgggatatgttgaataagcatgtactgtgggggaaaagacagtctaccttaagaaaggagcaagcaatattgggctcaagctgcagagacagaaaactagttagcaattctgagttgaaagatccaactaggaccgttgaaaatagaagttccatggataaatgtataccttttcagcttcttctatgtattcaagagctcgatccagctgagagagccaaggtagcaagacacaaaccctgaacctttgccctgaaactctatttctatacatgtggatatagacattga

SEQ ID NO: 38624 - DNA, 168 bp, Arabidopsis thaliana columbia
cccttttatgttgctaagggctttgtcctgatttttagcattggcagatgttgttttgtaaatgtggtgtgggaagtgcaatctctgtttagggctaagcttcctcatcttggtatccgctgccaaattctctttccaaaagtcccacttgtttgagtggtttggatg

SEQ ID NO: 38625 - DNA, 551 bp, Arabidopsis thaliana columbia
gacctatacccggtatgtttccaagggaatggctttttctgattggtgaatgggatcttgtataatcctaacaaatacgtttaatacctttcacacatttactctagtttcgggatggcgacagtccatattacaatatagatttgacggggatacgtgttgctgggaagcagttgtctcttcattcgagagtctttgacggggaacatggcgccgtactagacagtggtacaacatatgcttatcttccagacgcagcatttgcggcatttgaggaagctgtaagaactgttctgagaattgttaatgtttagttaagttccctgtttctctgttgcttatcttacatgaggctcttatcttgttgtattgaaggtaatgagagaagttccacattgaagcagattgatggtcctgatccaaattttaaagatacttgcttccaagtcgctgcaaggtatttattatctcttgcaaacttgtggtgtatatcatacttataatcaaggcaagtaactgactcttataattgtttatgctgaagtaattat

SEQ ID NO: 38626 - DNA, 246 bp, Arabidopsis thaliana columbia
agaaaaactcgttggttttcacatccgcttcaagttcaaaggttagcaaatgctccgccaaaattggaggcacaacaaagccgtgtgcagatctccatggaacaataacacccaatttgcgtttgtccattatacgataatatacctgaaatgacgtaccattggcctcctttttcttatcatctttattaaccagcaagacacaagccttaaacaccaaggttgtagaaagaggactttgatcca

SEQ ID NO: 38627 - DNA, 576 bp, Arabidopsis thaliana columbia
ggtaatgtactgctatagtatatttgcgcatgtcaaaaatttcgatacaacagtcgcattattatatatttgtcacacaacattttattactcaagcttactttggcagccaaatgccagaagaatatatcatcgaagaattagacgataaaatctttgggaagaacatctcataagcttcatgtttttgcttctggctgtacacagagattcttaatggcccacgagaaatgggcaaagcttctgatgactttatatatctataacttggcagctaacaagttcagcagcaccaaagtccttggttgcaatgagtttccatgtaacagtgtctgacttgttaggtgcattggtctttaagtgtgggattgaaacagaactggagctagatgatgatgaggagactgggatgttggggacatcagctcgtaagactgtaacgttatgattagggtctctagtaatgaaatgaagcttgccatgaaacccagcaagcaaataaggagattctgaatctgttaagtcatacacagggacttcccaataacaacttccaagtatcttccttttgatcat

SEQ ID NO: 38628 - DNA, 284 bp, Arabidopsis thaliana columbia
gtatcaaatgagagacattggtattcgtttatgtagcattcaatgataagtcaaggctcagtgtcatgtggattcctaaactgcctcatatatagataaggtggattccaaaatttgtactacaaaattatgaatgcttatctgaaacatatctgtattgaactcttgataaatccagtaacgaaaattacatcagttagttttagtttggcttcagtgcttctgatatctaaaacaagataccatttgaaccatatctaaattgtggggtttgactcagtttg

SEQ ID NO: 38629 - DNA, 598 bp, Arabidopsis thaliana columbia
  unsure (1)..(598): unsure at all n locations
taaattagatggcattttcgttttcataaattaaatagttgtatttatttaatttagtggtagttttatttcatatggggtaacaaataagagtaaaataatgatgactaaattcaaagttttgtttgataaaattgtcaaagcacactttaaagtggacgattttaatgagaaacatcaccacaagtcaatcttacaattttaaaccccctaggggnttacaaagatagagtctaaaaaaatatcttgcacctaaaacacgaatcactgagtaatagaaacaaacccccaaaaaaaggtcaaagcaaaaaggagccaaccatatgagataactagagaaggtccctaatgtttaaatctacattaaacccaattaattaaccaaacaagacactaatttatccccaaaaagatctctgttttcttagcttttccaatcctcaaaatcgaattgagaagcttcggaatacggtagtagagatacggtcggggaaattaatctctccttgaactctttcctgttttcaaaacctatgattcaaaaaatccacccattgacacaggaagcttctcttgttgccccttcttaattttatga

SEQ ID NO: 38630 - DNA, 509 bp, Arabidopsis thaliana columbia
gaatatgcttagaaatgtgactttgaacttttatttgtgatcactgcgaaattattctactaccattttacaagctttgcatcagattcacataccaaattttacaacatgtagaattgaattataaataagcgatccttactacagcaagtttaacgagtatcatacggatctaggcggagatggaggagtttcttttcggcttggtcccgatggcgggattggaacgttttttggtaacattctgaaaatcaggcgttgtgatggtgaccatggttttaagccgaagatggttggtttatgtggatcttgtggtggtgaatcagccagtcctctagcccatggtctagaccagagcaaacggctggtctcatcttgagtggttccaatgacacaagcgaagaggaggccaaaagaaattaccacaagaacataagttgatttcgccatcacaatattactttgttgtacacactgacacaagttgatatggtttggaaggtttatat

SEQ ID NO: 38631 - DNA, 569 bp, Arabidopsis thaliana columbia
gaaagtatcacattacagcaacgttagttgattcaataatgccatatctctctttcagattgcgagatagactccgaaatgtgtttttgcctgcatcatcatgaagtaggtctatttagacttattgttacgaaggcgaaagacgaattacttaagggcgtatgttcagactttgctgcaatttctccacttgtagctgaagcttctcccgcaacttagcaagcttctcattctgaagctccttccaacaacgttgactaattgctttctcctggtcaatagtgaagatcacaagcaagaataagacatcatttaacacaagaaaagcaaatgaatctcagatcagacttaaaactcaacaatgaacgtttgtgacaagtaagccacttaatctgaaatacgaaacctcccgaagactcttcaacgagtccaacttgaccttgtattcgtttaacctgcacacaaagtgccatcaaatccgaactcgtaagaatttgaaagattccaagatcatatcagattgtatgagaactgattataccgcgattacacaatctcacagattgagg

SEQ ID NO: 38632 - DNA, 523 bp, Arabidopsis thaliana columbia
aaaatgttttcggggaaattttttttgtcaaactttttccaccaaaaaaaaaaaattcatgatttacaaaattaggaaagattctaagcaattaaggaaggttttcacaatattcataatttttatttttgtgtagccttttctgaattttctaaaatctttcctgaattttgtagaatctttcctaaattttgtgaaatccttcccgaatttcgtagttaccttcctaaattttttggtgagaaaatttgacaattttttttttgcgggggaaatattttcttttatttatttattttaattaaattagttattttatatttaataccacactaaagttaatagtgctctttgtggaagttttcaaaagatattcatcctctgaaagaaaaacttgttcattgctatttttgtcaattcccctaaaatatttgatggcttttttatcttaacgactaattttaaaaaatagatttcttaactttttaaattatgtgtaaaataagtttatataacagatgtt

SEQ ID NO: 38633 - DNA, 538 bp, Arabidopsis thaliana columbia
tttcggatttgtttgtaactacacagatataaatgaatttccggagtttttatacattaaatgatgaaattgttgattcttggtctttgtgaatcctttatttttgtaatcaccgtctctctctataattatatacatggccacactaatgatgcatagtttcttgcctttgtatatttacttgctcttaatcatggacaacatctcatctcacttcaggcagtgatcataagtgatggttcagtgtctgtcttactcttatcagcttgctgaaagaattatttgcgactagggaatctacataactcgctgaacctctgatgatatttcaaatgcaggatacttggtgaaattggcctgaaatatgtggaattaatacctgaaatagtgccccttttaattaagtctcttgaagatgagacaccagctgtggccaggcaggtcattgcttgtggagctgatttattccgttccacctcgaaagagtggcagttcaggttgttttcttgtttttgtttttaggttctgtatttgtgac

SEQ ID NO: 38634 - DNA, 619 bp, Arabidopsis thaliana columbia
taatgcacagtttgtagcataagcctatctttgttttgcttattcagtgctaataaagtaatgatttttggattgggaaaatcataaatgactttagactttttacattccggtcatcatcagatcaattggtagtgaatgagagtttcgtattggtattaacatgaaaatatgtgcttgttgatctcctgcagtggaggtttagaattgctctgtgactccgtaaagattcataaagttaacatcaacttactcaatgattctgatatcgtaagcttctctcttttgatgatttttaaataccattgagtttattatagtcatgtaaaacttctcactggtgtttcattcagtacagttgacaatgaaggatttgctttcatgggttcgtaccaatttgatcaaggaaaggcctgaaatgttcatgaaaggcgataccgtgtaaagcttctctcttttctttccttgattccagcaagaactctgtgtttagtgtttaatacaatggtggtttggaattcataacgcaggaggcctggagttctcgtgctggttaatgactgcgattgggacttagtggtcactcgatcaacattagaagataagatgttatagtttc

SEQ ID NO: 38635 - DNA, 476 bp, Arabidopsis thaliana columbia
tatccatgcttcactttgttgttgatccaatctttcaggccgcagaagttgacagaggaaagaaaaagctccatgaagtatggcagactgaatatctttgctgtgttagagtaatgtgtcttcatgttcttgtttattcagtttctgttgtgtaatatcagtctatcgaggatgacgaagatgttatggctgagtctgatcgccctttaaagaggctgcgacgcagaggttaaggaggctctgctttggcaagccctagcttgggcagtccgactttagagggaccttcaattaatgacgaagaaaatgctccgatcctattgccatatcatcctgtaccaattgaaaatgaccatgatgctggtgagctcattcttacaaaagtcgagcccattacaaatatgcctctcagttctattcctggtacgtttttgtaaataggagtactaaatcttatttgcattgctcattttgtt

SEQ ID NO: 38636 - DNA, 748 bp, Arabidopsis thaliana columbia
aatgtaaaaactattaaattttttggttgtgactaaataaaatcactgtaccgtcaccaataccctaaaatatctcttaatatataattgtgtcacacaaacctcctcctcctcttacgttttaccctaagactgtcttacgtaaaggtcgatccattactctcacaccggtttctttcttcctgattccgctgttgttcatctcgacgtggaatctatagtctctctcctttgtctcttccacatcaactgatttcaaggtttaaattctattgttaatcttttgagttttataactatgtttaaacaaaacttcatgatcactttgtggcctgttcaaaaaattgtaatttgttaaattcttagtttgatttcgtttgtgtaaaaaaattagtatcatactgctaaaaatccaaattaattgattttacaggtttctattttatctcaataagctgagaatatatatcatcaattacgaattttgtgagttattttattttataaattttgttttgccaactagaggtgcgtccaccactcgtgataggcggacgttcgtatggaagagtatcaaattctctgcctactgtttttgaaatacctccttctcctaatcttgggaatccccatgaaccaaaagatgaatcaagtgatcagatggaagaaattccacctatacaaaatcatgttcgaattctccacccatcttgaaggaatggagctaaatggtaatgatactcttagt

SEQ ID NO: 38637 - DNA, 582 bp, Arabidopsis thaliana columbia
ggctgcaaaaatgtatatataaatatctaatctttacttagatggcatgggtttgaaaagttctgagtaactgataggcccaatgactaaaagcccatatgtgtttctcatcataatggaaggcctacaagtagaagaattcgctcgtgtttatgaattatgatcttgattgtaatcttattatcaaaaaccaaccgtaaaagtatatgaattgcgtatttgtaaattgtaattattatatagtattgagattgtgattaaaagtaataatgaatttgttgaattattattatagactatagtatagtagcaagagtgaaattttgttttcaagaattgagtcctaattttataaaaggagccaaaaaacccaattctatctaatccaatgaaaactccaagatcgtctctacgtccgccacgtcagcactatcctgatcgggaaaccaaaacgagtggtcgaatagtttcgactggtaacagagaaagcatctcacaatcccaaaattctttcacacttgctctcattaatcttttagataataacctaattgtttctgttttgtttttgtttctgtgaga

SEQ ID NO: 38638 - DNA, 505 bp, Arabidopsis thaliana columbia
ctcacaagtccgttcctccaaggtctgcatgttgttgaaccagaacatatctggttaagcaaaagattaacacgaaatccaaatatcaaaggaagagtaccaaaatacctagttgcatcaagacaaataacaagaaaccgattggtgatagatcgtccgaggctagctgcttcagattgaaacttgcgatactcatcgcttttgggtccaaactgtgatgatttgcacaccaaagaaagcattgtgtctttccccaaatattcagacaaaaccctgtcataccaaataacttaggaaattgaagatttgccccaagtgtagacactatgaatttgatcagaaagactctggctataaaatcaatgtcacctgcttagcgacgtggaggcaactgaacctagaagcgctacaacgccaaacattcctttctgtgacagaaacagagaccgtggaggtggagcctttctgtacagacaacagaacactgatgctgcagtgtcatgat

SEQ ID NO: 38639 - DNA, 556 bp, Arabidopsis thaliana columbia
ttcataaggaatggttcataagtaccttaccaaagaggtactcagctaaaacattaaaagacttggaagcaccataagagtcaaatccagtttcccctggcattatagtctcggccacaaaataaggctgtatcaaagtcatagcatcaaacttagaccatccatgtttaaagagagaggaccaataggaccaacgtagagaaattaagaacaacctcaacttgtctaatctcgtacttgtctgttctaaatagaactctaaagttcattgtctcgagatccggaactagagagaaaaatcaaaggttttaagttactacaaaagtgaataacacagagctaaagaagattaagctaaaaactaaccagacatgaaagcttcttcaagattagtagagctatcaaatctcttgggaaacacatatttcgcagtctccatcgccaaatcagccaaaactacaattaaattgacaatgaaaattcagcagatacaaaaaccaaaacaaaatctggcaagagaaaagacggaacatttacggcgttgagagacagagga

SEQ ID NO: 38640 - DNA, 582 bp, Arabidopsis thaliana columbia
gaggcaagcacagcccatgccagtgttggtcaacgtcttcaaggagtcgcagcagccggcggtgggagtgacggaaccgccgctgcttccggtgatgaagttgagacatggagtgaaggtagagatcatggaggaggtgcatggcgtgcttatctgctgaccttgccctcccaacatacagcttgacatcatcactactatcaatgttaagccttccattttaattggcctgcttaatcttccggtgacgatgctttatagatatacaattattcagttttatatatgataaaatgggtgcattggagttcaacaacttccaactaatatcctttctctcaatctcttatcaacacacaatttttctttttatttcattaattaacaaagagaaaccaaataaaaagagaaagtagctgagtttggtatactcctagtaattttgtaacttaagtaattacaatctttaattagttctgaaaaagtatactggttcatgtctacgtggcgttgtatatattgggatgcatctagaacatagatatgtttgataaattaaagcgatataaaccatgtaaagta

SEQ ID NO: 38641 - DNA, 553 bp, Arabidopsis thaliana columbia
gtcctgatgcggaagttttcatttgcacaaatgatatagaaatgggaatccagcagcatcaggatgcgaccaacctttaggtgttgtgaacttcgacatcttacctatggaaaaccgtgcaactaaatgggctgtggaaggtactgggattctacttgctacaggtttactcactgttactttggtctggctcattgcccctcgtgttggaaaggtatgccatcgatctaaccttgtatatctaagcctctctgactggtatatcgataacgtttatttggttaacggttgttttgaatttgtacagaaaactgctaggagcggacttcacatacttcttggtggtctctgtgctttaacaatagtcatcttcttcagatttgtaagtaaatctctcaagtgatagatccattctaacagataagtagtcctactttttactaatccaaacacacaaaaacttgtgaacaggttgtgccactagaatcaggtatggtcctgacgctactgggcaatcttattcatcttctggtttcttgtgtttggtatttgg

SEQ ID NO: 38642 - DNA, 515 bp, Arabidopsis thaliana columbia
gggtacgagctcgaattctctcgtcagaacttattgttgactcttggtcgtcggaccaacagctaaatagagctgtgcgtttcggctcatagttagtttttggttgggccttttctggtaaagcccaatagttttgttagtgtagcccaaccaataagaaaaatgattgcttcgtgtgagaaaacatcaaaaacattctttttaaattattatttttatcaaaataacatttagatagacatactgaaacagattgttttgccccaacaaatgaaaaaaacataaacggatgggtaataaatataaaataaacaaggaaaacatcagcaatgacgtgtatattaatctgatctaataaaacaaaaatcaaaataatatgattggatcgtacattttacatttgtcattcaaggtggataacaaatacgtctagacgggtagaacacgtagtcctccaatttaacactctcttgctatcactttttttatttttctttgaaatagatagtagatga

SEQ ID NO: 38643 - DNA, 573 bp, Arabidopsis thaliana columbia
  unsure (1)..(573): unsure at all n locations
tgtgattctttctacttttttttttttttttctatttttagcaaataaatccatttgttcgccggaatatgctcccttctcttaacgtcgatcacctgtttttctctttccctctctctctatttccctcaactaggaatcaaccatgaatctcccatcattctcacttctctcttctaattctttcatggaattctcaggtactattttccacacttttctctttcatttttgaaaatgtttagctcgattctgagtttccgaaatcgtgattgttgatatcgatcccgtttttcattcaattttaggttagaagaagattccgggcagattatctgttgattcgaagaataccgaatacgcgtttgacatttctgaagaattatgggatacttggacttggccttgtcgtattccaacagccgcagactgttgaagctccagtgagtggaggaggtctcaggtcattaatctcaatctcgaatttacattttttgttgtgacttgtgagtatgaaattacttgacacaataactaattatgttggatttgattttgatcntgtgattgtag

SEQ ID NO: 38644 - DNA, 513 bp, Arabidopsis thaliana columbia
gttaccccattcggagccacttgtgtttgaaccacttgatccgcacttgtacagttagatctacttgatccgcttttgttctacttgatacgctaaatctgctccgcctgatacgctttctccattcggagctatatgtatgtgaagactagacgaaagagagagaaagcaaaaccaaagaaagagaaaaaaaaaagtgagagaacgaagagaaagaaaatatgaatcatttccaaaacctttgacattatcaacgtgtaagtgatttgattgatcatttaaactgtgaaagttttctttttcttttggttttaagagatgaatttttgtaagaagatttgacatttcctatgattttattattattcacttgtcaatttgataaaaaaaatataaagagtgtttgaaaaaactcagaagaacattctcaatctttcattttgaaattttttaataaaatcaagaaagcttgttaattctgacattttaagacaatgaattttttttacattt

SEQ ID NO: 38645 - DNA, 531 bp, Arabidopsis thaliana columbia
ggatgtaaatgagtagtattcactgttaaagtcaaaactggaagtatgtgttgatgatgggtaagaagacgaagcagcacttgtttttcttgtcttcttctcacaatctcgctgtgtaccacatctatgtactttctttcttctccttctctaatctctagcatttattcctcttttatgggttacttctcttaatctttattacgtaatccttaaatcattatatgggccttaaatttttaggcccgttaaaatatcagggccttatcagattttagagaggaaaactgaaaaccctagctatatattctggagactctctcgtccgtaagtggagagaacggcgaacgaagcggcgattgcaccatgagagccaaggtttgttcatttcctctgtaatctgcttttgtttctctatgatatattgtttagatacttggattcgtcacagattgttattagtttacgcggctctatagtttccttgtcaattttactctttgttgaattgattgattctttacatatagg

SEQ ID NO: 38646 - DNA, 568 bp, Arabidopsis thaliana columbia
tgcttgcactcgatgagatagatcattacacctcagaatattcgaatcgtagccgttgagaattgagaatgaatcagaaccgtgcgtgtgtcgatggaaacagattaaggatattgtcgtagcgttaagatgccgtaagagctgaccatttggcgtgcgtgtgttctgtttcctccaacacgtgggactaacactccacttccctttctcaattcccatcatcgcgtcatttctacggctacgatttgtggctgcgtttcgacgcatggacggcttagattcaatgtggtcccttaagcatatttccacaaccaaatcatattggagtaatgctacgagacaccaaattaagtcgctctatatttttcccaaaatttttgaagttacgtaataaagacattagctttaaatatagcaattttatcgtcctaattgttaattaattcgtaaacaattttttctaagtgaatgccccaaaagaaaacaagaagtcgtcaaggatgatgcaaattgagagcatagtttttagctgtcatatgaagatgctgatgatggatgttgttatata

SEQ ID NO: 38647 - DNA, 502 bp, Arabidopsis thaliana columbia
tgcttagttctttcttgagttggtatttcgtaaacttccaccatcttagggacattaatactcttttgacatataagctttggtctgctaattcgatagtgtgatgtactgcagtcaattagggacattgatactctaagttagtttacttttacttttagcatgagatttgtacatccttgtatcttgatatctttattaacatgaatcttaggagctaaaagccattaaggggatacttattcccaagttgtcttcattgtcatagttccatctatatgtatgaagcttttcgttttttggatgaatgttagctgatatgaatttctcaacgcagtccccaggtaacaatagccactgctatatttttctgtcaccgattcttccttcgtcaatcacatgcgaaaaatgacagacaggtgagtttggttggatgtgaaaaaatggtcactaaggaagtatatgtcttttttcctctgttgttttgagtgaaactatgagt

SEQ ID NO: 38648 - DNA, 534 bp, Arabidopsis thaliana columbia
gtcagatttttttatgtagattttgttaattaactgtatatagagtaagcttacaaggttgcgcacatttgcatgtgttcttacttcttacatatcataaaggcaactcaacaaaaaattgtacacagagctgactggctaccttctcttcgccctgaatctcgacactggtttagacggttgagacgtagaagactgttgacatataacaagataacaaacataaaacatgtaataagaatcatgtttcctgcatttatgagtgttgtgtagttcgagtgattaaaaagtacctgcgtttggctgtgtgcgctggtctctagaatatgggcatgctctacgattgatccagtaaaagcctgcacgagttggatcagaaatttagtgagcttaaaggaaaatcagatctatctgagcaactatacaacttgctaacgcttggccgaaagagatgtgtatgtaccttggtagaacaaactcgggctctggcttctgtggctgccccaaaacaagttggcatgattatttgtgaga

SEQ ID NO: 38649 - DNA, 825 bp, Arabidopsis thaliana columbia
cttctcgttatcaaaacccgatgcgaccgtactcctcatgtttctccgatgggactctcatgaagtttctgagtttttggttgaaaacaacgaaaaagtcttgtcggaatcaggtttgaaaccagtggtagttgatccgaatcaagacttatataagatttcttcttgtgggatttgctttaagacttgtgatgatggtgattacttaatctccacgcccttttgctctcacatgttctgcaaatcttgttggagaaagtatcttgaaaagaatttctacttggtggagaaaacccaaactcgaatctcttgtcctcatggagcttgtcaagccgcggttggaccggacacgattcagaagctaaccgtatgtgatcaagagatgtacgtggagtatattctgagatcttacattgagggaaacaaggtattggagatcaaatactgtcctgcacaggattgcaattacgtcattgagtttcatcagaagaatcatgatggtgctgatcaggaagactatggcttcaacgtggtgtgtctctgtggtcatatcttctgctggagatgcatgcttgagtcacacaaaccagtgacctgcaacaacgcgtctgattggttgtttcgagacctaaatagcttatcgaaggaatcaggtgaaaagccattgagcctctcctcgttcgaaaccagagaaaagacttaccctctctcctcgatcaaagccaccaagaaagtttgccctcattgtcttcgtcctgcggatcttggtactaaacaatacctccggttcttgacttgtgcctgcaagtaagaaccctattttgc

SEQ ID NO: 38650 - DNA, 787 bp, Arabidopsis thaliana columbia
ttaaaagtttctgaaatgtttttctttcatctttaattactttaaataatttgaaggttttccgtcaaattgaaggttatttaatataggcatataacattggttctcaattatgtcaaaagcatactcatgtacaatgatggtctacaataatagtcatctccaattctccatgatatagaaaccatagaaaaaaaaattacaagaaaacgaaactagataatcatggcttagaggttactgttatgtgctcgctaaggttaatgattgattatcacttaatatatttttgatttttctaattattttaagatgcaaatggtagttgcaagttttggagattagtatagactcgaagttctcttggttaaaagaaattttacaatatgataataacatggacatataatataggtaccattgttataggatgttcattcggttaaatccaatcaaaataaaatcgtaaggaaaattagatttaaccaaaaaaagatttggtttatagattttttacctccaaaacaaacatcaaaccgaattgaaaatgaaagatcgattagtcaaaatataaaaaagttaaatccaaccaaaacttatacacatattaaactaaatccaaagaaagtttgatttcaaatcaatcattctatctcgtaagtaaaaaaaaaaaaaaaaaaaaacactcaaaaaccgaaaccaagtgtaattcaaatatatttttgataaactgaaacaaaaaaaacctcaaaaaccagaagatatgttttaaccgaaactggattag

SEQ ID NO: 38651 - DNA, 533 bp, Arabidopsis thaliana columbia
attctaacacaaacatgataatgtaagacattaaactcccatctataagatcccgcggctctgttcttgatgtttctgatctctactgatattttactattgttaattcctctaacaaattcgcctaaacagttcaaatagcacaagatagcttaagcttattatctgatcaacatcttcaaatggatcttgtcattacgctgacacagacatggctaaacacctagcataagcgagatcgtttttgagaactctcgactttttcttcactctggcgagtcttagaacgctgctcggtatctttaccactccaaaacttaccaaggagagtcaagtatcctgaatcatcgatgactcttctaatgatagctttgcgttcaacatgctcaccaatctcaacaagacgtggggacttgggcaagcccgtaaaagttatatagacatgtgcccttctggcattgagtctcttatccaggggcttctcattttcttcctcagtttcaatcaccactttcagaatctgaacctgaggc

SEQ ID NO: 38652 - DNA, 744 bp, Arabidopsis thaliana columbia
cattcatggataacttttgatttgaatgattaatttactcattgtgaggaaaaaaataaaaacagataaagttactcattgcttgtcatattgacatgacatacaaaattcaagctccataagtaaagctataaagaaaaagaaaagggggactctccacttttaggtttcatataaactcgttaactagagattgggttttgattaagcacgatataatatatatggccgaaaaagccttttggttagtttacttggctcacgttttcgtcttcatattttcctgtggacttgtcttctccttctagataacttgcatattcttctcttgacatattcgattttgttttctcctctaaacattggtgagtttaggttttctttgtgttgaagttacttatttccagacacagccacagaggtatcgatatttacttggttcataagttgatcgatatttacttggttcataagttgttgcattggtaatagatgtgtgacctttatttgagaacaaaccgtccaatggtcgtgcatatggtgggccttgtaccagagagatctgcgccgctctattaatgatcactgacataccactagtagatcttttcgcatgcaaatatattttatattattttgtttgttaaaagatttttcctagtattatcatatgagtaattaatgtttgtcctttagctttcactataaaaacgcatattattatcgatagtaaacatccaaatg

SEQ ID NO: 38653 - DNA, 558 bp, Arabidopsis thaliana columbia
ttcgttgtcgacaatttttcgtacagaatcaaaatctagtgccagctatataacgcatttatttaatactgaaaacgatgtcgtctagccattttggccctaacgaaaataatacggaccaagtgtaacgtctatcttcttctatgagataaacgacgaaagggtgtccaattatttttcactcatttcttgttcgtttctttggtaccaaatgtctatttacacgttataacgacataccatatttgtgctccacgtctcttcatcacatgtctctgtatgtaaatggtccatattttgcatttccacaacgacccatgtgtatgtgtacatacattttccatgatatttgtccttgcaaatatatatgattcgttacaaaacaaatctttctgttatgcacatggtcattaattgattctttttcccattctagtaatcttggtacctatgattcattcaaatttaaatgtctatgtcattgattgttaatgacgtaagttgatttattttgtatgaaattattgaattgtaggtattagcccattgccaattgga

SEQ ID NO: 38654 - DNA, 173 bp, Arabidopsis thaliana columbia
cgtcaatcgtaaatctgatccatgaacatatataatttaatgtagagcaatatatgatatttaaaatttaaagaataatcgaattttgtctctgcagcgtcagaattgatggatcactgcaaatgccaccgactctcttagcggtgcttttattgcacaaattattgtactaa

SEQ ID NO: 38655 - DNA, 563 bp, Arabidopsis thaliana columbia
ccactgattctcagctttttcagcagaaaactgatccggttccagtctcgggatgagatacttctcctcaatatgtttctttattgattcttttgtttccttggcaaatgcaggaggctgagaaacacgcatatacgcaaccataaataagcatttgcaaaaccataaaactttattaataaccaaaacacatcagtgcacaaatctgaacatgtaagagcatccaccactggatacatttatatgtaaaagtaatctggagtgtctcatgtcactgataactaccattgaacaagattttctactgatataaacctctcaccacatgaaatttcagaaaacgagcaacctttgattcctttcttcaccacataatacctgataacaactctaaaagtaactcctccctaatcaagtaaccagatagtccaatattaaccccatacgttcctaattccattacgattgttgagggaaatccaagtatactaaaatcacactaagacctagtaactacaatacagaaacgcacagctattaacatttcaaacgcaacaaattgc

SEQ ID NO: 38656 - DNA, 568 bp, Arabidopsis thaliana columbia
cccaatcttgaaggagtgatctccaccatcaatcacatgaacctcagtcacagctttcattttattacaaacagcttcaagcttattcagaggacacatcggatctttgcttcccttttgatacaaaaacattcataatccaaagacccaattataattcattcatgtgcaacaacataagagttatgttacttttgcataaaatacctgcacaaacatcacagggactcccatttccagtagagtctcgtctcttatcgcacctttcgcgccctgaaatcaacgtatacccttaaattgctcattcatacattcacgagaacaggaatcaacttttcacggacataaatctcaaaccttaagtggatatcctaaacatatcacagctgaaactgtaacatcttcattcacagctgaaaccatacagcttactctgcaaggtgataacaacatcacattaaacattgaaacatacccaaacaaaacaacgtgtgtgagctggacacaagaagaaatgtacctagaacccattgatttgccactaatatcaaaggatgaccagggaatt

SEQ ID NO: 38657 - DNA, 563 bp, Arabidopsis thaliana columbia
ttctcttgagatgaattcaatggatccaattaaacaagctttcatagagaaaatttaaactctagaagataatatatatgaaacccaagagttctaatcttagattctcgtcaaatcaaatttggatccaattaaacaagttttcatagtagaaatctaaaccctagaagataatatatatagaacccaattgttctaatttgagattcttattaaatcaaatttttgatggtaaagagaagaagaagatgagcttcgccaccattgaagagaaaacacacgctcgtggatcatgatattgttttgttttcagatttgcttttttttcgatgggatttgctttatattggaaagggtaaaatcgtaaaagtgaagagatagaagtacttaaatttgtaaggcatatgagatatgccttttttgacaaagacatagacttaattgtgtcaatccataattgaccctttttatggtggggtaagggtgagtaaagccaattaccttctgaaattatagatttacaaaatgatatactactttgtaagttgttgtaaaatcggtga

SEQ ID NO: 38658 - DNA, 533 bp, Arabidopsis thaliana columbia
ttaataaatacccaaatcaagatcatgctcattaaatcactaggaaagagttttacgtatctatatattttatctttttatttattttgcatttaatttgtagacatgatatcttaacaaacttggatttgatgcataattaagtttacatatcatgattcctttctataataatgtcacctatcacgtggtctctttctcactaaacaagttttcaagtttttctactaacttccaattatgtttaacaacaattcctaacatcaaatcattcttgtataagtcttacctactctgtccctatttcaccttgttgaaacttgacttttcttaaaaaaaagtttacaagtttctagttttccaacaaatcgtaaaatagaggtaatattactgtcgttgctatgtcaccgtatatataccatctagattcaaactagtataatccatgttgttgacaaaaaaatatatagttatctttggtaaaaacttagattaagtgttggatcaaaagttttgaatatgagaaaatatta

SEQ ID NO: 38659 - DNA, 616 bp, Arabidopsis thaliana columbia
tgaacgtaagtttccttccatttctgtgttgatttaagcaaagagattgataaaaacctgattcgtcccgtttcattgtagaaactttgtactggcttagtcgggatataatcgcataggttttagaattaggaatcggaattttaacttgatgtttaggaaacggaacctagttttagatttgttgcgccgatgttacatagaaaccctaatcccacggggcttatggagtcgcacaatctccacgtttcccaaatcggctctgcttgcaacagataatgcagaaatggctagtaaggaaactggaatgttttcactagctggggaattagcttctcttgtagaagaatcttcttctcatgttgatgatgatagcaaacctagaagtcgtatggaactaaaacgatctcttgaactccggttgaagaaaagagtcaaagagcagtgcatcaatgggaagtttagtgatctgttgaagaaggtgattgcaaggcctgaaactctccgggatgcttatgattgtattaggcttactccaatgtttctataacagaaagaaatggtagtgtcgcgtttgattctattgcagaagagctctctagtggggtgtttgatg

SEQ ID NO: 38660 - DNA, 484 bp, Arabidopsis thaliana columbia
atttacaggtaagagaccggtctgaccctcccacaggtttctgcccatggaggggcaactggacagcagctatcaccacggcatatgtagccaccgctaactcattaatgctgcttccaggaacttatcttctagaagtgcttgaatatgtacagaggggcactagcctaataatatttattgcagcattgtttgtaatataaaagtagtaaaaacaactcaaatttccaccaatagggatctcactgcaggtcattaacatttgttatgggaaacatacacaatggaataccactagctgtaaaaaaaaaaaaatttttttttaaagggagatctttaacgcaaaactctccaggatatatacatatcttttcagggtgcatgtgataatttaatacattcatattctccaggatatatatatatctccctctctttttttagttttttgagacggagcttgcactgtcgcccaggctggagt

SEQ ID NO: 38661 - DNA, 520 bp, Arabidopsis thaliana columbia
acatttttctaagtattctagtttgttttttttatttattaaagcagtaagtgcttaacctgcactatgcatgagcaaaagtctaaaaatgatataaaaatattttgtaatagatttgagatgttttgtttctcactttgaatgaaaaaaaacaaacttttactaaaaaaattgttgtcggtttatgtataagaaattaaagttgaaaattgaaccaagataaacctacgttatggattataggaaccaaccattgtcttcacttcatctttctcaacatactgtatgtttttgatttgagtccgacccgaattagtcaagtttcagttttaatgggcttcatcaacaagtttacatatggacttaggcccattttcaaaccaaaaagtacaatacaacaaaagcttctccttgttaactgaaacaaaaacaatgaatccttttttttttggtcaaacactgaatccaacaagtgaaaacaaacaaaaaaggaggaaaaaaaaatcagttttttttttgt

SEQ ID NO: 38662 - DNA, 589 bp, Arabidopsis thaliana columbia
ctaagaaactttaactgcaacaaatctagaatccagaattccccacagttatctagtcagccttgagattagatacgaaccctaaaactaaagtcgaaaattccaatgccattacgaagaaactaaatcaatatatccaccacaaggtccaaaacctgattacatcagctcataatccaataatcaaatgaatccgaacacaagaaaaaaaaaactcaaatttgataatcacctgattatttctcgtagcctccaccacgcgtatccaaatcctcctcgactgtggtggtcaagtaaaccttagggaagtccgagacgtcaaaactcttcttctcgttcatcatctgaaccacgttgtccttcgtcaatacgtatcgccggatcggtgggcggtttctgcgctgatctctgccgtggtatacgatgttgtatacggtctctggatccgaggaaggcacgattgcttcttcatcaatcgtagcggggcatcggagacgatactccgtcgcctttggaacagcttcgaggtattctgggtgagcgcaaggtccggtgatctgccatggcttcttgatgtacagctaaggtt

SEQ ID NO: 38663 - DNA, 957 bp, Arabidopsis thaliana columbia
cttcatttagttaaatgaagaagaacagaagaacagtgaacgaaacatttttggaaatttgttataaaattaaaaaaaaaaatacctgaacatccatatttaaaattacaagatgtaatataatggagtatcaaaatttaaattgacaatttcaaagtttcatactcaaatgtaagacatattcataaactacatgtcgtataatggatgctatttaaacagcttctattctatcacaatccattcaaacataaatctgttgaaaagtaataacaacacacaaaagctgaaactatagttttattcgacgtggcaaatcctattaatttcatacaagagctgatctacttgtgaattggtcttggctgttacaagtgcccagaaaagatataaacgttgcaagaaaaagcacaacattgaaaactatagagatatacttctacgttctcacaagagataaacgttcaaaggattttaactggaaataagattcaaagtttctttataaactatagagaattttaagattataagacaaaatttatacggtctcacaagatatacttttcgttcattcgaacagtatcatggttgaacaaacttggctaataggtctaggtcatgaatcttaacgtcaagattgttgagctttccgagcccaatccaactctttctatatagttgtttttagccttcttgccaaaaggttttctactaatcggagttagatttgacttatatatcaaaagcaattattttctaatcttcccatgttagacgttgctctgtctcccaagaatcctccacttaacccaaggaccatgaatctttagcctcccctctagcgaaaccttggcacccgggaaccagcactccttattcgcgaggtctccttgagacacccttccgatcgtgtcacattgagggctcctcccacaacaaacatgcagcccaagc

SEQ ID NO: 38664 - DNA, 538 bp, Arabidopsis thaliana columbia
cacccgaataaaattgacaataatacccttactgcttatgtgtagttattacgcattcgctacacgtgtaggggcattaaacacggagaagggtagttctggaaacttcttgaacgttgagatcgtcgtcgtcgtaatgagttgaaactttgccgcgaacaaatgaaatatctaaatcgtcatctaaccaataagaatcatccacgtggatttttcacttagtttacatattattgtttaagcttaggaataaatttgttttagttttgtgataaagtattttggataacagtatttattaatttacaaagacttttctataatctttctctattattttcagttgcatcaaaagtttaacaaactaataaagaaaagaccaaggacattttcatatcgtctagtcaattcgtaaatcatgggtcgagagtatggttaaatgtcaggttttgaattctagttctatatgggctgatcgcaaagcccattaacagtctcgtttatctttctatttttgcttacagaaaacatcacgtag

SEQ ID NO: 38665 - DNA, 354 bp, Arabidopsis thaliana columbia
gttaatcggtactaatggatcagaaagatccagacacgataagcatgtctctgttttcttgtattcttacttttccactgcagtaaaatctgagttaaaacatttgtattccatcacctctctctctctgcgtatatatggtagtaaaagttaccctctattgcgtttctattccttctatccatatgatttgactttggtttgtttcttcagttttgtattgtatataagttgatgacaaaatgagcttcagagactcccgttctcaaagctcgatagtcgcgagtctgataaaacactatacagttgtgtgtctacatataactgcaaaatccagaataataaaggatggaa

SEQ ID NO: 38666 - DNA, 479 bp, Arabidopsis thaliana columbia
  unsure (1)..(479): unsure at all n locations
tcaagcactctttcttaagatcttcagtgccagaatctgtggcctctcgaacctctctttcacatccctgcacatcaacacaacagagtttagcagatgaagctagacgattgaagaagatacaaagctatcaaacaaaaaaccattgatgctgtgacatttggtaaagttctacacagctatcaaattcggatccaacataagggtgcaaaaatcagtaatcacgctcatttgaggacgaattttacagcaactcatgaacttctaaagctcgattcaatcgaatccaataaaaaaatatcctcgagaaagcaaatccgatttcagaaatttccaagcagaaacacgaaaacaggtctacatttctgcaaatggttcatgattccatttgcctacaagagatggttcatcttcttcggaaacataggcggaaaacagcganacaaatgaaggatatagaaaaacttacagcgatgaca

SEQ ID NO: 38667 - DNA, 586 bp, Arabidopsis thaliana columbia
ctctcaaggttgacccatcaattcctacttactgaaattgagcatcttagtctctttttcttgtatcctcctaattccaaattagatttgcaaattcgtattcaataaactatataatataaggttcatttttgagaatatagataacaaatttagaatattacaggcaagtccgtattaattcctccaggaaatgctctcaaccttttgtactaaatcctaaaataaataacaaaaatacagagacaggctgcttttggttcctaaagtccctcccgatcattatcgtttgaacttgaaggccagcaaaacgaaaaaaaacttacaaaaacagaaaaatgctactcatagccatttcataagcaaaaaactcctaatttttcttgctaaagaagaaaccaaaaacctaaaagaacagacagaggaagaaaagatctttaatattttttttatttctcttcctggttgagaacttttacttcctctccccttaattgcaacaatgggaaattgttgctctcatggaagagattcagatgataacaaagaagaaccgaggccggaaaatggaggcggcggtgttggt

SEQ ID NO: 38668 - DNA, 379 bp, Arabidopsis thaliana columbia
aaatataggtttaccgatgaacacagccggcagatggataatcgtcgcgcgtccacctccccctcgaaacaaataacagacatgaaaaaactcgattctcaaaaacaatggacccaacgttcccaacatatccagcgcctgaccattacacggataaagcccatcgataccccaatccccccaagactaaacgcgcgctgcacataacactacaaacagatcaccaacaaaaaaacaggacgagcccacaggataaaatcaagctctcgagagtccgtcataaatccccgtgctaaaacgtaaatcactctttactctaacacccccccactccccactctttacaacgctaaccaaatgtccaaagcattcccaaaaa

SEQ ID NO: 38669 - DNA, 835 bp, Arabidopsis thaliana columbia
tccccacttgtctctctctctctacactcttacttttctttttgtcaaaagcccaaggaagaagatgaaatcaactaaacttggacatccggctttggatttggattttgtagagtgggaaattgtagtttgttgtgaaatctaacaacaaaatatttaccaaaatatagatttgcttaagtgagatatgtagtattttaatgaattgcgtattaataggttaggagtagtaaactttttgtttttcttgttaactcgtttgagctacttccggaattgaaaagaaaaagaagagagacatagaggtatgattacaacccccaaaagtaatgcaaccattcacatttcctgcagtatagttttcttttaaaaaaaatataaataacctggtgtaaaataaacaaagagaagacacgataagagacctttttaacttttcaccgaaaagcataagtaataaacagcacacttaattgactttttacgcatatatgcatacatatattgcttttcaattacaaaaatagaaaagtacagaacatttagcaaactacctctgtatatatattgatatcctgtaagaaaaatctaaatattattaatatcacctttgaaacaaaccataaaaagaaagaaagagagatagacatttgtatcacctgacgtgtgtgtggactgtgggctgagatcatgtactcatacaagcattctcagactacctatagcaagcgagattagtgtcctaattccaggagaataaagttgtatatatatatgcacctaatttgttatcagtatatgatatgcacatagagagctgtttatttttatgaag

SEQ ID NO: 38670 - DNA, 467 bp, Arabidopsis thaliana columbia
atagtaatacgagacggtataccacggataaaattcattagatatatttaatttctcttttggtcataggagtgtagtaatcccaccggtgtttttcgttatggtggttttttttttggatttcttctcgcgtgatgggattcttagatctgaggttggtgcctccgttttcggcggttctggtcttgctgatggctcgccaatgatgtctgaggttagtttgttcaggtgtatttgcataatttttggcctgcgtttggtgtctcgtctagtttattgcgagtttgttcttgggttttgcggatacggttgtagcgactttgtttgtggatttattggttctagcgaattggttccggatctgtaggatctacggtgctgctctgagaattatgccattgttttgttggatccgtgccctttcagtagtcgctgtgtgcttatttttccaagccgttttggttgag

SEQ ID NO: 38671 - DNA, 530 bp, Arabidopsis thaliana columbia
taattatctttcatggttaatagtttactgagtactctcaaatccaataatatttcagatattgctacaaacgattattagtacataatatcatctatggaaattttaatattcgtgtgtttctagtatatatattgatattccgaggtacgctcctgcaggagatgtatgaggcatatagatttgtggatacttcttactatgctaatgagatttcacatccaaaggctagaactgttaatggacaaaaagaatcatagattaatttttcagatagtgaattctttacaaatggaatggttaaaagaactcacaagatcattttagatcaaaaattgaaagagactcacttagtttctcagtctcgagttattgtctctccccccttaaatacattttaagagatcacaaagatttgtataaagaaacttaatgaatgttgtgatgatcaatgagctcccttatcatgaaccactttagaatagaacttagagcgggtgatgtaatcttcagtgcaaggggatggtgag

SEQ ID NO: 38672 - DNA, 604 bp, Arabidopsis thaliana columbia
cccgatgagaggtgaagtaaacggtttaagggtggtgcagaagcatttgaaggtagagatgaatgtttctcctttggtggtggtgagactgaatgtataaagaaacaacaagacgaaccaaacacaaagacaaggtttgtagaaaactcaatgagtatataacttatattgattcgtgaatttaaaagtacaaagggagtgagctgctattgagctcttacaaacgttctaaacgattgagtaaagaaagaaagaggctcctttgtcctaatgaaagagtagagagcatatacaatgatactggcttattcccaacaagagaacaacacatacagtcaatgactcataaaacgctccgtctgacttatttccaattgctcgaaagtaacagaagtgaaatgcttgcaatgcagaatcatagcttccgcgaaaacattttgtcccaaggaaagagtagagagcatatacattaatactgagagcttcttaggcaaggagcttacattgcttgccccagtgatagagaacgcttataaacagctcacaaacgcaccgtctgatcttatatgactctgagttagggcctttaaaccgggctgatgag

SEQ ID NO: 38673 - DNA, 741 bp, Arabidopsis thaliana columbia
gatgatgatacttgatccatgttaaagatacttgtttatgccaaattaagtttcatagtattcgatgaaattttagtcataccaaatagcaaaattttaccctttttctttagtctcaaatatgtcattttttttgtaacaaataacggaattttcgtctacttttggttactcttttcgaaaataccatagtcgaatgttggtagttgccagctgcctagttgctagccaaagagcaacctaaaagtcttataattacaaaaaagcaaaggaattgaaagaccgcatagcgcagtggattagcgcgtttgacttcggatcaaaaggtcgtgggttcgactcccactgtggtcgttttcctttttgttgtaatatttgaatgtttgcttttgttatttggtggggatgccattcacaaaccgacgaaaaagacatgatagtcgtaaacgatgtgccatggttctgatttcccacacttgttcagttcaaacctaaatgtttgtcttttgtttaaagttttaacaaattcctttgtaatcacacatttttgatagaagctgaatgtctaaatagagcaacgaaagtcttgggaaaaaaatgaattaggaccaaagttccttgggaaatgacagtaatgaacaagttattatcctcagttatctcttacgttcaggtcagattattgctgatgagttataaatttcaatgagctcaacaaaacaaaaaaacatgaacatatag

SEQ ID NO: 38674 - DNA, 575 bp, Arabidopsis thaliana columbia
tgttgatttaattatagaaaatgtattctaaatattgcagaacaaaaatcattgatataaaaactgattattctcaataaattacaaaaaaaattctagaaatctttttcttagttgtttattaacatgattttactatttttatctctttaaatgtcttaaaacttaattttatagatgaataagggtagtttagtcatagatgacaatttacaaactaaggtatagatggacaaatttttgaaaaaatgatccttaatatccaatttttccaaattataatgaatggaaatagagctaaacgtatttaccagctctagctctcaaaaatgtatttggtgatcaacaattatagtaagattaagaatatatgaaaggctcaaggtttagaaaatgtaaaaggtcaaatgcatgctttttcattgtgccaaaattggccacacgaagaaagaaaatagagaccaactcaattggccggacggtatgcaatataatgttgcatgtaaccaaaacatggtccaatattatgtggcttactgattcaagagccccatgaaatatcatttttgaagaat

SEQ ID NO: 38675 - DNA, 547 bp, Arabidopsis thaliana columbia
ttttgtgttgttaggttgatattcaagatctcaagcatgctgttagttcagcggttgatgtcatgcacgctatggtgtcttcaatattctcacttacatcgaaggtaaataccttgtctcggtgattataacgtgaatgttgactaaggaagcttatcctctcattgctcttctgtgccattttctgttttgcgtcggagaatagaatattagaatgcaatatatagctacgacgtactgcagaagtatctccatgaccatgataatacagaaaggcatacaaatacttgtctccttgccacctttgtcatagtggttattgtaagatagaaagttgaaactcagagttttagttgctggtacaaagccggttttagctctgttcagagaacccggttgtctgacaatgtacttgtctagatttggttctatatgaattgcttgtgttttctgaaccatactttgaatcctcttatctgggtgcattttgtttttctgtcattggtaggtggaggaaatgaattcagtaatggcagaaatggtgaat

SEQ ID NO: 38676 - DNA, 354 bp, Arabidopsis thaliana columbia
tgcaatttaagatttccaggagacaggctgaagctgccaaaggttgcagcagctcttcaactatttcagaggataaattcttagatattgttaaagaaaaagactctgcagatgttgttgattgggaagacagcgaaagaatggtggatagaattactacgtcatcaactttagatctatcagtacccatgagatcatttgagagcaatgccacgtctcaattttctagggatggttcttttgggttccctgatagacaaaagcctacgtggagaaaggaagatattgagagtggaagcaattcaaggtttattccacaaaatttggagaatgtccacatagccgacaggaaga

SEQ ID NO: 38677 - DNA, 538 bp, Arabidopsis thaliana columbia
tgtagccttgtttcatctcctgtcataggaatcatatacatcttcagctgatatttatagtaactaaagaaagaagaaaacattctgatatcacttaccgggacatcagtaatatcaccaatagcgaatacattcttgcgacccttaactctcaagtactcatcgaccataagccttcctttgccatccaagttatctttcagaacagttccttttagccattctgaagacaaaggttttccagtacagaggaagtgacaatccgcgtgtatcgtctctccacccgatgttcggtacgttttactcccatctgaagctgaactcaaatcaaccctttggttcaatatcacttcaactctcttggacttcatccagtctaatgccttgtctgcagctttctgaccaacaaattccagcaatctcggtccattgtgtactatagtaacctttttctcagggaaatcgacagctatctccgcagcgagctccacacccgacggacctccaccaacaatcagaatcgactcagatgacttga

SEQ ID NO: 38678 - DNA, 251 bp, Arabidopsis thaliana columbia
atcccctttaattcgattttacgctaattctggtttcgaattaatttcgatttgaattaccgttaataaaaaaaaatgtcattgtttcaaaaaagtaaaattaatactgtgtttgaccaaaacaataaccgatggtaaatataaataagggtccggtttatttattattttccccacatcccaaatgtgaaccggtctagacgcaaagtcgcaaagtcgcaaacgttgagccttcttcgttcttcccttct

SEQ ID NO: 38679 - DNA, 589 bp, Arabidopsis thaliana columbia
tcccctgcgttacttgaatttttatgatgtttttaaagtacaaatttagtttaaggctaattattgtttcaacacactaaaagtcctggtaggctctatatacacatcaaggtcagattctaattttaatacaaagttctaaagtcagaattcaaatttaatacaaagttcttttggtttctattaggaaaatcttaagctactaaaatcaacatatcgttacttgtgaggttaactgttaaaccaccttttgcttaccagtaaaccctattaaaagaaaatagtaaaacctaatgctggtaggttctagagatacatcaaggtcattttcatatcaaattataccggtaggttgctttgttaacgggtctattatttgcttcttgaaagcaaaacaacacataacttttacatgtatgttaactgtttatagatcctaacttagcaagtgaaatgatatttcaagtggtgccttggtggaatgttaaattgtgataaattaaagatatttataagaagaaataaaaaacacctaaggttgtttctgttaatagctaaactataggactaacattaaacgttaatgatg

SEQ ID NO: 38680 - DNA, 628 bp, Arabidopsis thaliana columbia
ttgttgtctatattgcattatagttacacttacattacatacgtagtgtgaaaacgatgcatagcattactatacatcaaatctgtgcatatatatacacgttacgtttcttgcagtgaaatactcgaaggtggatatgtgctcttgcaccacctaattaatctcgggttatgtaagaattacttcagagttcagagtatatatctatgtgattcttgcgcagtgtcaagtggattgggcatgagattgataaccgaatgggtgaggggtcaaatatcgttatttggatatagcgggattttaaactgaatgattgggccatgcattgcttgggaaaaaggctaaaattaaacaagattgagatacacattacccacttgtattttagtttccaaagaaaaaaaggaaaaaaggagcaacaaggcaacaagtatgtaatgatcaaggaagtaaaaaagggaagaggagtgtgagaaagagagcaaagaggagctgttggaagagggaaatggtcttcttcttcgtccttttggtaatttttctgcttgtgttgtggagagtggtagtactagtgtagagaaaggatatggaaatcagattgtgatgaagatctgatttgtaagaaggg

SEQ ID NO: 38681 - DNA, 507 bp, Arabidopsis thaliana columbia
aaataagaagacacagagtttatcaatggaagatcaccgtgacggcaaaggcaagaagagagatgattttttcgatagcattgactacgaaatttcttctatcttattgcaactttcacatcctgtcatattctcttctgattctcctgtgttacataaatggggtcgcactaaaaagaggtcttcttcttcttctcacctgcatccgccggaaccggtgataaaatcgctgccgtgtatggctgatgtcggcgatatgggaagtaattcgagttcttcgtgcttaaccggtgaggccaagaaaaccaattctcaaatcgtaagtcttaatttttctcagtttaaacagagacttgtttttcttgtgtttgttcttaaatttttctaatttgtatctgtgtaaaattcattatgtggtaaatttggtattgagtaattgttttttgtgtttgtttttgatataaacgacagattaaaaagggtttagaagaagaattttgtaggaaa

SEQ ID NO: 38682 - DNA, 532 bp, Arabidopsis thaliana columbia
atggtgagatgcaattacgtctttccagttgccacaaactgtagttctgattgtatgaatctttcattggtttaactattcttctcatatgttatctttcttcgtaaaattccattttctatggtaaatttaatttctgcatgtctggcataatacaggcaaagaagcttgagtttgtagaagctatgaagcttgaaattgaacgtctacgtctcaatatttctgcagcagaaagagatagggcactgttatcgattggaattgatccagctaccattaatccaaactcttcatacgacgagttatatattggaagattatgcaaaatagcaaatgcacttgcagttatgggccaggcttctcttgaagataaaattatagcttctattggtctagagaagctggaaaataatgtgatagatttctggaacataaccagaattggtgagggttgtgatggcggaatgtgtcaagtccgagccgaggtcaataaaagtccagttggatcttctaccaagagttcaagaggaga

SEQ ID NO: 38683 - DNA, 537 bp, Arabidopsis thaliana columbia
tgagggtcgagagatacaaagaagatggtggcaaacctttttggatacgttcttgaaaccgtatcgctgaatcaaaagactggactcgaattggcctggcaagcctccggagagaagaattaacagctgaaaagccttccgtctcagcaatagtctcggctttctctagattttgaaacgagcccaaccacgccgaatctatcctctcagatagagaagtgccaggggagggaatgttttccggatctttgttatcaccattagcttctgaatcagtatgggattgttcatccctctcatctgaaccttcctgcattctacggtcaatctttggaggatcatgcatctctggattccgaggagcattgtcatcaccagttttaaagactgatgctttcttgagttgagagtttaacaagtaaagctgatgatcccaagcatgagcaccaatcatgagtgctcgtctcaatcgattcagctctaggatatccaaacttccctgaaatttgcagatttctcctcaaaaatagggttgca

SEQ ID NO: 38684 - DNA, 637 bp, Arabidopsis thaliana columbia
tgctgatatagaagcttccatgttcacttcaccatgaggctgatctctaccatcttgactcatatcattctcattagtagcactgtgactttgcctctcttcgatcttggaccctcccggagataataccctcggctcttttactttacctgcacctttctcggaatgattaattaaactattcatagaatcgagtaaaactaaagtcgaagaagaggatttgtaccatttgagacatctaacgccgcaatttgctccatttagtaagtgaatttgattctccgagaatctaggaactacacgaaaaatcgagcaaagatgtttaaagatcgcttaccctatgtgagagagaagatagaacaaagtatgtttctttcttgttttggggaaagtttttgggatggagactcagtgtgacgtggcgtcttcgtagccgttacagttacacgtgttccctgcagtttcaacttcgtgtcaaaactgacaatcttattaaaatatttaaaagcctaattattaaatttcaaaaccctaattatttaatattggaatttaatttgtatcggaaaaaaggattctgatcgacagtcgcttaaggaaactatgtaaactttactttagccagaacaaaaagata

SEQ ID NO: 38685 - DNA, 361 bp, Arabidopsis thaliana columbia
tgtaaaatattttcttatgttttgtgttgagatctaatgagtttttatatagataattggtgacacaaaatccaaccaaaatcaaaatatatacactgaaccaacttattcttatagaaaatttgactaagaagtaatttggtaaaatataatatgtcatatagtaaatttgggtagaaaataattatatgtaaggaaatatatcaccaagagattaaacatggattggtcaaaataataacttgattatataagtgaaaatgaaaataaaagatggactgaatatatttaatcaagttgtacattaaggaatggaataccatatttattttagtcgtgtttcacaatatcaaaagtatta

SEQ ID NO: 38686 - DNA, 103 bp, Arabidopsis thaliana columbia
cctatattgttgtttcctagtaactttcttaaataacctgttgctagaactgagttcaaagtatcctgtgcataattctgttctagaagttttatgtgaatgt

SEQ ID NO: 38687 - DNA, 500 bp, Arabidopsis thaliana columbia
gtaacgtccgccagtgtacctcttgtcatactcgtttgcggaacagcttgtgttggcaagtccactatagctacacaacttgctcagagacttaacttgccaaacgttttacaagtaacttgctcctaaacccttcttcatcagtttgttctcattttcttatgtttgtttattttcaaatgtggccttttgtgtacacagacagacatggtttatgagctgcttcgaacagcaactgagtacgtttttctcctttttagttatgtacattgttatcctctagtctaagagttacaatccgggctatagattagcgcataagcacgtttgtttatgtttaatgtagtgctccgttgacatcaacccctgtatggactcgagaattcggctcatcagaagagttgattactgaattctgtagagaatgcagaattgttcggaaaggtacttcctctttggtgtatgcttcatttggttttgttttcattttgtgtttgtag

SEQ ID NO: 38688 - DNA, 488 bp, Arabidopsis thaliana columbia
gataaatggaactttagcaataaaccagactcggctcatatgaagcagatacagctcaaagatgacaaccgaagaggacagtagaatgaagcagaagcaataaaggtaaaaccaaggttcaccacgacgactttcaaataatacctggcaaagactttgatggatgaaagtctttccctcaactaggcacttccttattatgccccatgcaacttctgctagcaagtactgaaacttcagcaattccggggtagaactcaagggatttctgccctcactcacaggcaaagcattaaagttaggttgcctcaaaaacccccctgcggaactcttcactacgtctgtaatggccacctcctcttccttcagcaacttgaacaataaaaagaaaaaatggtgcaggatctgaaagctttgaaggacagagctcaaatggacctgccaaaatcagagaaacaaaaagatataagcaatataagaacagttgc

SEQ ID NO: 38689 - DNA, 550 bp, Arabidopsis thaliana columbia
taatgaaatgctacaactcaagtggtcttcaaattaataatatgaaattaacccataatttacatgaccagcagtaaatcgataattcattcgaaaattgtaagatgataagatagtgctatcctatatatgtacatggacttacatttaaatcattagctacttcatattcacaagagtgatgcatgtacatttatttgttcctacgatcgttggttaagtttcgggtgaataaatcgacggctgcgacggttcgcatgacgtccacttgtgctcggagatagacaatgtagtcaagtgtctctcttatcaaataatctttgtcgtctatcaactcacctcccggtacaagactcttaagcaagtccgtacgttttctcacccaggttttcgccgtgaaattgccatttcgtctaagaatgttacaacggttcttcatccgatttcgagctttttttagtattcgacgtgccatgggtttgtttgctgtcttatttccgctcctagaaataagagcgcggctccatacggtagagccatttcgagcagc

SEQ ID NO: 38690 - DNA, 496 bp, Arabidopsis thaliana columbia
taaaaacagaggaatgttttgacgaactcatatatagtctctgtaaaaacaaagatgaatgttcatagggattgcaatgtaatgggagttacgagtcccaaagcgtattagaaatcattaaatgttaatcttaattaattaccgtgtgactttaattaagtatatatgatcacgggggctgaattgtgtgtaggttagttgcttctttaatgatgatgacgattattttgttctacttcctctagtcaaagtcaatgcatgaaagttgataagatcatattgctgaaaattcacaatcgatattaaatgaattgagtttgtgtgtattatcgcattagatgatgcacgtgttatatgttacgatgatagatacatttgatgttgaagatgattaagagataatgagagtcccactaagtgataatttacttagtaaatgaaacaaagagaacgtagtcagatcaaaagctttaaatgtaccatcttttttcacttc

SEQ ID NO: 38691 - DNA, 874 bp, Arabidopsis thaliana columbia
cctggtgatttttgtttaataaaatctctaaaagcaatgtattcaacaaattgatttttcttctatttatagtttgaataattattagtatttgacaattctagatagtaataatgttattagtcatgacctataaataaacttttttgtaattttaaaatttgtcttctttattttttattttttttcccaaacaaaactatcattatttttccaaacaaacttgccatcaaataaatttttatggtaaacaaatattttatgataaacaaatctgctaaggtaattccgactaatttcacatgtaaacaatttttttcattaaaaaatttctgcaagcccacaacgaagttgaacattcggacagaagcccagaaatccaaatgaccatcgtattccagtgaaagtaaataattgacgaaggaaattttaaaaataaatgtggaatataacttctaatataagtaatgtgttatgtaatgccgtcaaactctggtagctaaaacataaaatatgattcttctactaacttttcattaatgaagatctgctaaccataaccagatcgtgatcaaattaagattccattatataccaaccattacaaatactagtgatacacagtataatatgttggtttatgtgatttatttggttttagtgcggattaagtcaacaaatgcaacttaggatgagtgatttggagacaaaacatatatgtttcttcttttcatgcgatgttttgaagtaacaaatgttagagggaaagattggttcacctattaagatctgaccaaccatgcgtatgaactatgcataccttttttcttggaataacggtataaatactataaatagtcctaccactaattgc

SEQ ID NO: 38692 - DNA, 796 bp, Arabidopsis thaliana columbia
tggtactatagttcttgttgttactttttttcccccataaaatcttttgattttcagcggattgttagcattttagcattgagatatttttgtttttgttcgattcagttcagagaatgttctattttgatagtcactccatcattcaactaattttttcatatatactcatatcaaaactgtcactatttcaaaatcaaacttttaggttacaccaatgactctatcacactaaactcaactcctagattttatatagaagaatctatgactttgatgatgtactttaaaactgagtcttttgagatcataaccaaattctacttcataacttttgttttccaatgttgattatttgttataattagaaggtgacacaaacgcttatagcatcctgtttttgaaaatgaggaaatacagtgttggcttttaatctctcattgaggcagaatatcaatgaatgacttcaaatctacgtatacatgtttacttatttagtgatccatattggtgttgctctttaattttcttgtgagaatgaattatatacatcaaaattgattatatcatttaattcgagttaaaattataagtaatacaatcttcactaaacactaattaaatcgacgtaaatttcttatacgattttttcatgcaacacttaaatcgacataaatttaaatattttggtcttcataccctaattttgataagatataatagaaaatttcgtatatctttttttttttttggtaaaaagtttttttttttttgtttcactccatatttagaaaat

SEQ ID NO: 38693 - DNA, 551 bp, Arabidopsis thaliana columbia
ttatttaatataaatatttgagcagattcttgttgactaatatgcgttgataattgattgcactaaaaaatgtaagtcttgttgttgcagtcacataacaagcagcagagtcttatctcaactaaaaccatgcaaccaaagtacataaaagcatacttagcacccaagggaagcatctggatgcacaagcaggcgttcttggtgaactcagcgttctcgtgtgggatttgcgtaatctaagaaaagcatgcatggagagattaactagaattgttattgctgatttcctccaaaaaaaaaaatgttaactgcttcagtcccactagttacatgctataccactgaacatatacaataaataaaacaaagaggaaggagagtaattacttcaccaaacaattgggaatattcatcaattgtagtaatatgtttctttgaacccgaagcttctccatcaagaaataacactattaccagctttggcctagcactatatgtaaatgaggatgtatgttacataaatgttataaaagtcaaacccgtaactatgt

SEQ ID NO: 38694 - DNA, 588 bp, Arabidopsis thaliana columbia
tccgactctaccagataacaagcagcagaatcgtatctgaactaaaaccatgcaaccaaagtacataaaagcatacttagcacccaagggaagcatctggatgcacaagcaggcgttcttggtgaactcagcgttctcgtgtgggatttgcgtaacctaacaaaggcatgcatggagagatgaattagaattgttattgctgatttcctcaaaaacaaaaaaatgttaactgcttcagtcccactatctacatgctataccactgaacatagacttgaagtcatttggtggattttagatttggtgggacttatgatgaattttaaggaggttcgggtgactaatttgggttttcattgaaaaaaaggtcaattctattcgtgatttggtaagattcaatcacaaattccacatggagagagacttatttttcactgggaatagttttgtggcatcgtgaaaaggttgtcccaattgttctacagatccaaagtctaattgatttggctgaaaccagatttcgtggaagcttaagaatgagtttgataatggtggaaagataagatttctaatgggaaaaaatttatg

SEQ ID NO: 38695 - DNA, 561 bp, Arabidopsis thaliana columbia
ctagtactgttgaaatgtgcatccttgggcttaatcatgagataaacccaagaatcttaaggttcagcagactgcagaaattcttgaagagattcgtcgtgtgagggaaaggtaatgcattcaaagcatcactaagttttacttctaacactgcagaattactcagtccattaagttttgttttgcttgtgtagaatcgcaaatatcatttgcaaagaggcaaacatcagttagtgtgcttcaagcattacttaccagcgcagtgaactaaagaaaggaagccactcttggtatgaaaagttaatctagcaattttcctttctttaatcattctgtttagacaggtatagtcattttcttggtgtgaatattaatatcttctaaggtgatacattaaattttgatgtgatatgaagttaatatggtcgttcacgttaatgttgttgtgatatgggatcatgattattaatgtgatatcaatacttaggagcatcattaagtaaataataagtgaataacatactattagattagatgtatacaattaatattgatttcaac

SEQ ID NO: 38696 - DNA, 735 bp, Arabidopsis thaliana columbia
cgaaagacgacggtgatgaatttggacggttgagtgagggaggtcgtataatttaatggtcgtttccaatcgtattcgtacgtggtccgttttctcctactcggattttgctttaatgtgatggccacacaaattggttagaaaactataagggaaagctccacctatttatttcactcatacatttactatacactaatatcgcacgggaaaattataacaattttcggatattcgtatttgaacagaaacaaacaacacatacgtaagaatttccttcacaaaaaagcccaatatagacgaacttgaacttcgtaccaacggcccaatatcgcttccttaatcaacggcccaaaattttcatttattaattaatcagataaccaatcaatagaagccacgtcgccacagccattagtagtagcatcatcaaagcctgcattcttgttcttcgagtctctctcgtgagtgactttcattaccgagaaaaacacaatcatagagaagctctcaatcttgtttgcttctgatcagtaactatgattactgtaaatagatcactctttcattagctttccctttcacttgtacaaaccaattcgttctcgagctaacggaaatggcggagaggcaacagagcctgcggcggagacgattcccggtacacccgtaatccgggaagtgagaaccggaaccgggtccgagaatttcaacccggagaatacaaggagagga

SEQ ID NO: 38697 - DNA, 1351 bp, Arabidopsis thaliana
gaatccccaaacaagagattctagaagctcagctttcaaagcatcaggtatccaaccagcatgccaaaacacactctttacacgttgatcccactgctcaatcgcccgctccagtccctatgcagcagtttcctcttacttctttcccacagccaccatcttccactgctgctccttcccagccaccttcctcgcaactaccacctcagctacctacgcagttttcttctcaacaagagccgtattgtcctccgcctagtcatcctcaaccacctccatcaaacccgcctccttaccaagctcctcagacccaaacgccgcatcaaccatcttaccagtcaccgcctcagcagccacagtacccccaacagccaccaccatcatcaggctacaaccccgaagaacaaccaccatatcagatgcaatcttacccgccaaaccctcctcgtcaacagccacctgctggttctaccccttctcaacagttctacaaccctcctcaaccacaaccatcaatgtacgatggagcgggtggtagatctaattcaggttttccgtccggctacttgtctgaaccttacacatacagtggttcaccaatgtcctcagcgaaaccgccacatataagtagcaatggaactggttacccacagctctcaaattcacgtccattgccacacgctttgccaatggtttcagccgtcagcagcggtggtggctctagttcccctagatcagaaagcagagccccaatcgatgatgtaatcgacagggtgacaaccatgggattcccaagggaccaagtcagagcaacagtgagaaaactgactgaaaacggccaagctgttgacctcaacgtggttctggataagttgatgaacgaaggaggagctccacctggaggtttttttggtggtcggtagccatcggtttagccaactctgtacagtactttatatcagttatcgatttaaggatcacctttgtgaccaaatatcgatttcaagagcttgtaagttgtaacccattgcgacttcatatatgatatcagtttgatgcgtaattctagagaatgtctattactcctttgtgtttgaagcttgaaagcttgcgatgatctttatcgtttcttttcttgtatttgaccatttgttaatcagctaacatttcaaatctattacgcatcaataaaacaaagaactgatagaagcaaaatgtctccgacattattgttacaggaaaaaaaaagaagaggaaactaaacccaaaataagcttacaagcaaatacaaacactcaaaacacatgaacattaagaactaacagtcgattttttttattcaacatggttc

SEQ ID NO: 38698 - DNA, 660 bp, Arabidopsis thaliana columbia
atattattatgtacacaaacacactctacactgtatctatcatatttttttcttgcttatcatgtgtatgttttatagaggcccttgttcaataaataatacaatgttttcctaaattactataacggtgctttgctacaattttagaagagaatccatgatacaactttgctcttttggtggtaaaaactcgttgtaagatcaatcaactccaatgtttgtgtctgtcttcttttaaagaaggaaaaaaataaaaaataaatcgccgtctgtggggatcgaacccacggccacgtggttaaaagccacgcgctctaccactgagctaagacggctttgatgcttatgttctcttctaacttcaatatattacttaatagatatctctctcgttttaatttgttactaaggtcaatttacatcgtaaattcgtaatgtttgtttttttatagaaagaccactcgtaaaatgaaaaataaattaagaatatgtagatatattttttgtaatactctctcaaacaatttttattgattagaatctgaaaatggaaatttggcatggagatctttcatttggtaaaatatataacagaaatttggaatggaattttttatatagataactaatagtaatacgtgacaacttgtttttaaaaag

SEQ ID NO: 38699 - DNA, 644 bp, Arabidopsis thaliana columbia
aatatgattcatattcttctccttttctctttcttttcctgtgaagaagagagaaacatgtggataacaggaaatctaggaacatgtcagcttcgggaaaaaaatgattatatcgataacaggaaatcttaagggttaatggagttacctgtaggcgcctggaaatacggtgaggagacttttgttccaggtggagctgttggaaaaattcaagaaaaatcagttgatgtgagcttcagattctgattccatgtgaagtttatgtgatgaagattcaagaaactcgagttacgatttcagcggatcaaaggggaaaaataatcagcagcaagagaggagatgattcatggttaggagagtacatgaagtcatcaaggacaaaaaaaaaacactggttcatcgaaggagctattctgagagtaaacatgaaattcaaaattagaaatttatgtagtctatgaaagttgaaagagacttaatgaaagaagagttaccgaggatcatgttaatagatgacgggatacgttggcattggagaagcagtcctagtgtttgtgacgatcttgcacacagatttgacaaaaagtgattagcttcgtaaacttgaagacatgagtgttggataaatgtcacaaggctgtgag

SEQ ID NO: 38700 - DNA, 548 bp, Arabidopsis thaliana columbia
taaacaccaaaaaattctacaacaacaaaaaaaacatatatgtaagacaaaacaagaatatacggggaggttgttgtattgcgaggtacggtgatagtggtggtggaaatgatatgtcgaaggttgatcggattatgctccggtaccgtccgattgcaccgagacctgattctggtggatctcctgcttcaccgacggagaagaatggatcggtgataactaacgtttcgtcgagatcacggagaggtaagagaaaatattcaaaggagaataatagtagcagtaccggatccgttaatagtaacggtaacagcaaacgacagagaaacgatgagacgaagaacggatctggtggtggtagagagatcgtgacgttgcctcttcttccagagactcctgagaagaaagactcgccgttgaaggctaaggcggcgccggagttaggtgcggcggcgttgtggctgagttttaatgacggagctagttataacagacgttatcagacagagttaatgacggaaacggttgtgtcgtcgttgttgacggtg

SEQ ID NO: 38701 - DNA, 887 bp, Arabidopsis thaliana
atcttgtcgtccctccaattttggacaagtcttttccacaaagtcaactgtgctgccattgatcattctctttatattttttctgggaatttttgctctgaactagtgttatttgctctaaatcggtgaagaaagcagtttgctattaaatctctctactaaatcatctgtttggttcctgatccaatgtcccctgtcgagatcactggcgctgatgccgtggtgacgcctcctatgcgtggaagagtaccacttccaccaccgcctcctcctcctatgcgtagaagtgcaccatcacctcctcctatgagtggaagagtaccaccaccaccacctccacctccgatgtttgatcccaagggtgcaggaagagttatttgttgtctacgtccaggtcaaaacaagtcttctctgaagcgatttcaatgtggtaaactaacaaatgcctgggaagagttacagagacatggagaagcacaaacgtatttagactaactttttatgtttgcgttcctttttttcttctgcaccaggcagatataattgccgagttattagacaattatatcctcatattattcctttttctttccatgatagtgccccagaatttgatctatcagagatagaggcccttttctctgctgcagtacaaaaccaggctgataaatctggaagtcgacgagaagcttttgaggcaaaccccgataaacttcaactggtaatgtgaaatttatattcttcttttaacatttggttattactattgtcatatagctataaaaacaagcgactgaaaagcatgttatgaaatgccagaaatctgagtaattttaataagaatgtctctataagcatgttattaatttgaaattgccaacactctg

SEQ ID NO: 38702 - DNA, 546 bp, Arabidopsis thaliana columbia
atgagttatcgactgtcacgtcattgatacacggaagggctatgttgcaggagatttttcagattgtggtttgacctatatttatttgatatggaggtttatcttgcaaaaaaaaaatacattgaggatttttttgcacaaaatttttatgttttcaaacggagttatcgagtgtcacatcatcgatatatgagagggttgtattgcgggtgactttaaagatggtggggttgacttgcataattcggatttggagggtaaacttgcaaacgagattgacttggagggttattttgcagaaaacccttaattaaaacgaaatatttgcgattttccccataacaatcttattataaaaattaaattatggttttcaagtagtaagacatataatcgtcatagatatcaagtttattgatcacaaaaaaaaaaattttattaattttaaaaatataattataagaaattataaatttaaacaattttaaaaatataacacataataccaagaaaactaaactaatatctttagctgcatagaattgg

SEQ ID NO: 38703 - DNA, 328 bp, Arabidopsis thaliana columbia
cgatctcgttgcaagtttaccctccaagtccgaattatataagtcaatcccaccatctctacagtcacccgcaatacaaccctccggtatatcgatgacgtggcactcgataactccgttgaaaaacataatgattttgtgcagcaaaaacctcaatataattttgttttgcaaaataaaccttcatgtcaaataaatacaaaccacaactctgaaaaatctcctgcaacatagcccttccatgtatcgatgacgtgacagtcgataactcatttagagcatgtgcaatggatagagatctgctgagtcatttatttaaggtgcaatg

SEQ ID NO: 38704 - DNA, 454 bp, Arabidopsis thaliana columbia
tgatcaactttaatttgtgtcaaaaaaaaaaagaatggcaaattaatagagggaaaataaactatttttgtttcacacaaagattctgttctataatttcatttggagaaattaaatttaaataatatctacaaaaaaattgtccatctattctttttttttggggttttctgcgaaattacctctctaagtcaattttgtttgcaagtttaccattcaagtctgaattatgcaagtcaatcctaccatttttaaagtcacccgcaatacaaccctcccgtgtatcgatgacgtgacatcgataactccgtttgaaaacaaaaggattttgtgcaaaaaaaacctcaattttttttttttgcaagataaaccttcatgtcaaataaatacaggtcaaaccataatatgaaaaatctcctgcaacatagccctgtccgtgtatcgaaacgtgaca

SEQ ID NO: 38705 - DNA, 1021 bp, Arabidopsis thaliana columbia
gacttatgcgaattattttaaattttcagtttttcagtttttatttattccaaaaatacaattgcaaagacttatgtgaattctaaagagatctataatttttcaaatagaagtctttatttatataaaattaaatgtttgaaaaatttaaaaatatataagggttagtttatttaatatttttattttttaattttgttattttaaatttcttgcatatattttcaattaatagtatattattatttgttagtatatgtatgcaatgtttgctattattgtaaattactaccgtaaatcagcggtagattgttccttatgagtccaataggttatatgtttaattccatgtggacgccaatcttgcatcattattttctaatgaaataacgtcgttttggagctttaaaaatgacgtcatttcgatttaacagaagattaactctgttaatctgaatttaacgacgtgcccaaaatggccaagtcaacgatatttaacaatttttattaagtaaaaaacaaacgaaactttgtgacttaaataatatttcgaaagttcttgcattttcgtcccaaatttgaaagttcacgatttgttctgacattttcccttttcaaataggatcaatttatcttaattaagtactcctgtattttgagctaagacgtaaaatcaattcttaaagtgaaaattttgtattgttaatcttagagttttctgcaaaataaccattcaagtaaatctcgtttgcaagtttaccctccaagtccgaaatatgcaagtcaatcccacaacctcaaaagtcacccgcaatacagccctctcgtgtaccgatgacgtggacctcaattactcttttgggttttgtgcaaaaaaaccctcaatttaattttcttttgcaagacaaacctccatgtcaaataaatacaggtcaaaccacaatctgaaaaatctcttgcaacatagccatttcgtgtatcgatgacgtgacagtcgataactcggagtcgacctgagtcg

SEQ ID NO: 38706 - DNA, 528 bp, Arabidopsis thaliana columbia
  unsure (1)..(528): unsure at all n locations
gaacatgcctcgttattcatgagtgaatttggagaatatagcctctcttttattctcctagaaacggccccatttcacactcactaggtgattatccattagctttatttatataaacatcctgcaacactccatgaaatatctcaaagctatggtatcattagaagctaatgcttaacctcaacacttacaagtaacactatttattttatctttaggaactggatatatgcatagtcttacggtgctcaactcttaatcaacttgatttggttttccctttgaacccagattttgggatctccaatctcataagtggggtttcatcaagtttcatatttattcgtaggctttaaactcattcctcttgatagtctaacaacttgatctcatgtcaagcttttaataaaatgcaacctacggtcttaggtccaatggtgacttttcccatcacttaatgcggtattttgttgaagatgtgatttgtagtaagctnaccgccccccacattttctaggctaagcagaa

SEQ ID NO: 38707 - DNA, 727 bp, Arabidopsis thaliana columbia
cacccaatatatctagcatgataccacttatgtcgaaacaagcttatcgctctgaagagtaagaagacaaggtagaattgaagaaactttagccggcattgtacccgagggaagatcaacaacaccaagttgcttctctctgtgtaccactaatgtcttccctatctcgtgcttgaaacttattgttgcgattcttgactagaatatggagactaataagtgtgaaattgagctgaacatcaaatggtaaggatatacgacgcctagttcggtgtgtgattagatctgcgttataggttttttcggtttgtgaacttcgaaaaccaagagtaagacaatgacgaagatgaggatgagaatggttaagatgatacaggaagctgtgcagcaaccgcaccggctggatttacgcatacgtttggtcatgacaaaactataatgtatggatggtttaatttgtatatttggagagcttgaagccacacttatagaagaaatataaatcaaagtagagaaagaagtgttttaaatgcgatttgagctgccaactaattccttacaatctgcctaaattatgtgacagtaattaagaatctgatttgattctttatctgactttttcttctactttaaaaaggttgaagaaaatatctacctgtatatgacacattgactaacacgttttactaattttgttgaatcaattatgattatctcaaaaagattt

SEQ ID NO: 38708 - DNA, 806 bp, Arabidopsis thaliana columbia
gaggatgagctctcaactcttagatctccaaggaaaatttgaagggaacataaatatcttccatgatctttgtcgcttgattccattgttaacgcggctttaaaaccaggttctcttgttgacgatgattctgtctctatgatataagctttccccataaaccctggagtgtattctagaggagaagtgagcgtcagagaattgccaaggctgatatctgatttgcagtgaccttggagcttcgagaacaagcagattaagaaagtgaacgtatagaacttcatcatcatgatttatgagatgtttctgcggctgttgatctttggaattttccgggaaaagagcaaagatgataagaaaaagaaaagaagggaaagtttggtatgagtgtgttttactatacacttttgcagggaaaaggtttctgctttcatgttgcctttgtggataatcgttcttgttatcctaaaaccttttttcacctatatttggtatttattttatttttacttgaaaatattttccaaaagagacacatattagtattatcagtctttccacttatttgtatagtttacttcaaaaagtttctaataacaaagcaagagaacagacgttggtgcacgcttggtcttccacaggctcaggctgtccatgtggggtttctgctctgcattcgaatttggatgacacacaatataggatatgagttatttcttttttgtttgtaaaaaaaagtagatgtgtaaattaaacatcgtatataaaaggatatgagttaaattatgttttaagaataggaaaaa

SEQ ID NO: 38709 - DNA, 735 bp, Arabidopsis thaliana columbia
caatatacgggcaataataattttaatgcaaaaactagatggttcaaaaaaaaaatattacattaaataatacacaggcaaatttcagatttcaaataataaaaaatttactataatatatttatcccacacatagtgcggataaactatctaatttttcttgaagtaggtaactaagttttaattgaaaaacaaacaattaaaaaactatatatatatatatacatatgtatatataataatagaatattcaatactttttaagagaaattttaccatccactgctcaaaagaaacaccaatgatcttgatatttgtagaaaaatctatggacgtaacaccaacaatacaaaaccatggtaagaactaagaagaaatgaagaatatcgctttcacgtaaaccaacaatatcatatatttcaataaagacaactattattatagttttcagaaagaaaaaaaagtatagaaattacatggaaggtggtaggtgaaggattttaccgaattacatacgtcaagactaattttgtcaaaaacaaaacaaaatttattcttgtgtgttagtgtgtatataagaccatctctcttctcctttatctctcagcttgagcttctctctcaacgaaagaactcaagctttccaacactataaatctataatacagcttttattctcaaattttgtttgtcttaccatcattaccaaaccatgcaagccgcaacgtcgtgtga

SEQ ID NO: 38710 - DNA, 782 bp, Arabidopsis thaliana columbia
acatgttctatgcaataattaagcaattgaatagccaatcaaagctggtgaactgaattatctatacaccaaaagttatgaattcttctaattaatggagcaataaaacctagaatcgaacttctagtaaccgatacaacaacgagaatctaattgcttctttccgatgaactttggctactttccgatgatatgtgcaaccaaaaatctcaaaattgttctaagatggaactcattatagagtatcctagttcttgcgatcaactaaacgtaataataaatcccgaaagtgagaagaagcattgcgaaacctgctaaaagggaagtgatcaacacacgcttcgtcggagttccattttcctgcacaataggcgtcggaggagataacgcctgatttgtttgttctggggatttccgatcacccaacgccatttttgacgccacggaacttcgagagaactccaatttcaatgcggtgttgtgaatcgggttgatctaaaacccgagattgaaccctaactcgaaacccgatcataactcttacataattaagaaattgccctgaaagatgatttaaagtttattttattccctcaatgtttgacaaatagatatttggcccttcacctctcaggagagattttctttggaattaaattttcctctgttttaggtgatattttccttttcgttacctttagttccttgtgcaaaggaacaactatagtatgagtcttccgattgcaagtgattctttttaaattgaagtaaaaattactcta

SEQ ID NO: 38711 - DNA, 595 bp, Arabidopsis thaliana columbia
cctacattcctactgcacctcagctatctagaaccactgaaatttgagtggttcagatgttcagcagcatcggaactgtgagatcaaaagatcatcatcgaaggctcgaaagcattcccattgagcaaagaaaaaaaaagcagcattcaatttggtctgaaagctaagaatttccgagtttctgaagcaattattgttatagcaagctcctattcatgtgattccataggaagaaaacaaatgaaataacattgcgacaaatatttacatgctcaaaagagagactttagattagattctcggaaaaaaaaagacacacaaaacaggatgctgaccaaagtttaggacaactagtctcctgaaaatagcttaaaatggtaaaataccaaacaagcagatgacggaaaacacgaaacacaaatacattacatctcccatagctttatatgagccactacgtcccttctccattctatttgctactagtagtcgttactattatcttttgtttttttttccttcccttataaaactgcaacaagaacaacaagcacaatcaaacatccactttctattaccctgttactatcccggt

SEQ ID NO: 38712 - DNA, 543 bp, Arabidopsis thaliana columbia
cgcctggtgaatgggaaaggtcgaaactttcattgccatttgttgctgatcaaagtttgatagaagaaagatggcaactttgttgttgagtcttaaagatgtctctggttttgtttgtttcaggtggataagagatcaacagatatctgaaggagttaacccgggcgatgatgtgtacatcatactgcggttagatggtcgagtccgcagatcgggtagagtaagtttcatctagaaaccttttcctctcttgctttctcgtgtttgatatctacttattggtttttgaggaggttttgtggtaagtaataaaaactctgttttttcaggggatgccggattgggctgagatatcgaaggagttaccgccaatggatgacgttctcagcaagttagaaagatgaaactgtgaagctttcttaattcttacatattgtatcttcgtaaaaccttagaattgagtagagagaactcatgggagaagaaaaggtctgtattgtttgtttgtgtcagaagccatgaaattgatatttgtgtatgtga

SEQ ID NO: 38713 - DNA, 638 bp, Arabidopsis thaliana columbia
tgaaaaaagaaatataataatattttaatgttaatgagagacctataaaaatacctcaccaataaaagcgcaattttagtataagtttctcaacttaaattacatataaaaatataaataatatattaagaggttatcatagagtatctcacctaaaggcctttaattataacattggcaccgaccgagtcaacgtaaaacattgactgaagaaagaaaacgacaaaacttttcaaaacggtctttctctgtaactttacctctctcagatggttctctctcaatctctccaatgtcgaacacggcgggattaacgattttcgacggtgatctacttagatccatcgatctaaacctaccggaacaccaacacagagtcaccggagctcaacttctcgagatctctgaatcaaaagtttctcaatctctctctggtctctcactaccaccacatctcaaagaaacagcgatttctcaagtctccgatggagatcacgtcactttccgtcgtacgatgttcaataaacaacaagcttctgagaaactcggagttttcttctccaccgtcgccgatgctctcaaaggtaccgtagaatcgcttcacatatattaagtctatagaacggtttatctaaacc

SEQ ID NO: 38714 - DNA, 584 bp, Arabidopsis thaliana columbia
caaaatcactgactggccatatgagatggtttttgtgcatagatgagaatcctggaacatgctatacttgtatattatacaaaggcacaatgtacaatgagtcagataataagagtcactcatacagctctatcttgtctccctgttccatagatcatacacagcatgtgcaaccactgacactgaaacctgactaagagtcaaggcaaccaagagaccaaaactggaagactcattttcgcatctcctgcaatcaaagaaatgaactggtaacctcgggatcaagtctcagcgaaaggaaaaggagtgttattgggtgaagaatggttacagttagtcacatgttggtttccctgagcggtttcagacagactgaactccatgtcatgtgtttcagaccatccaggctcatatgtctcaaggaaaccgattttcgctttattgggtaggtagtgaggatgaacaaatggaactccgtgcggccacccgatctcccttcttatattagcacaagggctgttcattacattgtggttatctcgcactccttgagattgcagaacttagtttgatccttttttact

SEQ ID NO: 38715 - DNA, 681 bp, Arabidopsis thaliana columbia
ctacccaattgtaaattaataatctgatccttctgtcatgttcaaaggtcaattttgtttctttatgcataaacaatttttaattatctaccaacaaataattagttggtctatttcactatttctataacccaattacgtcgtgagggttggaattattgagaaatatataaattatttcattaactgcaaggtctagctatgtacacatgcgtcttgtatctactacatctccaaaaaatatttgttttaaaaaagagaatcatttaaagtaatggaaagacttggtgatatgattgccattttacttcttatctacatttaaagaaatcccacttcaagactcaatcactttaataccactcccatctatcttcaagctaatactttttgtattttcgtgattttattttaaatactaagatttttgcctcattttatcaaacacttgaaacccacactatatatgtacgtgaatgagcaagcagaagttattgcctcctcactctctaacttgaatattttattcttaattctcttcttcctctctacacacctaaatctcttctccctcactctctgtctctctatgtataaaatataatatgtgtgtgaaagtagctcatatacgtggccatggagattatttggaagttgatgatgcaagagagaaagtaatgg

SEQ ID NO: 38716 - DNA, 901 bp, Arabidopsis thaliana columbia
cgagcaaaaggagtaaaagaaggcacaaattctgcaaggaagccaatcttgtcataacttgctagggatcacatcacgggaaagcttggtcggctttacaaacatgtcttgggtctctgcaatgaacttggcaaactgagatcctttcgtttgtatgtaattaccatctttaagtaacttaggcagattgggtagagactgctcagtctttggtgatagtgatggcatcaaagcccaaatggatgagagttcttcgctaggttgatcaagtgtttgaaggatcgttgtgttctgcatatctgtattaagacgggaacaataataagcaaacactttttgacacatctactctctattctgcttccataagtgaaacaaaccaacaagattagacaaaccttctgcaaacttgaagattggtgccaagactgcacatgggatgctgaagttgagatgcggtataacagtccccgctccatgtcttgcgttgctgcagatacagaaaacatagcaatgaacaatcaactacatatcatcatgattaaagaagaactgtccgtttctaatgacacatctcatcaatggatctaaaagacctacgtattgtatttgagaatgattttcggttacctggtaacaagtccaatcatatggccacttgaattgagaacagcaccaccactgccaccaggatgcacagcagctgttgtttcgagcatagcggggaactctgcgacttcttgagaaatggattgcgtattcaatctcctctttgcgtgaactacctttgctacaactccagaacaaatagaaggagaaagccctaataacaaacacagaagaatagagaggatcatttatttcttccatttaaggacacttggcacatgtaaggcacaag

SEQ ID NO: 38717 - DNA, 549 bp, Arabidopsis thaliana columbia
tgagaacagccattgatggtttccggttgaagctacttctcccacaattctaatttcatcaaaagaaaagtttattgaagatatataaacacaaacacagagacagatatataaaaatatttgagtgaagtgtaaaagcattacccttggcctaagaaaggagcctgtagagtcatatcatcaactagtgcgaatgattgttcatcattgtatgcttcttcaaatctcaatatcctgatggaattcaacaaaacaaaattacatttatcgacaccaaagtagcgaaaccacatataaaacctgagcaaatgcaattcagtctttctttggcatttgttgattttaatttaatttttttgtgacagcttatatggggtacctcaaaaacagttttcttgtcgaaaataacgttaaaaaaaactatattaaccacgtaaaaacgcataaacagatttacctctcctatgtactactccctttttgtgaccgtttcgccacagaaaaagcctccattgtcagatcatctgctgtttgtacaattagagagag

SEQ ID NO: 38718 - DNA, 941 bp, Arabidopsis thaliana columbia
ttttacaactgtctaagtgagagacgatatctcgttctatatgaatatactcttatgcttgatgctgagcttcattcatcgtttgagttacagtaaggaaggacgatcatgctagttatcgaaaggcatgacaagcgttctttcttcgttgtaattttcaagcagatagaaatatagaactttagagtttagaatataatgaattgttcatatcaatcgtttatacatcaaattacattaacctcctacacaatttctctagtgtgaaagactcacatatatatctgttctgcaaaagcgtgcagtgccaaatgcacgtccggaaggagcttacaagctcgcttggttatcttgaggcggtgaaccggaagcttcgaccaaatacaaacggcagcatggttttccatcatctggatggatttgtgcagtccttggcaggcggagaagtttgttgaagagattccgtggatcgtggagcagaccgaaattcgcatctggatcacctatttgtgaaagcttgacatgagagaatcccaaagttggtaagagctgatcaggccagtcactgtaaaagtggaacacagagtttggaagtgtagctgatggtttgttcatgaaatccgccaagagaactgtgctggttagtccacacttctcagctatgaggtttagtacttgcattgcctctgtgtgagacaggtaatagagaataccttcgagaacccataccgtgttaatctctggcaaaaaacctgattttttaagctgttcaaaccaatcgttgtctctgatatcaattgctactctgactagtgatttcgctgtcatcctaagctcatctctagagtttactgcagcttgaactaggctcgctttggttccaaaacatcttgaaaaccacttcgaatacgtcacttttgttcaagcagtttagtctgtat

SEQ ID NO: 38719 - DNA, 792 bp, Arabidopsis thaliana columbia
gacaatacaacaactcgtgaggctaatcatttaggacagtttactaattgtgtatttactatcttggcgcagttcaatgtctcaggcttaaattcgaaacaattgggtcagggtctaggtaacatggattacgtacctaacttctgacgattgagtatgagatgtacttgagtcatgtctagtaagtatgcaaacatttttaaattattttgaaaaactatatttgactaagtatgtttactatgtttaactatattttttatgtataattactatttctgaatatctaaggcccaaaacaacacaaggcccaaacccaattattaaaaattaaacaaagcgactaattgctgacattttcgcgactataaccattctattgggccaaaataactcgaggcccaactacggcgactaatttgtgataatttagcgactacaacaatattattgggccaaaaatttcgaggcccaaaattggtgactaatttgtgacaattaagcgactaatgtttaaacaaactgaaccttttaggctcaaaccctttaggcccaaaccattcacttgttatgcgaaaaccctaacaaaaatatctctctctcttcgaaacatccgcagtcttcttcttcaatttctctcttcgatttcctcttcgatttcctcttcaaaaccctagcaaatcgaagattcctctttgttttcctcttaatctcttcttcttcttcgatttctttgatatgaacctctgtctcatctagatctctccttcacacaatgtttgggcgaggaaa

SEQ ID NO: 38720 - DNA, 807 bp, Arabidopsis thaliana columbia
  unsure (1)..(807): unsure at all n locations
acgttttaattgtgttgatggataatgtgtattttatgatagaaacaaataaaatcaccttgttataagttgtaaggctccaaaatcacattaaaacatatgctagtgaattaccaataatttgacaaatatgttaaattcacataatttattgagagaatggaaatcatgactcgtgactcatgactaatgactaatgagtgagtcttgttgttgtatatagagactatatattcatctgaataataagtttctagaaggctgaattttgataagaggagcataaaaatgactgatcacacatcgcccactaaatacgcaagtgagtgagtgatcggagatatttacggaggaaagagcgggaagggagtgggtataaaattggtggctcgttcggtggttgcattattctgtccatgtgggccaacgtaccgcactttgtctctgtatccgtcattgaggatttttttgtttattttattttcccatctcacttatgatttttgttattattaatgattagtgatttgttacttactgaagcaattattttgtcaaaatagagactgcttcacataacacataaaaccaagaactggtgtcggatatcacactctctcattcacatggagaccaaaaaccaagaacatacgtccatcttgcattaacgataccgtgtgtcgtttacgataggcacaatatatacatatatgtacgctcataccaaaaatatcgagatgcactaaccaatgccatatataacatgagcattgagcacgatagtaggatgagttatganaagaagga

SEQ ID NO: 38721 - DNA, 764 bp, Arabidopsis thaliana
gagttggctatgttctgtaagtcgatggttcttgtaaacaaatttgttgatccttctctattgattcatatttactttcgcttaataaataaccaatatggattgctgtgcaggcaacagcctggtatgccgatggagcagcaccaccacaacgaccaagaagaaatgaccggaataacggctcaagcggagggtcaggcagagataacagtcatgaacatgatggtaaccgaggaggccgaagtaccgaccctactagtaaccatagagaaaaataagcaagtagaaaaagaaaaggagaagtgtattgggatttgtttgtagtttgtttttggagaactttaaaaagctctctctcatgtgttataaaatatgaaatcgaaaccttatggtttctggtttgatatggagactgctggggggataggattgagtgattcgatctttaaattatgagactttttagttttttctcttctgaataatactcttatcaattatccatcagatttggtgtttttgctttccctagcccttgtgcaacgttgtttacttatacaacaagttatcactgggtctcatcacataacattacagtctgaagatgtcaaacgaacttagactttcaacaagaagcaaagaaatgaatcaaatcaattacaataatacaacaacaattggcaatgagaattctttttgagtagagagttatctacattggagtgcagttgaaggctgtttcgaatatgattgattgattttgt

SEQ ID NO: 38722 - DNA, 778 bp, Arabidopsis thaliana columbia
ggtgtttcatttgtgacttcaatattttttcaaagctttccatgtatgtttgaaacttgaagcttcgatcatttatttttttctgtgtttcattcatttgcctatttgactcttagaaaatcacagaccagtgagtgtaacaaagtcgcagtgtacaggctctctttcctaatccaaaacgacatgtagtttttatgactagaactgaacgacaagatgtttttcttttgttatcccaattcttaaaactaaaacggctgcgtttagtaacccgcgaaacccactaaactctttagttctctctctcgttcccttgcccctctccctctctcgtcctcggatttttctcgtgcttcactgataatccagcttgacgatgtcgttgacggagctagacgacggactggttcgcaggatggccatgggcgcagtcttctctgattttgtacgaacgaatttttctctttttgtaatctcatttgatttcggattaaactttggtggaatccagcttccgagattaatccgttcaatttctcggtgttggttttacacagggagggaagatacattcggtgggttccataggactgatgatctattggtcacatccagcgaagatgattcacctctgcctcttcgatatcgccaacgctaagtcagttcttccttcctgtttttaggttttatacttatctggtcaagttctagagaaactaggttacttaaggaatcaagaagaaggtttttgattaaccgattagttgaaattcttgtg

SEQ ID NO: 38723 - DNA, 589 bp, Arabidopsis thaliana columbia
tagtaacggccgccagtgtgctctaaagtggtaagagttataactcatatggaaggcatgcgacgtacatactccgtaaagatagtattatatgttatctctgaggggctaaaaataaaactgataggttttgcgaaacgcgtgggataattgataatgctagaaatcccagactcctgtcatatgcatttgaacgaattcgaatccctcaaagaatgataatgcccctgcggacggacacaggtagttttcaaagggcagtacagcggctcagggtttcgcctgcgtattagcttgcgtgttagctcggctcggacttggtactggtttcctgctgggtactccaaggttcattcgtcgcgattgtctttgtgaatcctgtccttgggccggttgcgggttttcagctaccagccggtactgaggagggctgtcttccaccggaagtggcgccttgtggatcttgagtacactctgctgccgggcaacggggggccccagaggtgaccctgaccgagactctggaggtgatgaagggagcatatcgaatgattcggaagacgagttcgctcctgggttgccatagatt

SEQ ID NO: 38724 - DNA, 771 bp, Arabidopsis thaliana columbia
gttaatattttaacggaaagttgcgatcaaaagacacaatcattgagaagtgcaaaaggcatttattgagattgttattattagtagattaaatgtgttaactattacaaaaaaaaattaaaaatgaattgccaagatgtggaagcccctttggcccaatggttgaccaaaggtttattaatgcttctacactaagaggtatggggttcgagtcccagctactacgatttattagcagatttgcagattaatggaggcaagtgtgcaggagatttacaacgatatacaattatagccgttcgccaggattctacgcagagaagatattgaaggtgtccatcaagcgcatggagaaggagaaggaagtgtcgtctgtcgtggatctaataaggttcagaagaaattgtccgtggtagaatcgtctatgaaacagttctcataatttgtaataaataataaattttgacggcaaaaaaaaagaagataaataataaaattagaaagttgtatgtaatgggaatcgaaccatgctgcctagatttaatgtggagcactcttaccaattaaggtaacctatattcaaagaaaataaaaggtaacatatattcatatcactgtagtcaattgtttaattattaaaaaagagtatagggcacgagccccacctgatcttcggctgtagatctgccagctacagacatcctttatatatacatcatataaatacattaaaccatggttacaataaccaaagataaccggatcaaaccg

SEQ ID NO: 38725 - DNA, 636 bp, Arabidopsis thaliana columbia
agctcagtatctgaagacaaatcgaaaagcctagcatacaaatatcttttagtaagctaaaaagctcttaaatcaggattaaataaaacgatttgattctttataatgagagactggaccagatggtaacatagtaagtcattgcatggcagaaactaacaatctacaaccttaggaactgattttttctacaatttctctaacatctttccataatgatattgatcaatatattgacatgtacatccaccttcactatcagccgaaaagattgttacctgaaaactgcatccgaggatagaattcccaaatgggtgtcactatcagggtgccacgatgcttgtagcaaggttatggcactgtcactactagtatagatttctgaaccaatagaaactaccctgcaacacatagattatgaagtgataacgtataagcagaaggccattaatttaagcaagataacatcataatcaagataacaatgaatataaatgcatcttattagggtaacgttaatcactacctgcaaatgacattgtcttctatcacagaagcacgtccaaataggtacatcacacatatcccatctgagccggcaagaagtacagctgatccagacttattgatggagat

SEQ ID NO: 38726 - DNA, 754 bp, Arabidopsis thaliana columbia
agaatctctagctagttcctacaaagtctctttgtgatcagtgttggaattcttaattatatatgcattaagatatacctgtctcagactctatacgtgattttcaggaaagagctttaaatattaagctttgaatattctctcagaccatcaaagatttgcttggtgcactggccggaaatggatcctagtcgatatggtcgtcagcaagaatgggataataacagtgtaattgtggttttctccttacatatatgggatgataaacaagatatttttagggatgttatgaatctcaactcatccgtggagtgagagacttgggagagtgaggatgtggatgggatttggctaatgtaatatccgtcaatgatgtttgttgctgacatagcttattctcttcaattcacaggctccggagggttatggtactcagcatgatccaaatcatcggtgagtgctagtaaaatggattacattgatgtagttgttaatttgttattgctcatgggggtatatttattttagctactgtaactaaattgtatttcttgtactttatttggtttggttacttgtgccgaaatattcatgatagttcatatctcattttattaatatcttttctgtacctatactacattgctcttacaggtttggcgtatcatatgatgacggatatcctgatgaaaggttgatgcgggatgatgctctacaactatccacctggacataatactctgggtgacttgcc

SEQ ID NO: 38727 - DNA, 803 bp, Arabidopsis thaliana columbia
atccccgtcgacttcctctagagagacactcaacaaagacagaacagaggcactaaaacagagaacagaatgatggaacagagaactgagtgtgtgtgtgtttcagaagaacaagactagcaacagaagagaaaacaaaaacgaagaacacaggatttgttaacccagttcactcccgtaagggtagctacgtctgggccgagacttgcctcgggaatccactagaaatcagatggtgtttctttacaacaagagtatacaagtgacaacctaatacccttcactagtacttaggtcactctgcactacccttgtaatccgcagagaacaactcaatacaagtttacacaatgtaatgcttttctctcaagaacacctcacttcttttatttctctcacactctctctcttatcacacaagcacctattttatactccaagtaacaattagggcttcacttcagcaacaaacaagtagccgcctgcgtttgctaaacgccaactctaacaacttgaaaacgattgctgcagccactctgatcctgtttctcttttcgacacacaagacaaaatgtccttaagcgcaaaacatgactatttccaggctgtctccttcatagccgttgcctcaagaaagtggtcccaaaagtaactcaaccatggttcgacttacatcaaccttggttagtttcttgtgctacaagctatcatctccacagtatgaaacattacaaatttaacatatgacaaagcaataacgatttcaataattaagtattacgatcgtaatttttgcatgaagg

SEQ ID NO: 38728 - DNA, 563 bp, Arabidopsis thaliana columbia
tttatcccctgaaccacggcctgtttcgtagttacttttattcttttaatgtttactttcaaactaaccaacttcatggaattaatgaaggtcagtatcttgcttttggtcgaggcatacaaaagtaaaggagaagaaaaattaagtaattctaatcgaactacgaatgtctttggttctaattatatatatatatatatatatatatataatgcaacattatttacagactttccatcgacttactaaccatgcacacatctaattttctaaagagataaagaatcaatttttttctagaatcttgactatctcccatcaattttcttggatttcatatcactatatgaatccctaccttttggattctttcacatgtagaagtgagataagatttgttctcctcagaagatccaaactaacgagaacgacactagaaaaacatcacacattaggatttttctgtagggaagacaattatacactattagtctttcagttgtccttcctcattttagcgacatgcaaatttcttgaactaattattttcttacgtaaaaaaa

SEQ ID NO: 38729 - DNA, 431 bp, Arabidopsis thaliana columbia
gccattgtcgttgtcgcgcggcggtggaaggagtatcatgtcgtagccgccgccgaacgacatgaactcgagactcccgaaacggagcaccgtcccgggccggagaggttgctggagactgcccatctggagcttgacgggaagctgttcgtcagcacgcagcacgccactacctggcgcgccaactgtcggcgtttcgagaccggggggtcccgagccgacgagtgagtgtgccgcgtgccccagcccagatgggtcgagcgcgtgggcgagagcgaagcggggagaagcgaggtggccggagatgggcgtgagataggtggagatcccgcggccttcgtgttcgtcccgcgcccaggtcgggtgcgcttgcagtacgggggttacaagcgtccacgcgggtgagggaagcgagctgccctaagagagcg

SEQ ID NO: 38730 - DNA, 575 bp, Arabidopsis thaliana columbia
gacggaggcagctcaggcagggcgcaggggcacttcggctgttcggtagcaccgcagcagatcgcactcgcaccgccccggctggacggaggtagggggcaggggcaccgcgcacgccgctctcggacggaggcaggggcaagggcagcagatcgcaaaaaactgatctcagccgccgtctggtggaatagaagccgaacgatggctcgtgcgggatgccaagatggccggatgtggggtcctcggtgggcctggcttagggtgtgccagggcccacctggacccccctgtgggtccgcccctgccggggggtccctagatcgacgagtgaaatgtcgccgcgtgccccagcccagatgggtcgacgcgagacggagcgcgaaggggggaaaggcagccagagagaggggtggaaatccgcggccttcgtgtttgtccgcgcccaggtcgggtgcgcttgcagtaggggattaaagcgtcacgcgggaggggagcgagcggcctacgcgagcgcctgtcccgtctcttcccgtgcggcaacctctgtaaaaggcctggtcttcttttatagcggg

SEQ ID NO: 38731 - DNA, 776 bp, Arabidopsis thaliana columbia
tatattctagtattatttttattcaattcgtgattttcttattatcttcaaacactgctttgtttccttttcttttactaagacctatctctaatacccaactctatattttcctctattctagagaaaatattgttgattttgctccattgtatgtgtaactctattttgaagatatacaatagagcaaaatcaactatatttactctaaaatagagttggacattggagatactatcgaactatactgcaaagaagtcttaagactcttcttctgttacctttttttagttttatgcaattttagaccttttctctttagagtatatatacgctaacttactttcctataactaatattttcagggagtttctgaaaccaaaaatctagatgcagctgataaaaatggttctttaacggcgaaggcagagagcattgcatctaaggatgaatcaaaagataattctcatgatgagaaggtgatactttatatctcattcttgttatgtcatgagtttatagtattgcgtatgtattttgtttactagggatcaacctagatgttgtattcattttttaacctatataaatattaaacggtttgctaattacttgtttatgaaaatgtaaacatgatatgacagaagctagatctgcctactagtatttcatattcagcagataaagattctaatgaagtggttactgagagaggcaggtaaattgatttttccatgtttgggagatttgtttctgttagatgtccttgtgttga

SEQ ID NO: 38732 - DNA, 489 bp, Arabidopsis thaliana columbia
tgtcacattgctgtgatatcctgtatctttggaaactctgatcgcttgaggcatcctgctaataaaatggtatgataatgtaagcccttgatgtattttcatgttgtagttttcttcttatttccacctctagaatttgaaattcctaaccactattctctgttagcatcgggttaggtacatggaaatagtccatcttacatacatggagactgaagacattttgtagcacttagatactcactagctaagttagatcaactgttgaacctgaactgagtgaggagtaaactagtttttggcaactagatgagatgagtagttgacagttgtatttgagtgcaaaatatcaaaacaaaatattggttgcggaagaatatcccgtgatgtatttatagttgccataaccagacttgcaaatactgagttatgaatagttgaatgccaggcatttgaaaaaattgtttgatgggtgttctgtaatcatga

SEQ ID NO: 38733 - DNA, 453 bp, Arabidopsis thaliana columbia
ctagtaacagtgtgctctaaaggttgctggagctgaggaagaaattccagagccgacagtatagtctggatgaaagaagataaaagtatatttgtgctttttgcgtgctctgaaatgattacttgtcatttcagagcatttttgttaatcgcataagttttcttttgtatgccttgagtagtcccctattcaaggtatatgtgtgggagctagtgatgatcagcgattcagtcgatattgatacaagattgtatactgacgacggtgaaatcctagaattagcaatcataatactattatacaatcttaaacactaaacacaatagacaatactaatacaacaaatacaacttaaaatttcaaaattttagttataaaatatcgtcttgcggtataggatacattttaaacaaaacaaaaccatatacctacatatcatcataaaaacaaaaa

SEQ ID NO: 38734 - DNA, 694 bp, Arabidopsis thaliana columbia
taattggtagtagtacggagatcatgaattgtgatatagaccacatccaaaaccgcatcgcaacagtgtgtgtaacactaccaaaatctctacatatacatatgtatctacgtatttttgttactatttgaaccgtactgcactttatttcttacaccgcaaaacgcagtcaccattcggaccctgaatttgtcaacaatatcagactaaaaaatctagaaactttgcatacaatgcaagcacgtaatacatgactataatcgatacgtctttttcgtacaaaaaattcataggtcaactttaggccccaaagatgtatgtggtcatcacatctcaccagaaaagttcgttgcaaatttttcaaatcccatcaaaaatagtaaatttcaaaattcatttaataagagtgtcgtctcttccgaaaaaagaggaagaaacacagaaaagctaaagcttcgggcattatgtattgaaatcaaatctctctctctttttcttccgtggccaaaatggatccaagcagcttctctttggccatctcttcttgaagctgctttcttcctcaaattcttttttttccagattcttctcctttcttcttccttcttccttaattcgatttcgaattttgaattttctcaatggctcaatcgtgtcttaaaattgttcgaatcatcaatctaaggaacagagt

SEQ ID NO: 38735 - DNA, 586 bp, Arabidopsis thaliana columbia
gaatatcttgttcactatcagatgtattgagattgagatataactagcattttcttttaaactcatctcaactggtatccacagagtttttggctcagaatcagatttactatcatatgaatatgatatacacagggaaagaacaaaaaagatggagtaactttcttcttcatagtacctcctttactatcataatacattgaccactgcctccttaagattttcaaggtagcataaaaatttaacaaatgaaaaagaggtagccagaggggagccacataaaccggcttctacccttatataaattaagataataatatctgaatagatgaaccataattataaatatccataacaatagccataggaccaatcacccaccaaaaccatgagagatgagaccaaaagtattttttttttgttaggtaagcagaagcacaagcaatatacaaaaatgatcatccatggccgcctcagtttaaagaaaccaacagctcttttttcttgaacagatgatcagctcaagcttctacttttcctcttttcatggactcaaatcgatcatggaaatggtgggagtattgga

SEQ ID NO: 38736 - DNA, 1031 bp, Arabidopsis thaliana columbia
ggccttttattgatgttgtagctgagtccgacgaaacttctggaggagaaaatggattacggacatgtaatggccgtgcagcatgatcccttttggcagcaagtatttcatgtgaggaaatagccaactctcgctgcaaatataccaaaccagtaacaggtcaaacccccatgtgtttcgttcaataaatggaaaattttgggtttattctgtagtttaacatatacctttaatttctccctcttgactatccgctcgcacagaaggcgtaacctctcaagttcaacctggaggagatttagcaaaattccaagaattataaattacttgataagagatagaaaggaatacgcttaacaaagcaatggcaaaaacattttgacttcgctaagaactcctaccctataatgtttgagacttttcagctcctctgcaccatgtttctgagattcggcctgcagaaatagtcagacagatataagcaagcttataatctaagtaggccataatcaagatggcgaaagagataagagataagacctttgccttctgctccatgctgtgcttctcacagtacgccttatgcggatgtttaccaccaccagtcatatgaaaacccgcgcttctggcacaggaggggtggaatgtcgtctggcagttaccataactgcactgtaaaatgacaaaacataagcttcttgttcaatctttgtcccaacacttgaaatagatgtattcagataaaaaaaaaaaaaagtaaagaaacggtgactaccttagtgcatgcaccatatatccgttggcatacacaacaattatccgttttcttggccagagactcctaataaggcaccatacattgagctttagtacttttaaacagcttaagcatcacagtaattcggtataataattatataaacccaccattccctgcacaggatttatttgtccccttctgaacgttgactccaaggaccactgccagaaattatcaccaagttatttgcaatgttcaatactgaatatag

SEQ ID NO: 38737 - DNA, 598 bp, Arabidopsis thaliana columbia
aaaataacacactcgaaatttaattttagcttttagccagctttcacattcgtcgtcttggaataatcaattctatgtccttttgtatcttgttcgttgtttctattttttccaaaataacttttatttaatgacgaaaacctaaatatttatatctaggaggagtttgagatgattccctttcactatttatttttgttgccacaaaaataaaagagaagagtttggttaaagacaagacagtatatgtttttttaagaattaagaaaggggaagattaagaaagaaaatatgtaatgtttagctaaaaaactccaaatcaagggaagttaattagttatcttctctttttttctataaaggctggagatatgggccacacaggtggacctaccatgatgggtgatctctgggacaatgcatacagtggtttttgggtccactctaaccttatttgtctctctcttggctcatttagttcattttttcaattgtcatgcatttcacttgctatactctcttttgcttaaaacttattttattaaaactttataatcagaagaagaagaagatccaaattttttattttattttaata

SEQ ID NO: 38738 - DNA, 259 bp, Arabidopsis thaliana columbia
gccatcgggggtctcggtgatgcccgtcacttctgcgcccacggggcaaccaagaagcggcgcaactgtgactcgcccaagatgccgcccacaaaagtgttttgggtctctgtctttgatgcaccagacaccgtcatggtgttggtgacggtgaaagcaccgccatcgcccacggtgcctggtacagcggccaccaacatgcaattggtttcgtctgtgaaggcgccgtcgtcggtttggatccagcaaatgcctgtgg

SEQ ID NO: 38739 - DNA, 453 bp, Arabidopsis thaliana columbia
aataataattcgtgattaggtgtgtgaaaactttgaacatcacatacaatttttaaaaagaagtattacaaaaagaactttaaaacaaatacgattttttttgctctttctctctctttctccccctatataagcatcaaagggtttatcataagctaaacaaatttgctcttacacatcggatcataagctaaacaagcaaacatgttttaaataccgtcagattatctaacgtaagccttaatccaacggtccaagttcaatctcttacaaagtcgcatagtctctaagccaccagaatcgtctcccctccgatatcgaagaatagttttaagttttaataaaatctccggtccccgtcgacggcgtcatcggaagacgaattcgtatcttagaactgtaatttcgtactcggcacagtacaaactttgccggagtagagtgagattacga

SEQ ID NO: 38740 - DNA, 537 bp, Arabidopsis thaliana columbia
tacttaggacttgagtgaaatcaaatcttggtcttttattttatccttcacgggatgtgaagtagaatgctcaaagatttatttggacaatttggatttcggaagataacatcataagaaaacaagacaaaataaagaaaaagggtccattattattttatttgttttgccaaacgccaaaaggcttccattacacgacaaagaacaaaatattaaactctttttgattattagttaataatgcccccattaatagttacatcagaaatgcattgtgggttcttaattatttgtcctcattgtcccaaatgcattcactaggatgatgtggttaacgtcaggttaatggtggaccatatactatgatagtatgatataacaaaatatcatatcaaaatgatttaacctaagattacgacttaatcattctcgtatcgaatcaaattgttcactttgttagaaaagccacttgttcagaaaattttgttgcacatgcagccattttattctcacactttaggctcccgtatatacgaa

SEQ ID NO: 38741 - DNA, 540 bp, Arabidopsis thaliana columbia
gcaaaatcttaaatggtaacttttctagtttttgatttttatataattattatttagaaacgttttaaaattatttactttaaactaaattattatttttcaaaaacaaaaaaaaaagagtttacgatagaatttgttgaaaatcccaaaaaagtgggttttggattttaagaacaaatgactagaatctataaaaatctggattctctataatttagggaattatttttttataaaatcttgaatgggtgaaaaagtggattttgcaaaatcaaaagccaaaatcaactttaaaaaccagtaccatacaaggccttaacaagtttgtatcttaaaaaggcctttgaattttgaggcccgaattgttggctttagtggattggcctctgggccgggcctgtagttgatgctcgtgcatcgtgctacgttcggactttgtattatccttctctttatttttccggtatttcattggcaggtttatttcattagttttctatttttaaagtgacagaaaatacagaaaaaggtaagagttag

SEQ ID NO: 38742 - DNA, 632 bp, Arabidopsis thaliana columbia
gaaacatgtacattaattaatatatttatatcaaagttttttccggctttgaagcttgaaaatactccatatattatatacttctttgtgctaatttgtcgacgctttggccattttcatctatcatcgaggattcacaatttttggtgcgtatcgtttacatgatcgaagaaatagatatccggaaggatattatgacaatgtaaattaaatatagttttactttagtctgttgactatccttatgcttaagcttaagagatagtgtacacgcttaatatactcactttgcatgacccatataaacagtgtaaaggctatgatataactcttcatcacccatattgatttaccttaaaatcacattcaccattgcgtctgatggaagtaatatttaagtatagaatacacccatatatatgtatatttattcataatattatatcaatatatatccacacatacgcgttgacaacacagaaattcattctaacacgtacgtttatttaactttgataatgctagagtattattgacaggtataccgtgtacatggaattaatgttttactcgctgctaataaaatgtatcttccaccaatttaagcgacgtatacgtatattgtacaatag

SEQ ID NO: 38743 - DNA, 563 bp, Arabidopsis thaliana columbia
  unsure (1)..(563): unsure at all n locations
aatgaaatatacaattaaattaaattttaattaaattttcattgattttatgtttatgcatagagacatgttgtcaacacttgagagagtccctttatcaattaaagtttaacacaaatagcatagtcccctatatcaagatcacctgcaactaaccaaattctcaccaaaatcactaacaaatgaaacaaaaaggaaaaaaaaaaaaaacagcatcaatgttcatcttttcccctacatacatatatataaaatctaaaataaacacaattttattacataacatattaagattatatttattggatttcttcctctcttttttaagtgtgatttactgttgtctctaattctttcatcagcaaacaccgattacgtacaaaataatacattattaataacatttcttactcaaaaaaatgcgccaattcaaaggcttgtctaaggtgtgtatataatagtgttacttgcttgcctatactatatataaggagagagagacttctaagatcncctccattttggctacattttttttctttgataaaaacattttactattt

SEQ ID NO: 38744 - DNA, 857 bp, Arabidopsis thaliana columbia
tccgcagttaagcgtgtcattttgtatttctgaaatattatttgttgttaaaatggtctcttgaattactctgctttagtattgaaatattatatttatgcatttcaaaagcttattgtctgcattcttttcttttgtcatgttattatatttttactagagatatttaatctaatcatattatgatattatttaacaacttgtaacatatgcaattatgatgagcagcttctccaaacaatggtttcacggcgcagtctccccgacacactcggaccttcaacggaaggtcatgcatgtacgacatccatgtgatggaaatgctcttcatgcgcactctggacctccgataaggtttgcaccattaatatgaaagaaactgcgttgttttctggtacttgaactccaaacctaggtgtaagagtattaataattttttggttaactattgaaacaaatggacctccaatatattttgttactttttaattaaaaatttaaataaaaaataaaaaataatactaataaaatgaaatagaattaatcccctgtttaactagaaaatgtataggatgattgttactttgtaagtaaaataaatcagaaccgaagttttttcgaataggagacaaatcttaccaaccattaatgatttaattaatactaaaaggattataggacaagaaaaatgacatacaaatacgatcaccaactttctttatacatagtaacagctagacattgtatgtctgttagcagactccccctgtattatatttttgatcaggaccaatttggaatcatcaaaactgaataaagataccaaaggtccaaaactaccgctaagaatatatgta

SEQ ID NO: 38745 - DNA, 427 bp, Arabidopsis thaliana columbia
agtgactgatatcttttgatgaaattttagctctgagggatttgatttgttctttgtttccttcttacattccgttgttggacatccattgtgggttaatttggtgagtttttgcttttgcttgcttgatgaagcatattgatgcacacgaccttagctgcatcccaatgatgaatgatatgaaaaaaatgttaaaagtagtgactgattataccttgattactagtcaattctgagggattctatcagctaagctaaattcaatccttttgcgccatctctttgtttacttaactctctatgtgcccttcgatgattaataatatattaatggttagaagtagtctgatatcttattgatgaatatttcaaatccgagggcttaacttatttcttataaaagttgtgactgatagcttgtgcacaa

SEQ ID NO: 38746 - DNA, 1189 bp, Arabidopsis thaliana columbia
tgattgctcaatcatgaatacacagcaagcaacagccatgaaacaaaactgaaaacgaataagaaagccgagctagcttacagtatgaagcattatcaagatttttaaccctagacatagcgatcccaaaatttctagcaacaacacacaaatactttccgattttgtagcaaaatcgctatgaagaatccgatacaaggtcatgaatcgaaacaaaaacccaagaaaactgagcgacactatagtatcaacaatggcgaagtactaaccaaaagcttcgggttgaagtgcgacacgaagaatcggaagaagatcgccggaaaatagttgagctacgatcggaaaaaacgaatcgggacaaaaatcgcaaacaaagtttcgccaagtcaatacaaagccattaatcgaaacaaataccaagaaaactaagcgatagtatcaacaatcacgaattacttaccaaaagctccgggttgaagaatcggaagaagatcgccggaaaatagctgagctacgatcggagaaaagtgagagaaaacataaattcgaaatttctggagacacagagacgaatccagaccctgagatttcttcaaaagttaccgtcagattgaggcgaatccacgtgtcatcatctgcttttcagatatttggcgccataatattcagttcgtacaatcggagacgtcatcgtcgcaatctgttaaaacaaatctgacggaccgttataattgacggacgaaaacaaactgcaagtggcccaacacaactttcatatttacattactaagccccttccctcacgttcacaaatatataccttattgggcctattattttaaggcccaacagcattaatcatgcaatctgatttacataatcaataaaacctctataaattaatactcaaaaaattaataataaattaatagattttttcggtccgaattgtgactactattaaaattgatacaaatcgataaattaataagataatattttttttgaaaactttatataaatatatggttccatcaatagtacttcatctattttttttgtttgatattttaggaaaaacacaaatattaagaaaaatatattaaattttgcttttaaatttattgttcgttgtgatgacaattttcaataactttaaaccaataatattcaataatttgtattgaag

SEQ ID NO: 38747 - DNA, 655 bp, Arabidopsis thaliana columbia
gatcccctgtagggtccccatacatcgtctcaatgttgagtaccctacccccaaacatgatatgcattgtttatattttactaggatggcttattgacttaccagtgatcaaattgaagttaccggccccgccagtttcctttgttaactcatacacgcagtgtaatgcctcagaccaagactaggactaggccgaggaattttcgttaaagatttagcaggccatacaatcggagcattcgaaagaagtccttacgggacgagtattgtttcgtccgaccaacgatctcgcagttttggggatacttgtgagcaagtggtcggggaaccggatgggtgagtcaagaggaacatggactagactgactgagattaatgtgttgatgtgttgagggaatggatcatgtagattatgcttgatgatatgggcttgtaactgatcgggcctagtgtatagccgagagtgttgcttttgtgtaagcaggtaagaagaacgagtggcctataatgatgaagatgagattttggataagtatggtgaaatcaaatagagatgagattttggataagtatggttatggataggaacaataatggatagggcgaaagtggataaagatgaagtatggatagggacgtgagtggataaggatga

SEQ ID NO: 38748 - DNA, 586 bp, Arabidopsis thaliana columbia
ctctagtaacggtccgccagtgtgctctaaagaagctctgagcaacatgctatctgtttctttaccccctccctgtccgagggggggtagcatccttcaacgtggctttaacccctggattgggaccacgtaggcattttaatatgccgattaagagcctcacgaggcatcaaaaacaaccttggaaggccagtactgcttattatatagtatgtactaggcaaggatgtctccttactgttgaaatacaccatcacagtaagtataaaggtgtatatagtctacagagctgtaattcctgatggttgctctagacttttacttcctatgggaagattgagagctttctactatagaggcttatatattggctccaagccagtcttctagcagccatgttgctgcaatttacaccttcttacctagagatagtgtgtttcccaggctctgggctgaggctatcctgatcaaactcatgctaaggaagtcctttcttgttattattgctatacagaataacttccgatacccatggggataacctgacaagcccctgctattaccaaaggggagattttacatgaca

SEQ ID NO: 38749 - DNA, 689 bp, Arabidopsis thaliana columbia
actgtcacaatctcaaatcaggtctcgacgaatgcagcaacaaaaaacagagtgttccgattcgaaaagacggattcaacgacaggatcattcagcagtttctcgtctctgtgtcggaatctcgttcttcgatcagagctttaagtagatctctcgcctcgcagctacgaaccgtcggtggcaaagtttacgagagactctctcttcttcttcaacctttcgatgtaaagatcaactcttttgccaaaaaccctaaaagtctgatcttttacctcgaagcgattctgagcagagccttcttcgaggatttcgaagctcctgggtttcagaaaaacgggtcgacccggattttgaatccaattgatcgttgtgaatccaattacgcttcgtttaacgtcttgatggagctgacgtgggatgaggtgttgagcagaggaacgaagcatttctcggaggagtttagccgtttctgtgaccggaagatgagtgacgtcgtttcgatgcttagctggaaccgtgcctggcctgaaccgcttttacaggtaagcaaatgttaaaccaaccaaacggttaataatggtttatttcgaaaactacttggattgaaccggttttaatggcaggctttatttggtgcgtcaaagagtgtttggttggttcacttttggctaatcagtgaaccggggttc

SEQ ID NO: 38750 - DNA, 544 bp, Arabidopsis thaliana columbia
tgattgggaatatagaagtgaattaaatgtgtgatcctcaattcctcatactacataaggtgcaaaatgaatttctaacataaagattataggagtaataaaaacgaaaaatagccgtgaaaatagctcaagtaaaaaaaatatctggaatttagaagaatgcaaatggcttcaggacaactttaacttctagtaagttaaactcgagtttcgtgtaatcaaagtaagtgtctcgccagtaacatgctcaccaccaatgacaatattgcccctttcccttttcttttcccctgcaataaggaaacaaaattcattttgttgcaaatacttatattggaacgaaccatttctctaatttttttattgtttttttttattcttaaaaatgggataacattttagtgcataacaaagttttagacttaaggttgaaaaaacgaatctaatgctttacttaaaaaaaagatatcaactttaacgaaaaagaaaattcgaagaatcttaccgttaccggagaagccgaaattgctaaataaccagtgga

SEQ ID NO: 38751 - DNA, 539 bp, Arabidopsis thaliana columbia
caaatatcttcctacatgtcactctttgtactgtagatttgtgttcatgcagttccaatttgaaattgattacttttagttggaaattgtttgtaagcttcttactttttgtacctttcataaggtcttccatgcttccttttttttttttttttttttccatgcagatgtctgtttcatggttttgggtctatgaattcgctttatctgatatatacttatctttctaggtattattataacaagcggacaaagcaatcaaattgggaaaaacctcttgaactgatgacaccacttgaggtaatacttacaaagtagtctgtcttctaagatgattttcattttactggttgattaagcttaccaggcttttagttggtgtgcacttcactagtgatgtaaatggttgcagctttgtctggaacaacgttgtttaatttgtatatttttttcactgattcggaaactccataactgtggagatatttattaagactgctacgtgctcatctgaaagcagctttcactttattgaaaca

SEQ ID NO: 38752 - DNA, 554 bp, Arabidopsis thaliana columbia
cttaactccggatgatccttggcgagtttgcaggagagcttgtattggaactgttgatatgaatctggaagattacctacaactgctgctctatagcctcctgaaccttctataccatcctcagcccactcacgcatagaaagtgtctcaagcatttgaagagcatcatcgcgaatttgtctagatggatcgactaccttgtagagaattagacttaagagcctctggatttcacattttggtatttcttgtcgcatgtaaacctcagccaacacactgaagtacccatcagctatagccgcatcagagtagtaacactgggaaaagtacagatgaattaggtcatgcagtttagaagagtctaatcaaggatgtagtcaaacagatgagcaaagcatagaagtgaaaaaagcttattaagagaattcagatgcttaaactggagctaataaaacaaaactatctgatacggaaccatcactgcatggataagttgtcatcattggtcaagatttacaaacatctgacctagtaattacaagacgacagtataa

SEQ ID NO: 38753 - DNA, 483 bp, Arabidopsis thaliana columbia
tagaggatccgtgatattgtatacaatttaatttctctggttaaagtttattttgaatgttgttttctatttttctcaaaaaaatatctcaaaaatattactcatatggcatatatatttttagtatatatattttattactaacacccgcagattgtgcataagatggcatcatatattttctgtgtattaccaagaaagataatatgtttttgtttctgttatgattggagcgcctcttgtcagagatgatatgcagctttttaaccttgcagcaatcagctaactcaagaagatcgaacaacaagagatctttgctggcatatagtgatagaagctccttcaactttgtgaaatccatacaaggaagatcctgggtaatatcattatccactaaggagatacaacgaagagactgtatccccaatctattagccatgtcactgttgatgctaggatgtacaaaccttttcccagagagag

SEQ ID NO: 38754 - DNA, 614 bp, Arabidopsis thaliana columbia
tatagctatgagttatgagtcgttgaaggactcagagacttgatgagggctttatagagaggataacttacacgtaggttattgtttgttcacgtagaaaagtttttctcgaatatccactatattactgggtccttactccttaattacgccacctttaccatattcatgcatgtttacatttcccttttttcagcacatttcccttttttgttttctaccaagcatatcttattatacaaattaaaactctaatgttcattattcgtcgggagtatatacgttttaaggtgagcatacattattaaacttgatatatccataaccatatcaagatttgcgatatactatataataaacatatatagtaatgtacattattattttagtttatgttatagatagatgacagtaattataattcaaagttgtgataataaaataactaatcaatccacacgattggttttgatttgaaagcaaatgaatctttacatgatattaaagtagtagaatatgtgccatctaatttgaatccaaagtggttcgatctaaagttttacatgctaaatttgaagggttcgtatcaaacctattgctggtaagtgggtttg

SEQ ID NO: 38755 - DNA, 497 bp, Arabidopsis thaliana columbia
attgatacgtaagcgagccactacgtttggctttttactcaaattggttacctttttaattcctttcgttgccaaaagttcaattaaattccttacaaattacttattttcttttgatgaatgtccacattgcggttaccaatatatatttctaattaaattcttacaaaattaacaatgggccccacaataaggaaacaatggtgttctttttacattgaaaataatattaagggtgttgctaactaaaaaacaaatagatgtgggggctgcttgttagatattttcaacaaaaaatacaaaaatgttcttcggagcttcctctgacacacaaaaacttcacttcactctctcttttctcgtgatcctcacattttcaatcactaaatcaaatcgccaaaacataaacagagaatcaaatataatacaatggaaattacgtttctgtcattcaccttctgaagaagatcttacgcttcttttttagtatatactga

SEQ ID NO: 38756 - DNA, 767 bp, Arabidopsis thaliana
ttgcgtcctttcttatttttgtgtggttaacagtttgaaagatcaaaagaagaatgaagattgatttttctgagccagagtgcagtaactgttaccagtttaccaatccagacctacttaatactccagaatccgaacagagcaatgtgattggctcatccatcacttcagtgccggttaatgatggaccagttccacctcttgaacttgattctgctgctgttgtttcaacttcaacatcatctccagttcaagctcttggacatgattctggtgctacagtttctacctcaacatcatctccagttcaaattttttcttcaccattcagcttcggatccgctcatgctgccatcacacccgttagttcgggaccagcgccatctcctacatttggtgagcctcgcattctcctagctacttctggttccggtgcgtctgccacttccacatcctcaacttcatctccacttcacagttcttcaccattcagtttcggatccgctcctgctgccatcacatccgttagttctggtccagcgcaatctcctgcctcatcacctagattatggatcgatagatttgctacatcatctagtgcatctgccacttcctcatcctcaacttcatctccatttcacagttcttcactactcggattcgctcctgctgttacatcagttagttcggcaccaaccccagcttgtggtccaacccaagcttttggtcaaccaacacaagctttcggtctaagtatgttcggttca

SEQ ID NO: 38757 - DNA, 531 bp, Arabidopsis thaliana columbia
tttttttttttggttattatctttcttatgatcttggttcttatcaggagatggagtttgctcgttctcttagaaaaagcaaggttaacatcaagttttgtcaggtagacttgagtgaaaattgactagtagctgtaataggcaactgcttcgaggtttctgggtctgattaactgaattccgtgactgcagacctctaatatgcttactgaatgttgcagtattcatatgagctgttacttcagtatctacatagtacagtatcgactttaatgcttggtattattaacgagcacatcaatttccaaggtaaatgtgtttctttctcttatatatgcgatacgttgtagcagttttttgagtagaaaattgaatcaattggtcatggataatttgttgcagtctactcgggacagcctacttcctcatccgatgacatagaagctgtcaccattgtcgggagttttcaggacactgctaatcacattaatcaaaaagaaatacagtggggagtacgtattcccctaaagt

SEQ ID NO: 38758 - DNA, 433 bp, Arabidopsis thaliana columbia
tgacaatattgccttatgtgaactttaattcctttctcatcaatgtataagttaacttaaaacaacaatcaattatttttagttatctttcactatggttgtttgtttcttgactgaaacaactcttaaataagaccaacgcacttgactctgtgaaatgagaaaacatgtcaagaaaagattatacaacggaggatgaagaatttagtatgctaatgaaattttccgagtaataagctaaatgggggcttagagtaagatatattgggcctaatagagatgagtgggcgggcctgaagaagcccatatctgatgaagtggtcggctggttcgtagtagagataaaatcatgagactatgagaggcaaaagtgcaccggaaagactccacgtgcacatgtacggaaagatacgtggaggaaagcaagactatt

SEQ ID NO: 38759 - DNA, 500 bp, Arabidopsis thaliana columbia
tgctataaaattctaatattgagtttagaaattccaagagacaaatatggtcattatgttggaatattcattttgttttggatcaagtttaattatcgatccatttatggaaccaaattcaatacaagatagcatttctagagtttctataaaagtgtttaagataactgtagacaataaggagtgacaattgatcacctagtgtcaataatcaatatataacccataatcgacgtttagacaatctaggcgtttaaaaagtttatgagactaaacaatatacattagaaaaatatagtataacatatgaaatttcataatatatataatcagtaacaacgtcatatataaatcttaaaatagattcaaaatcaaactctaacaataaaaaaatagaaatgccaaagcaaaagctagaaacataacactaaatgcagatgtaaaagctaacgacaatgcaaataataataatgctaaatacaaacgcaaactctaataaa

SEQ ID NO: 38760 - DNA, 597 bp, Arabidopsis thaliana columbia
agtaacggccgccagtgtgctctaaagttgaggaaaggtagtgataagtgataggggttgtgtgctgtcctccgtcgagtgaagctaaatcggaatacaagctctggcgaacagcggacttgactcgcgagctggggtaagtcgggcggtgatggttcaactcaatccagttgcgtttgtcgtaaaacaatccaaattggagagtatccaaggttggcctggggtctcaagatcagtcaagatctcaagaaaggtcccagtgttaagtgactgattggagataatgatgtacttaggcgaatgagatttgtcgcttcagctttggatgaggtggccggaccgggagatgttgatccattccgataaatctacagtcactatggtcacgtgtacatttaggacagagcaactgaaccagaatttattgactgtgacaagcaattgatcacattagtcgattattagtggcagttcatagagcttccgaagaaaaaaaaacattggtggatggatcataacgcataacagctagcatatacatcgtcatactggaacatcaaagatggtatttcgccaggtcctgtgcaagcctggagt

SEQ ID NO: 38761 - DNA, 451 bp, Arabidopsis thaliana columbia
agttcagaagttgcctaaaatttattatagatctgttagtatcacatatgctataattaacgaaacttgtatctttatctcagatggtgaaaaacattacaatagctgcggaggcacaagagaagttcgttgatgaaagagaacaagctcgtgagaatgaaaaaccatgaatgaagaataacgtggatgagttgaaaagacgtatgcatgaagaaaatctgcaggaatgccgcattctctaatcaatcattgacaaacatcttttatattcacaagctttcgggcttgctctgagtgttatgagtctgcttttgcttatgttctgaataccatcgataatatatcccttaaatgatttggtgagtctacttacacagctcatatgcatcttgtctgcactatgtataagtgcatatgagctttgtaaggagacgcattgcgtgagacatgt

SEQ ID NO: 38762 - DNA, 916 bp, Arabidopsis thaliana columbia
atattaatcatcactttggacatatattacaaatgaaattgtcaactcgtaatagaaatgcaattaaattataaaataaaaaattatttacgggagttgaattatttttttgttggcaaccgtagaaattttgattagatgctcaaatatagaatcattatttattcgaatgcatttaaaggttagccattagcctttgttcgtgaagctattataagcctatacctatattacttatcttaatctataactcccaatttctctcgaaactaaataattgtaaagattaaaacaattttcagttacataaaaaaaatatacttgtaaagattaaaacattttacttgtactagagaatttttatcaagtgataattaaatgtgagcaactgagcatgaagcctccgtgtcatatacttactagttttggccatgtttatttatctgcaaccgaaatgggcaaattacttttttctcttatcaccttgacttttgttttttctattaaaattatttttaatattatggctgtgaatggtgactgcgttttgcggtacgaaaaaagtgcggtgcggttcaaatagtaatgaaaatcagcactgttgcgatacggttttaagtgcggttttggtcaccattcacagcctataaatcattatacttttgtccaaaaaaaaatataaaaaatcattacagtaaatagtttattttttgttacaaagatataattgggtacgtaagaagtagaatccaagagatacggtaggtacaagttataaatcataacatgtagtctccatctgttcgcattggcgtcttgtagacatttaatttttatgtcaagtatatacttgcacattgcacttgtatatcaaatttgatgattatacaatgacgtagtaaataccagagtgggg

SEQ ID NO: 38763 - DNA, 654 bp, Arabidopsis thaliana columbia
  unsure (1)..(654): unsure at all n locations
ttcatcatacttttcatgtttccatcaagattcatatgaatacaaacatctcaaactctttttctttagtggtcttctatcaaaattttttttttttttcttttggattgtaaacgtaacgtataacaggaagaggaaactacagcttgtgtgctgagccaaacgatgagttgaatgttgttgtttccaagaaagtcttaccttgagttatgcggaggaaggaggaagctatggtggtggttgtgggcggttcatgagattgtgttggtgctgagatatgtaatcagatgggtggataacatagagaccgggctgattcagattgacgaagggctgagaaggatgatgaatagctgtggatgaaggagggcgtgtagctgagagtgagaatcctgatgatgctgcatttgaaaacagtggcggtgctgtagctgctacggcggtcccaccactggactgatcatgcccttgccatgtcctggctgggaagctttgatgagaacgtaacataagccctttctctggtgttcttcctggagacaagaatttaacttttaggacagaagattattcattcaaatcttcaagaatacacaacatagaagaagacctacaagcacnacatagacatgtcncaaaggatacaaagagttg

SEQ ID NO: 38764 - DNA, 1185 bp, Arabidopsis thaliana columbia
tattgaattcttccctggatcagttaagtacttgagctcaactctttgatatcctttgagaacaggtctatgttgttgcttgttagttcttcttctatgttgtgatattcttgaagatttgaatgaataatcttctgtcctaaaagttaaattcttgtctccaggaaagaacaccagagaaagggcttatgttacgttctcatcaaagcttcccagccaggacatggcaagggcatgatcagtccagtggtgggaccgccgtagcagctacagcaccgccactgttttcaaatgcagcatcatcaggattctcactctcagctacacgccctccttcatccacagctattcatcatccttctcagcccttcgtcaatctgaatcagcccggtctctatgttatccacccatctgattacatatctcagcaccaacacaatctcatgaaccgcccacaaccaccaccatagcttcctccttcctccgcataactcaaggtaagactttcttggaacaacaacattcaactcatcgtttggctcaacacacaagctgtagtttccccttcctgttatacgttacgtttacaatccaaaagaaaaattccaattttgatagaagacccctagagtttgagatgtttgtattcatatgaatcttgatggaaacatgaaaagtatgataaatgcttagtgaataggacatcctaaggaagagttccaagttgaggcaaacacatattagacctcctgttttctgcttctctgtaaatctcaaacacatatttgaggcaaagttttcctaagatcatacaaaactacaagtaacaacatactttgtatttgtcaaaatttacaattaaaaattctaagggatccttaccattggagatggtaaaaacaactatttggagctcttgtcgccacgagaaagaaactcagtaatcttctccagagccaccgtacgaccaaactgagcaaaaccattgcaaagtccagtctctctgtctaggtcaacgagagttgacttcaacctcttccgttcctcttccacctctctcatagctacaaccaccgaagaccttttcttaacagcaaactccgccgtcaaactaattgacctctccacagactccaatcgactcacgagtttactaattttctcacttgcttgagaccacgataa

SEQ ID NO: 38765 - DNA, 460 bp, Arabidopsis thaliana columbia
tcatatcctcatatggagtcccttgattagttgtctcactagattggatgagacttcgatggaacacatccaaacagtgcaacccgccattgtcacccaattcatcggatttttcctgcgagtctaacgatctttctgatttggtcagcacctcgctagttggcattagtgttttgaagaaccgaacagctacttctgccactatacccgtttggttcggtgtaccggtttgtagccctaataaccggtcgagaacgaacagaggaagttggttttccaacattatcatgtcacgttgaatcgaatgcatcaatcctcgcttagcgaaaaccgggtcgttacgtgcatatctattcagcacacaacagagtcaacagtttaagcaatagaaaaaaatcactagataaaatttagccaggcttacccaattttctggaatccttgaattgttcccttgaag

SEQ ID NO: 38766 - DNA, 580 bp, Arabidopsis thaliana columbia
tagtaacagtgtgctctaaagaaaacacaacgcatattcagttctactgtcgcacagcgggtggagatctatgattcgcaagaccatcggatacatcaaacatccacacgccattcttcccgcagcacacccgttaactacgcgaggccgagcaatacagcctgcaccgaaaatgcttctcgaccactgcagcgcgaaggaacaaattccggccgatcacacggtagcattgtccctcatgaggattgggagcgcgtcaagagtcgcggcccagcacacgaggtggcccacaagcaagaaacctcatggcttacagacagggaaaagagctacaagagctccgcgaaggaattatatgagcagacgtccgagatataccaggaattgttaggagatcaggcctggagggaggctgccgacgctgctgccgcgtttgaacattttccagcacagttcgatgatacgaaaagttctgatgatctcaattccgtccgaaaactagaagaacatcttggggataagacaaaggcgaatcattacatatttacgctttacagagaacttccttctcctggggtga

SEQ ID NO: 38767 - DNA, 970 bp, Arabidopsis thaliana columbia
tcaagttcttaaccgttggtccggcccggtccgtggcagaagctcataaagctagggctttagggaatcagatcttataaaaaaatttagggttatgattttctgaattgttcaataggtctagtggttaagcttgaattttctctattaacaagtcatgagttcaaggccactatatgcattcttttcacacaattttctagtcttttcattggggcatcaattatttggcttgctttaggcagcccattcattcgggccggcacgttggtcatcttacgtaggcatttggatgtgaagattcatcaaaactttgccttgatcacacattacctcttgcctggatcacacattagcaccggactttccgtgctactcttcttctccatctccactgttagttgtaaagaacggtgtcagaaatttttgtccaatgacgtagtgcttcaaagttttgttaagtgagacccaagaaatgcaacagacactttataccgaggacacgtactaagcctaagcggctaagcctttctcgtacttttaccttttgtggaaactctttcagcttcagaagatgacgtatcatcttcaaaaacacaaaattatataagcttcaatcttcaacacatgtatatttgacttcaagttcttaataattgaaaattgcaatgaatttaaataaaattctatttgatgtttgctcctactctaaaaatccgtgaaaattatttttggggcttattaactcataaatatataagtatatataaaaaaactcataaatatatataaaaataacacaaaaaaaaaaccatcatttggagcaatgaatttatctaatgaaattattctattctacaatttctattgtgaattgattgtgtttgagaaagactaaacgctatcacgtaatttgtgttgcattttcaacaaaaaatatccaattaaatcggatattaacattaccaat

SEQ ID NO: 38768 - DNA, 589 bp, Arabidopsis thaliana columbia
ccttcttaagtttctccatttgataattcactcaagtctccagctcctcttcttcttctcgttgctttattcgctctctttcactcatcatcatcacactcaaagatttctgttgtattggagcaagctctagcgaattttcgtactccccttgtagaattttagtttcctgttttagatttcgaggaatctcgctttggaaactttaagctcctgttcaaagtttctacctttgtttattttgtttttgttttcttctctcttatctttcgtcatctttgattaagtaaccactttgatctctcaatttcagcctttgggttgtctaatctgacacgttcctctgtcttagctttccttttctcttctcgtttgtgggaagcctacaaggattaattattaaataccaaccccaaaaaattcttcctttttgattctctgattcgtccctttttgtacatggtttctgtttggttgttagagcttcttgctgagttgaattgagctggttgcaatcactctgtttcttgggggttgatcgtgtattcaagtggtggatgagtctgttccatgtgctagggtttggtgc

SEQ ID NO: 38769 - DNA, 582 bp, Arabidopsis thaliana columbia
ttctttaaaaaagtaatatataatttgtatagcatatgttgaagaaaattttattagctaaatgttcaaaaaaaataactcattttcttaagacattttatttggatttatatgcgaaggttttatagtttttaaatcgttgcaattttaggtttttaggtgtgactacaaaattttaggttcacaccgatttactcgtttccttcttatgaatactaagatttggagtataaatttcaatgactcttcaaaatacaagatacaagtaatttattatttatacaacaattttgttctcaaccaaagatattaaatctactgaaatttagtaatgaaaaatataaaagtaataccctttttgtccagtacagagaaaaagaaagtccaaatagactattaaaacgggccccctattaaaactcaaaaaaaaagaaatataatatttgaaaggcccaaacaatcaaggcccaacaataaatggcaagacgtaaaatatctggagaagcggcttttagtcacttgacaaatacacgtagaaacgtaaaagttttgaatagtttggtactttagtgttgactgttg

SEQ ID NO: 38770 - DNA, 505 bp, Arabidopsis thaliana columbia
accttagtttatataaacctaaccttcatccataactttcacaaaaaaaacgataagagctattcgttataacaaaaaacttaaagaccaaacgaagaagcaaacgttttgtgttgcaaaaatctagccgggaaattaatactagatatatatgggtcgaccaggtaatcgaccggatgaagcacaaccacctccggttcaagttcaaccaacggttaaccgggacaaccaggtacattcccaaaacggtgcaattggtcaagcaaacatacaaacgggcagaccggtcaataaccaaacgcaaaatctctggagttctgatcttttcgattgcatgaatgacagtgaaaatggttagataacttttaattaaaatacaatcaattacgcaattgtacacacaagcataacattctatgattatttcttaattttgttgttgttgttgtgcattggttcagctgtgatcacatgtttagctccatgcgtcacgttaggacagatt

SEQ ID NO: 38771 - DNA, 481 bp, Arabidopsis thaliana columbia
ttttgtttatagatggatgaagctaggttttcgaacggctccattttctagatgttagtcttactagagtatcaccttgtcggagtttcaggttttttcctcttgccttggtcagttaaatagtgtggcactttgatatttgttttggagctcgggtttgggcattctgtggatcagccgatccttggattttgtttggatgtaggttctcaaggctgtggatcaaagatttttagaagaagaggtgaattttagatttccaaacttggtttaaatattatatctggttgaaatattggttataaatctcgacaataagattttaaatcctttcatcaaaaagaatattattctcataattctgtcggacaacagtgatggaaagaataagaatttttatcattattaacaagatgatgacgtggtacaatgtcatcaaaaccgtgacatccacgtcaccaacgttatcaaggacatgaca

SEQ ID NO: 38772 - DNA, 442 bp, Arabidopsis thaliana columbia
tatgttggggtttatactgttcttcctaaattagagttcgaattcaagagtagtgatcatataactttcgttttcctttcaatctttcataaacgaatccaagtaccaagttaaatgcatggttacgtattatatactatatataaatgtaatcatgttaatgttacaaatcaaatcagaagaaacaaagttatacataaaggagaggatgttttgattttggtcgaaaagaagttcaacgtcaatcattgaaagaatgaagtaaatagcagccaatagaaagggaaaccacactacagacatatcaatattacataattttttaaatataattaattatccatatccacacactaatctttcattcaaattccatattacaaaaaaacacagaagaattattcttaaaggcaaatttgttctttagacttatgacaagagg

SEQ ID NO: 38773 - DNA, 382 bp, Arabidopsis thaliana columbia
ctgttttatacaacccaaaggttttatattttcatcgacaaggcctgctgcaaccacattgatttgtcatgtcgctttcgtaccatcatcttttacatccagtttcttcaatactcctttccttattgtcctaatgtacattcgaaggatgaggccctcgtagtcatcggggatagatgtcattcatcccccaacatggaatctgcaccatggccgagatcgaccgctaaaaggacatgagggtgacaggcacgtatctcttaaaagtgtgctcaacgcgtactagggcactcccgctactggagtccccctaactactagcaagagattctggcgcgaagatttagttgatcgctcaacactagtgtataaatgctgcctt

SEQ ID NO: 38774 - DNA, 617 bp, Arabidopsis thaliana columbia
tcgcaatttgtgaatttttgatcacaagactacggttctccgataactgcataaacttctcgatcatccaataatgattcatttgatccctgtgagacacctcgatcacgagaatttgctttctcgatcaacggtaacttttctcagtaaatcggagtttctcttaaccgtttctctcttttttcctcaaacaacaaaataaacggaataaatcgactatttataggcaagagtcgagtttcatgtgtcgtcgtgcgtcaatacgtatcacggacgggggtcgcggtcggctacggaaaagtctccctacaagtgtttgatgttagagtgtggtttgtgtattttaaatgggcgttggtttttcttatgaattaattactcagagagtatagaaaagtatgtttattcccagaatattatataccttttttattactcatatgttttgatcattagtgtaattacaattaacacccttgattaatttttattaataaatattattaaatttgtttttaattgaaaaataaataaataaacaatgataatccatgtcaccaatccacgtcatttaccctaatccacgtcatctgaaaccaaaaatttctataaaactt

SEQ ID NO: 38775 - DNA, 513 bp, Arabidopsis thaliana columbia
taaagttgcagagaaaactagattaatgctcaaattgtagtaagtagattggataatttacactcggaaaaaacaagttttttcagaagaattagactgttgctcacttgagaaaaatctagctagctttgttaattgaggatagttagttatagtatttgaatgacattaaggtgtttgaatatcgcatgaattgtcgccttggtatttgggcaattaccggtcattattttgatctttgtgatgtcaactaatcgatcccaaccatatatatcataaactactgtctcttaattgatccattgtgtttttaattttatcattactttttttaactagttgagagaatgattatctaacccctttcatattcagaaaacttaggttttgagtttttgctttatttgctgctctcttgaattaatagagctctcgtatgcgattgactttgggtgatttttttttgttggaaaagcaaatttcattgaccaatatgactagactaacacacta

SEQ ID NO: 38776 - DNA, 937 bp, Arabidopsis thaliana columbia
taattgggttcaccccctagaataatctcttttttttttttgctttttgtttctaagattcatagtttgtattcaaccatagctttatttaatttgttacttaattgcatgatatattatataatatttttcttttcaaatatatttggttgcttggaaaacaaataaatgatatgagatttggttttcaattaattgtcatttactttgtattattgactttacatatgtgtgaacaaatttaattgttggtttagttgggtagttaatatcaaactaaattttctaaaatatttaggtattagatgttacaaactctagagagaaatggatattaatatatctatttatttatttataaaaaaacaaattttagataaaagttagatatacaaccaattaaagtgggcttgcctcatattataccattatatataaaaatttctaagatttatagttttatactaccatagatttatttatgaaaatattacattctagggcacttttaaaaaactatgtacggatttagacactttaaaatgataaagcactttgtcaaactaaattgtccaatttaccctttttaactgcaaactcattctctttgtcatatcttctcagcgcttctccatcgattttatttttctatttccaaaaccaaaatcaaatcttttacgaaaaatcaaagttcaaaaacgagggctttatcttctaatctccgacatatttgctttgactccttgctatgattgtttttaaaaagctaatcaagacatgatggcgtagttggtagtagcggtggcggagggagctttatgccttattcgtcgttttgtttggtgcctctctgctcctaatgactctggtatctctgatctacaaaattagaaagttcttaatcttattccacatcagatctgtaaatttgaaagta

SEQ ID NO: 38777 - DNA, 447 bp, Arabidopsis thaliana columbia
tctagaggaagtccaagagaaggaagatccgaagttgtcgggccgggtcggataagtaatctgggaggatcagttgagctgtgggctataagcagataatgcaatttttgatgattacattacagactaagccgaaaattctgttggaaaaaccggtcgttatttcccaatttattgagagaacctatatactacaatgcctaaattctattgttcttgaatcttttttaagaggtaaagtttatatataagaaacaacagtaagaaataagcaaaagccaatccaaaatagaacgttaatctgccattcaaaagaaaacatccattgttgacaacttaaacatgaattagcaattcacgttattttaatatttttcccccgaaggcgagtccgaaagttatcagcttggcccttaatctcttgcctttatggagcctctccaggaa

SEQ ID NO: 38778 - DNA, 748 bp, Arabidopsis thaliana columbia
cagtgtaagaacattaatacaagagtagattataatagtgtcgataaatctcaataagtctggttcgggacaatgtaggaatgcttggagttggataccaaacgaaaacaggagaatcaataaacatatctttcaagagcaagtcatcagctatgaacacgtcgcttatgctagataacatgactccgtcgttgttgttgcaatccggtgagtgtacaggcaaacgcgaaaaggactcagagaggagcttctctgctttcaccgtgtcaccatgtcgcacaacaaagctccagaacgcacaacactcatgactagacaatctgttcttagttttctcccaatatttccacaactcgcagtaatcttcaatagacggattaattctcacgccaaatgcagatgagaagaaaccaagaaggttatgatccttaccactacaatagtggttttcaagaacgttaaactttgatccaaagagcttatctttgtcaaagagcacacaactagaaatatcagcccatttctcatcacttggtatccaaatccgacctgaagaggcacctttctcaggtttccattcagcttcactaagaaatctataaacccgggaaatagcatcagtttctgagagtttatagacatttcttgcaagcaactggcaagctttgtctgaatcatgaccaactcctatcgcaataagctcttctctaaacgaattaatatctgagccataatactcttcgtcgat

SEQ ID NO: 38779 - DNA, 586 bp, Arabidopsis thaliana columbia
gacaatgccagagagcgaacgttgggacgcttgccttgcaagacccatcagcagcttccacacaccttgcaatcgcctacaccaaaccaataccggaatcaaattcacttataaccgcccttccggtttctttcatgccgtgaaaccatttgtgtatcgacctcaatatgcaccttcttattgctgattcaaagacaccttgtaaaagtccttgtaagttgtaatactaactagtttggatttgtgaaatgctaatatggatcaagcttaaagtgttttgatgtaaggataagagaagtttgtttatataaaagtctttagtcaaaagtcaaagggagactagtctcacaaggcggtgacgggggaggtaaagaacaattaattttgaatgggtcctacagatgacgtgttcaaatgttatagggtcaacaacgtgtctcaagtattttgctgggagaaagacgaaaatatccctatcgtcattctttgcgtcagtcaactgaaaaattgaatttcgtctagacgaggaaagcaataaatctaggaaatcaaaaatcgttataagaagaaacagagaggttgcgac

SEQ ID NO: 38780 - DNA, 450 bp, Arabidopsis thaliana columbia
ataaaataaggagaaaataaaaaaaaaagagaaggagcagaagtagcagagtgtcagactttcacagatctgacgatatccttgcaaccaaaagcgttgaagatgcgctcagaccgcatgttctttctcatttctgcctctcctttttctcttcccttatttctcataattttttttttaaaggaacactttatcttatcacgaatatattcacacattttcatttcacctttttaatcctttcaagttaccttgacttttatcttctttttttaaccttacaagttacaactccttttttagaataattgaatgtgtctttaactcataattttattgcatattccacattccataattcactgacggtagacgtaaagatatttttttctgggagatgacgatttaattatatgtagtaactaaaccaaccagatattttgaatagtc

SEQ ID NO: 38781 - DNA, 179 bp, Arabidopsis thaliana columbia
actaacaccaacaatataggaccattatctttaagttcctccagcagttttcttaagccaacttctgcttgagaatcattctcaaatgtacgtgcattgtcaccgttgtgctggagcatcatcagtactattaccctatagttaggagcatttgacaccacatcaaagacgatacacaa

SEQ ID NO: 38782 - DNA, 540 bp, Arabidopsis thaliana columbia
cttgtttggatacaaatgacaattctgtcacaactacatccgtagattcttcttcttcttcagagtctaataaaccagtaagtgaatcagttgaatcaagcaatggcactgccgaaaaagcaccattgacagcacgagagagactaagagcggctcgtgttcttagccgatacactgaagcaacaccgagaccgtgagaacctagaatggggagccaacttcttgatgtgctcaaggaaagtgataagaaatcgaagaggaaaccgggtctacccgaagcaccaactaacatgcttgatgatagcaggagagggatgccaaagagcggtcttacgtttgatttaccggagagctcggatattctcatcattgctttctcgtttgtgttcatagagcacagtcatgtatgctacgtacttttgttgtttggagactcggtgcgatacacttcaacgaatagtagagttgagatttggagaggtttaatggagtttggaaccatcaagcaaggaacgagagagagagagtgttttgttcgat

SEQ ID NO: 38783 - DNA, 767 bp, Arabidopsis thaliana columbia
ctaaccacgctgtatcattgtatgtactagtgattttaaattatgagcttttcaaatacgcatgttatattgggccgtagaaacataaaggcttaatttgaataagccgctttgaaaaaggcccaatctaagaaaggcatactctcgcacgtacgaggagagcacgttccgtctatcgaacaacgtgtggttaacgtaaaagaccaaacgcaaacgcagtcgttttccttggtcattgcgcggcaagggaccgagtctgagaagtcaaaggcgacacgtttgctatgcaattcgtctccttcgtctatctacatttttatgaaccacacattgatatttcagtgatcccctttttcgattttcagcgattctacaaacaagtttttgttttttttttggattctgggttttgtctgagaagtgaaagaatgaacgattgggctagtttgggaataggttctattggggaagctgtgttttccaagctcctgaaagttgtgattgatgaagcaaaaaagttcaaagctttcaaacccttgtccaaggatctcgtatcaacaatggagatattgtatccgttaactcaaaagattgattcgatgcaaaaagagcttgactttggtgtaaaggaactaaaggaacttagggatacgatcgaaagagctgatgtagctgttcggaagtttccaagagtcaagtggtacgagaaatctaaatatactagaaaaattgagagaatcaataaggatatgcttaagttctgtcag

SEQ ID NO: 38784 - DNA, 847 bp, Arabidopsis thaliana columbia
aaaaacaatgaatctggattcgtataagtcaaatcatgatagaaaaaggtcaacccaagttgcgatttaccaaaaaatgtcgaattgagattcgaattacgaaacccagattgtcaaattatcggaattaagtaatttttcaacttcattcgataatccaagattcatgtaatcccccgaacgaaacacacataaatgaacaatgaacagtaaaactaccaaaataaaataaaatcccagtttcgattcccgacagaaacaacaacaacaaagatttagtgaaacttgaactctttccacagattaccagattcgaaaaaatcacagagaactgaaaaagttaactaaccttgtgaagaagaccagatagtcgaatgaagcttgaattggaacagtactgaactcgattttaatcgcgacttgaattagcaaaatgaaggattttgaggaaatttagacgaatagatcacattttctaaattttttttttttttttttaagaagcttctgcattgagggagtcaacgtttagtcaacttggcacgtgcaaaattatatacagctggagagtttagctaacggaccaatcatgttacttgatttgctaaataaaaagagtttgcaagtcagcacaattcagacacaacgggtcggggtcgggttaactaagacatgataagcacagcaaccccattaatttagtttggtggtgccaagccgaagcaaacataacgctatgtcccttccacgtcagcacaaaacgttccacgtcattatcgtcgtcaacatctttcttcattccccaaccggtggcgtgttcctccagcattgttttaactctgtcatc

SEQ ID NO: 38785 - DNA, 551 bp, Arabidopsis thaliana columbia
ttcagtaccagttgtaactataggtatgagctttacccttttattaaaccaactgtttgatgagagttcatgtatatgcgtgtgtgtgttacgtatgtgttgtgtttgaataaatgttttgagagaacacgaattttgcttttcttgtttgtttgtggtttgttttgtataacacatgttagagagttgatttctacacgcactatataacataatttgtttcataatatatagttagttctttttgtttcattttatgtaatggcttcaagctacacacatttccaagtatatatactttgtacgaagcgaaagttttttaacgttgttagtcaatcgctaaattaataacaaatttaaagatgtcatgttttagaccaaaaaaaaaaaaagaagatgtcatgtaaattgaacatcagaatatcacttccaaaatttcacatgaataaagtatatatatcagttagttctcaattaattgaacaacaattctgatctgcccaacttccgtcatgcatgctaacagctgcggtatagaccattggtaatgt

SEQ ID NO: 38786 - DNA, 725 bp, Arabidopsis thaliana columbia
caagcatatgctttcaattattagctatatagctataatctgttatgaacattttcgagagagatcaatcatgaaaaaaaattaccccattcaaattgaactatttaaagaccagacagttcttcttgttgaaacaatgaaataatactgataatgtatagaaaccgacacatacttattaattacttatatcattaatacaatgtttttaatggaaaagtttgaaaaaacaatattgtgtataaatgctataacatctatgaaaagatggtcctacaaagtggtcgtgctcatttataagttttcgtacaacactacaactatatataataactccaaaaaattggtccttttatgcttatcattaagactttttggaccaaattttgactgaagtgttattttttttcttttgaaatcaatgacttaaccctttcgatatttttcaactattattaaacaattatatttataaccaattaccaaaaaaagttataaagagatgggttgtaattaccaaattgttcaggattagatagataatccatgttcatttgataggcattggctgctacaaacacgtcttgaccaatttcagcattgactgatgcgatcaaatcaactaattgcggattgaacaaagcggctgctgtttggagggcgcatagcactcgccattgcggctatgctgagccagctccgcgggagacatcccattgcaccag

SEQ ID NO: 38787 - DNA, 488 bp, Arabidopsis thaliana columbia
atttgctgtccacattttaacacaactctatctcaggggtggtgtctgaatctcgtctctctcattcctatttatcccaatctaatctatcacaaacccttccacattgcttttgtcagtctgtaaaattctctttgaatcagtgaatcactcacttaaatccaaaacagtttttttttctttctttctttatttgcttgttgtggaatcaatagctgtctccgggaaaattcgttttttttctccttcgggatctctttttttttttttttggttttatttaataattatccccgagccaacatttattgtcgattcggtttatttcgtctccttcgtcttccactcttactagtgcatgctctgaatctgtatgtaatgggagttcaacagtctggatccattatcctagccgggtcgggtcaaggtctttgagtaagagagacaattcgttttgattcggtgtagaagacatcatgaatactggt

SEQ ID NO: 38788 - DNA, 499 bp, Arabidopsis thaliana columbia
tcccgcgatccccggattatcaataatagtaaattgaacaacaatactatatagtagtaaaattaaatagtaaaatcatttattacaaaacgttgatagagaggagaggacaggggaaggcgttctattcaacgtgtagcattttgtcgtggcacgtagatgctgcatgagttccccaatattccctcctcattaaaggttttcactagtttttcataaatattatattgataattatgtatttgttacatctataacctatagtattagttttaccatattaatgtgtttgacgttttatattttgtttggaggaagctgtcgagccccacattcctcggcgccaacatggcctctcctctcacgtgacatttatttataattttgggttgcttattaaattagctaattccattttccgacatctacatatgcctcttgtttacccacacgcactctatcataacattatcattgccggatccttttttgaaactat

SEQ ID NO: 38789 - DNA, 966 bp, Arabidopsis thaliana columbia
actcgtataaaggagctatatctgatcttcctgtttcaaccgaggaggatgatgtggaagaagcagctgctcttgaagaagcagcggtgaaagacaatggagatggccagacaacgcaggacgtggctgaagctgcttcagctggagataatgaggctgtcgagtctgatccatttggactagatgcctggattcccagttctggaaagaaaaatggtaaaacaaagataaagagaacaaatgaagatccagatgccgaagagaataagaggtttctcaggtcaaaaagagaagctttgattacatgcttggagattgctgcacgccgttacaaagttccatggtaagaatgctgccatgattcccagtaattgatctgaatttatcccactgaacttgttatcatgtcaaaactgtgaaactgaggaatggttggattaattttcaggtgccaaacagttatagacatattggtgaaacatgcctttgagaacgtgtcaaggttcacatcacagcagagacaagcagtggagaaactctgggcttctgttcgagaacaacatctccgtaggaagcaaggcaaatcagtcacaggaaaactagacgttacagcttttgaatcgcttcaggataaatacgccaacgagaaaatgagcatccgaagctcagttggagccagcggtgaacgccgtgcacagcaatggctcggttaataaaacagtttccaaaaaggtctgattggtaggatttgttcactaagacatgaactagaaaagcaaatagagaaaaatattgctctgtttctgattgtatcttagaacaaaaagttaccacctttatccaaaatttttacatgaccatgatgactccgtaatcagttacagcatatgagtattgattctattaattcagtcccagttctgatgacttgtctgccaatcatcatcatcttctcttggcggcctc

SEQ ID NO: 38790 - DNA, 577 bp, Arabidopsis thaliana
cattgtagcatgcaatgaatacattctttttttttgtaatgagcaaaattagcttcaaaatggtttatgatcaaaaataagttaataggagaatttctgagccaccatgtcataactcataaacatcatcatcacaatttggtgctgttttatttacaaaacaaaccatgcatcttttgaaaaggcaagcgtttacaaaaaggtattcacaaacataaatttaattaacgtataggatcacaaatatagcatccatgttcgtcatcaacattcaagcccatcgtttgatttctatcttcgtctcgcttacctgaccagccgtgggacattattcttccagagccagccttttggagtaatggtgaggtcttttggaatcaggaattatttcttgtaacttacaggcacatcatcgtcgtcttcttcaagatcactgaacgacacatcttcatcaacatcctgcacaagatggttggtggtggcactaacagttcctgcattatcttcatccttcaaccaatcatcagcatcatcatccacttgaacatcaataactgtaggtgaagaccagtgacta

SEQ ID NO: 38791 - DNA, 650 bp, Arabidopsis thaliana columbia
ccagtccatcctgacagctgccaatatactcgatcatagaggccaagaagcagcccagaccattctgtcaaccaacctactcaaccaccacctcgaccctctgatcagtccgcactcaacctgacaacctgagcaactaaaagagaagagaagataaggcccattgaaagcccattcgaagtccattcgaagcccacttcgaagcccattaggaagcctgctttgagccgacactcttgatcacatcgtccatgggccgttaagtgggctcaaagcccgcttccttatccttatcgttttaagtataaataagtctctaagggttttgccctgggatagggagacatacacctactttttacagagatttctgcaacttattcagcagccgcttttcattcctataacttcgtacttcgatttttcttctaagttattcagattttgctttcatttacttgttcatttctgtttcatttcctttgatctttagaagtatgcaatcttcaatcgcttatatgttgttgtctttgagcatgttgtttgagtagtgattaggatttctgaggatgggatatagtagttgtggaaccctggtcgaatatgttggttaagtgtatatttattgaacccttctggattagttgtgt

SEQ ID NO: 38792 - DNA, 632 bp, Arabidopsis thaliana columbia
cgttctatatcctaacgttgtaggaatcacaggttgctcctctatccttctttcgcctcacttcttggtatggagaaattacgccagggttgtccaacctggctactccttgagcagtatctgctaaagcatcataactggaaggtatcctgtctttatatatagaattctgggatactgttgccacaatatctaatatataaaactccattgagctatggacatttaccactgaatctattgtaattcagtgggaatacaccggacgatcttctcgatacaatatggaagcaaggcctgtattaaaacagggccctgcatctaagcacactcctaaggtgttgcttaatggatctggacggtcggttccccagtcgcaggggttaagaaattccaatcacttaaaacttcatatacatgtcccagttgaaggacaagaagcagttctaaaccctttggtgcatgaaccctggtcatggtttcctagtccagtaacttgttgggatgggcttgacattcggcgttttggaaacccaaagatgagaatcgatggaaaattagagcatctgttttgtcttctgcgcgggccatcatggagcttaagactttagtggttctgaagatgagtgtca

SEQ ID NO: 38793 - DNA, 555 bp, Arabidopsis thaliana columbia
cgactctagacggctgctttgttgagccgtcacacgagagaatatttcccatgaccccattattatatattattaggaatgatcaattacaaaggttggaaatatgtcgagggtgtcgatccagtatgcgagttcccctttgtttactcttcaaaaagaacaagtctgggggagagaaagaataccaaagaaaaaaaatatatatataaagaatggtcgattcatcatggtatagtacatgaatgagtctaaaaggttcttgaatattagcttgattgatgagacccagcgatgaaagcctagtggaaatagttgtggaattaggtatggaatctagaatgttgtgtaagcttgcggagaaatacatgttggttaggatttgattagaactgctaggcatatggatttggttaggatgatcatggtaataggctatagaatgttaggagttctgctgttttcaaacctcttccacgggttcgccttttgtgttttgcttgagggtaagcaaaagctaagtttaggggagttgatataccctattttttacttgtt

SEQ ID NO: 38794 - DNA, 556 bp, Arabidopsis thaliana columbia
ctagaggattcaatttggttaacttatttatataggccaagatgtgtaactttctaacaaaactttaaggaaacgaattgtcttttatgaatctagcatcttaaaggacacgatatctaaagaaataaattctaaccttttaagagatattctaaaataacattttagtgtgtatttcttatcttaaaatttgtatatattagaattaacaatctgacacctattcaaacatatctagttgtcataatctaaatataagaaaactaaacaggtgtaattttatcccaaaaaaagaaatataaacaactttactcatcacatacatatagattatattctccaccttagatatggtttttcatattttccggaaaactttttccacaaatcaaatcacagtggttttaattttgggaaatatggccatattataactaggtaaacgacaaatcagtaagttgagatatataggagcatgcacaagagtaggacagaaacaagatttggttgagacttgagaaataggttaggttatggcctcttgggctgaagaata

SEQ ID NO: 38795 - DNA, 576 bp, Arabidopsis thaliana columbia
tcttaataagaatctgaaacaaatactaaaaacgttaaacgcaaaagcaaaattaaaattctaaggaaaaaggtagctacctagtgggttgtctaccacttagcgcacttgtttagcgtcgttggctcgacgtttgggttttactaggcgtagtaagacgggttgtttcgcccttggcgagctctcttggattggaactcctcggggggttcttccgatctctcgccatttaacctccttcttcttcttgcgcccggggtaaacaacaccatctcgtgaaacacttcgtcaacaatattggcgaagcataccgttcgattaagccaatccattatagcgcccgctgcggctaggaacgtgcctcttagtatgagttgagagggccttcctttctcgacttttatgatatggaaatcggtctgtacgttgcaccttaacctagaacataaacaatgcggactattccttcggaaaccgtgaaagacgagtctacaagcccgattcgcacatccgaaggttgtagctccttgattcgaagcttcctcgacgtctcccttgtcataaagttgatggatg

SEQ ID NO: 38796 - DNA, 576 bp, Arabidopsis thaliana columbia
gtgttttggttttgtatattttttttttatgattaagattctagtgattatcaattttttttcttattactatctatacatatatgcttagtttatggggaattcccaaaagagtaaggaaaaaggtcaatacaaactgtgtcgtgaggttttgaggcttgtgataatctatggtcattcttcacgatggtttatcattggtctttgtttatatacaaagttatgattcacaatcgctcactttttatgatattttcatgattttgttttgtgaataaaagtgtataaaattataaaccaataatacaataatttaaatcattaacaatcatagattcttttgtttttagttgaatatcacaaaaaaattgatgactttattaaattatgaatccaataacttcagatttattaagactttagattactttttacaaatcaaaatttaataacactaaactttaatagaatcttataaaatcttaattgaataacaaaagatttttcataacatttcaaaccactaaaaatctatataaataacaaaccaataacacctccttaattttggttttg

SEQ ID NO: 38797 - DNA, 572 bp, Arabidopsis thaliana columbia
gtaacggcgcggatccccgtagaaaagtgaagaaatattttgattgtgatattctgtttgtgagagtttagccttcgggagtttaaaggagcagctgtttttataggcgtataaaaacgttgttaattgggctggatataaccgtaaatcggttagttagcaaatcgaatgtaaccagcagctttataactattgacaactcagccgtaatgtggattaactcagccgtaatagctcattttcctgcaaaactcagccgtaaccatttaaaatttcccgccaaacagtcatagacgcaacctttcgtattcatttctctatttttttttgtataattctacataactcagcaatattgttacatgttacacctaagttatctaaatagggaagtcaaaaggttctgtcattttatatgtggtttacggctgagttatttggtttaacggctgagttatctaaacagggaagttgaaaggttttatagcattataactattgacaactcagctgtaatgcctggtaactcagccataacaatatattttaccgccaaactcagtcgtaacata

SEQ ID NO: 38798 - DNA, 901 bp, Arabidopsis thaliana columbia
gattaatactctcgcgtctcaatcatacacaacccaagtaaaaataacaaagatacttaagagcatcttcaacggatgaaaatgtaagagtttcttaaaaaacaaaaagtaataatattttaatgttatgattatattttaatttttaaatacacacaaaatactaataacgttacacgtgtttttgtgttggtgataaaggctcttagataaggatttttgttcactctctctctctttttttttacagcttttgattattatataataaaaaaaaaccgagtctctgttaatagactaccgttaagggtggtctaagtaaatgacatgaaacttatctagataaattgatcaaatagtatcttaatctagtcatttgtaaaaagtcaattacacatgtgaacgcgatggagatatcggtaggagcccaaaaaccgaattgagaaacaagtacaaattttattaagataacgataacaataataaaattacaacaacaataattaaggacagaaagtaaatcacggaggcaagatatgatatctttttccttaattcaattaatcggccgtaagtactttttggacatgacgatttatgaatctcaggatacaaccgatcacgaactaatacccgagcacacaagtattagactcaatcgaacttgatctacgatatactctcgaaattattaaacaaagaacttacttttaagaggcaagagagaggagagactttagaatttagagtgttttgtgtttgagagcttgagaaataatgagaggttgggtctatttatatagtagagggagataggattttgtgaaattctcaggatatgcatgatatattttgagactatcatgagaatatgaaatattttaaaaatatctcaataaga

SEQ ID NO: 38799 - DNA, 513 bp, Arabidopsis thaliana columbia
gatgatatgactggaatcttaacagacaaacgcaatgatatgaatacagagggaggaatgcataatctgtgaagctcattaaaggacattattcgaaaatacagtggtgggctcaaagcggatatcctaaataattgattgttctacaatctcagaactaagtgaatgccctgcaaaattcaatcatcgaacatgacctaaggtaaatgcacaagaacggttgcagatcctcagtgtcagaatctattatctttgacacacaaacacaatcatgtgatacatagcagattaacgcataaactatgaagctcattaacggatacatagcagattaaagcataaactacgaagctcattaacgggcaagtagcaaacagcagtatctatgatgcaaataaggaacattcaacaagataaagcataagatgagtacccacataacagaagcaggaagccaagcaaaatcaatcatcatcttcttcagtctttccagcaccgaaagggtcatgattt

SEQ ID NO: 38800 - DNA, 1089 bp, Arabidopsis thaliana columbia
cactaaggttaagtactaggtggcgttccggacatacaagcattaagattcaactcaactagaaagaatagtgtaaacgatcaaacaaagtcatagaaaccgccaacctagattttcgatctattagtccccatgaattcccctttgaaacccccttaaacccaactagagatctactcgctcatggcaaaggagctaatcaaaagttgggttgagtaaaccataacgaaaagatgaataaaacttaaaaagggtttagagattacttttttgaatgtagaatacaagaggcaaagctccaccttaaagagtcttacactaaaacgagaaagagaaagagagagatggtgttcttcaagattaaagatgtgcggcggcgagtgagcagctcttggcgacggctaaggtttgctggtgatgaaggcacacgtagggttagggcttagaataagtaagtgatcgggccgagtagtgggcttcagggcaggagcctaacaggggcggaccacgttatggcttgtggtggcagttcccatagaatatatagataatcaaagtttttagcttaagcactgtagttaaagtagcagaatggtaggaagtgcccccattaaatgctgaaggtggcaggttcgattctatctggctacattttgcacccacataatttctttgttgggtccgccactagagcctaataggggcggaccacgttatggcttgttggggcaattgccccaataatatatagataatcaaagtttttagcttatgcagtgtagttaaagtagcaaaatggtaggaagtgcccccattaaatgctgaaggtggcaggttcgattctatctggctacattttgcacccatataatttctttgctgggtccgccactagagcctaatgatggcggcacaaagagggatggacttgggcgtgacctaatggttggtggtgagctactcggagctgcttgggttcaagtctcttcggccggatgtgttttggacttattatttccaaatagccggttcttgacatgtcttcaatctttgggtcatatctccaaacagcttcgtggattgcttcaa

SEQ ID NO: 38801 - DNA, 461 bp, Arabidopsis thaliana columbia
ggatttgattatttataataataaatgaaaggactcagaaaattatatttttcgtttaaatattttgagaccatggaaattatttgaggccgtgtttatgttgtgtgttcttcgtttcgtttgtagtttgtacaataacgatattttaaaaaaaaaaagacgaattattctttttgtagcgtcattgaaatatcgaacacaataatatcactatctaattacctgaactagaaagttcgatagtaaaatccttgcagtccttaaaactctaaagtctaaaccaaatacttttctcttctgttttcttattcaatcaaaaactttttagaaattactggatgattaggtatatagtattttgccattttggtctaaaactttacatcatatttagttattaccaatctagaatggtctctaggtttttaactttttaactttttaactttttttaactaatc

SEQ ID NO: 38802 - DNA, 537 bp, Arabidopsis thaliana columbia
  unsure (1)..(537): unsure at all n locations
tnnnnnnnnnnnnnnnnnnnnnnnctaaagttgttgctttattatatgtgtaggcagatagcagaatagaattataggcaagaggaacatagaccaagcttgcaagtacaggctgccagctaaaccatgagagctaattaacaccatgcatggtgctggcgatgtgttggctatgtgtccaggtcatgcaaacctggcagacgaactcaagccagcttggtctcatacaagccagttgtcagtataaacagtgtcatgactaatagatggtaccaggcttgatacaggcattgcactgcatgacctatatcatgctactagacagtcagctcaggctgtgctgtgccttaaagcttggctgtacctgcagtattaatatcagtattataccagcagtataatagtatcaagccagtacttaggagatatatatactacaagtaggcaaggatcatagttaactacattattattgcataactatataggagtattattaattattacaaacaactacccagggtgctataaagaaac

SEQ ID NO: 38803 - DNA, 448 bp, Arabidopsis thaliana columbia
tgtaaccacgtgccactaaaagttttgttttcttctgtcataggcccattagagtcagcatctccgacatatttcatcatgcgacattttgtatagatatcggttatcgttttatgctgatgatacactattctaacaatacattcgggatgtaactcataattcacttgcatttgtgattagggctatgagggtgggtaactctcagcctgaaccaaattctttgattgctttccgtaacttcagtgaagagccaaaaagccctggaatttgggaaccagatgagggtgattcctcagcctctgcctcagcatccgcatctgcatcagagtcagcatccgcacctcgggacagcctggcctcgttgtaccgtcctccttttcacctgatgttccagggctcttttgaacaggttatctacacagtttcttgtttggctaattgcttg

SEQ ID NO: 38804 - DNA, 413 bp, Arabidopsis thaliana columbia
ttttaagtagtatagcggttctagaaactgagtttcttgaggtcaactgcaatacatattacagccttataatattgttgattgttagtcccctctagtctagttcgtcaacccctttacaggcaatatgaggcagcactgccgttgtgaaaattgatcgacgtccttatatgcaatattcgacaccttttctataatattcagtgtaatttggtatgaacagttcgtatctcaccgcatattattatttatagttataatattctccaatgtctgatttataccagctaatctacctctgttgtcgtgagaatgagttagtcagcatcgtaattagcatcgcgcttcccacctactgtctgttatgattctagattccacaaacgtcttggtgggagctcctctgatttgta

SEQ ID NO: 38805 - DNA, 498 bp, Arabidopsis thaliana columbia
acaatgtgattcagcaagccttttcaagagattggaaaccttaaaatgtatatatgtacatgaatatctcctcttttttagtatacattggaagtaggtaagtggggtttagaatgtagacacttttactttatctattgtgtacatctatttatcatatgttgtaatgtgtcttaagtcaatcgactcgataaaacaaaatgaatttctatattctaaggaaatttgaagtaagatacaaaaagaaattaagcatcactagatttcatacagaacattagaaaaaacaacagaataaacaaccaatcaataatctttgttctccaattaattaagttctattaaacaaaaaaaaaacagaaataatatcgctgcaaaaggcagaaaccgcgtgaatcttgttttaatttaaccttttttattggtagtttcattttaattcatcgtattgaacgctagcctaaagttatggataaaaacaagaaaaatcaaataact

SEQ ID NO: 38806 - DNA, 522 bp, Arabidopsis thaliana columbia
tctctttgagtttttagaaatgaatatatgtaaataatatatagaaatgtgcgtgtttaggtggtgatgaaagaagagttttgtataatataaaatacacatacgacaaaagtgaagaaataaatgtgtggggagagggagatcaaggagaagaaattggggtaggtagagggaatggctgttagaagaggaacggagggtcgttttggtttggtaggtttcatattttcctttatactctcttgcatgtctattttttatttgtatttatatcatttcttaaaactgaaattctgttaaatatattgcgtatataaatatcaagctaccaaatttcttttacgaaataaattaatattatacaaaatcgacacatcactaagtcgcatgttatgattttaatattttgttttatacgaactagaatatgaaaataactactatatcaaatagttttataggtaatattaaggaatagctaaatgaaacacaaagattaagcagactatagagagaagattt

SEQ ID NO: 38807 - DNA, 500 bp, Arabidopsis thaliana columbia
atgatgggaattaacaagcaataaaatgaagatcttatcagctaataatgtcaacatcatatgaacatgatggtggtggataatgtttaacgttataactgctccctcctttttatcttaaggacccaaccaatgttcattattagcccctcctttgttttcaacactttgctttattcacaatcaaccaataatactctataaatttcattattgtactctgttattctatttaaatttcataatataaacactttattcgccatatacaccttattagtattacagaagaggttaaaatatatatgcaagatatctcgtgctcaaaagtaatgggtgtacacttgttatccatattctcggaagaataataaaatattaaattttcttaaacatactacatataaagacaaaatatgtatatggttattaatctcataagacaatgaatttatgcaacatacggatattaactaagagaagtatagtattaagtttac

SEQ ID NO: 38808 - DNA, 400 bp, Arabidopsis thaliana columbia
ggtgtgaattgccgagacactactaacgacaaatatgagattaattattatgggattaaaataaaatataacatgagtatatgctttaacttgataatagaaaacaattttggttttagataagttagtattactttttatttttggatttgtaagtatgagcagatgctttatagatatttgaatgaataatttgtttaacttgttttttcactataatgttgttttatagagttaaattaccaaaaataaaaaaaaaaatatatatatatataaatatatatatatatatatatatatatattatatctcattataattgatatatcgttaatagttagtcactcactaaatcgtgacgcgtgtaacgctaatatccagcttctgatgaggcccgcct

SEQ ID NO: 38809 - DNA, 530 bp, Arabidopsis thaliana columbia
cctcccagattaggtgccatcgtttctgcaccaacaaaactaaaactgattgtgggattgctttcgtgaaacaagttgtaacttctcatttgcctcgtcctatcaaaatgcggaagaaacaagatgtgaagagccgttcagtaaggaaataaatgtggccagaactcaaaacattacaacaataagcaaagacagacctaaagcaaatcaacaacaaaccaagactacagacatctacctagcagcaaagactaaccacaagtagcagaaaagactcagaaattgaatatcctaagaaagttgaaacctttcctcttaagaaaacacaatcgcacaaagaaactctaacaaaacgttgttttttctcttccagagagctaatagcgttttcagatgacgatgagactcaaaaaggagaagactttcgtcggaaattagaagaacttactaagtacagagacgagagggttagggtttaaagcgagctcggtacagagaaaggattcacgattttgacttacttagtgaag

SEQ ID NO: 38810 - DNA, 611 bp, Arabidopsis thaliana columbia
ataaccagaattatgtcatgtatacatctattaagataaatctaagttaaatcgatgtaattactgacttctcatcgctcaattctttttacgtttgagttatgctaacttgtcatcgctcaaatcgtgctatgctgagttattataccgtaacagctgagttatcgtagtttaatttgatagtttggtgataagtgtgcattttatatccctgttacactttatgtcttttactcgaccagtcactcgaccacatcaagtgctttgcaacaagctgtgttggtcgagtttttttactgttctacttgaatttctgtttcctgcatcttcacttaggactgctagaacacctcaaaacctgttattgcttggcttgactctgtgaactctgattgtatcttgattgctagcatcacacccgtttggattgacaacctaaaatactacaatgacatgattggtgttttaggataattaactaaaaaactattatcaatttggcgtcgttgctgattgggtgtttgtttgttatatttaagattttagactttcttagatcaagttctttttcaatttttatttcagttactaactgtgtgtttttcttgttg

SEQ ID NO: 38811 - DNA, 421 bp, Arabidopsis thaliana columbia
ctcgtcagaaaaaaaaatttcgacgaacaatcagtcagccatttcgactaaattcaaagaaaattacaaccaataagactttcatagtttaatgttacaattaatatccaaagagatttattaaaatgacaaagtttttaaggtgatccttgaagagtttttatattaccccaaataaacgtcgctttactttactagtcaacttacaaaatcagcattaaccacacaacgcattatacatagaagattttttaccatttggttaccttatccaaatctgcgcccactgactcttccttcaatcttctcctctgtaatctcttcacaatctccagaaaatctcacaatcgttttttgcttatcatctacaatggacgcctctcttctcccaccacggatctctcccgtttccgccatcgcg

SEQ ID NO: 38812 - DNA, 526 bp, Arabidopsis thaliana columbia
catacttatgaaaggtttgtgcctatttacaagtggtaagacgttcttgatttatagcttaatgtagtaacattgtctcgatctagactatacatgcttaccatgtcatggtgaaaatcgtgagtccataactcatgatctctatatattcatattcatatataatactggtttgcacgtctgcaaacaaagataaagatttctgataatattaaatttatcccaagaatattgaatataaagatgctagctggttctctgaaaaaaaaaagcgtacacagcttgtcattgaatttataacctatacgaatatgaggctcgtagaaacaactcttaaggaattgtgagagaatgttacttttagccgatcaaaaaatttgtaacataaatacactgacaagatatttgtattataataagttttcgaaatttgaacacaattctatgcatcatgctttttcttctaacaagaagaagaatttaaacacaattatatatttaacgcgccaaaatcgcgtgtgaagtc

SEQ ID NO: 38813 - DNA, 605 bp, Arabidopsis thaliana columbia
gtatagagagttttgcggaacaccactggttactctaaaattatagtttgagttcgagaacggtttgataacaacctagctatttctagatctactatcatctatttcctgagaataccctaagcctgacgcttttaatatcttgtttcacaaccaaccaatcgtctattgcttacttttgtttctctttagtttcattacagttttacttatcttaattcaaaaccttcgtctattgcatgatccgagagctttgtgaattcgatctctaagtgttgcaactgacctctttatttgagagagtggtcttaggattaatttgtcctatatcaaatttggctccgttgtcaaagttctctttgattcaccattagactaggtgtagaatttagactaagcttttatttttctttattttgttactcacgcgttttctttcttctttttcctgtgatagggtaattacaagatggaacgcaacaaactgcaggcagatttcgcgactgcgtcgaccgacaccaacagggtgtcgatcgacaccttctgtagaacaaaccagctaccataggcgacttcaacaacgctgatcttttctactccaatcg

SEQ ID NO: 38814 - DNA, 504 bp, Arabidopsis thaliana columbia
aaaacttaacttggattttcctataatctgaagataaaattggattgacgggcaaggctacagaaaatggaaacttaacaataaattatagcagtatatattttaattttttcattattatattgaggtttttagtggcttgactagcttaaaatctatttttccacgagtggaaaagttcattaagagaagaaatggccaacaaaagaaattataaacctaaatcaatttgtacaagcttattaaaaaaaattgaaacgagtaattctaataaataaaggaattaaaattaaaatttccatttttcttaatttaatttttttttttaatttctttatcgatttcgtaaagacaattattaatcaatcaaaaagagaagattcgccttgggcagacggacttgagttcacggctggccaagtcatcactcgtaattaaaagggtttagacacagtgcgcacgatagcatctgtgtttgcttcttccaaatctctctcctatttt

SEQ ID NO: 38815 - DNA, 664 bp, Arabidopsis thaliana columbia
cctgaaacgcaagaagaagaagaagtgtatcgtgttaccattgatgatgatgaaatattccaaaattctgctgctagaaggcaacaacgaggtaggccaaatttttggtcaaccgctagacgtggaagtagtgcacaaagatctggaggaagctcacgagtttctattggaagtggttcacgaggaagtcagagacgacaatcctttgaaacaacaatacaagacatcatcactggcttcagagaattccaacgacaaagttttcaacaacttcgtcctggtgcttttgaccaagatgattacgatgaatttaaaaaggcggaagcgatatttatcgcgctaaatcttcccaagcacactatatttcattgatatagctgcaagcactgacgaggataaggtacaactgttagaagctatgactggtgtttcacgcaacaaccaagatgtgctaaaacagttgggttcagaccattcatttgggagtccacatttaggaggtatatcatctagaagtccatcctccgttggtaataatttgggagggcaaaattcacccggtttttggggtcccatttatccacagtggggaacaccaccaaacgttgcacagtgaggaacaccaccaaatgctccacagtggggaacactgatcgatagccgg

SEQ ID NO: 38816 - DNA, 599 bp, Arabidopsis thaliana columbia
aacggccgccagtgtgctctaaagtataatcttaggtgagcactcgctatgaggaattagctcaaccttgtcttctacgagcgaaggattagacctcgacgccaatcatgatcgagaataactccaccaacacccggagaataatcgtgcggaccttgaccggggctagattacatatacgcacctgggtcacaattcgtcgaataggcatcagtctgcttaaggctaagcacccatggtggacctgaaagtgtacgtgtcaggtcaggccggagtttcactcgattgactggacgctcagtcctgacgtgcctcatgcaaaccaatctcggtcaatatgtccatcctagcagcttcattttctctgcatgcatgcactgagaagagacgtggaccaccaagtctggtctgcgtactaaggttggaagtccaatccaggtgagattttctatctcaatagtctccttaagttgtagcagaatccgtgattaaatttactgaatgctgactcagtgagcgagctcatcgactcaatttaagaacagacagacgattacacgtgtttcttgtataggtccttgctagtggaatatataatc

SEQ ID NO: 38817 - DNA, 786 bp, Arabidopsis thaliana columbia
  unsure (1)..(786): unsure at all n locations
gatagaggatcaaacttagctacactaaaaatatcgtcccgatcggaaaacatacgagaccacgatctcaatttcaatccccgctggtcttaattcgcgtctgagaaaacgtgtctcacgaaattgcgaataactcaaccaattttaatccaaatccaaatcaatctttttatttaattaatgtagaatgacacatgtcatttttttgtgtaatgatgtgtcactcatatggaaagagttgcctaactttcatatatatgattattagaagcataaaagaattaatcaaaataagaattagaaaaaagtaattctaaagtgaaatacacaaaaaaaaaaacttttgacacataaggaattggaacatcaaaacaactggactaaagcactaattagtaaagaccggacattaaaattaatataaacgaaagaaacaaaggcaaatgaatcactaatacaacaaacacaaaacttagaaagtgttcttgagcttggagattttgggagagaatttaaagattttcttttaaggattttttggtgtgtttaaggtaaagagattctcagatttactctttggtatgcgagaacgatcgcggagagcttgagtgggaacctggctcgtcggaaagatgatggtgggtgatctagtaagtggacatcactttgtcaacaaggccaatgcaatcaaggagccgtacggtgattcatacggttatctgtacccatcaatcacagtttcaaatcggaccttgataatgagtaagaggatgtnttttgtataaa

SEQ ID NO: 38818 - DNA, 564 bp, Arabidopsis thaliana columbia
atggaagaaagtattataagagaataagagctcagagacatttaaggtaagacaaatggaaaccgtctaagtcaatagacatgtaaccttgttaaattcacaaggatggggaaggtgccctagaaacagtggaaaaaaaagaatgggaaggaacccatgtcaataagcatatttaagaatatgagaagtcatatcaaggtaaacgagaatttcatcttttgttgttatggtactagacaaaaatgtttttttgtgcactaagtccagtggatgttgaaaagtaaagtttaaagcttctctatgctacaagagtggcgcatcaaaagagctaccatcgttagaaagcaggtgtcgatttgtaaagacggtaagttagaagttttaatgaaaggttgtctgcttgtataccgtgaatgtggaagtggtgtttgctaaagatacaagtaagtggttttatatggaaataaatcaccaccgaaaagtcgaggacgaatttcatttaagtgggggagattgtacaccccactcccacatagttgggcgaattgttttgatattatgata

SEQ ID NO: 38819 - DNA, 570 bp, Arabidopsis thaliana columbia
actaaaatatgatattattaaaaaggaggtaattttttaatttttctcataattataaagaaaaagtttcatacttggaaattttttttatacattattctagaacatttattaatcacttatactaattatcatacaatctaaaaaacaattgaacatattatactcatcaattcaaaaaacacttcttacattatatggtatgcattgtatcatgttggaccatcttgatataaacatggcaaaacgcatatatttggaaaattatataactaaaacatgatatcttattattaaacatattatatcatctgtccaactaaaagttaattcccttaatgaagtccaactctaaatactaaaactttcacaaagtacaaataaattgagtacgggacaactgaataacttatgacataactatggctaatgcgcagtattttgtctgggcccgcattccacttttattatcataataactattgtgtgttcacactatgcgtcacactatgtgttcacactatgtatttcaattcaatcaaaaaactttccatccattaattcaaactt

SEQ ID NO: 38820 - DNA, 1005 bp, Arabidopsis thaliana columbia
atgtacctaatggccaaataaagatacataggagaaggaaaagactataaagagagtggagaccctaagaaaagagactccatctttttttttgtaaaatggttttcaatgttataaataaggtccaatggactatttccggatttaggctcatacattttcccttagactcaatccacttacatataaccagactaaaccatctattacaaaaccgatctaaaccgaaagttgaaaatcctaatctcatatcgtaaaacacgatctgagccgccgtccaagaattgcagaatctcaccggaacagaaaccctttggggagcctagacgagattcgtcgaacggagatggtaattcaggatccgttgtcctcctgccaccgtagagcagttttgaggaggaagaggcgatccgggttgccatagtcatgaatctcatagctcagtcgagagagttgacggcagtagtgagtagatctcaagaccatcgacggtggtaaagcctcaccgaagcggagtcgacctcccccatcaagcggcgacccaatgaaacctccagaatctttagacttccgacctaaccgccgtcagcccttgttcttcactgtgaagtctcatccttcctctccgtgaagccacaccatcgatatagctcttaccgacagtgtctcgcataatcttctcccctccaccagggccagctcaatatagtctctgtcactgtacacattttcagattgagccctatgatactgtatctgttgagtttggcccttacatttagtctataattttattatggccctcagatttagtcagagttatctttttgacctcagatttgataaatgttgagattgtatccgtttcattttgattctgataatttttggatcctgtgccattgctccgctcgcactgctcctaatgcagtatttggactctcagtggtcccttgattgtgaatagattgtattgccgtgaagatgcatgctgatcccggttga

SEQ ID NO: 38821 - DNA, 906 bp, Arabidopsis thaliana columbia
ccgatcgtgagtcactgtttcgttgttatcatggtgataggtcatccgtggagatttgagtgagaaagctgaaccaccattggataatagaacttgatctaacaaagaggacatgttatgactggagaagaatagaaggatgggaagagatcggttgtgacgaagaaaatggaagcggtgatggaggagacgtcacggatcttaaccgttcatcaccggaaccaatggctacggagacgagaccgttcaacgatgatggcaaaccagtgatgagtatattttgtagcagatcatagatggtggtgttgtgatcagtcgaaggaaagaaaaagaaagaagaagaagagacaagaggaaagaggaagaacagtttcaagaatgtttcttgcagggtgaattcccgacagaccagagggactcagataaggactaaggtgtctctagaaagaacatgctgtctaaaatccacagcaactgacggatctgcaatcagacttaaaatcaagaagttatagcacgtttctttctggacaagtaattgcaaagtctgtcaaatctagaaaactctaagtaaacagttcgagatggcttgttgacgacagcgtttgaagctgttattgaagtcagatcaaactgtaaatttttggagttattcatgatactatcggctacataatcaacggtgggatcacgtttctaacggttagttcctgacttatatatacgttactgtgacggttttgtatggaataaccatgatgagttttattgtttggttgggcaaacaagatcggtttgagcctaagcttttcagggtcttcaagactcagtgttttagttcttggttgatgaaggtgttcttggaagcaagctagtaacttgtctaaaggagaaaggagatgaggg

SEQ ID NO: 38822 - DNA, 418 bp, Arabidopsis thaliana columbia
agcttcgaagataatacctgcaagttccatcccccattaagcattaatcaattatatatagcttcacaatacaacaagtacacagttttcgatttacttactctgagaaggaaagcaatacagtcctcaaattgtttctctatacggtctatttccatttcgcatctagccttgatggctgaaactgctccaccgctgctcagtgtctgttgtattgagtagaattctagagctaaaccgagaatcatgttgatccgacttgcgatgattgcccactatacaaaaaccaccaaacactaggtttttagaagcctacaacttcaaatatatactatgcattttaagaggtcgcttaatgccttcatggtccattaccagcttttcttgaaccacaaagcattgccgctgaatcgataac

SEQ ID NO: 38823 - DNA, 504 bp, Arabidopsis thaliana columbia
gtactattaatgattatggttatgatgacactcatcattactgttgtatttatggattgcatggaaataaccaaatgctttaaatagtcatgtgacgaaaaccccttgcttcgtgggctacggtatctactgattttacattttatctaaatccataatgttatgtacttatgttcaactgttatcgcaactttttgatgaagtcaaaaatatcccgttaacatttgtttttttttcgtattttaggtttgtagatcagattaatcttcgaggccgtctcaagtattttgacaaacaaccttaagtaaaatactaaaaatggaccttttattgtttacacgatgtcaataaaaaaaccaccaaagaagttaatagtttttgatctctcaaatttcattttctttctcaaactcaaattttatcgcatttgttataaaaacgttatcttttgaaaaaatataattttacattaaattcagaaaaaaaaaacaaaaaaccaaactt

SEQ ID NO: 38824 - DNA, 496 bp, Arabidopsis thaliana columbia
ttcatttatatattttaccaaaaaaaataaaatcatttatatttttttcctgaaaacattcattttatacttttctgaaaacaagtcttgataattaatctgaattcttcttaaacagtctaatcaaggtgtttaattttatttttggagtccaaattaaataaaatgcttgcagaaagaaagaaagaagcatctcttatctcatagcagagaacaatggttaaagtatgattgtatatttgtatggcacgataaaataaagctcacgaatctctcatgtatagaataacttcttttattcactttactgcaacagtacgtgtgtgtgctccttcatctgtcatggtaaacactagacagttccaaatgcctttttaccttttctaaatcctcaattctaatgattttaaatgaaacctagaattgatagaatcacttcaagttttgttttctttgcaatcattcaaagatcaatagaattttaaagattgacaga

SEQ ID NO: 38825 - DNA, 508 bp, Arabidopsis thaliana columbia
atcataagcatgcatgttttttagaattatctcattcagaagcccatacatgaatcaatgataatttgttattgagccatacttcattttatgaacgatataagcctagtaagaacattgcgagacaaataaaaaccaatccggtaatctttcaaatttaggaacataccgtatatattgggtttcggttcatttttaaaaccgaagaaaaccggttagggtaaactttcttttcctaatcaacaaaaggaaaactgttgattagagacgatcatcgtcctctactttataaaactgtcacaaccctagaatttggatatacaagtttgtagtagtagccatgcgtttgtctgtagctctgatttcatcttttcaatggaagaagaggtcttcaaaggcgattatgagaagaggaagaaaaagaagaagaagaagacaaagaggagaagatttttttgtggcacaggagattcctttggatctacatgatcgagatctgactagattg

SEQ ID NO: 38826 - DNA, 754 bp, Arabidopsis thaliana columbia
cctctgtgctggcgacgcatcaaacaataaactgactctggctaactctcaatgctaataaactaattagatatctcatttatgataacatctcagacatgtactcatatcaaaaatcaagtaaatgaacctaagacatcaaactcataatacaaacaggacttcttaaaacattgataaggaaacataattagatggaatatgtcataccaagttttctttggtaacagagttagagagagaaaggtggtatacatatgtcagtctggcaccataagctgagcattcagagcctcaatcgtatcctcctcgagatctgacgacatcatgttctggaagttgttaccttgagaggaacatccaagcccgtgactttgagcatcagagttatgatgtggagaaggaggatgatcctgctgtggaggttgttgttgtgttggcgtttgttgtggaggttgttgcggtggagtcgtttgctctagagtcagatgtcgactattgtggacttcctctgacgaatgacgttgtgatgattgactctaaaagtctaagttctagaaaagatgttatgggggtcgatagtcgcaaaaaatgcactacacctattgtaggttgaagaataacgcggcgtggaacttgggtgtccagagaaacttctaccgctgctggtatgaaggtgtattgagaagattgatttgccggtcttatgtttgcaacggtggaacaacgcctctctgagacgctttaggaacat

SEQ ID NO: 38827 - DNA, 592 bp, Arabidopsis thaliana columbia
tatcttctacaatttatatacatgttttggactaaaaaagctatctatatatatatagcctatataggtgaagtttgtatagtaatggcgagaacatggttcagtattagccattattagtaaactgacactaataatgttaaaatatcgtcctatactcgtgtctaactgcatgtctatcatgtacattaagatcaagactaatataaaactcacaaatcaatatactacttaagaaaaagaaaaaaatctggttcttttttattcatgcacacacatagtataagttaaaaaatgaccatattaatttgtaaactgaccaatcgtgtatataaaaggacaccttctctacctacttatatattatacatcatttctctacattgttcaccagctctctccatctctctactccaagcataagaggtaatctctcaatagtttgaaacaaccttttgtaaaacgtattgtaacttacttaaaattgtagaacgtgagaaatatcttaaatgtttaaagtcttcgtttttccccaagaactgaaaatgattttgcatatatattttctcaagtgggtataatggatataaag

SEQ ID NO: 38828 - DNA, 959 bp, Arabidopsis thaliana columbia
tttgccaaggttaagagtgttggcttggttaagttctttcaccaactccgggtggttcatgtacaagtgttgcttcacccccgtcgaatacgtgtacactctccctgaacatatcaatttttttcaataaattactcatacaaaataaatatacaataaatgctcaaaaccaacttagaaaacggtgaaaatcaaaaacttaagatttcctctcaatcaatatgaccgatcataaactattaaacgatccactagcgaagcgacaactactttggtattttaaaactaaatttaaaatatatcttacgatttattactataaaaaaaagggaatcaaaatgaatcattgaggagttatcatataattgatcagctcctaacttttggatcaagtagacccgatcgtacaaaaccttattggcttttcataaattttaaattctgcggcgttagttgtcattaggtgtcatgtcaatccatgcatacgttacacacatatattatatatacgacttagctgtcaatcagtattcacatatgtatgaattaaaattcacgcatgtattatgaatatataaattcacgtatgcatgttaactagtgtcttttggatgtgtgtgtaatgatatagtactttcgttaactatttacaagatgtaatgaagatatatgtttgtatggtctgcagtcatcatcggtccgaaaaatggattcgtctaactcaaaacgaccaacaaaggactaatctgccttgtgtgctatcactatgcaaattcagaggcgtatctactttgttgacaaaaaatcatttgccacagatcccaaaattaagagtctcaagaattgttgaaattatcagattattgaaagcttaccgtattgttttcgccagtggtcgagatatggatagagagatgaagtgtagtcatgggcgatgatattatcccggagtagtgtta

SEQ ID NO: 38829 - DNA, 607 bp, Arabidopsis thaliana columbia
cctgaatccattaataataacaaggcatatttcaaactagtatttttgaaatagttgaataaaatttatgtcattgttgctaaaacagtgaacctgaacattaattctaaggtgcattcaatcagaagaatcaacgattaaaaacaaaacaaaatttgtttggaaatacgttgactctgttttctatgttgaccataagaacaagaaaatgtaatcattgacccataaaactccacacttccacgtctatctactctaaacgggccacaacctttacaggccggcccattgtacaacaattttttttgcagattttggatttcgtggagaagcttgataataataatatattgtaacaaaagcttagagatgtcttacgataaaagaggccaatgtttgcaacaagaactgaaaatctaaagctacatcaataaaacctgtttggatacaagacattgtgctgaatacgaccaaaaggtcaaggattcgggtgcctgcaacccaaaagaaaaagacagcacaattgtcaatgtaagagacttgagagacttgagcgtttacagagaacatgaagaaggtttctaagagtgaagttacctgaaatgat

SEQ ID NO: 38830 - DNA, 596 bp, Arabidopsis thaliana
tcgactctacattcgatctttaatctctacgctctctaatgggttcctcctccgatatcgtccctgaccgatctccagctgacgatgtagctccggttacagataccaaaattccaaaggaggagcctttgacgcttaggagaacgcgtccttctcgggcttgtactgttagggctcagcagcggcttcaagagcttcaagcggcggagagaaagcttaagccgcctaagaaggagtataaacgagagcagcatcgacggagagaagaggtggtggaggaagatgaggattcggaggatgacgatcaagaggatgaagagaacgacggagatgatgagagtaatccgaagcaatgcgttgctggaggaagttctactaaaatcattacttctcttgttccgccaccggaaccttcacagatgccgcggtggaatcttcgttctatgtgggaacttgcttctgtgctcaatttcttgcatgtgagctctctgttaacttcaattgtgtgtcgtcttctggttcttagctgccaatgagtaactactctcaaagttcgttgttttgtttctttttctggatggtgatgaaggtattta

SEQ ID NO: 38831 - DNA, 551 bp, Arabidopsis thaliana columbia
ccttcttcttctgtaatactctttttagtttgtctagtcatctctgtttaaatgtgatttgtaattcccaaacctttgttcgaactgagccctttccagtttatcttcggctttttagctattattattccgtatcttcatcattcattataaagttacaaaagaagttgaagatttcagcattcaagaatgatgacaaaccaagaacaaacttgaaaatttggtcgaaccaaaaatggtttattcagaatacgtacatatgaatacataagtaaccaaaaaataaaattttatagcttttgccaaaagactcgatcttggattgtctctaatcctacccagaaaatcttgctatcacacaaaaaaaaggaagaaaatgaataataacagggtaaaaattttcagtaagagaactcatggccgcggagtgaaatgtatttcttgacccaaatggcaatatcttcggcgcaggcgtgtgcctgaggagtcttgagaagcatatcaagtgtagcaaactcatgaactgcgtctttgtattctaaaactggaga

SEQ ID NO: 38832 - DNA, 770 bp, Arabidopsis thaliana
gcacgaaacttgtgcgtcttaccaaacaacattagtattaatttaaaatgtttgggaaaaacaaaagattcaagtattcaacctttgacatacacaaacaaaattgaatttatacgaaaaaaaaaaaacaatttcgtatgaaactcaatgaagaaagtttcattcaaaacataatgaagaaagtttcaaaatccacatctgatatgtgaagattgacgtatatttgatttgtggtttctatttctaatttgccatttcaataaaacgattggatatgcaaggataagtttgacttcaacatcttgcttcggtccggaccattttccatttctttttctcagaggtaaactagaatagttcttgaaagttatcataatataatagtaataataaaagtaaaagattgagacgttggcgggatgaaattcgtataaatagagatgtctataggtgaataacacaaacacatcttgttctttttgaagataaacggaaaaaaaaaatggttatacacaaatcaattaccccaatcgctctgatgttactattactactagcgatccatgcacatattcaagtcgttggttcaacactgtaacctctgtctcactagccaatctgaaacatgaaacgtcttctgagatcaattttccagtttggcgtcgggagcttcgcggtggcggaggaggaggccgtggtggcggtggaggtcatggtggaggaggtggtgaggattttggtaacggatgtagaagcgatgttctacaaag

SEQ ID NO: 38833 - DNA, 468 bp, Arabidopsis thaliana columbia
cttaggtaacgatacctgcgtcttactgtttttgttcatttttcttgtgctttcaccgtttagtcgctgatcggagtatttgactgtgaaaaatccttcgttttttggtttttgtttcatataaatcggattgatctaccttttgtgctttgatgtttgttttttgagcctatgcgttgttggcttgttataacttcacgttcatgtgtggattttgagattttggtagtgactgtgggtttctttggtggctataggttgtaaaaatgagttctagggctggtccaatgtctaaggaaaagaacgttcagggtggttataggcctgaggttgaacagttggttcaaggtttggcagggacgagactggcttcttcacaagatgatggaggagagtgggaggtcatttccaagaagaacaagaacaaaccaggaaacacttctggaaaaacattgggtttctcagaat

SEQ ID NO: 38834 - DNA, 841 bp, Arabidopsis thaliana columbia
taccaagtaagttgaaaaaataaaactattgctcagttatttatatatagattatattaaattgaaacaacaattaactttctaacgcaaataatcaactcgctgtgtaccgcgggtcaatatctaatgatgtcataattctcgtagacaaatagacaatttttccatatgagtacatttgatgcaaaagtagacatttgaactgaaacctatttttgtttacaaacattcatatcaacaactaaacaaaaatcgaaactaacttgaatcaattaatcaagtattaaattaatatgaaaagtggactcaaatttaactgaatcgatttaaacctaatcaaaccagataatttttgattctaaaccggtttacctatgtcacaaaaaggaccatccatgtcatattttttttttaatttttaaaaagtcaagttgttttaaatatacttgagatgcaaagaaagatccgaatcatatatccgaagattccgaaaccaaaggcggatccgacggctccaagctgccatattcccttgttactctaccactaaattaagccccacataaaacaataaagacacgaaatataaatacctaagcaaaactataggaaccgaaaaaaaaaaaaaagaataattccagcatcattcctcaagtaatttaaaaacaattattaaaagaagcaacttggtcttccattttttttgctacaaaaaatttaaaaccccaaaagaacttaaaatcttttacataaagatcaccaaccagccacatagaaaacacaaccatcggtcttcttattattctttcttcaacaccaaatagtcatgatgaaagtggtg

SEQ ID NO: 38835 - DNA, 492 bp, Arabidopsis thaliana columbia
tgtgttgttttgtacgtttcagtaataaattcaatatacttttaagattcatgtcaatgctaagaccatagttctctattcttaagtttttactctatttttgagtgagatataaaatggggttaaaatagaagtggagtttttacatagtatacaaggttactcacttgtactattattcgaatataagaagaacttctttctgtatgtatatcacaagattatttcatcaaccaaaaattgtatatcccctcattaggccaagagaactataactaaaataaaattaaaaaaaaaaatacttttttacattcagaaagataatgtaacattataagaatttgctccccattaatatgtatatattagttaacataataaattcgagcctaagttttttcttaatcacaaaaagcgctcttaggttgtttttgtccactttcctctcgctctcatatcgatagtcttgaacttgaagtctttagtactgat

SEQ ID NO: 38836 - DNA, 741 bp, Arabidopsis thaliana columbia
aacggccgccagtctaaagcatgatttggtgaaattccaaaacatcaacaaagaaactattacaaaccaataaactacatgcaatagtcatgaagacattaatatttatgctactcaattgcctaaagtttttggaaccagaacgtatgatgaattatcactatgtatagtatatgatcaaacatcaaatccgcatttaatgtactttgggtttcgttgtttcaaactgtaactcatattttttttatattttttttgccatgaatatatttgtgaaatgaacacgcaaactaaaggagatctctttgtttgtatttgacattttataaaacgttgttgttccaaataaaatgcagaagcatgtgagtttcgcagagaaaggaggaagaggagagatcgttgttctatgaagtacaaagcaagagtagccagcaattacatattgtccactacttcaaaatgcatttgttaggattcttattttttatttgtttttaggactcatatatttttatgggcatatctagctatcatctctactatgatgtcaaaaacgaaatgagacatttaccaccaatttttaatcaacattcagaaagttcgagtcaaatttttactaccgcccatgagctataattttaacatgcgtccaccaatgtctcaattaaatatgcttaagctatccaatcccaatatatatcatagtgtagtagctaattacgctaactcaatcctaatgta

SEQ ID NO: 38837 - DNA, 775 bp, Arabidopsis thaliana columbia
tgttcatcttctatcagaagcagactcgtttgtcgtctaggagaaccatattcaggaaaaactcgttgactaaggcatgctatatagggtgcttcaatagagctcttctccgattcctatcttgcacattgtttttcaagcattaatcgtacttgagaggaaatgaaaacacaactagagctaaagtatgtttgatatcaaaatgaggggaagcttacaaaacattcgaaaagggtgtgcatcaagcaaagtttccacttctgcagagtttggtgttggagtacatgcctcatgtgttccattagagtcttctgcagagtttggtgtcgaagtaaatgcctcatgtgttccattagagtcctacacaataattactcagcagagatgctgccttggagagtgcatagaacaaaacattcccctagaactgggaaattgcgcatccctcacttcataacaaaaaaaaagaattgactttgaacgtcaaataataacaaaagaagaagcatccttttacggcaataccacaagtcttacaacagaatatcagatcgtaaaagagatccagcgcaagtaaagatatgagtttcaacagttaatatcttggaaagaccttctcaacttacagcaacaatcaaaaagcataatgtcatggttacatttcatactgcagcttttttttttaagtctagaagaccagaaaaagtatttgaaccagatggcataaacaacagggcatttggtctagtggtatgatctcgctttgggtgcgaga

SEQ ID NO: 38838 - DNA, 624 bp, Arabidopsis thaliana columbia
cagcaggtttattttgttgtgaatgattaaataaagagataggaacatggttgtctcaagaaactattggttagtagatctaatgaaagctaggttgttatcgaaccattcttaaactcaaaactctaattatagaataaccggtggtgttcctcgaaactccttatatctatagctaagaataaccggagaagccgagaaattatcaacctaaatatgcattctcaacgagttcgattgttcaccttagtagataggctgattcttattacacacctaaaaaacagactcatcaaataatagatccaactacatatacctatggtcggcatatctattgtctggattcaagatctagttaactactctagatctagcattaagcataattaaagatgaagaattctactgataacctagcaagggggcaatctactaaaccatatgaatcccttatgagaaaccatattcttaacaagcacattactcagacatattgattgaagcaaacaacataattaagtatgaaagcataaacatagtaaataaaggagggaaaagaagggatctcttcactgtattaagaactgaatcaatgtttgaaaacactcgatgaatagcttg

SEQ ID NO: 38839 - DNA, 544 bp, Arabidopsis thaliana columbia
gtgcgttgtaccatcgcgcaaactcgtgatattcgatcacggattaaagccatgatctatcattttctcttctttccccccttaaatctcgttgttttttcaaatcatagtgactgttgcttttcccatcgaaatgaaagtaatctaacaaaatctactgttagatcatgtttctccgaccaaccaaatttgaccttgtctacatatacacgtggcttcacaaatgcgcatcaagcaattggaacttggaagcatcactatagttctaaacttccaattaaaagattgttagtcaatctagggttgggatcataggtggctaagttttcggtttaacaaattttcgagatcatcgatataaaatcataggatatgtcctcatcacaatacagtatacacacacacataagtgattaagttatgcattcataacattaatccagaagctttatatgcagactcgaaaagtcagcataaatccagcattacatggcccatttgtctccacattttgaccacatagcattcagttgcttggagagtg

SEQ ID NO: 38840 - DNA, 356 bp, Arabidopsis thaliana columbia
cacttctaagatccattactataccaaagagcacaatggtgctgtttccggaatggaggatgttcccattactccttttacaagggatatgtcagcatctggagatggcatcgttgcaggtacattttcacttgtgtcatttgtttttcatagcaatttggaagttatgcttgcgattaactgaaccacactactctctatttcaggtctaataagaatgcttacggttcagccagatcttatgaacaataaagggtacctggaacgcacagcgagatatgcaattgagtgtggtattattgatcaatggttgctggcacaaacccgaggatatcctccaaaggatgacatgggag

SEQ ID NO: 38841 - DNA, 507 bp, Arabidopsis thaliana columbia
ttcttaataactagatctctctttctttcttcttatttttctcttctcttctttagtttcgcttatctcgcggctctgaccagctctcaagttgttcgtttctggttaatggatattgaaccctcttgggatcttgggggggtggttatttccttttcgaaattgcatggcaacatcaaatgaccaaaccaatactaaatcatcacattctcgtactcttctccttctcttcatcttcttatccctccttctcttcagtagccttacaatccccatgactcgtcatcagtccacatctatggttgctcccttcaagagggttctcctcgaatcttcagttccagcttcatcaacaatggatctacgtccaaaggctagcacacgacgcagccgcacttctagaaggagagagtttggaaatgatgctcatgaggttcctagtggtccaaacctatttccaactaggtgagttggacatctggttttttccaggtgagtttgaaagat

SEQ ID NO: 38842 - DNA, 369 bp, Arabidopsis thaliana columbia
cggcctccctcgcgccacggcccggaactggcgcgctctcgccccgacgcgcgcccttccgccccctcctcagggggggcgggatttcgagggcttcttgaaccagagcgcgggccgtgctgctgtcggggggcgttctttcgtccaccggatcccttcgtcatggcccgccgtcttgctctgatcaccggcgcctccgccggcatcggggccgcttccgcccgcatctacgccagccacggctatgacgtggccctgaccgcgcggcgcgcgaccgcctcgagggcctggccgccgagatcaagctgcgctcgggcgtggaagcctacgcccttcccgccgacctggccgatccggcgggcgtcgacg

SEQ ID NO: 38843 - DNA, 609 bp, Arabidopsis thaliana columbia
tcacttcgttattttctcgggaaaaatttcccgatcactaaacctagtttttagatattttctctcctggattctggatctacacaatctttcttcctcttcttctatgaatctgttcatcgtaatttcagattcttgatatatgattccttttctccaatctcttctcttagctctcagagatgggtgagaaaacaaactcacgttatctcggtgtaatcatcactcgaaaatctataattttcttgttcatatcaatcatcaccgtcctttcttggttttttatcttttcttccacaaaccctaaccgagttctcgatcacatctcagtatcagaatccacagatgtacctctcatcatcatcaagaactcaaacagttctccacaaaacaacgcaccaaaaccccaaaacagagaaggagcagaaacagaggaacccattaaagaaaacagaggaggaacaaaaacagagtcatccatgaatcaaaacagaggcgaaaccctccggtgtatccaaagggtttctccttctccaaggccattgaaagtctacatgtatgatatgagtccagagtttcattttgggttattgggttggaaccagagag

SEQ ID NO: 38844 - DNA, 545 bp, Arabidopsis thaliana columbia
ccagagaaagaaatcatcctctggtcgtgatggagatgcttctccgtcgcctatcgcttccccgaaacctattccgcagctctctcttctcgccaattccgtcgtctcccgctgttcaaagtacactgtctctaatcctcatattattgaacagtttcgagattcatatatgattcagatcctaggtctctacttgcgattgcataatctttattgtttggaatttacgcgatgtgattattccttactgttctggagcaatttaggaattttttttttgatggatttagtttttggtaattgtaggatcctgaacattcaaacagaagatctgcagcatcattttgatgtagagttgcctgagagtgttaagcaactattgacatatgcaaggaactttttagagttctgctcttttcaggcacttcatcaagtgatgaaaaaacgtgattacttgagtgatcaagagttccgtcagctaatgtttgacatgatgcttgcttgggagactccagtgtcacaagtgagcaggaaacaaagtgaga

SEQ ID NO: 38845 - DNA, 359 bp, Arabidopsis thaliana columbia
tgaactgagatcaaatcaaatccaaattaaatatagaagattaaaaactaaattaaaattgaaaattaaaaaaaccgcgtttcactttaaaaaaaaccctaagtgctcgtctccttcgctttcctctgttctctcggatttaaaactcaaaaaaatcgtatttctccataagagtaacatatcactggacgtttcccaattatgtcctcctacgctcccgactagcgtttatcctattccggtcgccgccggagaccttgtatctccatataatggtgtcgccgaaagatttagtggcgatagtacactcttcgctgctcggaacatcccggccaactccaacgcagcgtatcgaactc

SEQ ID NO: 38846 - DNA, 470 bp, Arabidopsis thaliana columbia
agcgcatgctggtacgggtttggacttgttccaatgtaatgcaagctttgcctgttgaatgatctcgctcctaaattcaaaaccaaatccaccaaaacattactttaaaaaccttccaacttcaaacacaattgcttaacatacataaataaaacttctaaaacttttgatttaattgccacagttgccacagttgggcctaacaaataaaacgggcttaacttttgccacagttgggcctaacaaataaacagttagcctaccaaagcccaaatattttaattgaaataaattaattaagagagacatagtaaactaacccgacgagattgctttcttctgtcttcgtcgccgtagaatttgaagttcctccgtcgtagaagatcgtctcttgtatcacctactccgatatagcccctctctgaattctccatcctccgagcagagaaggctgttggtagacagttata

SEQ ID NO: 38847 - DNA, 379 bp, Arabidopsis thaliana columbia
tcaccaactacagttgaattagctaatcaagggagcaaacctttctgctgttgaagctcgagttcttctctctcacgcggctgcttctcaggatctcgagtgtcgatctgatctcaggcacacatggagtagacgttccatcgacccaaaggccactaagggcccagaatagtctgttggagcttggcacgggcaacaaacctggtttagaggcatctctcgggctcccgaaattatgcctgccaatcggtgcttctcaatagcagccctggagcatcttttcaggaggtgctagcgtctcactcagagcacgacgtcctggtgtactaccgggtccaggtcgtgagtgagatgccagcgcagacagaggatcagacac

SEQ ID NO: 38848 - DNA, 537 bp, Arabidopsis thaliana columbia
ccacgtaatcctcgtatattcccctctcaaatggagcaagacgggagagaacctgcatcatcagccatttacttcatattaatgagcacgaaaacgaatgagacctattgggtgtatgcaatttacatcagaggaggaagcaaagagtacaatctcttagttctaccagagacaaacaattagttttctcgagaaattatcaaatacgtatttaccattaagaagtcgtccaaagaatgcacatatggccaccaaaaaataacaaatgtcactatgactgcaattccaagcttaatcacagaaagtatagggctcttccgtcttaggcatttacccagtagatggctgaaaaaggcaggagcaaagtatgcactcatctgcagcatcgacacaatggaaaaagtgtgaccagcatgttataaacgggaacagggcagaaatgaggtacatcataaacaaaggggtatatcaagcccgcactagattacaatattgtatgtatagacattttacataatgcacgatgtgaatatgtat

SEQ ID NO: 38849 - DNA, 562 bp, Arabidopsis thaliana columbia
gttattctttaacccgaaaacatgttcttgtctttgcacatgtgtctcgccctattttttatttcttcattcaacaagtcaaaatgaatctattttactacatgatctctataaacgaatgtcataaagattttatggccttcaaacttggtctcaacatcgatcatgtatatgattatctgattcatccatatagaagagggctaacccgccccttgtaccttgctttggccttaaaaaggttttcaagaatttactttctttcttatttgattttaactttgtaaatgtcacatttttccgttaattaattctttcgctgagtgacaaatatgttaatatgacatttatcatcaagatatatattttatcatatttttgatacatgactatcaaacaaacgtcacactattggtcagagattattcgacataatccataagaagttgtaaatatatcatcaagtgtgaataaatgtatataaatattattagcagacaaaactagtagttgctttttcgcgattcgtgcgaatagattctgatgccaaatttggatatta

SEQ ID NO: 38850 - DNA, 460 bp, Arabidopsis thaliana columbia
ttcttgaaacacagagaatttaagcataatgatcataaacatgttaccatttaccaaatgactttagcatgcttctttggctacttgagcaagaggatctacaccatttttagagcagaaatacactccaaacaaaagtaactcaagtctcaagatgagttgctagcaccaaaagatattgcgcggcgctggcttcaacaaaatctgatctacgtttcactagaccaacaactaaaatagggtggtcgtcctcgcttttgtgctccagaattcgtccattactggttggtgaatacaaagcaaaaaattacgaaaacgtacttgaagttgtgaactgttttatataatttacctttcttcaaaacgccatagaagcatagaacgatcgtgtaacaaccatgcacgtcaaatctcagggaaaagtccatgtaagattggcccttccttgtcatacacacat

SEQ ID NO: 38851 - DNA, 572 bp, Arabidopsis thaliana columbia
ccaacgagattcttctcgaaaatttcctgcgcctctccgtgtctgtgaaatcgattcaggtaaatcactcttctcgaatcgatgcttgttttgtgaaataccgattctatcagatctatttgataaatttgttgttgttgttagtcgtctgtgtagtttattcaccttttgtttcgatttttgggtcctcacgagatctatgaatcgttatctgaaacaaaactcgaaactagcagatgatatgttatttagcgcgattaggaagaataaaacgagatttgttggtagcagtgagtttcttagatcggtttttttatcgattgtgtgaaaaaattcaccattcagatgcttttattgatttgtgtcttctataattgaattgaattgtttgattcagcagcttaattatctaatggttttatgtgattgtattggcttgattagggttgaatatgccttgaaacttcatttcaatcccactatacactatagctataatctgatataagttcgttttcccttttgtgtggcttgattatgtttgatatatctatgtacttcaggttaaggat

SEQ ID NO: 38852 - DNA, 383 bp, Arabidopsis thaliana columbia
ggtaccgagctcctatttaagtttgttatatgaaaagctttcaaattactaacaattatgtttttcttctttaaaccaccaagacaaatgtgctttttacgtgtcatcacatatgaattttgctatatatcgatgtgatcaactaggttaatgattattaggtctacgtggttattctaattcccacccgtgaacgacttcgtgatcaacaaactttatttggtttggagtttgatagaaataacatactatataagcagctagctctatgtattttagactatatgtaaacttggatttgagtattaatgtatatatgtaggtatgaggtatatattgattgaatcatactacctaatttttctgaatacatggatctgtgt

SEQ ID NO: 38853 - DNA, 1088 bp, Arabidopsis thaliana columbia
taacaatagtgtgcaatatagtcaacaagcccgtctagctcagttggtagagcgcaaggctcttaaccttgtggtcgtggttcgagccccacggtggcgatgcaactttttgaaagcatgctgttttaacacgctaacgaacccagttactacaacgttgtttaacttcccactgctttatataacgaacctcagaattttgtccgtataagtgttctctgttcgtaactgcaaatccaattcgagagcatccaacatttcaaaaattgacttcataaacagagtaaataggggcccattcgcagagtatgtaacacactgtaaactaaaaatcggaaagcataaagttatgttcttggcgaaaataaatgttattccacgaaacacattcaaaaaaccttcttcatgcactttggcgagtatgatcaaaaccgaaaggaatcacattcgcagagtatgatcaaaatccaagggagatactttggccaaaaatatatgtcaatttgtctatataatatatatatatattaacttactgtattcaataaatattagacacttcaaaatccacaaaacactgcatattcgataatatattagacacttaaaaatccacaaaataacagcatccatatttgaaaatgtaactcttgctaccaggcagacagcatatatatatatagtccatcaaggcatcaaaacggctgtggcggcaggccctgacaaatacgcctagcttctagaatcgcgggagagttgaaataacaaccagggtcaaagtcccctccaagcttgtactcaccaatcaactcacccttgatagaaaggtgtcctgtatcctcatcgaatattcttctaactatagttttgcgttcagtatgctcatcaccaatccgacacttggtgaagcccttaaaagttatgtacacaattgcagttttggcattgagtagtctctcattcggcggcacatatcgtccttggtttctatcacgcttccaaatctcagcttggacagatgctctgcacaacaacagttgagaacaaaccaaaagtattgattacgacactcatggtgtgcattgata

SEQ ID NO: 38854 - DNA, 600 bp, Arabidopsis thaliana columbia
cctaaaatggtaaacatatgttaactactatttataatcattacaaagctttcatttgttgtcaactaatatgaaagctttctacaatttcttatttcattttccaaatcaaatttaagaactctcagacaaaaataatatatatagcaacacgatgtcgttttcactagtaaaaacttaacaacacgtcgccgtttggtaatgacccaatcggcgaaatctgagaagactaaaaccctaaggtaaacctgagagaacaagccagagctaatctcttgtcggaaggaagaaggatcaaaaatgccgctctacgactgtatgcttctgttcaagcctataatcaggaaggagggcctcatcgacctcgttgcgcgcattggtaaacacgtttacagcagaaatggcgtcctcaccgagatcaaatcctttggcaaggtcgaattgggttacggtattagaaagctcgacggaagacactatcaggtattcaatttcgttagttttcttactgaatcgatggtttatgagtccgtagagtttgtttgatcaggatttctccaggccgattcaatggtattagcattttagtttaggtttgtg

SEQ ID NO: 38855 - DNA, 350 bp, Arabidopsis thaliana columbia
gttcttacaaactgtgacaacacgagatgattttgtatctgtatggaatataattcctgcagtgataagacaaaaatagcgcaaatcaggatcaagctaatgagcggataaacaaaaaaaataagaacattttgttacagcgaatcccaccgtagaatagttcgtatgtgagttatgaatcgccaggctacaatattatgcagaaaggacgagaattcagctcaaaatcgggcagattaaatactggcaattgtcagaaactgagatgcgcatacacagcttacgtggtctaaatagcatcagcgtcttcctgatttacctgtgccaaatcacggatttgtctcaaaatt

SEQ ID NO: 38856 - DNA, 534 bp, Arabidopsis thaliana columbia
atctaaagtctaaagtcatgtacacgtttttgcattgaaacttaggccatctctattcggtgacaaaccttcgaagtttatcaaaaagaaaaaaattactattttataatgacttaattttgtaattaaatttttttttttttttcagttgtccaattataagcagccacctatgcacatagtttctcaatgattactctaaaatttctctacacagaaacgtttctttaattatgttattctccctcctcttttatgaattgtttatattatttcagtgaagataaactctcaaaattgtaaccgatggagatgctcttataattatagataattatatcattactgaatacatacttctgtttgaaaaactaggatatgtcttttgtgactatttttggttttaaacttaaaaaatcaatgtagagtaaactatagaagaagaaaagtaacaacatcccaaaggacccaaactaaaaagcgcgagattaatcaaattctctttttggtcagtaaaaaagagaacttaatggg

SEQ ID NO: 38857 - DNA, 591 bp, Arabidopsis thaliana columbia
tgtgtgtatatataagcctctcttttctcgctctgtgttaaaccatcctctcctttctctctctagatttttatcccctttccctctctctctctctctctcctagggttttcgtctctctcgttcactgttaatagtcttaacggagaggtttgattagcctccgggaagattctactgcgaactttggacacatctctctctgccatggcggctgagaagttaagggacttgagccagccgattgacgtcggtgtgctcgatgccactgttgcggccttctttgttaccggatctaaagaagaggtgcttcaatttctctgggttttgacttgttcaaggggctcgaccaatgattagtctatttcgcgggtctgttttattgtttgagcgtcttcttctcgattgggtgtgaggagtaggaattaggagcgtttcgttgttagggttttagcactctgatacatctttgtcttaagacgcttgtttcgggcagctcgagttttcaatttggatttttagggcctagagttttagtaatgtattgaatacaatggtttagttcccactgagactcgagattggtgaata

SEQ ID NO: 38858 - DNA, 689 bp, Arabidopsis thaliana columbia
gagctaggagtaaactggtccttagcaccccataacggatatgatctaatagccgaagaagagcttgttgaagcattcacccaaatgagtcttgaacgaactactcgcccaggtatgaaatatcgtttgataggttcaaggaccaatagaaaacaagagaagactttggagcttcaagagacgaacaattcaagtgtcacatctgaaagtgatcgagacagtcaagatcaagaccaagacatcaaggatatgtaagagcgcgaagacattgatcaagctactcaagaggaaatccaaaaagacccctacttcaaggaaccagccagcaaacgagcacaagacctgattccagaagtacctgaagaagtactacaggaagtgactcaggcgacatttattgggtctaaaaggcatctaggtaaggtttattcagtttatattatctttacaagtccacacagcccagacaatggctagaatcaccctcaatcgtgctcctcaagagaacttatttagtttccttattttatttcttaaaacaatggtttttgtgttttgattttatttgttttcttgttgcatttttacatttaatttcggccctaaaactagctgaaggactcttataaagtccctctgcagcagttgtacgattttttcacctttgattatcaatcaagaaccgcatt

SEQ ID NO: 38859 - DNA, 477 bp, Arabidopsis thaliana columbia
tccaagctgtctgtatgttgtagaatgtggacaacttgaagccacatatctggattagcctgcaaatcccgcaaaatctggtccgcagcagctctctgaatatgtttcgggagcaatgccgattagttcaaggtaaaaactaaaatacaaatgaggtgaatgttgacattgaagcagaagtataagagatacgagattcggtaatcagagaattgaacaatcatagcaaaattatctttttaagtgatgctatttcactgccagatgagctcaaagacagaggataaaaattacaagtatgattggaaacagtgaagcgacaaaagaacaagggacttaattcaccaatctcgagtctcagtgagcaactaagccattgtaattcaatacattactaaaactctaggaccctaaagatccaaattgaaaactcgagctgcacgaaacaagcgtcttaagacgaagatgtatcagagt

SEQ ID NO: 38860 - DNA, 1155 bp, Arabidopsis thaliana columbia
ctcgctaaactaaattgttgacgtggtaagttggatggacatgattttagtttagaccagggattagtccgggtgtatatattgacgattgatatatataaattacttcagtcaatttaaaattcagtgtaaacttgttgagtatatatatagagatattaatttatttaataatttaatttttctaatattttcctctttgaattattattgtaacacccgccccaccatataggccaagacggcatgttattcatctgatcttgccaaaaagttttctttaaactttatacatgaacaaaatattgcacataactccttacgcctactaacctgaggaaaaagggaagaaaaaaagggtgagtaaagaatactcagtgaggggaatcaactctgcccactgaaacatagaacactttctaaagctatacaaccatcattataacatataaacttagacacaagcaaacaacctaacatgatttacttctaataatacattcataataaccatcttatcaataatagcacatatatacatatccttaggtccagtcatcctcgtgacgactagaacctcatgagtggaggctggccctcgtggctcatacactcccatgcatcccgggctcgtcagcctttcttgaccagcatgtaacccgtcggcccatcactgtccacattactagggagaccacggcctatagctcgattctccccagtcatacatacattatacatacatcatactcaacaatcatcaaatcatatcatcacataatcttatcctatgcaatcagatctaagcctgcatatcaggcgtcaagatgcataacaaaagaaaatgatactatgtttcgcaaataccatcctcaccttagcctagtgaagatgaaaactcctttcttttcacttagacgatctttactaaaaccacatgctcataagctctaacttagttctccttcaaccaggacttgaatccatgagtcatgaaagctcctgcaaagcttcaggctcaaccgaactcgtttcccaaccaacaacacaaactcatcactatttacttcaaaataaactgctctggaaacatactcagaagtaggaactacccggtagaaacgtgatcccacagttgaagatgtagatagtagt

SEQ ID NO: 38861 - DNA, 541 bp, Arabidopsis thaliana columbia
tgttatgccagaagataaaataagtctacgggttggaatgaagtttgtaagtatcagctactgaaaccaaagagacaagagaagtgcaactaataaacgcattgaatattattatcagggagtgctgaatatacctggaccaaaatgacatttagcttgttgacatagagcctttctgatctgaaagatgcttcattactcgagagctacaaggtaaactcattatcaaaacagttctgttaactaagcttcccagttatatccagagaacaaggtaataaagcctccaaaagtatatacctgtacaataacctctgagatgtaatttttcattccatctcgttgttcaacaggcagtgcattccatctatactttataacaccttctagaacctgagagtggatgccaaaaagagtaaagtatctcaacagaacagttttaatttacaactgcataaggaactaaaactgacctgcagagcaaagaacttggtatcaagctgtttgtattttgtagaatgtggacaacttgaagccacat

SEQ ID NO: 38862 - DNA, 471 bp, Arabidopsis thaliana
ttctttagtgttgtttttgtttgaaacatgtattgttaataactcaatcactataattataaccattaatttaattatttattggtttatttaagaaaactaaatagttgatttactatagatattttaagcacattaatacatatcgttaataattcaatcattataatcacgtaaaataaatattatttgaaatatcattatttatttatttattataaaggttaaaaatataatattttctacttcatatattaattttatcataactatcaaataactgtaaccatattaactgtatatatagtttttaaagttataattaaagaaaattataactataataggttgttaataaacaaaaatcgtaataaccgtaaatgtggttatgtctaggtggaggtgctggtgggggcggtggtcttggaggaggacatggtggcggttttgggggtggtgcggtggtggatt

SEQ ID NO: 38863 - DNA, 759 bp, Arabidopsis thaliana columbia
gaagaatctttatcatatgtaaagaggcaatccggaaaatccgcgagttcaacgttatttacagtttatcacactacttgatgcaatttttggtgatgtaccaaatgcataaagtattaagctttttcttataaaatttatttatttttgaattttcagttttatttatggttttaattattaagcatgtttaatttttcaaatattatcaatttatatattgtatttttcttttaatagtaatatataaaaaaagcaatactaccctattgtgtttctcttttaatagtaatatattatatttatcttggttattttttatttaattattatcgcacccgctggtttaccagtcataaaattcccgcaaacgcactcattaccaaacgcttaaccagtcgttcaaaacacttgataacgcttgaaaccacaaccgtccgtttccgcaaactcccgcaaccgcaactgcacccgctgcgtttaaaccagtcaggccctcagttgttagcgattgatacaaattataaaaactgttaaatatcgttttgaaccgtttgagatcggtagttaaaaacttttttctgcaagcgtttgcggttgcgagcagtagcgattagttaaaaaaaaattctttttttcttaattaattaaaataattatagctttcactcaaaccctaatcactacaattaaaataatcttatcttttatatatcttattgttattagaaaactctaatcaatatattgtaccatatt

SEQ ID NO: 38864 - DNA, 935 bp, Arabidopsis thaliana columbia
gtagtattaggttacattaggctcgtagtaagtaatgtggttagtcatttatatgaataaggtgtgacgatgtcgtggttgtcccaatagctcagaatggttcgctaccacccgagactgcccaacggggtagtaaaagttttaccgtaagggagttagtcccttctagacggtttagattggggaagggatgtgatctttttagactttgtgtctagcggtcggagcattgccttgtgggaaatcagcatcgtaaagtgtaggggcccgtaggatgaagagtcgttagcatgctagttttagattaagtagtttccgctgcatatactctataaagagtattcattgcttgtttgtttgtgttgtgtgatttcttgtcgagtatactcaatttagtatactcgtattgattgtttgattggggattgggattgggatttttgttattggttagaaacccaggctcactgagcaatcttacattactcaagattctacattttgtcttataggtaacctttgttggggagacctataggggagcacggacgttggggacccggtgtagagtttgttgtctgttgtaaaattagatttgtaaattgactcaatttgagcattaggctcgggatcccaatccattgtaagtgttttcatgttttattgaataaaggagattttcttaaaaaaatccttgtgtacttctgatattattcttgtcccgactaacacaacttacggtcatggtacgggttgaaaagccttaggccatgttcgtgaggaacgatgttcaaggatggcctgaccttggtaccagatgtgttctgggaactcggtcggatcgtctacgtgcatcaaaagtaacgcttccggattcgttcttagtcctagaacggtttaggggtgttacaggtatgagagaagggaagtggata

SEQ ID NO: 38865 - DNA, 344 bp, Arabidopsis thaliana columbia
caggataggacccctaaggatggaaagtgattcaaccgcaatgcaagctaccatttccgaggacattctgcaaagctaaaaggcgggagaagaattgttagggaagtcgattcttaaaagcaaaatgttactcagtatggactatatgtatgtcttataatcagggagtaacaccacattactagtctctattccaaaagaatccatattaactttggatactcttgtatggaaacaactgctatttgttaaagattcaatagctctccaaggatgtgatatggtgtctcacgcttgccctgaagtatgtcataaatcccataattttggcccaagcattttta

SEQ ID NO: 38866 - DNA, 503 bp, Arabidopsis thaliana columbia
agtctccatcatcatcacaggatcaatctctccatcatgttccaaaaacattttcatcaaattcttcgaaaagccactcaccaaagccactcctttcttgtttcccggcaccggcgttgctctcgaatccctcaagttccaaaacactatctccggcacaacgtctccatacccattctgtttatacttcctcacaatcacttcataatccgtttcccatccattacttggattacttggaggctgccttaaaaatgcatagcctggtcttgaataatgtgacgacgacgccgcttgatcaaactccatatcactgaacacaaacaccctcttgatcatctcttccggcttcagcttctcttgtacggccactccaagaatcaaatcaaacactttctgaaaatcagtgttcataccccattgcatttttttaacaaactctgtttttgagtacagatcgtctcctttcaccaaatgcaactccggattttggctgaaagtta

SEQ ID NO: 38867 - DNA, 491 bp, Arabidopsis thaliana columbia
atttcttgactatcttggctcatttaaaaggaaccgtcatttttctttctgactagtatatatattgtttatttatcttttgaagatatgtacaagttttcgtaagcctgaatccgtaatgtcactatttaattatttggacgttatgtcacattttacgtatgtagctttttagcttgtgcccagtgttgtcccctccgaaatttgctcatctctgccccatgtggtagtgcactgcgtttaagcaacatccagaatttcagattatggaagtagggacaagaagctgtggtggaacacgtgctgttttaggaggctaaaaacgacacagcgttcgcgtctttaaatggtaaactttcacgttcgcttttacttgtgtcattttcagttttttgacctattgctaataaatattctcgcaggtcgctttgtgaaatataaacacaaatcccaccaaaacggtgtcgcgagaacgttgaagaaattaattt

SEQ ID NO: 38868 - DNA, 335 bp, Arabidopsis thaliana columbia
caaagatactcaacaaggtcaacatgtagctgctggagtgttagtatatatattttgttaatcaaaaataaaatctctctagtcttgtatccttaactggaaaatataaatggcgggaaaattgaaactaaaggcttagagatgtaattggtttatagatcgtaggatttgaaaatcctcattgatcaaatccgaggaaaaaccttattatttaaatttatatactttttgatgacgttaaaacctatatgtatatgatttaaaatcaaagaggatatctagcaagtatcagattttaaaaataaagtttactttcggattgaagtttggttttc

SEQ ID NO: 38869 - DNA, 248 bp, Arabidopsis thaliana columbia
cccgggggtggactcggaaataccggtttttcggggcctgtgttggcgtttccaggggtctctggggtgccggaggctcctttctgcttggtgtggttgttggtggggttcgcagaggtcgctggtgtgttgagaaggcgcggaggttctccggttggcgttttggtagcccaggccgtgccaggctctttgccggggtctgccagagtcgagtcgcgtgccgaggagtagctgttggtgctcttctc

SEQ ID NO: 38870 - DNA, 510 bp, Arabidopsis thaliana columbia
gcatcttcaaaaactgaggggttttgttgctaataagcagaaatttgaacttgttaattcattaggaagagtatctagagtatggtgaatcatctcatcagcttccatcacaattaggaagaagaacttttgtcaacattcatgtatgaacgagctttaggaattcccttaacaagccaaaactgacacaatcttttgcaggtttgacccgtatgcagtgcagaagtttcaacttcgacctctggacaaagctgatgaggcaaaggaagaaagattcagaaagaatcataagctaagaacttcaaaaccttagctgcctgtttgtacacttcttataaacaaaataacatcatcagatttccttggatcctttaaaaaatctcacagattggaacattctcaagcgtttttagtttttgcattcatctgcttccgtatttgccgttgtgggatatagtttatcacatagtaagtatctatttcattgatgttcacgtatgctactgtgaa

SEQ ID NO: 38871 - DNA, 628 bp, Arabidopsis thaliana columbia
acaaaaaaggaatctatctacgaactcagagaatctaaccgttcaagcagcttcatggcggcttcagtctctcttgcctggtacatagccttcaaaactagattataagacgctgtattaggttcaacagaaaactcctccattggcgcaacaagatcaagcatatctccagcagaagcacccatcatcaagttagctcgaaggtaatgattgtaaaggttcacatcaggcttattcggcttcccattcttgtcaagcgatcgaacccaaacctcaaaaagctgcttcatgtcagaccaacgctgcgaacgatccaatccgcaaacatattcagcagcgagttcatgtcaagcgtctcagagagagctctgatacgaggagcaggagcttgatttagaaatcctaatggaactagagattggttgaaggaaggagtgtttgggatcggactacgccaattctcttggtaaagaggacttcctgttgctggattcggtggaagcggcgtggaggttgattgatggtttgatgggtcgtgatctgttgattcggttgcgagcagaggatcttgagagaggaatggtgtacggaaatggctctgatgggtgaactgaggtgaaggattggg

SEQ ID NO: 38872 - DNA, 531 bp, Arabidopsis thaliana columbia
ctctagaggatcccggtgacgttttaaaatcccgtaactgggtcgtagatcctgggtaacccgcatccctgagttgaactcagtttaacaattagaccacaaaaatctgccattaactcagaagtgagaagtgtagtagaaccattcgacacgattgaaaaagctcatctttcttatttctatgtctctctcttttggttacgtaagctctctgtccatatgcttcattgatggtggtggttatcaaaatctagcaaggttttagcttcaattctgtccatatgtttatccatttccaagctcagacgtgaaaagatttcagatttatcgctggatcacggctttgatttcttttgcttcagctttgaatttgatttcttttgcttcagatttatcggtggatcttagattttgatgtcggtatatggttcgattttataaaaagaagttagatctttggaatcatagacagggataaacgagaattgaaatctggggattgatttggatctgatggaaggaaaggtggct

SEQ ID NO: 38873 - DNA, 449 bp, Arabidopsis thaliana columbia
cgttgatttctctctaaacatatgggaattatccatcgttcttctcaggaaccgatgcaattcttcagatttctacttgtgcgactagcccgtccatcacaatctatgagcaaactttcctgaccctatcacttcactcggcggcccagtcgcacgcaagattcgatcaatacatgaagttacacatgtctatagacttcacgccgcatcatccttgaattcctcttttaggttattacttctatcgaggtttgattttaatccaaaaacaacattacctagtcgttttcaagcttggattcagttaaatcctcaacaattacgcagctggaaccttttaaacataattcttcctttttctatttaagtttttttactagcttataggctacattgtatagtagtatactatacctctctgtctatccatccagattatccttccctat

SEQ ID NO: 38874 - DNA, 538 bp, Arabidopsis thaliana columbia
agtcaactgttagaaactttaaggtcattgcatttcaaaagttgtttgtaatttgagctctctctcttttcttgagtctgaggatttgattcaaatctcaacctcttcttgtcttccaagtctggctttaacactgtttgtatgcaaacagttgcacatgtctttgtttaccttgttttagatgcttctctcagtgtcatcagcattcaagtgcgttttaagtcagtaacaagatgaatacctcttgttggcatcttaaatcacacgaattgttcatgttaaagcagaagtttcaaattgtttgttgatattgaagagaatgagaactatttcctatgtttaccttatctcgctattttcattttcccctttcagttccctactcttatctgtcttgtgattccaaatgcagaacacacacagaatctcccatggctgcatttgcaacggcagaagcgtgtgacagcaacgcagaactaatatcaaatggagacttacgcgctcttcaccaatcttcaagatctatggccatagaaga

SEQ ID NO: 38875 - DNA, 619 bp, Arabidopsis thaliana columbia
gaagaagaagagtcatagaatctctgcttctcgaagtaatatatttggcgatatttaaccaagaggttcaccgtcttcatcgttggtttcaaggagaattcatgtcttttcactgcaaaagcgcagatgatgacgagcactttttggatctgaatctcttgattccatgtaattaattagcgaacggagatattcagattgtgactcgatcaatttcgatctcgttcgtcacaacttcgattatttctagaatgatggatctaagatcggagaaagagagagatctgagaaagagaagtaggaagagaggcggttggctttaacagaggaaaagcaagttgtttggctgagatagaaggagagaataggtttttttatttttgttcaagtaattttttttttggtctccaaaatatattaagaaacgtaacagcggcggtaatagtgttattgtggtaaaagtattagcgcctatgacaaaaattcgttttccgcttagtgaaattttggtttagcattttaatagtgttatggtagagaagtcaatttggtaaaagtattagcgcctatcctttcgatttaatgccctacctttgagtgtaagacaagtttagatggg

SEQ ID NO: 38876 - DNA, 548 bp, Arabidopsis thaliana columbia
ttcatctgaacttctccaccttagtcaaaggtaataaaaagaaactgtttttttttctcttaggtctgtctgttttagctgttgaactttatggtcaaaacattaaacttaaacacattgacttttttatttctttagtgttgagccaataagattcatggttgagattttagacaattgttttgaataataatgaaatcgatttaaagcaatactgattcttgatttattagtatgaagtatgaactaatgatatacacaacttggtttgtatgttcatagcgatgttgtgaagagaggggtaatgttggaaattgagagacacatccttatcattttagggttggttggtttgtttgtttgttgaattatgagtttgatttcattgtgaaaatatctttctttcttttttcttattgtgttgagagataatgataacattggatttgatagaatctataatttgaagctaggtgtgagacttttcaaacagagaaaatagaaagagagagaaatggtaggaccttagtgatagctgacccatatat

SEQ ID NO: 38877 - DNA, 689 bp, Arabidopsis thaliana columbia
  unsure (1)..(689): unsure at all n locations
tatatttagttgataccaataatacatgatatacaactacatattacatataatgaaaatatagtatagtttttgtggaatatacagaactgatatttgatgattaattaaaccaaagatatcgtgtgtagcacggataccgacctaattattcgtattaatttatttttataaccttatatcatcattgttcatattacttaattttatgactaaagtataaaattagaaatacaaaaagtatatcaaagtttatttttctgataaggttagtggaggagtgactcattgattaaagtttagaaataggaatctcaatcactttcattagtttccaatttaacaaatcaaaatcagaagaagaaaaagatgaccagctctgatcctcaatctcacaacgtcttcgtctacggtagcattctagaacccgccgtcgccgccgtgatcctggatcgcacagccgatacagtccccgccgttctccatggctagtacgctctctcaccctctcgatgatcgtttatcaatcggagattaacaaaagatttatgggtttttaacagcacagatataactcaaaggacttcatatccatgtattgtttcttctgatctggaaaagtcacggaaaggttgacttnnttgtctgatttgtttgattgtgaaattgggtttatttggttttatgat

SEQ ID NO: 38878 - DNA, 537 bp, Arabidopsis thaliana columbia
tccctcgaaattaacatcaattagctcgtcattctctagacatggaaagtccacaagctgcgagatcgagaacaagaggaagatggagagatcgtaccttgtagaatatcaaaccaccagatttgttaattatgtaaagactgtaaatcgctgccatttttttcccccgataatcttcaaagatccaaatccgagaaatcagcgagacgatgaagaacaacagtacagatcttattaatgatttttctttttctcaaaacggcgtcgttattatatcgatggtctctactcgcgccacgtcgcctaattaatttaacgacgtcgtcttttaaagaactagcgtctcttaaagcgccacgtgagctaatgtttaaaaaacttcaccaaaaatggtgtcgtttcaataacttttcttcaccaactaccaaaaacgtctgaagaagaaaaaagtataagtaaagcagagagaagagcaagggagaggtactaaaaatggcggtgacggaggaggagaagaagcggaattcaacggttgag

SEQ ID NO: 38879 - DNA, 499 bp, Arabidopsis thaliana columbia
caaattcaaaagtgtgtcccactagtcaaccttcttttgtctataaacccctcacttcacgaactagtggcttctgacgattactccatcaatttcatactcacatgtatacatacacatacacacaacactcactcacatatacaatttaagtagagttagggttttctaatgtgtttcatcactcatcaaatggttatgaaactatatgactacgtttcaggcatgggaacaaagatcgttgagcgaattactacaaaccaaagtggcttaaagagtgttgatcatagtgggttcatcagatttgttgttaatggtcgacaagaatcgtcaaaggagacgttgacagacgaggaagaagaaggagtttttattttaaggtcaatggataggtttcttgaaaagcaaaatgctgaatccatcagacatacaatgcaagcccaagaagatatttttaagcaacaggtacgttatacttgcatatatatatatatatata

SEQ ID NO: 38880 - DNA, 569 bp, Arabidopsis thaliana columbia
tgtttaaatttggcttccgtctgacatccatcagcttctacaatagtggttggtcagcttccgtctagcatcgtctagcttgtttagtaatgatggctagcttctgttatccaccggagtagtccggttttgcttcccgttctcgagttttctttttctactctttgtttttatcacagctaccttgtgtcgtgacgtgtttagtttcagtaattccgtgatctatgagacgacggtgtcaattcgatggccttgtttcgtttgatgcggattcccttttgttaagtaagcggtctacaacaagaatcaacgttgattgcaactaaggactaaggtaatgaaaaggaagctttgttttcagcaaattatggattgcctatagctgtctttacatgtattggtacttcgattcgagcaaatctctatggatcaatcagatcttcctcctctgttacctgttattcgtcagatctttctttgtttgttgatttgacatgcggatgaggatgagacttctgtttttgtatcccttccactgtattatgcagtatctggtgagaatcaataaa

SEQ ID NO: 38881 - DNA, 612 bp, Arabidopsis thaliana columbia
tcgggttttgattgtttataaagtaaaactgaaatatttgtcagttaattagaatttagttcatactactaaaatgaagattaaactcgttccgagtcaatgcgaaccgaataaacaacgatcgactgtaagaccaaaacgaatctctttattcggcgaagaccataaatttgtaactaaagataactacgtcaaagtgtaaaagtaaaataataaaaatctatttgaacacagttcttttactgggtagtttcaccctttacaaaatttgcagaatgtagttgcagcctattcgactttttgtaaatgaccaagttggcaacttaataaataccgcgtggtttatagctcatgtgcgtagacttccgtgtgaaaatggaagcggcacaaacagagttgttcaattttgttgacaggaacgcagctttagctacataacataagattagaggctttgagtagattctaagatatttaaatttatttgtactgtattctaactttttagattcattaaaagtatccagtaaagagaaattgtgtcatatgagagttaagagaattgttttgatcgacaagaaaagatgaaagttaatctttagtatttaaaga

SEQ ID NO: 38882 - DNA, 568 bp, Arabidopsis thaliana columbia
caataatcccaaccaatcaaaagttaatcacatgataagcagacacgagctcagcacatcaaacacattaagcaaactctgacctaggtttttggttaattcactaaaacctacacgtttcactatatcctaaacaaagtaagaagcaataatcaaagctgaaaatgatacaaaaatctacattttttgagaaaactcttaagatacaggaacagctctactacactatgaatgattgcaaacgagctatgaaaaccaaatcataagcatccatgacggcgatatgaaacgaaatcgaaagaccgagaaatattgtaccattctcgaatctgttggttgaaactagccgccgtccacagagagagtcgagcgaattcgccgtcgcgaggatataaagagatctcttaaaaactttgtatcaagaagccctaattcgtaaacctgaaattccatatttaccctctggacgatttatcaaacaatgggctttaaggcccaatcatatatcgctttaatgcccttcacagttttgccaatttacagtttgtcttacactttggtctcatat

SEQ ID NO: 38883 - DNA, 345 bp, Arabidopsis thaliana columbia
cacttctgcctccaccgccaccgccacctcctccccctctttttacgagcacaacttcattctcaccctcacagccacccccaccgccacctcctccccctactttttagtgagcacaacttcattctcaccctcacagccacccccaccgccacctcctccccctcattttacgagcacaacttcattctcatcctcacagccacccccaccaccacctctccctagtttcagcaatagagatcctttgacaacattgcatcaacctatcaataacactcctccaccagcacgtcctcctcccccgccactgccatctagaagcatccctccgccattagctca

SEQ ID NO: 38884 - DNA, 487 bp, Arabidopsis thaliana columbia
tgagaataacaatttcttctcttcaagtagtagtaatactggtcttgcacttcctcaatctttcatgtcttctgttccgcaagttgcttctgtagatttcaataggagaccagaaaccgggagcagcatgagcatgcttccttcgagtggtggaatctatggttatggaagttttccggtaacatttccttcttctgctcaaaatggatgatctcagtttctgtgtttataacttaagtttttctaactacaggtgggcaatacaagttatggatccaactcctcttactcatccaatctatatggagggtaagtttgcaagttagtttcgtttgttcagtattatattttcaactcttttccctgttgattatcttgtgaattcacagattgcctcagtctactactatggaggttcgaatcccagcaaatgcagtgggtaaagttatgggcagaggaggaggcaacttggacaacataagaaggg

SEQ ID NO: 38885 - DNA, 565 bp, Arabidopsis thaliana columbia
aagaagcaaccaacttgaaaaactttagacgaaagcatgtgtagaaaacacttactaggcaccataggcccaatagatgcaaaagcccaggcccatctcagaaaaatggcccatccaagaggaattgttcatcgttggagaaagcgtcaccacgtcccgtcttggtcttccatcgtcaactgtcttgagaactgtgaggatggctgaggatgagaggatggtggtcggcggggggtcggaggaggcgccagagaacatccctgaatcggggaaaagcgattccagggggacgaaggagaagagaagagcgacatatctaacctcgtgaaaagcatatctggggtatcctagcggctggtgaaagggcctctggtaacacaccgggaatagatctaccctagatgagagcaaggagacaccgaacaacaagtcggtgaaccaactttgtaggatctgggcgaaagtcaaatcacagaaaatgattctaaattgaaaccaagttgtaactaaagagaaaaaaatggaaaagcagaaacaaaagaaggaacccgacgccggtgaccat

SEQ ID NO: 38886 - DNA, 538 bp, Arabidopsis thaliana columbia
gtaatacagtgttgaaagatatggagaaagagaggaagaaggagaagatgaagcaatacgttcaatctcctgaagtgatggagatgtgtaggtttgctggagagattggtattcgtggtgatttgcttagagaacttagatttaaatgggcaagagagaaaatggacgacgctgagttttatgagagtttggaacagcaacgtgatttggataattcgattagggaatctgaaactgtggatggagaagtagaagaagaagggtttgttccttctgatgaagttgaatctaggagtatctcccttcctaaacgaaaggggaagttgaagtacaagatctacgggcttgagttgtcggatccgaaatgggttgaaatggctgataaaattcatgaagctgaggaagaggctgattggagagagcctaaacctgtaactggaaagtgcaaattggttatggagaagcttgagtctttgcaggagggagatgatccttcagggttgcttgctgaatgggctgagttattggagcctaaccg

SEQ ID NO: 38887 - DNA, 536 bp, Arabidopsis thaliana columbia
atccccatttgtctgagaaaaatgaagattttgaagacagttacagttcaaatttggatagagagagacaaagagaggaatgtctattgatttagttgagatttgaaggaaggaaggaagtgagtgatgatgatggtcttgtctcgttgagtgttgttggtatagagactagagagacaagtcgaagaaacaacctcagacttaacccactttgtcccatcgtttgcggagacaaacgaaacgcgctctcttgcagaaaaatcggtaagcaaataaccgaatgaaccgaaccgtaaaaacaaaaccgcatccgaaccgaactttttaaaataaccgaatagttagtaaaatgatattgaatcaaatgaaaaagttttatcgatcaatcacattcccaagtcatggctttgtggatagttaaaacttaaaagtaactagatattgcatcaaatgcattaggtagttcgattgcaattcagatgatatcttgtactaagcattttggttcattttagtggattttaagtttggagtga

SEQ ID NO: 38888 - DNA, 366 bp, Arabidopsis thaliana columbia
ttgttatctcttaatgctgggaactctttgagtatctgaaggaaacgtagaagtcagtctcagagagtctcaagagcaaacagagcaaggaagcatagaggaaattactttttcaaaagatatatagacatgaacaagagttatagaagtgcattttcacaagagtagagatgatattcagaagagtagcacaaatgaaagaatcacggaaaattcaaaagaagattgtttctagatataccagtgaggcgtattgtaattgttttctcattagcagagcttcaaatattaaattgggatgctcatgaagcgaagagcatctctgttgccaaggaagtggtaatgcagctaacactttcagaccta

SEQ ID NO: 38889 - DNA, 455 bp, Arabidopsis thaliana columbia
tagcataaattttgaagtgatatatggtttataatggtaagaatatttaatcattttcaatacagataactttcaaaattagacatactaaatgagatataaaaaattccattgatatacttccaataattatcacatttctaaactagcaaaatttattttattttaagacatagaagatacgcataatagtcaatgaactattgacttggaaaagatatcaccttggatattaagtctggactttttgcgtagttttcttataaaaaaaccatcaaaattaaatttctacaattattcattgacaacacaatctttggaaaaggctataatttgaagacaatatttggaattggctaatttgaggatggatagataacatttcgattggtttaagaaagaacactagatcgatatctcttggagagagttagaactaatgtgatgtctagacg

SEQ ID NO: 38890 - DNA, 439 bp, Arabidopsis thaliana columbia
ttgttttgcaatctacaactagccaattcagaatatcttattttcattttattcatatactttttgaaaagaaaagtcgaatcacatactttcttctctctatttctcattctctcttcttcatcatattactcattttatagaacagcaaaaccctagatttcctgttcaagctcaagaccgtacaaaactttggaactcatgtaagaaacagtacacgtttttgtttatgtgtcttcttcagtccggattataagaattttgtcgattgaagaaaacaggctaaattaaaccctaattttctctcttagacaattcctactttctctccatttttatggattcgctctcgttttaaaaggattcagaaattaactatattatttgaattcttttgccataattcccttgtgttttctgctaatggatatacatttgg

SEQ ID NO: 38891 - DNA, 541 bp, Arabidopsis thaliana columbia
tcagcgactattgttagtaggatatcttcatatccttgactatatttttcaatcaaggttctatttatgtatagtcgtatattcacattaactatgattgtaataccctagctacctctctgtgtatatacgactgtacataaatataacattgattgatatagtcaaagatatgaagatgtcgtaatacaattgttaggaacttcatagttcatttgatcaaaaatagtgttattttttattcaaccaaaaaaaagtatgtttacgtcatatgcaagttgcaaccttggataaaattcaaagctgaaaagaaaatagaaagagtttgaaagtgaaaacagggcaatttctatagcccgtcctctagaatcagattgtcgtgtccctgatggagcataatctcttgcggactacacgatcaacgagattggcgacatattcaggagggttcgggacctcactgtgtcgtctagagttgtgctccaccgttttttttttttttttgtcacaaaatcaaatgcactatcacagaatatgagag

SEQ ID NO: 38892 - DNA, 407 bp, Arabidopsis thaliana columbia
agttttgtaattgatgtgtcaaatttacgttgtaagttgagagattttaatgaactcaacagtccacatggtcacactcacacatgactcgcaaatagttgacaggaaatgttcacaaatttttgtaaaattgtaaactactattggattatgggaaactgaactaggttatgacactatcatttataagatgatctcatagtttgttgtctatatgattagtaattatacatatgatacagagaacgtacgatccagatcctatttccgcaaagagttttctgcataactaagatttgattcttcaaaaatgctaaatttaaagataaaccaggtcaatggcacaaacctatctagatataagtaagtttttcttcataatttaatttagtgcacacagacgactt

SEQ ID NO: 38893 - DNA, 590 bp, Arabidopsis thaliana columbia
gaagaattttgagtttctactgccgacacaaagataaattagccattgtcgaagtcgcagaaaagaccatagaaaaggctgttagggatatgcaacctcatttactgcagattatagtccaatggtatatgagaggtatcatagagtcttgtgaagaagatgaagaagattttagttgagggatgttctgtctgatttttattgcattttggatatagataatcaaccgattgatctcttgttgttaaccaaggtcttttccttcataaatgttttggcccatgttcttctagtctatgtttgtgggagtgggatgggatgggtaatatacgttgctattagatgtcctcaattatgctctgagaatcgaaaaggtattttcattgtcatccaaaatcataaattcatattttgctgcttcattaaactgtgtcctgaaaaatacatctatgcaatttattctcttatacagacaatgcagaaatatggtgaattccattagactataaaggtaatattacttctgcttctacttagaaaagacagcaaaattggtaccatagtccaaatgtgtgaaatagtttcagtaa

SEQ ID NO: 38894 - DNA, 590 bp, Arabidopsis thaliana columbia
cctaaattatttgtaacaacaatatagttgaattgatcggacaaatatcttttgttagaaactcgaacttaattcgttctttatttgctatcaaagactatacgtattatgcatgtaatagtaacttattggatttgacggtattaattaagtaacttggcaaatggataaccaaaatgatgtcaataaatcaataataatattgtaccgacgcttggaagtgttaaaacgatagaatgtagaagagagtgcaagtgatcaaatgttacgatgctttgtttactaaatttgtggtgtcttgcggttcacgagaacaagatgctgagaatgtaagtgactaaatcatttacacacatactgtatataatatgatggctccacgataatattttaagagagtgtaattgtaggatatatcttacaatatcaataattcatatttttcttaacgtaaaagattaggtcaatcaaacaaaaaaaagaatgaaacgatttgcatcaccaaattaataaatattaagacatattttaacaataagtttttgttttccgataactttgaaattatgaaatgcatgtactcgataata

SEQ ID NO: 38895 - DNA, 747 bp, Arabidopsis thaliana columbia
gtgttcgatgagtaatcgtacgatttccaagatcaaccttggtcgttgggtatatatttcggtaaaaaaatcatcgtcgaaacacaatcgatcattaattcttttatttgtcactgtagttaagccaattgaaactctaataaaaaattaagagcttaaaaacaatagaatatgcatctaaagatttttctttccttcaaaccaagacacaatctttaataatataattaaaacaaaaaaggtaaacataaaacaaagatgtttgaagacaccaaaaataggacggtgaaatttgacacaagtaataaaaaataaggtttgtattaatcaacggaaaaccatagattagaccattagagcattctcattgcataattatttttttagtgtctcgaaaccaatatatttaatattttaatattaaacgcaaactaaccattaaaaaaaaatttacagaagtggacgaaaaaagatttgctctcaccgtttgtcaaagtgagaactggtttttacggtttgtcttttcattcaatttcggaccaaattaccttgggaaaacttaataatggcacaaaccaaaccgtgcagcagttcgtatcggttcagttgatggcataaaccaaaccctacagcagttggtttcggtttagttgatgcggttcagttttgaaaaaggcaaaaccaaaaaactgaaacggagaaactgaagaacaagaaaaagagaagagagtacgggagagatttgag

SEQ ID NO: 38896 - DNA, 703 bp, Arabidopsis thaliana columbia
taactctcgccgatcccctatcgaatgaaacacactttttataaaaaaataatcttttataacatataaattcttggacaatgggcccttgagcatacacactcaaatccaaccaaatcaaaatcattaagttttgcaaaaagcaacaaactctataccggtttccctacgtcttgagtatttctctaatggttcccactatggtttccttcaaaaaaaagtggagtcataagtaatctaagattacttagtgagctcggtctacctacaacaaattttagttccccatccaataatcacacgcaacagagaatagcaacgaaaggtagcttaccgaagcatctaccaagaacatgcacatgcaattaagactccacttttattaagttttttaaaatagggcccgatatactgccttcaacccacaccaaacacacactcccgagatctctcgctttacaaccacaaaggcatgtaaccagagcatcccttccaaatgctacaccgtcgtgtagacaactcatccagggtatctagccccgtctctctgagcccttcgcactatgtggcgatcaagtaacaactttaacaagaccccacaatagcacggttcactacgaagatcagacataccacgatcttgatacgcttatggtctctgcctcctaccacgagcaccacgtatcaagacccaacaattcaa

SEQ ID NO: 38897 - DNA, 510 bp, Arabidopsis thaliana columbia
  unsure (1)..(510): unsure at all n locations
aatatgtcacatctttaaagcaaaatatatcacatcatcaatatatcaagatttatggttgcataataataaatcaagtttatgaaattctgaatctactaaaagattgtacaattgatatatatgtttcttaactaattaaaccaacttgttcgttcgaataacaaaactttaaattgaaactcctggttacataattcccagggacattaattaacagtttacgaaggaggagatcaccagccattctgaggatgtgatcgttatcttaatcaggtttgaacaatcaatctgaaacaacacacgctagctatatccttaataattgttacgtagacatatatatgtatatttttggtcaactatgtatgcatatatgtatggagtacatggagacttaaaattatgaatcatgagacaaattcgtgtggatactataaagtagtatatctttataagagnataagaaaaagtgataaagaaacacatggaacatttgctagtggagag

SEQ ID NO: 38898 - DNA, 485 bp, Arabidopsis thaliana columbia
cccgattaaaaaaaaaagaaatagccgaataaacatccttgtttacagtaccctatctcttatgaaatagattataatatatgattcttttctactctcataaggaatcactagaagattatgtttccatgggtaaactgaggacttttttatccgtaatccttgtgtttttgtatgcataaattaatctaaagccaatattcataaaccattagattcatttgaaagacaacaacagaaatacattcttttttttttttggacaaaacaacagaaatacattcaacaactaaaaaacataacattgaaaacataagcagaactccaaaaggaattcaagttctcacaacagcggttacaaaacccaatccaaatattaattcccaccgtttcctccatttgccccagtcgcatcctcctcggtccaagctccaggcatctgcgggtgtggcgcgtgtattcctaaaccgtaacaaaccggagtt

SEQ ID NO: 38899 - DNA, 536 bp, Arabidopsis thaliana columbia
tattgttagaagaagattgcttattgggcagataaaaggcccatttaattaaatcatttataagagaggttttgaaattgaaacccaagaaggattgaagtgttttcagcgggaactgaaacaaatgatctaagccgttaatttcttatcttttaacaagagaacaacacggagaacaaagctgagatttttcgaaaacacacaccctgaaattgaatgtgttcgtggatctaccaatgataagattatcacctggatttgcaatcaatcctcgttttcgatccgattcctttgtcaattcccagaaaccgccttttctctccgtccaaatcgggtcacagcggaggaatctctctagaatcggatcggagaacggcgacggcgtccgtttcgatgctgtagcttatgaggctgatcggttgagcctcgacgcggcggcgatggaggatatggcggagactgcaaagaaggaactagaatcggatccagatagtgacccgaaagcgtggaaatgggttaccgaaagaagatgtggg

SEQ ID NO: 38900 - DNA, 598 bp, Arabidopsis thaliana columbia
  unsure (1)..(598): unsure at all n locations
tctctcacagatgactctgttagatgtcgacacacctcaagtccattgggaaatggtgcagttatcgaaacttctgataagaagattattgtgttacgtcggagtaataatgttggggaatttccaggacactatgtattccctgggggccatccagaggtatttacatgaagcatccttatttacattaagcatcaccatattgtgtctgttactaactctttagcattgttgttgatgactttaaacattgcagccaacagcagtaggtattgattatcatcagcttgaaaacaatgttcaaaccggtgaggttttaaacaagaaggtaactcaagaaatgtttgatagcattatctgtgaagttgtcgaagaaactggaataccagcatcatcacttgtaagccggaatgagttcttttggtctctcacttaggcgtcccgagagatatctgattgatcttttatacaattacagagctcgcctctcttcatcggtatatctcgaagggagttgaatgtaagaccagctatgtttttctactcaagtgtagtcacattcagatgacattcanagattatctctagcgctgaagat

SEQ ID NO: 38901 - DNA, 520 bp, Arabidopsis thaliana columbia
tctccaacatgaacttctcatggcaatttgctataaacctatcagccaatttatcaatctcattcatcatcgtctctgtctcctcttcttggccgtctttaactttatcctctagctgtcttagatagctagagagctgagatggttcttgatcatcatcatcgcgaccatccatggattcagtggagtacattgactcccaagtcgattcgtgtacgagatgagctaagtagagctcttccgggagacgcactggcgcagagacaggcactgcgtgagaggagcaaaagttgtagtgaagtctgaaggagccgaataatatattattcttttgtttctttgagactctctttggatagagtaaagaagacactgacaagaaattgtattgcttctttctcaagactctaacaagaatggatgagactctagatatttctcggagtagccgacaaacttgagaaatgatgagagtttgtattagggatttgagtgtcatggagcttgaggttggtgaaga

SEQ ID NO: 38902 - DNA, 473 bp, Arabidopsis thaliana columbia
tcatttacacattttaaacctaaatagtttttttttttttggttttaacctaaataatttacaagtaagacaataactacatttttaattaatgttgagtttagaagtattactaaaagcatatcgtatggttgactctttgtacatcaacagaatattttattggtcgttgtattgaggtgaattatgcaactgatatataaaaaaaggactcataaccactagtgactcccaaaacatgggacaaaaacttaatcgacaccgaaccaaaaaaagaaggattaagttgccggaaaaatgcaccagcataaatgattgaatcaagtagaatattttcttattgacgaagttgtcagaaatgatacgtctgcatatttattagatcttgataaatgtacgctacatttgtctattccctaattatgatgacactatagttagaatatcgctagaaaagatatcccaaatatgcg

SEQ ID NO: 38903 - DNA, 511 bp, Arabidopsis thaliana columbia
agagattggttgatgtgcacacgtccaaagtcatggtctacattgttcggggagaacaatgttgtcacacaagtggaatttggggttgttgaaatggatggatgttgggcagttatctttaattatgttccaagtttgattcaaatcgagcaagctggaggcaataggaacataggtaaataaacaccgtctacatgtaatatctttgtgcgtgtgtgtatgtgtgtgtgtgtgtgatcatgttctttcagtttcaggcttttctaattcaatgacttaaagtgattcagaaaacatgtacaaagatacaagttgtgtgtgtgtttttcttaattttaccctgtctcttgtctgagttttctttttcacccaagatacaagttttacaactataaatcatcgcccaattcaccttgcaagttctaccactaagccaagcatggtatgttgcaagtataattggtgtttctctatatcttacaacacacagctgtaagttgaaatatttgga

SEQ ID NO: 38904 - DNA, 271 bp, Arabidopsis thaliana columbia
cacagaatatgaattccattgttactattgagggatacctactcgtcttattgcaacagaatttgactacaggaaagcgcaggtaactagttattaaagacaatagtaatagaagctgtgcaacgggaagaacaatacttaccagaactggaaatcctacaacgatagctccagcagaactcacaatcacagacaaagctgtgaaaaaggctgagctcagagcactcgagatcattccaagaacagaagcaccagcaccagcagaacctcc

SEQ ID NO: 38905 - DNA, 752 bp, Arabidopsis thaliana columbia
ttctaccttgttatgtagaacagaagcttcctggtcaaaaaagagccaagcctcatctggagctatctgtgcatcaattgaatcattcagtcccataacaaccaaatttcaaaccagatttttatatatcatacaagaagcaatatagccatgcagcaaacaattacctttggagataaggtagctttagaatcatcttggggagttgcttttgattttgcatgtggagggaagttcacagataagaagttcagaacctgcaaagtttgtgaaaagacccaaatccgatacacggagctggtcaacatgttgacttgtgggtccggcccaaaacatatttaatttcaaaaccgccaactaacaatgcaaaacaaactcttggcttgacaaacctgcaaaagagagagagggatgagcaatctaagattactcagtgaaggtaagctttagggctcacgaattctccatacacaaacatatctagaatcacaaatgggactacttcccataaccgcattatggcgggtctgatacaacgtggcaacacacgcttatcttcgtgctacggatcacatgtacctcttgcacatgttcctgacactattcactcgtgctacggatcacatcatgcctcttgcacttgttcctagcacttcacactcgtcggctcgtcggctcgtcagccatcctgatctatctgcaaacccgcatcaatagacgacacataactacaaggattccttcttatagga

SEQ ID NO: 38906 - DNA, 387 bp, Arabidopsis thaliana columbia
ggcttttatgtccattcccaatgtacgtactgttcgatacctcaccttcttgccctaaatagaacgaaaaaataatagaaagtaaaatggtatgagaggattgagcccgaaaacatcaatgcatgcaggtttaattttcttacagcaccatcgacactgtcgataaaaaatggagacttcatcataagatcctcaacaatgttcttaattggcggcagttttgcatgtctagcaatcatctcattaaattttactttcagcatatcatcctgcatataagaccaaaaagagggtttgatttttcagaaaatatttgccttcaatagattgttcctaacaagtgtttttttgaaactataataccctgagaatgcaggcatcaaatcc

SEQ ID NO: 38907 - DNA, 1045 bp, Arabidopsis thaliana columbia
aacaaaattgaaggaaggaagaaagaaaaacttccggaaattgaaatttataaggaagcttctgatgatgtaatgattgggtcttttttgtaagttatattctgtaccattttctgggtgggggttgtatcgacaaaatctgtagcgtagttttattttatttttgatttaatgatacattgtcacaacacatactaaaatgtatttttaatgcattcattaaataatgcttttattaaagtacaaaggctctttgtatgtttggtgtacccttttttattcaaccacaactcgaattcagccaaaatgaaactgttctttatgctttttatatgatccatttgtttgtttactataaagtttctctcaaatcattgtctgattgaagaagaaagaatattgctttccagacataatcggggttgtgctatctaatcaattgactaaatagtaccgagtctaccgacgcacagtgtgaacgtgttagctccaccgctatgaaaatcctgaaattcattgccttcttctcaggctttattttgccattggctttttggcagttagtattatgaatttatgatccagtctaatttaagaacatatgggtcagttttctgcgagcagatctaacttatcaaattctctcaagaatcaataataaaatgttaatccaacaaatctacaaaaatttgcaagtgtttaaaaatataaaacatctaaccagacttcaatcctcgacctatctactatgtcaaatagacatgatacaaaaatagaaagtccccgttgatgactgcttctgacaccaccaatgcttccattgccgctcacgctatcggcattaccaccgctactgctaccaacgtgtcataccagctgctactatcaccgtttccacttgcatgaattttcttgtgatggccgtaatagtggtggcagcaacggttaaaaggatggcttaacatgttcgtagcagaagcggtggtgattttggctgtcgctgaaaaaaatgatagcacaactggtacatatgttgtattattga

SEQ ID NO: 38908 - DNA, 570 bp, Arabidopsis thaliana columbia
  unsure (1)..(570): unsure at all n locations
tccctaatctagagagcgaagaacaataaaatcgtaaccctaaacagatccaattacaaagattcttcctcgtacctggagagacgaagaaggagagtgcaaatacgcagtaaccctaataatttcgaaacgaaggaagtgaaccgcggatgatactgcgattagtcttcaacccctatcttataacttggaaaccgacgagattcaacggtagcgatttgtttcaatcaacggtttagatttcacggcgagataaacgtcgatattaccgatatagaaaatagaaaattgcacactttccaatttagtacttttattgggccttatatcaactctaaagcccattaaagatttagcaaacatatgcaatttcgtattaatcataagtattaagtacatcataatcattggtcaagttactctaataattttctgttttgtaaatcagcgacgcttgttcttgcttccgatcaagagtgtgaagtagaagagaccctaaagaagaatcccaagctacagtgatcccaagcaattccatttgcttatcccgtgatccttgctgtncagtat

SEQ ID NO: 38909 - DNA, 484 bp, Arabidopsis thaliana columbia
tttcttttcttgtatatgaagttagagcattaaactaaagtgggagaacttgttaggaagagagtacgtggttatttataataatgaaataaaactctgttagttagctggagtttatatctgggaggaataattaatacaggaaaacataccagaactatatattatacatataaaaagaaatactattgaaatatgttatcaaaagaggtagcatagaaaggtatatgccactgtgtttggtatatctccctcccaactcacaagtcaacgtacttcctagtaacaaaccacgaagttgccactctttacattatcgctcacatatattattttatgtttatcatctgatcaacatcagatcgaatttatgttaaatttcaggttctccaacattgtttcgtacggagacgtatgagtagaacttttgttttgcacacgactaaactttttagtgatttaatttataatttctacattgaat

SEQ ID NO: 38910 - DNA, 544 bp, Arabidopsis thaliana columbia
cagaggacataaatgacccaatgacttaataatatatttggttgagacttaggagtagtgagattaaactacaaaataaggtaaattggaaaataaggaaaaacctttttcgatttcgatctctccttggtgaaaaaggaaattgaaaggggaaaaaacgccgacaacagtaaaccaaacttctcacaaaaactccttggaaagttttcaccttctttcagccctaaccccatcgtctctctctcgcgaccgcctcatctctctctgtctggatcaatctcgctctctctttctctcggctacgtcgctgtttctcgtttcgtgatccgtagctgtctccgctactaccttaatcagcgagcttcttccggtggaataatcttcggataggaggaatcggagaattcttctaattgggtgtctgggttggattggaatacgtaattctgttgggtgtccaatttcgcgttcaaaattagggtttatagaggtctcgcctatgcgtcctgggcgtaaaagaggagcgagcaaggccaaagccaaa

SEQ ID NO: 38911 - DNA, 533 bp, Arabidopsis thaliana columbia
tttttttacaaaattccgatttgcgtctacgctatttcatcatcatttttctattttgatggcaaaaatgtaacactttttgaacaattaagatatttattaatttcttctggacacctttatcttaagaaaataacatgatcatctatccatcaaattcattacattcggtagttatttcgttatgaaacactgcttaattttggatctcgtagttctagaaaagaaaagctacacatggacacatggtcgtccgaattagttgacatggtcatggttttatttagggctgttttactttatttcagaagctaatggtttaatatagattttaaagtttttatctatgattaggcgattagctattgatatggactttagttgacgttttaaaaagaaacaaaaactttagttgacaagattacagtcattcaaaaagggctactcttgcatctaatctaagtatgggtttgccaaaaaaatctaagtaagggcaatcacgcttctttctgttgtttgtcatttatattata

SEQ ID NO: 38912 - DNA, 461 bp, Arabidopsis thaliana columbia
tagtgggcacattaagttaattatgacatacgatacgataacaccaggtacatggtcactcgcagcatgaggaaccagatttcactgaagaaataagttacattatgacatgtctgatacaaatagattatggtccactattatatcaatatacctacgagaacacagaatgtctggactaaccaaacatttttcggagactatgcaaatctgatttgatttttgaaattagagctgaaggaagacagaatcataagcaattagagcgtgtttacaggtatagccaccaaaatttaattgcctttcatggaaacatattctccagaaaagatctatctgatatgatagatctgcagccaatatttgctggatattaactgacatatgactgatttggtatctataatttcggaccaattagggatcatggtagtgtctattatcaatagggaacaagaggg

SEQ ID NO: 38913 - DNA, 570 bp, Arabidopsis thaliana columbia
ctttaacaaatttcaaaactttctgtaaagcacacaaatatggatggatttatgaatcaatgagaaggcaagctccatgatacttagagattcaacgaaaaaaaatcaccaaattgagagtagctacacaagctaagagaacacaaatcaaaattttcaaaagatttcaatagctgtgaataacgaaattaccttgctttgctttgtgtatggagattctccttcaagcagagaacttcaaaagctcttcgaggtcaagaagagaacttcagaaacaaaacccactacttcgagatcgatgagcttactttgaaatcgcgagcagatccaaatcatgtaaaagagaacaagagatttcagatcgtgtaaaagagaagaagagaaaattttagatcgcggcgtaaatcgtgttggctttagggtttgatttttttttttgtgtgatttcttaaagatattaagcgtgtttaggtcatttgttacattaatcgcagctttttaatcgttgccgctgaattaaatcagcgttcaaaattactcgctgcagcattttgacgtaagtacgtgcag

SEQ ID NO: 38914 - DNA, 615 bp, Arabidopsis thaliana columbia
taccacaaaatcaagcttttgatagatctatctgggttatttactatagcaaatctgcaacatctttcatttaacccattggcgactaatctcccctaatgctcaacaccatgtctaagagaacaccatcaaacagcttgaatcaaccagaaacttaaggtaatttggactagagcaaaaccctaggcgagaatcgccctaacacgtgccgagacgatgagcaccgccgttgaattcgtcggaaccactggaattcaccggattgttgagaaacctccactcttctgccgatctcaaacccatgttcaagagacgtcgaaatcttccggatctattcatagagccgcttcaaaattctccgagtatcaccatcgccggggaggcttccaaaattatattttagcttttattctactatttgcgttaacatactacattttaatctcaatttgattaaccgactattcatctagcggactgtagagaagaggcaaatttattaaatagttaaattatgaatcaaatcgttgagaatgaattacaatttgtgggagtttagtttcttctatagcggaaaaaaagggtattaaacagagaggagagatactggtttga

SEQ ID NO: 38915 - DNA, 888 bp, Arabidopsis thaliana columbia
tcttacttctctaagctttaggaaaccactctcgcgggtcaagtcatttcaatttgatccgggtcgagtatccttggactacgcacgggcaagaatacctgattacctttctcaacattccgccgtggtccacaagggtctcgacggttccttggagactcggtacatgagctccactttcacgtttaacttggagggcttcattgatgggtttgaagcgagggtgacttaatcaccttccttctcgtctttgtcctccagttaaatttttcttcttccatggacttctccttgcccatccccttctccttccatgaaagcttactccattgcacgcaaaagttcaaaaccgacctctactactccgacttcttacttccggacaagggttactacagtgttcttgattatattattgagataatgatgatttgatcgtacaagtgtttagaaatacagatataagtgtttttgccttcaaagtcagagcgtttttgatagcctgaagttgagagcatttttgtgcgtatcctctttgtttgtcctttgaggtgctttatatagggctctgacgaatcgcctcccgcgatattctcggaagatttccagttatcttagagtcggtgatagagattatctttatccttagagaatttcgcgggatcttccatattcggcaatatccttggagattttccaatatcatttccgggttttccaggaatagtgtttcgatcttacatcggttctaagtcttctcctcggacacgaagtttctcccaagccgggtcaagttggtcctcgggttgtggtcgggcggctcatctcctggatgtatggctgagccgagtgatagtggtcccgaggcgtttcgaggcctgcttcggg

SEQ ID NO: 38916 - DNA, 496 bp, Arabidopsis thaliana columbia
tattcacccgtgattgcacttttatttacctgttatttgtgttacctgttaattgcattttagttcttgaaatttgttgcatgttggttctactcgacccaatgatcaagtagggctcttaagttcttatctttgttgtttgaatcctaacctagaattgttactagaaaccaaccatctctataatatggtttgacttagttgcttctgtacacatcttgattgctaacaataacagtggactggattgacactttctatagctgcatcgacatgtcagtgtttaaggggaattgaactgaatacactaatatgtcgtgatttttactgatttctaacatagtttagaatggtttttagagtctttctagtatttttcgtatgttttgagtcattttaggtacacttacacatctgggaactatggagcacaataaggaattttggaagcttttcagcaataaagatcttgaaggacgtttttcagaagcttgtg

SEQ ID NO: 38917 - DNA, 703 bp, Arabidopsis thaliana columbia
gtgaaggttgattctcatatctttccagatcgacaagaaatccatctcaaaagcggctgatctgataacagtggaactccgctctatggtttcggccaggatgcgctcgtccggaaaaacagtgagaattcttactagactgcaacaaaagaggcaaagtcgggttctttagaaagataagccttgtagcttcataatgataagccgggaaatcgatctgaaagctggcggatatgtggtctgataaatacacatgcttgagagaaacgcctataactcccggaaaacagcatagaattaggcaaagtacatctttatggcaagataagtctcttagcttcagaacgatatgtagatgggctcttgatgtgtttttaatcgctgggaatctatcttctaccccaattgttctcgcagttcgagtctgcgatttttagagatgtcatatgttgcgtggaaacagtgctaacgcttagtacacagctccgatattggtgaggttgattgtgttggaaggacaagcctcttatcttcagattgataggtaaaacacctcgttatgctttctagatcaccaggaatttcgttttaaagttggttgttctgacagcggcgattttgacaaaaagattgcatccgaggaagagaagcgatgataactcctagtagacaggtcggatcgagacgaggtaggcttctttgg

SEQ ID NO: 38918 - DNA, 526 bp, Arabidopsis thaliana columbia
tgcaaaatacaaaatgaaaagtctatataattgacccaaagttttggtctttatcttcttatcttgcaaaagaacacgcttttgaaaaagtttgaataagagagaatcaaactgtaccaatgggggaaactttctctgataaagctgactcttgaattttgtttgagagagaagacgacttcaacagccactatttatagcggtgttctttgcctttagaaaattacgatattacccctctgaccaggaggaattaaaaaaaagtttaaaatctttaagtatggaactgtttcttctatgtcgttataatttaattttcttaatcaacatttgaatatgcgttccaacaattttaaaaaggtggaaattgcgtgagatcataagattatcgaccttcgaggaacaaaatgcatgtccataatttgctgacattttcgctaactttgtctccgttcatggacaaaggtaagttcccaagtaattgaatttgaggccttacaacgacaacgccaacaacatgaccaag

SEQ ID NO: 38919 - DNA, 519 bp, Arabidopsis thaliana columbia
ttgtcaaccaaaagatgaaagtgctactaaaacagaaaacttggtaaggagatcaagaaagatccattgcatatcctagaatataacatactaatcatcaatgtatgatgcatgattcgagaatggcatttcacatgtttgaactcataaaccaaaggtttagagaatacgcgatacaaatactacctaatttacactattggagtctcttttacgtttaaaataactgtcgtttgggacaaaaccacattatattatgtgcttgagaggattacgggttttgacccaaaacgtaagtggtaaccttcaggattacggtttttgttaaggtcttcgcagcgaacgcgttttgcttaacggttactaattactcgattgaccgttgatccatcagatacaccaaccggacggtcctgaatcgtccacgttttgcggttaatgttaggcctactagattaaagtgaggcccaatacggcccattaattcaaaattcaaattttaaccccaactttctttct

SEQ ID NO: 38920 - DNA, 559 bp, Arabidopsis thaliana columbia
gcctaaaacaagcaagaaaatacctttgccgtatacaaagattattaccattattatcgacatcacagaatgtagcccgtctagctcagttggtagagcgcaaggctcttaaccttgtggtcgtgggttcgagccccacggtgggcgatagtgttttttctgttgtttttgtaaagagctgaagttataaatgggctttgaaattaatgggttcgaacaccaacggtgggcctttttttctttctatttttgtaaagagctgaattttaaaatgggctttgaaattaatggatcagtgaggttaaggcccatatttctaataaaattagaagtagttacaaacccgacccgacccggttacgtgtatgcggagatcactctcctctccataagctaagctctagaaacaccgcctttaacgtctcgctgcaccatttttcatcgttgatcagtcgtcgatcctcttgagtgatttgattttagactttctagttatcaaactcgaaagatggattctgtccttgtagtgggcattgcatcggttattctcggtgcgttg

SEQ ID NO: 38921 - DNA, 596 bp, Arabidopsis thaliana columbia
cttccccatcctctctgttctttttggttccttaacgttcatgatttcagtttctcatacacaatctagattgaaatctaacaaactccgaaattgtgatcataggatgccaatcacagtgtatatgaaagacgataaagctggaggactgataagtattgcagaatatggtcaagaatacggtaaagacgacccaatccgagtcctataccatggttttggtcattacgatgcccttttgcttcacgagagtaaagcttcgattccaaaatctaaactttagtatacttagttttgcatctttgacttttgtcaggtgttgatgatgtttttgtttactgacacaaccactatctgtatgccttgtagaatgtaacctttttttaccttttactttgaataaaaattttcagtttcaaatgatatgctcgcttcaaaatcttagcttctggatagatacaaagcttattgtagatactcgaaaagagtatatgtggtcagtgtgatatcaggccattgtggttgaaaagttgaataatgatttaaaatgggtccaaacgtgacaaaagttagtctacttcatagaattgagtgga

SEQ ID NO: 38922 - DNA, 451 bp, Arabidopsis thaliana columbia
tccccacattcaattacttactcgtttatagaaactgtgaggttccaatttcctatatttaaaccccaaattaatcaagcaataaaagtaaagagttttctgcccttgaagttacactaactaatattagtaggaaacttatcacacatatctataaatatatcttccatagaaggaagcgactaagacagataaaaactaaactacatattgacctagaagatccaacaattttgacaaaacttcacttaatttgttttgttaatagatatcagtcctattgtgaagttaagctctttgcatcaacctaagtatgcaaaaagagtaactgagtaactaagggttccacgttctaaaaggcttcttctttattaaatcataattaagaccaggagttctagtcaggtgtctcgacaattccaaggctggacctaactaggggtggacaaat

SEQ ID NO: 38923 - DNA, 514 bp, Arabidopsis thaliana columbia
gggtaatctcacgggttttaaactcattttaacatatataaacatagtactagcccccaacgatatatagtcgaaacacatatctatccaccaaactctttttgataggtcgatcaatatcaatgatttgtctacactctacaccaaacaactgatagtacatatagtcgtaaatcatataaccatttcgaatctaacttacaaggttggtgtctttcatatgttatttgttttggtgagattcaattaagttccacagaaattggtaatgattagtagggggtactgttgattatacgtaaaagaaagggtgtaatttctaattacttaagagtttggtgcctttagcagtaacaatagaagatgtgagaaagatggaaaaagaaaaaccatacaaaggacaccatcacaaaatttacaaatcctaattttatacaaaattaaacatactcaatactaattctttttgcttaacatcaaacggattactttgtttcttttggaaaagtttagt

SEQ ID NO: 38924 - DNA, 286 bp, Arabidopsis thaliana columbia
gtagctcgacgaaaatttaacacattattttattaaatgtacattttaagtatattcctttgatattcctacaaataaatatattaatatttaatatgttaaacaataagatagaattctaagataattgaccacatgtctataaataaatttgataaaatatattcatacatagaaaaatagcatgatacccagacaaataacgtgtcttacaacactgagaggcatcagataaacagtataaatgagatacctacgtaaaaaataacatgttacgaaaaatgat

SEQ ID NO: 38925 - DNA, 221 bp, Arabidopsis thaliana columbia
cggcgccggccgcaagggttttcggcgctgcagcaggcgatcaccgatgggggcccgttcggctatgtcgccttcgacctgctggaactggacggccggaacctgcgtgcccggcccctgaccgagcggcgggcggcactggaggaactgctggcagaggtgccgccgctagggctgatcgagctgtccgtcgcgctgcccggggacggcaccaccgcgct

SEQ ID NO: 38926 - DNA, 553 bp, Arabidopsis thaliana columbia
tataaaattgtcattatttatcgtaaaaaacatccacaaaaataaaaatttatcaatttatatgaaagtttgtggttaaataaataaaaaatctgtcaatcaaattaaatctgctataatttataaatctgtcataactatcttttaaaaagtctgtcaaccaaaaaagtctgccataaaaaatctgtcgcagttaaacaagtctgcggaataaaaataaatctgtcataactaaacgatagacttttataaaattgctggaatttttttaaaagggtatctttgtatttattttattttcaacacataagaaaagggtattttagacaagaaaagaaccaatttaacatcaatatttttgaagacattctagtaattaatctcattatttgggttaatctagttttattctcttaaaggtttctcaaacaccatccaaataatactatttttgaagtcttttgtttcaactttgcagaaaatgttgttagtcaatttcacgaagttgaatttgatcaacaacatagttctagtatttccgatgagcttttat

SEQ ID NO: 38927 - DNA, 551 bp, Arabidopsis thaliana columbia
cgagccagcaatcaaagaaaggatcttactttcgataagagaagtcattttgataaatgtgttcatattgtggcagctcatctccttcttgatccttcacacaaaaacatcattggcgaaattcgcacaaacaaaacaaaccaaatcgaaatctcacccaatttcacttacaggatcacaagaaaattgcatttttttgtcagcgattctcgcaatcagactcagggcctagtataggtcaagtttctacaaaattaaaaacggaaggagagaattaggtttatcaaactctgggattttaagatcgacacaaacctttggaaaggaagaaacttgcagctagaaacgaaaccacattacttaacacatatttatttgcaaacacacaaaattggatattggtgtaagagggaaagtgggaaactgaagaagcttacctgagagtttgagagagagaacgcgacgacgagcgaggacgaagaacaatagacggcgttaggaaaagaatcaaccaacttttctttttcttttaaaattaggaaaaacaatag

SEQ ID NO: 38928 - DNA, 587 bp, Arabidopsis thaliana columbia
  unsure (1)..(587): unsure at all n locations
aataccaatggtgtgaggataagcaacatttcacttgtctcctgattgtcttgtggtcaggtttgttacttcttcctctattgggttgtggaggattagaatctctcacatggagataagatgcttatgtatgtcttttggttgtaatcatataattatataaatcatgtgtttcatttctcttgtaaaatcatgatagtgttcaacaacctcgttaatatatctattgatggtaagaaacaaataggctgttccaaatctacatacttcagtcatcaatgtgtcagggtttatgccattagtgagataagtcgttatacaacacaattcgaattggtctgcctttaatcatcaagaggaacaaaaagttaagccaaatttacaaataagatgattacaaataaatgtttgcagatttgaacatccacaataatgatttgaatcatcctaagatctagatctcaataccaaacgtacataaaaatatttgaaatttgaacacacacacatgatccccccaatcgaatcataacgatagaaactanagtaaagagggggcattttggacattgtatacctataaggtt

SEQ ID NO: 38929 - DNA, 503 bp, Arabidopsis thaliana columbia
atgcggcggaacgaattacgctcaaaaccacagcatgtacatacacatctgccacaggtttgccttctggtgtgcgttctactatccattctacgaccggccttaaaacgcaaaaggctactagaatcaaaatgatcaccgctataaggtcacgatatgctgtcatgggagagatgttcttgtacgttcccacaagataggcgaaaatgctgacagtagacgcgaagatgtcattgataagggatgctgacaacacaaggcgaccaagctctgaattgaggatcttgagttctgacaggagatgaacgacggtaggcaagagaatcgaggattggctcgagatgaccacaatgcgctcggcaaggactttattcggcgacatgtagtaagggtctatattatcagtgtggaggttttcacacagaagccacccaaaaagggacaatgaagctcaaagtcctatcacgatgggtaccatccgttgttgaatgccaatcgacgct

SEQ ID NO: 38930 - DNA, 608 bp, Arabidopsis thaliana columbia
ttaagtttggtcgtaatgccaagtgaactttctgattatgttttttctcattgattgagattgatcctttcctccaaaagaatcaatgctagaaaaattgcagtttcaacgagacccattgttgattgtgtgcgatatgtttaactttctggatataaccaattttcatatttttgctggatatgattgcaggatgcagctgcagaaaacaaggagaaggcaaagctaaaaatgagactcaggggtatgcaagcacgcttagatgcaatcagtctacggtacaagcagtctgtgcaagaatcagaacttatgaacaggaagttcaaagaggcatctgctaagctaaaggagaagttagcatcaaaagcactcgaagttctcgacctcaagaagcaactctctgcttcttcaagaacaatgtgatgagcttacatcacaactcttaagtagttgattcacggctagtaaatgtcttaaagctgtaaactgttaaatgattaacgtcataatcacagagaactgatgtgattatggaagagcccaatcatatataaattatgataggtagattaacaaattacatggagtttatgctaaagtaattaaga

SEQ ID NO: 38931 - DNA, 493 bp, Arabidopsis thaliana columbia
taacaaaccacgttgatcttcacaaaagggcatcagaattatcaaattgcatcagaaatactgctccactggtccactatctaaaatacggcgtgaaaaatgccaaaaattattgaacaaatacaaaatacaaatacagaagatcaatttttttaaaaaattagaatttattggacccaaaaaattcagaatactaacgattttcaacttcatactagaaaattagaaatggacgaatgtcaaatctaaaattcatatgaatgcgtaataaataactctaaatatttggattgcgtaaaatccgaatggtgaaaagtaaagtccaaattaataaatttagaaaatatgtctggcttagatcagatctcatatgcaaatggaaaaaaataaaaattacaaaggcaagggtttggtgcaatttagtttcagttgggtggtgttaatataaaaggcccataagcttcacacttcatcgtctcctctccaccaagtg

SEQ ID NO: 38932 - DNA, 789 bp, Arabidopsis thaliana columbia
cctatgtaaagaccgtgtgtatatgcacggatgacagatttttcacgccaagatttaatacgtggcaaactatggttggttgttataataggaagttacttgtctagagttcgatggctgacccaccggctaaactgtctttctccgtccacttgtttttagacagaggacgatttcacatgtatgttagtatgaaaattttccagctatataccattgtatgaagagaaagatattttccaactaacttctagtcctagacatttacgcaagctttgcattaactaaaagtatgttaccgaaaatgatgtcgttatagaagttcgttgtgccttatgaataggttttttaaaacataaagtatgcatggcttatgagttatgaatattgattttctgatttgacaaaaccattgtaaaattcaaaacttataattctatctaactagttatttttcttcttcttttagtactgttatatattggcgagatatgtatttgatcactttaaaatattaaggtgtatatgttgtatctatactgcaaccaaatttggatatcttttaaatatgtatttcatattttctatttgactaataaataatattagttgaactttttgtgtggagattatatctaatccatcgctttcactaatttctaaaactagtattatatatcgacattcgacgtactgtagtctgaatcaattagtatcacaaccaattttttccctcgcataatcacgctcgcctcattaccttacgtggactaattatataagtacgtt

SEQ ID NO: 38933 - DNA, 669 bp, Arabidopsis thaliana columbia
tcaaacttaaaaccaatgaaaatgtctataattcacaaacgaatacgtaatgattaattagaatgaagttaaaacgaatacatgtgaggtgttgcggaacttcggggcgaaggcaagacccgtttataagtttttttgtaatctcaaatcatcactttgttggttacacttacaagttagcctccaaattaattatactcttccctaatgttggttggttaccaagattaatttctattttaaataaaagtcaaattacaacacacgaagagattaatcaatatatatatatatatcatatcgtgattacctcaataggtagatagaaaatatattggtctatcgaaagtcttaaaccgaaatgaaacttcaaggatacggctatttgatacgacttcaactcaaatcttaaaatataagtctaatttacacacaatcatattatggatgcacaaaacctcagttgctttgaaagaaccaaaaatcaaacgttactaatggaaaacattagattactttatcataatatgttttgagaaccttatatattttgtaacaaataattcataaatataactagatctcaaaatttcttagttggcaatttggcaaacaaattaaagagctggaattttatttttttggtttgttggcacttaggatttgtga

SEQ ID NO: 38934 - DNA, 764 bp, Arabidopsis thaliana columbia
ttttcgagtggcacagatctacgatggttccattcactagttagattggttcaacaatcctaaagaaaaacaatcctaaagaaactaagagatcaaaaccagaatcgattctcgtgcgttatctctccggtgaggatgattcacgcggtgactccggctcaacacaacaacgatctccggtggtctgagtggtgcaaggttgccggcttagggtttttgtgacttgatttggagtttgcgttctccttttataatcacgtgggatcattaggttttcacttggattcaaatcattagcgggctggactagggcctcatagtctaattgtaaaataggggtgttacaagtatccaaagtaacccgaggggttaaggccactgcaacaaaggcagcaaagtgtataggccgggaggaagatctttccaataccgacaaaccttgaacatccaatccagtccatatatgagggaatattgggaagagaaactgctccattaaggagataaaaaggtaacaatgatccgacaagatcagatttaccgggagagattatcgcttaatctctttccaagctgcctgcaagaaaacaaaattactttttatttacttgtttcaaagcatcacaagcaacccagggattttagaaacaagaagccagggtatgagaaatctatgctcagtggaattagcaaaccacatggaccaagatgcgtcatcatcattggaaagagattgatgatgtcaatggatagtgagaaaggtg

SEQ ID NO: 38935 - DNA, 475 bp, Arabidopsis thaliana columbia
tgtttggttgtctctaaattatggagttaaagtccttcgagaatgattttcagagtttgatcttactcaccaccaaatcagatccttgaaaatcttcttttaattttctatttgctgcttgtcgagagtttggaaaagtaacatttttgtttttgctaattgttgcattcacaactgcagcctcgggactaattgtagatgctgttaacaattcagtaactcacgttcagaaaaaaaagttctgaagctggattttctgaatgatctgaagataataatttacaatatacacgtacacaaatacgttcacttgaataaatagatgataagtacaaaaataattgttacaaaactgataactcacaaattaaacagtatttactttaaggattttttacacaaacctttaccaaacatgtataagtagattggtagaggaatgttaatgaatcgtatacaacagtaatgatttgag

SEQ ID NO: 38936 - DNA, 311 bp, Arabidopsis thaliana columbia
ccccatcatttagctaattaaaattataggtccacatttcattgtaaaattaaaatagtcctaatatatgttaattacttttaaaaatcaacaaagggtccacaactcattaattgataattaatataattataaactcgaatatagtatgattagctaaaaggacccccattatattttatatagataactgtatattatatcctgcttcttttgagcagtaaatatatttcttataaatgggaggtcgtattctttaataaattacaatgaacagacatttttacttagtgacatagattgatttttcg

SEQ ID NO: 38937 - DNA, 1472 bp, Arabidopsis thaliana columbia
ggtgatccaagcttttcagaaaccccagctggcttcactgataccttcgcatttacaggtagagcagatgacattacattttgggcattgcgtgctttcacagaggaagtcgaatcagaggaaagatgtgcaggagcagcgggtctgataagctgtggagcagtatgagcaggttggttgataagttgtactctctgagacccatcaataactgggtaatgatatctcggtgcctgagcggatgacattggaccattatttaacggtaccgaaaccgggggatatatcatggtattggagttatatgagggttgcaccaaattgactggtcttggagcaaatgatgagactggctgtgatctgggaggtgggttagaatgtggttttaaagccgttgaatcgccttctgaatacgggtcaccacgtcgatcaagcctcagctcttcgtgtgtgtcaggatgtgtaatctttacaggggtggtcttgcgtgccccaccatattttccaccttgctgctggggatactgagggctcaaacccacacccacatggcctaactgaggatgaatctgagcacccattggagttgcaaaaccatgtccctgagcctgatgcatcataccctgatgatgcatcggatgtggtggatgtcctgataaaacacctgcggcgggatttgaggagtattcccatagataatgccattggcattggcatctgaaacgaggttgcagtcacgggagtctgcatatgcatattcggcccaccaaaatgtacagggtgagggacctgagtatgctgatatggtgtctgcacagaaggcatgcgaatatttgtaattggagacttctgcgtttgacttggaggggctatatgtgggacttggatatcagctttttcactcgatggattgtgcccctctttcctcatcaattgattatctgcacccttatttgatgaatcttttttgggtacagaagctggcacatttgacgccgttcttaaagaagattgctgcatctgcaaaacaatgtttgctcgtgtcataaacgaaaggtcaagttcagaacaaagtgaataaaagacatcttaagtttcagtatatattctttaaaccaatttgagttaaagatcaagcaatcaggccagcaaatcgcaatacaagacaaatgatagagcatttaaaagtcagaagcaaagttcgagacacagactattcatcatcctataagaaagaattatttatgtaggcaacaatcacagtaacggcagatgcataatactaaaaggtgttccactgggcacgtttctggtcatccatattcggaggtgctgaggtagttcgagcaggaacctagaaaaccaacagggaagattattcaggtgttgatggaaaaatcaaacaaacaaaggaaggaacaacagcattaccatcagatcaggaccaagtgacccaaactggagaggaaatg

SEQ ID NO: 38938 - DNA, 740 bp, Arabidopsis thaliana columbia
agagtgtcgacatttttgtttatctacataaaaagatcaaaatctaaaggaatcgaaaaaaggaaatttacgaaagaagaggaactctaataatttgatcggaatcttgatcttgatcttgatcttcttcaccacaatcataaacagatctaaccaaaaccaactgatcttccaagtatctctgaagcaaaccagcttcttccggttcatcaaacccgccgcaaccacatccttcttcacatctccggagcctcaaatcatcttcctcggcggtggatttagcaaaccaaggatgacgactacggagacgactaaagatctcgacggcgcagaggattgggattgaggcacagaggattgggattagtaatggagaacagaggagaaagaaaacgaaacggctccgtcgtgtacgaagccaaaagacgtcggtcaacataatggtgacgacggcgcgtgaagagtcatggctggagtaaatggggaggagaggaggtcgtgggttgtacgacacgactttggtaaatgagtgggatcatggagaagcttctttggcacatgactttgttctttttatttgacttttttatatacttgtgtttggtttttgtcatgtgactgttttttacttatttacaaaatttgataaatctgtttgttatatgagcaagaccagtttggaggaaagttattatgaaatacaaagagtcggaaagtacaagaacattctgaagacagat

SEQ ID NO: 38939 - DNA, 485 bp, Arabidopsis thaliana columbia
tgagttaaatatatatcattcaaacatgtactattttataaaatatagacattccttttaatgttttaaaactaaatatgtttaatttataaatttatgaagagatgatagataacacacatgaaaaggatgaaaaaaaaaatgaaaaaaaaataacagacatgaaaagatgatagttgatattaacacacataaaaacgcaatcctaaccaacatgcatataagaaaattgtgttctatttgtttcttgagattaaagtcttgatccaagatatagttctaaaaatattactaaaactcgatcatggttttgacattaatattgcgttattaattatacattttgtagaagttctgattttacactactgcatgtatatatcacatatgtggcttatcagccggacaaggataaacgcgtacacatgtaccagagccaccatctcggtcacagtagccacgtgcttgtggtccaaatctagaaa

SEQ ID NO: 38940 - DNA, 1257 bp, Arabidopsis thaliana columbia
tcggtccgccagcaaagtcgcctgtggagactgttccgctagcaaagtcgtctgtggagattgttccgccagtaaagtcgtctgtggagactgctccagttacaacgactgaaatcagaagagcggaaatggtgagtgagtcgatctcagttgaagatcagacatgtaaggtggaaccccctcataatctgactgaggtatgatactgtgttttgtttttgggtattattcattaattctttttcttatttgattaaattattttctttttttggctggttcactcagaatcgtggacagactatgccagactctctggtctctgatcctgaaacagcaaccgttgctgccaaggaaaatttatcactcccagctaccaacgggtttaggaagcaactcctgaaggtgtctactacatctgatgctccaacttctgactcagtagatacaagtattgacaaatctacggaaggttcaagccatgcctcatcggagatttctggttcttcaccgcaagagaaagacctaaaatgtgataaccggactgcttctgacaagctcgatgaaaggtctgtaatttctgatgcaaaacacgaaacactgtcaggtgtgcttgagaaggcacagaatgaggtagatggtgccacagatgtctgtcctgtctctgaaaaactagctgttacagatgatacgagctctgaccttccacattctactcatgttctgtcttctactgttcctcttggacattcggaaacacataaatctgctgttgaaacaaacacgagaagaaatacttctacaaaaggaaagaagaagataaaagaaatccttcaaaaagcagatgctgcagggacaacttctgatctctatatggcttacaaagggcctgaggaaaagaaagagagctcaaatgttgttcatgatgtttcgaaccagaacctgttacctgccatacctcaggctgttgaagccattgtggatactgaaccagtgaaaaatgaaccagaagactgggaagatgcagccgatgtttctacaccaaagctggaaactgcagataattctgtgaatgcaaagagaggtcctcagatgaggtcagcgacaactgcatcaatacagaaaagaagtacaccgcgggattcctcctaaagtttgcagacctgtgtactgctcttcctgagggatttgacgtttcgcctgatattgctaatgccttgattgttgcatatatgggtgcatcacatcatgacatga

SEQ ID NO: 38941 - DNA, 1492 bp, Arabidopsis thaliana columbia
actcatttaaggtcacaaaaacgcgctagtaactttacaatggaccgttcacttattaatcccaccgttgttctcaaccctatagtgccacgaaactgcccaaaacaattcaccctgatcagaatttgttaagacctccaaacactgttctaaagatgacacattgaatctgtgtatctagggtttcaggaattggcagaaacaccaatttcttgcttaagaagcaatcgtcgtggtgattatgatttaccttttccgacgattttgacggctcagatagcttccctaacacttcctctatcaaaaaccaccgtagatattttctatgcggctcaggtattaccggaaatatcctccaaaaactccaacttgaatctgaaatattttgctgaaataacttagcttttctgaaaacagaaccagtgatttatcataaacttgcgagatgaattgtgaatgcaatatacctctgtttgataaaccgtaaaatgctatggactccttgcagctagatgtatcccgggacggtaaaagctcgatgtaactctctttggttcgacgggtaagtagtcctcaaaacccttacttgtcacagtttcctcttcttcttcttcacaaacaaaacctagatttaaactaagagtctatgagatcaaaacaaaaatttgcagaagaagaagacataaacaggttaggtttccttacccaacaaaccaatgatgacaaggctcgactccggttaacaccggccacaacttcaatgaaacacggccacgtacgaagcgacgatggtgacttttcccactacgatccttctttgtctcagtcattgtctctctctctctctctcgtttcttcttttggcggcatttctaaacaaagagggagatgattacgcttatacacatatatggccacaagaaacgagttaaccttgtcgtttttataactttgctctccttggtttaatgggctacaacatttcatcttattaaactaaatagcccatcaattgagattgaggatgttctaattttccccaacttaaatggaattcgtccctgtgggaaggttgttaaagagtgatgacttgggttcgaggaacgccaaacgcaccaataacttacccgtgggcttggagggcctataggagagtggttagggttgttgtgctacagcgccaactggacgcaacgtgggagagagtagccacgtgggcgggtcccacgggacaggttgttacagtttggattgtatctcgtagtcgtagatcaaattttattaagagatggaatgatggacagtgtgcgagtaaaacacacacacaactgttgaagtaactggaaagcaaagtgtaattcaagcgactcgaatcatttccttttttctcggatccagatatttgacggaatttaactcggtgctagatattgatttattcttagcttaagtcgggttaatcggagaatgttaaaccattctcttatagagt

SEQ ID NO: 38942 - DNA, 778 bp, Arabidopsis thaliana columbia
actctagagattttattaaatttaataacctatgtattaactgtaaaataaaattattagataacttaggttccgaactttccataaaacgttggtaagtttttgtgtcattttgttaaataatacaaacactacctttaattacctgtgctactataaattcaacatccaaaaattttagcatatttttaaaaaacataatttatttcagatatttagtaaattctgctatttttaactacttttatttatggttattaatatctgtttatcacagaaattaaactttaactatttatctttacatataaagttattaaaagaaccaaaaacataataaaggagaatttgagtggatacaagttgtaaacttttttaagatcataaacaccatatatccctataaagataaagaatacgacaaacttagatctttttcctccaacgtgatatctagtagtaatgaaaaaacacatgatagttaataaatagatcttgaccctataaaataagtaaagacttttttaaagatagcaaaagtaaactctgtaagaagtctccaatggagaacaatctaactcttccaatgtggcataggcctaatttggggatcttcttatatttcgggtaaaatcacacactcatgtaaaaataccgacatcactatcattattacaaacagtacttttctttcattattatagtttagaaaaaaaaataactcgtttatttatataataactttataaggaaaaaagttgtttccgaccagcaaaat

SEQ ID NO: 38943 - DNA, 404 bp, Arabidopsis thaliana columbia
aatactatcagatgtcaagtggtacggacggcgtaagatctaaggatctgtttgcttctaaaactcaaccctaacatgcatctttactaagttctcataaagctattgcgtaaaacatattgatgactaataacatcggtagaacatattaattcacatgtagtaaaatgaataacttgtcgtctaatgccataaatgagttgttctaggtgacaatattcttggaaacaatctcatgtgcttcttggaattttacttcaaataaatctctgacttttgttgacttcttggttaattacattaacatacgatctatgtgtaaacaatgtgattagaatacaatttgtaaaatccgacaaaacctaaatcaagtgttggaaacatttatggtgtacgtaacgtag

SEQ ID NO: 38944 - DNA, 512 bp, Arabidopsis thaliana columbia
tattaaatttagtaccactaaccctgaaaaaattcatgagatttctatttctgaataatttagtttttacatcttcttatcactcgcaaatttctaatcgaattcttaccgtaacacctaaaccgaatttaaccgaaataaatataaagtccacctcaaatcagcactatatatcaaaccaaaattgtatcaaatctataatacactaaagaaacaacaatgattgaactaattaacatttctcgacactgaagaaactaaaaaatcgaataaagcagaattactctaccccgttaaacccggtctggattatcattcacccgacccggttctaaacccgttttaaaagtaacgcgctcgggaatatcagtacatgggcccaaattactatgctgatacattcagttaatgataacgttaccgtcacagtaaagctaaacaacttcgattcgattaaaaaaaaactcgccgcttataaagtgacgctcccaaaaaagtaggaactcagaagt

SEQ ID NO: 38945 - DNA, 515 bp, Arabidopsis thaliana columbia
tccccaaagatggtaacattaaatcaaagttgacaatagagaagcaaatgttctgatccggtctggttggagacagaccaatgacctggagaactcatgttcatgcaactgtgtactgtcttaatctttcatacaacgaatctataacatttgtgacccagtctatgattaaccagataggcaactgattttgtgacccatcatgcatcaaatatttgagtcccagtaattaaagttctgtttctactcctaccatttggactttcataaccaaaactaaatcaacatatgaaacaaaaaaaactgagagatcttgatatcacaagtcactagaaagaaatacaatcgcactaaaccacaaataaagccacttaactgctatagcacatgttgcaagaaaagggagtctaagttcaaaaccattgtgcaagcacaacacatgaaaaaaacgaaacaaaagcttagatagagcaatagaagtgttctgggacctgttttgaaagaaactaccacac

SEQ ID NO: 38946 - DNA, 284 bp, Arabidopsis thaliana columbia
atggaattaattgagttaatagaataagataatagaaaagtgataaaaaaaataaagagagattttgagaagaagaataaaaagttatgttttgatggaagaatggttgagagtgatgggttaagtgataatgtaagaagtgggtggacaggagaatatttaaacaggaagaaaatataagataaagaataaatgaatgcagaagagaaatatataaatggaagaggagatatagatcaaatgaaaaagaagatatagaaattataaaaaacagaattgataga

SEQ ID NO: 38947 - DNA, 600 bp, Arabidopsis thaliana columbia
  unsure (1)..(600): unsure at all n locations
gcatgcctgcatgtnnnnnnnnnnnnnnnnnnnnnnnctaaagctttagaaataatggctgattagagatggctgcagaagccgatttcaacggctgggggtcctccagttccgtctccccgatatgaaccgtccaacttccgccctctgtgcctgaaaagacgcagatggcgccaccggggttagagattctggtgacgacagcgggattgtcttgaactgtcagcatggatttctgcttggatcaaaggtagtactcaccgatatcgtgagtggtcagatccgtaggaaggtctggtcccaggtgttatcgctagtgccatggaaagcaatagttacggagtcgatctgccgcttttcggcctgcatgcggctgtccctagccctggcgctggggctggcgctggtaagagccgcgatggaggcgacgacggcaaaagcaacggagcgcatcttgataagaaacgtaaagtaatagagtgactggattgaaggtctcgaatatgaaaatatctgtgattgatttgatgccttttattgttcttacagagcattcttgacaggttttataattttccaggcctacagtatctcctttgg

SEQ ID NO: 38948 - DNA, 633 bp, Arabidopsis thaliana columbia
atttggaagatttgacatcatcatcatgatgattgttgtttcaagtttcaaagaagaaacaacatcgcaccgataagttaggtcaagtttcaaaaaccttcttgagaggctacagatagatagttacataaaccctgatttaattaggatatatatggagttacaaattaaaaattaaaattcaatacttgataaagttaatttgtaagtatagttgaataaaatatataatttaagaatgctatttggaatataagaaatacttgataaagttaatttgtaactataatgaaagactgttgaatttcaaatagaaattttacaagaaaaagataattctagtaggaaaaggagataaacgaaattctaaagtttgctaaattcaccaaattaaacctcaagtttgcctcgtcccgaaaaaccagtcaaaattgtcttcattgagccattttagatcagaaataaatagccaccatatacagtttcggttataaacgttagttatgtgttcttttctttgtctccttcatctattttgaatagaaaaaatctcaaaattttagccgattttggagacataatctcttgggcgtgaagatgatttgattttgttttgtctagtactggaggaat

SEQ ID NO: 38949 - DNA, 465 bp, Arabidopsis thaliana columbia
  unsure (1)..(465): unsure at all n locations
catcgccagatccccttctgtctatgagctacgtgtgagagtaggaaagagggaatatgtaaatgtgggaaataatcacattttatctgccaagaactatatgattacatctataacatatatgatcagaagataaatactaagtatccatataatttgttcatgatggttttgatcttttaggatatccactttattgtagctgcatggccgttggtagtcagtcttcttttcagtttatgctgttcagtgttcacaaaacaaattaaataggtcaattagaggattatgtagttagaagctctcacaactacacatgtttcggcaatattanaaagagactgcagtagctacctgttacagtccacagtcttagagaaagggactcctatattaacaccacatttagcagggagttgtttggcaaatcatcattaattccagggattgtattagctacactct

SEQ ID NO: 38950 - DNA, 789 bp, Arabidopsis thaliana columbia
ttttagaagtcagattcaaagtagagtcagctaaatcctctgcatttggttcagctaaaatcccttcaccaactaccatgttagcatgtgtcaattcttcctttttcatgcaacttgtatcatcatttatttttggagcagaacttgcggtgttatctgcaagaattggacaaaacggaatctatgaaaagatacagccataaagattaaaatcttcttactgctagatgctgacatcttggtattaaacaagttagaattaaaggctaataccttgcaggaaatccaaggtatcaggtgcacaaaaactggaagcagtcatgtttgggctctcatgcagaaaattatcatcgttgggtttgttttccttttcttgcaacccatgaaactgaaaaaattaagacacttctcgttcaaaacaactttcctggagaaaaaaaccttcaccagtctactacgctaaaataacgaaagataaagctttcgagataaacatactagaagttctttatggaatacctcttcagaaaatttggataatggctttgatttacagctgtcaggaagccggtttgtttcttgaatagggatgaaaattttcatttgtggtggcttttctgatggcagagatgaatattcgtttgtagcatgattagaatgaaactgctctggtagtgcaacttgctgaccaactgtctccacttctccttttcctgaacagattgacactggtgctgaatttaaaatctcgccaccagttaatgagtcttgaaatcttggctttttatg

SEQ ID NO: 38951 - DNA, 616 bp, Arabidopsis thaliana columbia
tatattcataaatttatacaattattaatttataatattgatgggaccatatatttacataagattttcaaaaaaagttactatcttattaatttatcaatttgtatcaatttttacactggtcccaactcggaatcggaagaatttattaatttatagaaattattaatttatctagtattaatttatagagactgtacttgtttccatcattagcacaaatgctacttcctcctcttgaagttcttcgaacagttgagacttatttattaagagtacaggtttcgtctcttccaaagacacagatttcttctcaatatcttgacttgtaaccaatggctcagaacacttttgagattgcaataacgtaaggcgttttccttcgtatgaaaaactatgtgtgtttgtgatatgtctataatttgcatgatttaggcattcattcttcaccactttgtcattgtttcatccataaatcatctcattaggagtcgttttagtgtgttttacatacttaggacgattttgcattaggattgcatgtgcatggcatatttggttgtcttcaggtattttggatgcttttggagtcaaacagaggataaacagaatatga

SEQ ID NO: 38952 - DNA, 1104 bp, Arabidopsis thaliana columbia
  unsure (1)..(1104): unsure at all n locations
aaaaaagatatgtgtaggttatcatattaaaaatatctaaaatgcctaaccttccataatccacataaaacgtaccaatgtagcttttaaaatgcttaatatctgttttatgtgaaaagtcatttaaaatagagtccttttaaaatatgtgtaaaatattttagaaagaaggtggagcaacaaaaaaaattgaaacaaagatttgttaaaaaaaattagtaacagcttggttttaaagatccaaaaactaaatcatacaagctgttatcttaaattctaatccctaaatctaaagaaagtatataatttcttatattataaaaactcagcttatttatacagatatagtgtgtttacaaaactttcccaattattagtttcccactatatgcccaacactctataacacccccttattcaatttccatttcatcacatattttactatgtgttttttgaataaaaagaatgcgcaaaataacatggtttctttgttattttcgttttttttgtgtaacagcccgattggtcaaccattttctttatatttagttagtctactcactagtaagtcctaaccttactctggttagcttatttccttctcaaaagtgttggtgtagttaaatggagtagacatttttggggaaaaaaaagaagagaagagttaaggagagaagaaccctaagaatccaagatgatgatagtttggggatcaaaggcaataatcagaaaggtaagaaatacattagattttggtaatagtcatggttaggtagagaatgaaatcatatatatgaaagttggtcaactctctccatatgattgtcacatcatcgctttaacatttgtcatgtgtctattaaataattaatgtaagctcttcaacttctaatttataggttaataatatatttattatttgaatttatatattactactctcggttcantttatgtactattactaaatttattataatattacatgatttttcaataaaacaattttaatagttttttcatactcgaagattttttttgtaaccaaactcaaagtatgagtatataataattgtgtattagttaatgatttgagtatgt

SEQ ID NO: 38953 - DNA, 918 bp, Arabidopsis thaliana columbia
attgttgtaagaaaagctcgatgtgcaggcaaaaatatcttggtatggacctagtgagttataggagaaaagctcttatatatcaaccatagagaggatgtgaaggtgaaggacggcttccaaaatttaagaatttgatctttaatcatcatcttcatcatgcttgccctttgttgcccatcttctttgatcgtttgaacaatgcttggaacaagtgtagtggtttatagtttatacgttgtcttgtctttaacaaagagagttcggtggggaaattttccttgtcatctgaacgtggctaagagaagagaagtgtcaatgcattgtacaaggagtggacgagcactgatgaggctaagttccctgaccagctgtaacataacccgagaccgcaacctatcccaaacagctgcacaaaatcctcacctgagaagtgacctgcagcaaatactcctgagctgatcactagtgccttccaccattccattctcgacgctaaggaggtcaggagaaagcgtctgtacactatctcctcaaggatgggagctactacgcagtagagagcaaaacatccgcttctcgccacttccccgctcaccattatcttctccaattctgattcatgtacagcctgagatcaaacaacatgttaaaatgataatcatcttagcagagaatggtgtagtagatcgattggggagaccttagggccaaagagttgatcagctacaagcgacgtgacgaagataaacccacaagacatcccaaacccaatgctgagccaaccacccagtttcttccttcccttgtttcgttattaccctttagaaagttgattgatttgcactgagcgttcgctgtggtcctcagcagcaagactgtccctgcaagttctaccgatttggagaaccacaagtg

SEQ ID NO: 38954 - DNA, 586 bp, Arabidopsis thaliana columbia
tttttctacatctattccataagttaagttattaagaccatgaataaatcctcctgaaaagttaaaaacaataatgaatgtcatatatcacatcatcaacacctttggagttaagaatataaaattagaaccaaaccttggagaaaaagaccaagtaatagaagtttcaaagatcgaatcaaagcttttcttgttgcgacaaacctacatgacaagttctataaacaaacatgtagtgagtcaacaagctagtgtggattgaagaatgagactccaacatagaataaacaaaaaaagaagttaccttgtaagcaaaggcaagagagacaccaacaataaataagaaaaaaggcatgacaaaatccgctagtgtgacaccatcccaaggtgaatgattaatagatggtaaaatccctccaacatcatccacaagtatcataaactgtggttaaacacaacaattatactctaattacattgttgatcacgtattagaaagtgattagaacaaaaacttactgcgacggtaagccgcgaaagacatcaagggaaactaatcgttccttgtcgggaggaagagaggaag

SEQ ID NO: 38955 - DNA, 605 bp, Arabidopsis thaliana columbia
tagaacttaacctctcgttaactcaaacattttcttggaaccataattctgtatttgtaaggcctttgaaaatccctgattggtttcttcctatacaagtcaaaacccaaatttagggcttggttgagttacgtaatagaggagaataaacacaaatcaacaaagttaagagaaacaaagagactcgaaaatttaaacttaaataaaatgatcaaattatgcatgtttataaagtaaaaagcttttgttgcaaggaaactatgtttgggtttcattgctttcaatcaaaacatttgaactaagaaaagtggtcaggactaaacagaggatgaaacgatcaacataagttaaaaacatgtcattaggaagcattagaaacgtcatcgcaataaactggctcgttggattaatagtgaaattgacgatatatgagtatattgctaggttgtctttttggtgttatgatttcggttcggtttacatggttttgaaatgaaaattgatttgggtttggtttgcattagagttaatatggtttcagaaaaaaaggttttggggtccgcgagctcttttggaacaaaacgagtagaatagaaatagcatga

SEQ ID NO: 38956 - DNA, 638 bp, Arabidopsis thaliana columbia
ccaagctatgcatacagagataagatcccaactacccagagtacatcaaatgaagctctaatggtaatcccatctccaatcccaatataagaacttaagcctaccctttgcattcatgaatcttttaagctctttttctaatcactcttttcttttctcttaactctaggagaagctttctccacactttgatacatctagcggatttggatttctttaacaactaaggttcctgtttttaacattttaaaaccaagggctttcgcccatcttcaatagctaacaagaactctttcttttcttttcaaatcccaaaacctttactagactttttctgtttctttagcttacttcacctagagtcttttaccttttcttatcaatgaatcaaccctttttttttcttttaaacacatcccaacccaaagtataagcgcccacctagtcctatctagtccgaaaaatgcgaactagaactacatgagacactatctttgtcgttacgaacctaacactttctaccaagcttaatcggaataagacctcacaaacactcacaagtgatatagggattgaaagaaagtctaggtttgggtttgggttaactgatctaatacggagagtcagctacttggatt

SEQ ID NO: 38957 - DNA, 668 bp, Arabidopsis thaliana columbia
taaagtcggattggttaatcttaagattaatcatctatggttttgtgccttttgacttagttttaagacgtacttggttacttttcatttttttgctgatcaaaattgaaactgcagtgctccagcacctcctcttcaagcaggaacatttactcgtggtgtagtgaccatgcgttgtgatgtctcgacctgttcttcagcacacatatcaatgcttgtgtctggaaatgcgcagacctgtttcagtgatcaggcaagggattatatcttttgaaatatagcttatctctgcatacatgtgcaatgggatttattattaatctcctatgtaaatatcagcttttggaaaatcacataaaacatgaggtcgttgagaagatccaactagtccattcagtggtgaactcagaagaaacaaagcggggtttctctgagcctcgtagatctgcctcaatagcttgtggagcaagtgtgtgtgaagtttcgatgcaagtcccaacatgggctctgcaggttaataatctctttctttcctcgacttatatttgttgtagatagtaatctttagcccaattatttatctcatgcaccttgtttccaagttcccaacaatttagtcagcgaaagtagtccaagagtttcagatgaaaagtttgttatgaaattgt

SEQ ID NO: 38958 - DNA, 556 bp, Arabidopsis thaliana columbia
cttcaaaattgattagaagtgtcattatataaatatatatacaataaaatttctataaatatttgaaccactctacaaataacatctagtctcaacaagtatcagctactaattttaatgatacagattctacaacatgatggttaatacttggccttggatttcaatgaaagcatccaagagggattgcagatccgcttcaagttctttagccaaactgaagttgaattagtgtaggcatccaagaggcgttcttgagctgcttctggatggaggtgagagataactgttgtcatgtcgtcgaggatggattccttggctttatgtctctagacgtcggtggtgatagttgggtcactgttgttcgcagagctgcctccaacaatgtaagagccatcctgccagttgctcaagccccatcaacatcttctccggttatcccgaaactgaagccaagactcatcacacattcgcgcatagaggaaagtttaaaacttgtagacgattgggagcagaaccaatcttacttgcccactttattacaaataatttcact

SEQ ID NO: 38959 - DNA, 261 bp, Arabidopsis thaliana columbia
ccatgacaagataatcacaccagaggccgagaacagtatcccgacccatggagttctgtagcgcgatctcttggcaaagacctcgggaagcatccccctctcagccattccaagtagctgaaaagaatcactgctcatttcagccaaaaacattcccatgttagatgtcgcagctgcagcttgaatccaccatcccaaccaaactcctcctataactttaccgatatcagcgaaatacccgtcagtccatagcttctgatc

SEQ ID NO: 38960 - DNA, 506 bp, Arabidopsis thaliana columbia
ctcatatctggaaagcgatgtgtgtagttgcgaacttgtgttatacccaatctttataggaggtcgtcatcctttcttcattttgtactacaatctcgagagcaaaatcatcaccattgtaaaacttgaagatcaactttttagaaattttcgtgggtgtaggattcaggcttttacaaactatgtagaggatgtgaagcttatctaagtgtttacttcttccaaacagaactcacatgatctttgtcgatctttgtcttcttcttttttttggtctggtatcttttgatgaggtttattggtagttctctttgctttatttctttggttaattctttaataatcggaaagctatgaagaattgtttactaagctgaaactctgacatacaattgagttatagatacaattggcacatcacaaactggaaactgcttctctcaagcataagagataagacgaatatataagccaaaattttgaattactaattgaaaaatatgact

SEQ ID NO: 38961 - DNA, 517 bp, Arabidopsis thaliana columbia
tcttaatcaaatatctctcaaaatttctccactaaacatttgtaaaccacatccaaaaaataaaaaaagagtaaccagatataatgattagatggagacactttgacaattaagtcataaatattagtgttcaaaattctaaaaaaagagaaaaagagaaaacaaatatcagtgttataaggacactttaacgtttcttcacttgcccaaagctctctgaagataaaagacaaaagagtaaagagagaaagaagcacgaaaaccaaatcaatggcggtttcagtttcaatcctcaccgtcgtcactgctcttcacctccttgctttcgtcttcgccttcggtgccgagcgtcgccgtagcaccgtacccaatttatctctctcttactaaaatttgtcatttttccgatttgtgttgtgaattcgtgttttcttgtttattcaggctgtgcggttccggatcagtacgatgagaagactatttgtaagtacggaactgaggcgtcgacagtgtacgg

SEQ ID NO: 38962 - DNA, 609 bp, Arabidopsis thaliana columbia
gcaatacaaagagatgcatagaggaacaatacccaggaaaaaaaaagacaaaaacatgtatagcagcaccacttgcacatgcctagagccggccggggcagacaataccaactagtgatttcaaaaaacttagcagcaattccaaatttctaggaatataagcgatataaaatggaagagcctacgagattcttacgagatgtcgagctcggagacgactgaacgacctgcgagctagtagcgcgcatcgatagaactcaaaatatcaaattagggtctctcttcttcgatgtgcctgatgtgagagaagaaaatccgattagctgaaaagcttaatcaagcaaaagaagcattgaacaagagaatgaccaacgaaaagcctaaaattccatccgaaccttaaacgcgatactcaaaaaagcaaagcttctgcacgaacccagagaaagttcgatctcacaagaacattgacacgaatcctttgctggtgattccggtcgtcggaacaaaattcgatcagatgtctcttaatttacaaattgacccttctggttaactacttactcagctcataaccgggcaatcaaaccggttatatttggtatgaca

SEQ ID NO: 38963 - DNA, 524 bp, Arabidopsis thaliana columbia
tgtgttttgtaaagagttaagtggttagtctgactgtggaatcttgcagtctatcttgtctgtgctgctgctggctgctacgagattgctttggcggcccaccgcacaaggaccgccacttctgccaccctattattgaccacatctgactccattggtcactcgaataatattaaagctatctctgtataggatattgcagatgtttgtcaaattcaatcttaaatataataattcaaatgtctcaatttctgctctgtgtggatatatattacccaaaaaacgatcaaattaattatcagagaaatgaaatcatagtctggaactacaatcactagcaacacaatgcaacaacaacaacaacaaacacaatctactgtcttcgattcttgactcttctcttgtatggacttgccaagacttttgaaactatgtacacacacttctaagacgaggccaaaccagtcttctctttcaacatgatacaactaaataaacacggagtcacagggtttgatggaatt

SEQ ID NO: 38964 - DNA, 580 bp, Arabidopsis thaliana columbia
ggctttgactctgaggactttaacttcatctgtcggctttggtttcccttgtttgggtattgtgtacttccttggttccacatcaagttaatgaatataattttaatttagtgacaaaaaaaatgaaagtcaatataataaaaatataacaaaaatacaataagaatacataacataacccataaagccttatgccacctctattgcataacaaattgtgagtgtctttagattttaatgaataaaataaaaaggtaaatgtctttaaattaatgcagaaaagagaattgtgtctcttgggagacatcaaagacatttgttttgagacatcttaacttatgtggcacaatgtcattggttcttattttttcttttattttatttgtaattaaagacatttccttatgttgtgcaatgtagatgctcttagggaatcatggttttacttggttgtggccttgtggggaaaaactgtaagctataaattatttggtttggttaaaccgaatgtttcgttattgattaaactaaggataaaattatatatatttcgtttttgatatatacctgaaaaccaata

SEQ ID NO: 38965 - DNA, 252 bp, Arabidopsis thaliana columbia
gcttccgccgaacggacttagctaacagtttaattagtgttgtagtgttgtgtcgttgtgtctatgtatgcacgcagactgtcgactaaacggtttgggtttacaagtccaattctagagtatagtgttttgtgaaaaacaaaaaattatgttgcgaaggaccttctctgtcgttgctttgagacaccaagaagcgctgcaccaccactgaagctgtttgccaccatccaccattgatgccattggcgaccc

SEQ ID NO: 38966 - DNA, 525 bp, Arabidopsis thaliana columbia
ctctagaggatccccatcctctgatgctcgtatcgtcgagtctctctgccaaaatagaaataccagtttttgcatcttcaccagtttttaaaagcttgttacttttgtttagtttctcatttctgaatacatagttcggtttatgtccctagctttatgattctctggtttttattgaaactttttctgaaaaaaaaaactgttttctctaattcatatgagtctgctcttaaaccggacaaaaaaatggtatcaatgtagtagtacttctcctctgttcgattatgtcctgtctaagagtgattggtcttagtcacgtgaccgtgtggtgacacatggggtcttcattcaattcgtcatgaagcagccgttttcagtaaaaagataaacctggaccacaagacaccattgtggtccagacctgtttagttgggaatgtggtccatagcgttgttgttcgacaaccttctttcttcaacttcacataaggaatcataataccagtcaatctacttacgtaattgc

SEQ ID NO: 38967 - DNA, 868 bp, Arabidopsis thaliana columbia
ctatatatacctttggccgtcattaggaaatttcacctaaaaatctcgcccatagctagtaaagaccctattcaaaagtcggtaagttttctgaccttagttgcttttagtaaccgccgattagtccttaatacagttagattgttgtttgctagaaaaccgagtaagagaaggaaccaatggattcgaggggtaggtacggtcgtttcccgaggatgcttggatcaccagtaactctcggacatgtgaagtagcacgtggttaggtgtttaatttgatttacttataaattgcctaggaggttagtaaatcgtacttagtgataattattgtgtgatgcattgtcttttgttgtgattgcatgatgttaaagtatagtttaaacgttgtgctgcccaagttctgacaacataactgttatgttgtcgcgttgcggtaacatagccgttgtgctgtctgtttggaattggttgttgctagttagaagtggttaactaactagcatagtcgaatgaagtcttcccatctatctgctgtgtattgcgtgaaactccgtaacgttatggcttacgaaggttcggggatggcttgcaaccgattgggcgctacatgacgatgtagtagtgaggaatgcgatctcttgtagactgtatgtatctaggagtgtgtggggcatttccttggggggggggggaaggatctgaattcgtagaggcctaaagtaggaagagtgtagaagtgtagattaagtcttataggaggtgcattgtcaattgagtcttgcttgttgattgtagattgcgtggtatagttaggtgttccgatagcggtataggtgaaaccctagagaccgcggtctaactgagta

SEQ ID NO: 38968 - DNA, 1095 bp, Arabidopsis thaliana columbia
gactctagactctgaatctgcttcgctgattatcttccattaatggataaaaatctacaaatcaaggtattccctcaggtcgtcaaacaaaaaaaaaagagaagggaagcacaaaaaaccaaaggggggcaaacaaagtaaagtgacaagacgaaacctttgtgtgacgatactatatagaatgcaaacaaaatggagaaaaaactctaacttgagattggaagaaatcggcttttgtatttaaatgggttttttacagaattatagagcttaataataattattaagaaaatgtggtggataatgattatggtatcttggaggtaaataaaaagttattttggcggttaatcgatcggagtttcataaaaaaaatactttaaattaatctaccgaataacagttaacaagatgttgaaaaacatcactttggtgcatttagcgtatttacatgttttttcctcaaaaatccaaaattcaaataaaaacttgatttttttttcttgaaaccattagacaattttcatcacatactcaaccaaattacctgaacactttgaatcttttattattcactgcagatctttttttttctttgtttatcttgtaggccatggtcatcatccagggacaacggccataggtgacaaaaaattgcatacgtatacactaaaatcgaaattagttatatggcgaacagaggaagcccacatgagcctcccacagctccttccctcgtccaacgccaatctgtctccttttgtatttttatatccaactttttttttgtcaactatgtaatataaggtatccatttttttttctcgtttgatcactatatatcaaattctttaacgtgtttgctttcttgagggtattaatggttgaggcaataaattaaacggaactaccttgatccattcttggttttagtcttttagattaatggatatgtgaactgttataaacttatagttgatcatgcattcatggtatggtggtgctggctgatatatataacgatgcattgatattcttattcttagagtcatgttgttatttttggtgagatcttagagtcatgttgttgagaag

SEQ ID NO: 38969 - DNA, 527 bp, Arabidopsis thaliana columbia
taacataataatgtgtttctcgataaactcaacaaaagcaaaacacagcaatattctgactgatttgatgacatcaatcgaaccaacaataatgcttgtattcaaatctcataataacatttggttttctcttatgtagttcgaacaatcgaaatcttctaatataactcagccacatcacatgcataactcagccatcactttgttataactcggccaaaccctgaaagtgcttttcttgagccaacagttgtgaaaatcaagtaattagcatatcataaccacattccaactagtggaaccgtgaaactagatcatatcatataaactttatccaacagcctactttgtccaacatcatactatatccaacaacatacttcctagaggttttgacagaccatgttttgtcaatcgacacttgctgaaaataaaagttattttttgttttgaaattgcacatcttcacgctaccaatataactaacaatttggtggctggtttgatatatcataataacatatggt

SEQ ID NO: 38970 - DNA, 573 bp, Arabidopsis thaliana columbia
gccagtgtgctctaaagtctggactggcatccccctgtaacggcgacggtggactacgggtgcacatatacctcgcaatcgatcgatgcaagttgctccttcagctatagtgcctatggctcgagtgatgggctggcgttctcgcagcattttgatacggcggtcagcctgaggccgacttgggtgtccagcgcagagatgcttgtcacggcaggcgtagataagttgggtgcaactgcaactgcaactgcgacagagacagggacaaagactgagagtgaagagtctcaggccacggagacagagtcaggtgctgcggcaggaggtcctgggccttttggcgcgatggttacagctgccccggtgctggtgctgggagttgccgctatgctgtagccagtcacgtcatgtatatctgagctggataatgtgatttatgcctattagggctgggcatagctgaagatttgaggaggatacctgttacctgaatctgtcaccacaatcatgccgtgccgagccactaccagttgtcaccccatcatgtctctatacaagatatccctaatatga

SEQ ID NO: 38971 - DNA, 295 bp, Arabidopsis thaliana columbia
aaaattagaaaactgataaaccgaaatttgaccagaatcataagatcgaaaatatgcagatgcatgcgtcttattgtctaggattagaaaaccatatggtgatatgacaaatagggtccttaccaaaagagttttctaactgtcaccaaacgaaacgtcatatttgcaccatgaaaaattggacgtattgtgatcgatgattcggatgcgcctaaaataaggggtatgatttaagcaaacttataacacactgacattaatgataagaccatattgttaacaaaccaaaagaaaa

SEQ ID NO: 38972 - DNA, 343 bp, Arabidopsis thaliana columbia
tgatgagtagtcaattaaatatttatgattttctctttggattatagtgtaaaactgagctttctaatttttgcccatgtgagcaatttgtttgtttacctaatattaggactttctactgttttctcttactttatactagaatttgtaaagatcttctacgttagatttggtttcttttgtgttcaacaggttctattgtttaatatgaataatctacaatatgtacttttttcttggatcatcatatcgttctttgttttattgttcatttaagaaaggaataaagatataaaaaaatagatacccattttcaataaaactttttcctttttaattatgg

SEQ ID NO: 38973 - DNA, 302 bp, Arabidopsis thaliana columbia
atgtatttggtagtgacaggtgaggaatctatgtgattgtgaaatttggccatctgaaatcataagtaagcatttaaataaatactttgtttattttcgcatgaaattattaggtattaacattgattctagaatgacaaagatgaacctatgacaaagtatcaacattaaagaccctcttactaagacagaggctttgctcagtttggaacagacaggacatgagccaaatgaagcccacaagacgtctacagaaacaatgggcccaaataagcctaccgaacgactaaagaactaatggg

SEQ ID NO: 38974 - DNA, 505 bp, Arabidopsis thaliana columbia
tttttaataaagaactaatgtctatatatctcgaaatgatatcaaattggcgcaataataaaattcctcggatactattaaatcagaagctaaggctgcttatatctaatatatgcaagacataacatgagtcacttcatatatatgtgaaggtatataattaaaacttagaatcaattatttagttgattaggcatataatttgatgtacttattgtcgctaaataaatgtcataatggatttgcaccgcatattatagagtttctcttttcctagtccaaatttgcaagaaataaagtagagatggaaaatatgaatttgcattttaaatttactttggattccatacatatatagaagtactttgaggttatggaaaaagatagcaaaagataggacttactatacaatttactaaaatagtcacagaagaagaaggaaaagataaagaaaaaaaaaaaagagaaaggagaagacaaagagggaacaagttggggatataat

SEQ ID NO: 38975 - DNA, 312 bp, Arabidopsis thaliana columbia
ctagacgttgccacatagtcaaataagtctcacgaacagcctcttaccaaaccaactttgtctttttccattctacatctagtcttattctaagtggactccatatacttgtatgttatcataatatttgcttatatatgtatctatagcttctatatataataaggttccacgagtatataaactgtatactcatcattgtgcagagatgcctctcctctagaaacaataccctctttattgcctttatcgtcaggacttcgtgtctgtattgcgtgttttttgaggagtctcttttatctttttggtggt

SEQ ID NO: 38976 - DNA, 936 bp, Arabidopsis thaliana columbia
tttttttggccaggatacgaaactcatcttagtttcggattgttatttggggtttgaacaagaacactccattgaacaacttgcacgacgcggatgagccattagatgatggattgtagtaaccccatatttttttggaatttgttttatatattgtcaaaattttcttaaaattctggtttttttttgtcgtcttcttaatgtaaaaccaaattttaccttacgttttgtaataaaacagtgttacagatcttttgagatacataagaaaaataatgaagagcttaaggtaaatgtgttaattttacataacgttatgtagaacagtgttacaaaaaaattgggctacatgactacataataaattaatcaagagattaaaactaaatgtgtttactctgtgacagtctgtttggtaaatttgtttgggtcaacaagtttacgttattttgaactatctccatatcaaattaccaattattcattacagttacagaagggaaataaaatccattattacatgaatttaaaaaaatcatgattctgtctttattttgattaaaacgagtctaattccagactacattataacaaatggacgaaaggagagtgaaagatttgacgaacatgattaatcttcgtcactgtcatcaatcacggccttacgacgatgagtcggagcttttctaggcggagactcctcctcgtcagactcaatccctttccttttccggccacttccacggtgatccttctctgccctacctccctgcataaaccacatttcaccacacattacaatctcaatgaacttcctcattgacaacaataaaaatggaagaacattctaacttcggtaccgcaacctcttcctcttcttcatcttcatctgagtatctgttagattatcactcgttcctcttcatcttcttctgc

SEQ ID NO: 38977 - DNA, 479 bp, Arabidopsis thaliana columbia
caaaaataaattaaatgtttttcatcattactcattggtgactgaaatgaattgaggtccctatactcttattgcttctcagcatcgagttgtttgtgcatcaccattgtcatgactcatgatttttagaatcatttatgcaattcatcatcttaatcattatcattataggatgattgtatcatatataacagtcgaaagggaagggccaaaaaaagtgaaataaagttttgttctctgtaatggaagaaaaagttgggaggagaatcatggtttcactatggttctttggaattttgattttggtagttagtgcccaggttccgggaaccaaattctgatcatactacaaaaaaatatcttgcggattattgtagctcttgtcttgcataacatgaagcttggaattaactaaagaaagtttcttagagattcttcttcttgtttgtactctaaagaatctaacactctttgtaatg

SEQ ID NO: 38978 - DNA, 678 bp, Arabidopsis thaliana
cgccaccgccggacaaccaccgtcaccatcgccggacaaccaccgccgccgtcgccggacaaccaccgtcgccggacaaccactgtcaccatcgctggacaaccaccgtcgccgtcgccggataaccgccgccgccggaactaccaccataaccaccatcgccggacaaccacctctaccggaatcaccaccgccggaatcactaccgccgccgtcgtcggaatcaccatcgccgccgtcgccggaaccaccaccgccatcttcgctggaaccaccaccaccaccaccttagatcattttacctaccccttaagttacttacttaataattacatatatagtgctatattcttaatttttctctcaaaaagtattattcatgcaaatcacccattataaaatcaaaaaagaaatcgtggataaaaaagaaaaccaaaacctatattacataattaaaacaaaaacgaaaatccagttaacttgagaacaaactttttttaaaataataattttgaacaaaatttagatacagaagaatcttcttcacatatttcgttttagatcataaaaatattaaagaaaaacaatttatttttgatattgcatattataaattgacttagttttagcttaccaataatattttgacatgtatcaattcacaaataattgatttga

SEQ ID NO: 38979 - DNA, 641 bp, Arabidopsis thaliana columbia
  unsure (1)..(641): unsure at all n locations
tatgtgaattttcacctgtgcttctatgactttttcttcatttttgtttggcgattgagaagattgttgcatgtgacatgtgaccgagttgatatctcccagttccagggcgtcagagagctgctgctttaggtttgcaacctcttcttgcaaatcttcacagaaacttgtctgcagaaaagagttgatcagttagataattctctgaaatgtctgcgcactagcttcaaaggttcctaaatacgctggaactgcggaaagagacggtgtattatctgaaccttttcggtgagttgttcctgaatgatacgattatctgcagctttaacctgtaaattaaatgaatactgagtaaaaagagtcctaatccttaacagatcatatcgagctaaataagatatatagttgcaggtaggttatatagcaaagccatctaggtgcagtatcaattaagagctgaagtattgtgtaaagagagagagtttcagcagcacctcgagttcaaaacatttctcatttagttgagcctcatttcagaaacagcctgaagataagagcgactcacatgagagaaaatccaacctcaaacaaatgtcagaacaagaagcacaaggctactgtgtgatngttgaaaaagataa

SEQ ID NO: 38980 - DNA, 941 bp, Arabidopsis thaliana
ttctcccgccgtggaggaatcaaatcgccgactcaacgatcgacactgtttctcgtttgatcgccggcgttttctccggcgcacttactggaatcttcgctatgggtattaatatgttttgccgttttgatcatcttttgtttgtgcatttgagtagaggaaagttttcccttttgtgagaattgtgacgattttgttccctctaagttgttcgtttctatccttttggtcaactcttgatctcttgcaacaaatatttcttgtgggcctgcaaattttgtgaaaaaggttacatttttctgtcttgagagatttggttgaacatcgttcagatcattagtcagattatcatacgtgttcaacatcttacagctaatgattttgaacttaattctcactttttagaccaatcctgggtttaagattaggaaagtgtgatgttgttgtctctaggttatttgaataaatcatcgtctctgcatgatccctataaaccattttgttttttaatgttattgtagctggagcttttactggagctgtaactggtgcggtggcaggaagagctgcacagtatggagttctccgtggggctgcacttggcgctgttgctggagctatcctctctgttgaagtgttggaggcttctcgtgcgtattggtatttagagctgtcaggatcaaggggtccatcatctatggttagtctttaattctaacttctgtgcaatcttacacgtttgtcaattttggagatggtttttggagtttttcgactgactttatgatcgagatggtgaaatgattctgagagaaatgtagtttggtggaagaaataatgagatagttttgacatgttactggtgggcaactaaattatgggatgacaggatggcttggtttagcccttggtaatggtaataggaatgaatttgtgtgcta

SEQ ID NO: 38981 - DNA, 489 bp, Arabidopsis thaliana columbia
cccctccgtttctccataaaaaatctgcaacaatcgcaaatattaacaaatgccaaaagaaaaatccaaaggtggctgactgataattagcaaaaaagactcactcaaagaataaggggtcatgctgatccccataagttaatatctccgcaatcgatctcagtgcctcgataacgagatccttcaaaaatgacacccggtaaacagacatcaaagcctaacaaaacaacaatgccaagacaatgtccactaaccttattagcctcgtttactatctgaatctttctcagctggtcagtcaaatacctatataaaaaccaaaactttcaacacttactatgtttcatcatcatctggtataacaactaatgtcgtaacactacgatcacaatgaactttctgagaacaaatcattctcctacaatggtcaacatagtccctttgacccctgagactagggaaagatgacttatatagtttccctacaat

SEQ ID NO: 38982 - DNA, 526 bp, Arabidopsis thaliana columbia
  unsure (1)..(526): unsure at all n locations
atccccgctcgaccaactaaaccaaaaataaaccagagattcactttaattagaatgaataaaccgggactataccgaacccttaatgacttctattatgtacaaatatacttagtatagaaactatacacaatctaataaaccctaacactttcgagatgatttagaattggaaaattagtataaaatgcacgttgaagaaaaagcacgattgacagatttttatggatagtgaaaaaatcttggtcaaattcgagtagacaaccttatcagaaaaagaatttatagattagacgacaaagtgaagcaaaaacagaaaacgttatctagaaaacgattaaatgatacatcacaacctgatttcttcgtcaaagtaaaagacatcttatgattcataattatccaacggaaaacgacacagatattatggatacgttttccanataaacgaaaatgaattaaagtaataaaatatccattcctcttcgatcatatccacagttcccacaccaacatgtcgcgaaag

SEQ ID NO: 38983 - DNA, 497 bp, Arabidopsis thaliana columbia
tgtgtttgaattaatctatggttcgattggggtttagttcgatttgcttttaattcgattttaaaagacttatcaatgtaacgaaacaaaaaaaattcgttcattgtcgtttaaaatagttaactcaatcaacaagttcaagctgtaaatttaagtttactaattcaaataaaccatgagaagagattaaaagtgcaaataattaaatatttagtaatgtacaatattattaattaattaattaaataaacacattgggttgtcggttcggttcagtttaaaaccgaaccgaaccgaaccattttggttgagatgaaacataaccaaatggtttgaatctaagcttaggtttagtttgggtaggtttaagtttagtttggtcggttcggttcggttcagttcggttaaaatacccacattgttataaaattttaattggattttaattataaagattggatttcacataggattttaattggtttagaagtattatt

SEQ ID NO: 38984 - DNA, 617 bp, Arabidopsis thaliana columbia
gaaacatggcaacactaccatgaatacacgcaaagaatggctacaattattagttcaaatgaatgtcatgagttgaattccaaacaatcacaaaggagcttctatagtttgccatcgctaagaagattcttcaggaagaatgaaatcataatccattaaggatttggtttatttcaaagctcagtagcgagctcgtcttagattaacagaaacaggcagtagttactcccaaagtttatcaagaccaaaaaactgtcatggaacagaaatttaaagttgacaaacacaagacagagtgaccaccaaatacactagtaagtcaaattatgatttttcaatatactttatataataagtgtatcagctagttgagatgaagtcttatttctttaactggataactggactataactgatgttttcctaagtttaggcatgtcttcatctgcatttctaggtgtgctttgaataaaggaattgaagtttttagtaattccgttttctcctacttggatatgcattgcaaataggtttatttagacagagaagtgagagactagaacacacctgcagtaaaaagactttttttactttttctccttgaaactttatatgtg

SEQ ID NO: 38985 - DNA, 690 bp, Arabidopsis thaliana columbia
tttgaaagtcgttggaactccacgttttatatcgtaaagttggacagcaactaaacgttttgaatgtgggtaaatgaatgtggaaacggtatggaatacatttttaagagtatggagtacaaaaaacaatttatgtatgggtatgagccgtatgacttcgagatccacgaatctaacattttttttcttccttttccttttggttctacacaaaagcctcatcttctttcctctttagttttttcaatatgagatatttcgattatgtgatgtttgtgatccctaactaatgagagaagttatctataaatacgtccgttttggaacgaaaatatacgtttagttatcaataagagagaatttagatcggaacgaacatttagattggtcgttattgttttaggaagccttgatttatgaaacgtttgaaagttcttgggaatttcataacaaactattacgagatgggcgataggaagttatacattttttcatttacgatgtcattaccttgttcaaatctcttgttagcaatacaaatatattcaaccactagtttcaaaagaacaaatttctctaagctatgatttttaactataccgtatatactaccgttcgaaggaaagttgtatatcaaaaaaaaaaaattctattatacaattcttagaaatttgaccacacaattatata

SEQ ID NO: 38986 - DNA, 553 bp, Arabidopsis thaliana columbia
tacaactagaaattatacgtagaaaaaatcgttaaacacccgctaaaaatcatactataaaacacaatagtatacatagaaaaaccgttaaacacccgccaagtttagtaaaaaaaccgttaaacacccgcaaaaaattagtaagtatacaaatttattttatatgatcacaatattatacgtagaaaaaaccgttaaacacccgccaaatctaatactactaaatatcgatcataacttcattaaatgaaaaaaaaactcaaacataatattaagatctacataacttcattaaaatgattaaagatctaattatttttcattttttggggcaaatatttagatcttctaatctaatagggaatgaactcaaagaaagatatttgtgtttgaagataagtaaactgtaccggaagttgggttgtgtctaccgtcaccgatccacgagagtatcgaacacgaaatctgaaccgttcacaggtccgacgtggcaataaactgtatttaaaatccggttttgagtctgaatccttaatagaaagagatcggagcg

SEQ ID NO: 38987 - DNA, 532 bp, Arabidopsis thaliana columbia
tgtgatctttctcttccatggttttggacccatcttctttttctcatcttctgttttctcatcttcataattttgttccccacgtatgttcgtgtgtctatacatctaaagcattctttttgacaatattgtcatagttaattatttatatgcttacattactaatcatgatctagtataaaagcatgatgtacacacaatagattttaaaatagacccacaacattcgagacccatcacccatctaaccaatacaattaaaaaccttaaaagattacattttcatcatataccataatatttcttttagaacggatctcatgattgaaaagttaggcttatcctgaaatctagaacaagaccaaaccaatatatatggtaacaagtgcctcgatgattatgagatacatacctctcatcatcaccttcttcacttcactagaaaggcagaggctcatagattgatatggcatataaatggatattacagaggtgaaaaattagattaattatgataatacacaataataat

SEQ ID NO: 38988 - DNA, 477 bp, Arabidopsis thaliana columbia
  unsure (1)..(477): unsure at all n locations
aatctcctatttgggttaatctcgttttttcccatcttttaaagccctttaaaatctgttgaatggcaactataaaagctgtccaaaagaaaagcagttgtcaaacttcatccgcttgcagtattcaacacacctcttcaatagtgtttctttgatctgcttgtgtacaaaaattttcttcacatatttgatgtccttatggttcaaatttaggctttgaatgttggatcagatgtttggtaatctaaggtgtgagatagataaattgtctttatcttcccaatcagcaaaaataaaataaaaagtgggttaactgcatgcaaattttatttttgtcttttagtaataaaagcaggccaaaaataacagttctctctaataccttagtggaactcgtccaacaccagtccatacttttctaataaataaaaactganaattgaaatacaattctcttttgtacttcatgcattacac

SEQ ID NO: 38989 - DNA, 614 bp, Arabidopsis thaliana columbia
catctttatttttgcttctcttttatagtttacttatggtgttctttgattgaaccaaaaaagttacttgtaagttgaatcatcatatttagagattgaaatttattaatttttcggggaaaaaaaaatgatcgaaccaacttatgacacttacttagcaagtaatgccaattgtaccataagccgatgaataattgattcattatgtactaacgtagaatgttatcgtcaggtcccgtagctcagttggttagagcgttggtcttatgagccgaaggtcgcgggttcgagccccgccgggaccaaaacttgagtctttattattttcgatagaattcttatttacaaacatttttagacccaaaaactgtatatgaatccggagaaccttttgaaagacgagctctaacttcttttttttggttcggtccttaactcttgatatcatcattttgtgtatgaagctaaaccaaatgtaaatcagaaaattcatgcctgccagaatttgatggtgtttgaaggaacataaacttttagtgtcaataaggaaaattggatcaaatttggttggcttcttatcattcagtaaatgaaaccggttaactcaaacaaca

SEQ ID NO: 38990 - DNA, 480 bp, Arabidopsis thaliana columbia
atttttttcatctttttttcgttttgttacacatgaactcaaatttttgtttttatttacaactaaactttgtacatccattaacttctaactaaatcgtctgtacgcattgtacatcgttacaaaatcaaagggcatttttgtctgaatttgtcttaatggctaaattctggaaggtccagcccattttgccaattcctgaaacaaaaactcaagtaacagtgaaaataaatagataacaaatcattcgatctcttctctccttcttcttcgaatattagcttcagtatcgagtggcgagtgacaacttagggtttcaagcttcagtcctttcggcttctctttactctgggtatgctcatcgttcttccctcacctcaagcgctgttctcgcaggatctttgctgtcaagtcccttggcgtaacttatatcaaaatatacttggtaacatttgtattgaatcaaagccacacattttg

SEQ ID NO: 38991 - DNA, 289 bp, Arabidopsis thaliana columbia
tgacgtcaaaaattaatttaagccaagagacgaggaactaaaattgaatttcacattttgattgagcatttgggtttgaattaagattactcgaaagttgccaaaagtttgcctctgagtcattttattgttcatgaaagatttaaattcaaagatgatgttcattgattgggtggtcgtgtaagtaagagtcgtcagcgagttttcttctccgagagtaatggagccatctcaacgcaacaccaaaccgccgtcgttttcagattccactatcccggttgagtccgat

SEQ ID NO: 38992 - DNA, 558 bp, Arabidopsis thaliana columbia
tattgttcaaagccgaaattcgaacacccattgatacaactaccaatttttaaatttttatttaggtattaatgaatgaaagctactatattttttttatatatagatgggaaaaaatacatttaaatatcagagagaattttttaaaaaaaaaagccaaaggaaatttatgttgactttaactttttggcagacatctttctttaatagctcacacataattgcgcacctttcccgttttttgatatttcatgtctccatgaccaaccataaaatctctatcgtaacagtaacttttatttctcgactatataatagtgaattaggtggtcgatatattaacaaacaatttgttgacttcaaaagttaggtatcagtgtaagctgaattttatttccatttgtatatagagatatagaatcatcactactcttacaaacaatggtttccagtatatgtaaaagattctgatgaatctgccaatgtatgagcatgaatcaaagctttacaaagacatggttgattactactttctatgatggtactcgcatgcggctt

SEQ ID NO: 38993 - DNA, 514 bp, Arabidopsis thaliana columbia
  unsure (1)..(514): unsure at all n locations
tatgatgcatgtattaactcataattaagttgaataacattcatggttcaattatgtctctgagttaagaaagaaatggaatgaaatattctttttaggcgcatgaaaaacacaaaacaaacaaaagacgcaaagagaaaatcaattcctgaattgttataccacctatntgatgatccatgcgcgttgactaaggggaaaaggatcatcacaaggtgaatatgaaccaaagaatccatggaagagtaagtagagagagataatttaattaccatgacagggtcatcgtcttgagtttcatggcgatggtgaagttgttggtggttgcgacgaacacttaccatgagttcttgttcgcttcccaaactagaatgtcttacaccagctttgttctgcttcctgtttgcgcgacgtttagaaaagacaaccgagtagtttgtagcatcatttggtgctttttggtcagacctccgaactgtggaactggagtccatgcagcattctgtatccaaga

SEQ ID NO: 38994 - DNA, 574 bp, Arabidopsis thaliana columbia
acggcgccagtgtgctttaaagataacgaatatatatatatatataaatagataaggatataggccggccaatcactcctctagaatcggtagcgggcccaaatcgtcgaagaaccgagccattccctcgaacgaacagtcagggaagccaaagccgtatgcccattcctgcactttgtcagttgctacttgggtagttttggatttttataggacgcaccgggccatcaaattccccaccagcattaccaccggcatatccgaagccattgccgtatccatgagtgtgagcatggacatgggcttcgacttgaccagcaccaccgttaccgctgccaaaccatgccgtctgtgcgtccgccgcctgcaataccccgttcgcatcccttccccgtgacccatggtgttgtttatgacgctgaagcggaagttgattctgattctgatgttgatgttgacgctgagtctcgttcccattcccactccaaatgccatctccattccgaacctgaaactccctcaaatagtgacgtataatctcggcacatttccgcgtcacgacgctctcgtctgt

SEQ ID NO: 38995 - DNA, 445 bp, Arabidopsis thaliana columbia
agccggccttacctttagcaacaagggcgcttaggctttactaagaagtgcgaaagggcttttcttgcttgtttagtaaagtcacgcttttttatttagaattgagtaggtgcttgctggggcagggcactcttcattcttcattcgaaacttttgaatgtcgggtcagaggtttctgccttgttatcaaaaaggaagttgttgggtaaagcaaactgcctgcgtgttaatttatagaggaaattcacatggataataagacaaataaacaaagagaataaattatccacacaaagacaatcaatatttttttagaaaaatgtaccatgaagaaaattctagccttttgtggcgcacggccggagtttccggagccttggccggagtttcaccaccggagtttcgggagccttagtcgaaggagtttcagccaccggaacggcgg

SEQ ID NO: 38996 - DNA, 265 bp, Arabidopsis thaliana columbia
tatgtttcgtagtatagttttttaaatttttatatctaatgtataaacataaaaactatatatatatcattaagataaaaaaattcaaaaaagtcagaaaaactgaacaataaaaacaattatttaggaacataaattattttttagtatgtaaaactgaatttaaagatcgataaatagaatttagaaatggaggatttggatcataagaatatataattcaagcaagcaaattaatttatagaggaaattcacatggataata

SEQ ID NO: 38997 - DNA, 536 bp, Arabidopsis thaliana columbia
cccgagataaagctaactatttctctaagtatcacaagtgtaagaaaggtcatattaattaattgttgcgatataagatgaaaggtctctttgtattagaattggagcatctagtggaggtgattatgcgaagacaatgtatagtgttctgatttagaaatgacaacacgagtagtggcagacctgataagaggtgtccgaaggggccccgtatgaaagtcagtggacctaatggtagtagtagatgtgcgccagtgggagagctacagtagctgacttataagacgcacgaacctaggaccctagcggctcctagtactggtatggcgtgctgagttctaagctacctctctacgagagcgcgtgctactgactctgacgagttggacgcgtatgactcggtggtggaggacaagttatgcaatgggttctcatcagctaagacgtgggaattctcagaccaaggtcggatgtggttagctgggcaagcacagtgtggtttaaaggtgcaattccaaacatgtcgcttcatatgt

SEQ ID NO: 38998 - DNA, 582 bp, Arabidopsis thaliana columbia
  unsure (1)..(582): unsure at all n locations
ttttgtttttctttttttcagaatttaaaaaacttttctttaatgtttttatttgtttggatattaaatttacataatgatatgaaaactaaccggattttggatccagcattagtcgtaagcgattccaaacattcaacttgtttttcctattattatgtagatttagcattaaagttttcaatttggatttttaataataattttaaaaactttgattatgtgaggttaaatatgggccactatgcctatgaagaaaaatattaaatcaaattaaaaaagatgatatgcttaacttcaacagtaagtaatcaattaactttgagggttcagaagagtcattggcaacagacaatgtatcatcaccaattgtagcgcacgaaacacacatttggtggatagaaaaaggaagagtgaaccggattcaaagacctctttgagaccgagccatatttgatccagcagcattggggaaaatggcaggcgctttgtcggacatggtaactgctttgaggtcaaggaaagctgattccataacgcnagaggatagatttagtattacaaactgaatcaatgtgcttg

SEQ ID NO: 38999 - DNA, 849 bp, Arabidopsis thaliana columbia
  unsure (1)..(849): unsure at all n locations
gatcaaacggtcttcgagaatgaagaaccgcccagttatctataagcaaaacatctcctctctgccacggaacagcaacacattcctcttcaagaatcctaagacaatcatggactatatccgcaggtaaaggctttccatccccaaaagtcacagcctttcttggatcattccgcttatcctcccatcccgtataagcagctaccatgctgttaaaccatactttacggtttctcgactcgtcatatttgatagccggaatcggacccattaccgtcttggctccaccatcctctgtccattccagtttcattcccaaatcaaccgccctatcaaagcaagtttcatcaatgttatcaagaagccccctcaacgaacatacactgtgagaatctacaagtgatgatgaagtacctttgctcagcaaggttcttgtcatgggttaagaatgtagatttccaaccacgtccaatgggagatgaaggatcatcatcttcacctaaaaccctaacataaagcaaaccatgttcctctaatctctgaacaaactctggatgtttatctttcattctctcatacacaacatgactcaacacaattggagtctctccaccacacttaggctcaatctcacagtaaaagaacaactttgatggaaactcacgaacctaacaaacaccatcaatcaaattcaataaagctcaaaactttagatgtaacaaatcaaattcacataaacccaaatctgattttgatcaatacctgagccatctcgtggtgaaaaggaatcttctgatcaggaggtgattcattagcagtgaagacacgactgacgacgntagtgcgagg

SEQ ID NO: 39000 - DNA, 471 bp, Arabidopsis thaliana columbia
ctagtgcgccagtgtgctgtaaagcacatggaaaaggtcttttttgtagtctagtgtggcctatgtatattatcttgattttcctggttcagaagcctaaacgaaaccccagtacaagttatcaacgaaagaatccagaagcctagccgtccgtatccggtatagcgcggatagcttcacccagctgctgcacggaagctgttgactgaacgactgctccttgtatttgtcaatggatgtgtcggaattatcatagcatcaaaatcttgatcacctttgctcaagcacacgattgcattctcagactttcaacgctttcgctagattttgggctgctcgcggggcagatgcgcctgagcctccctactgttgatccaccggcgaacgttcctttttgtgagcttgacagcggcggcttgatgagcgccagatcttctccaacgggccgtcgtccaggaccgcttggatgca

SEQ ID NO: 39001 - DNA, 824 bp, Arabidopsis thaliana columbia
caatgcttgaacaaggtttctaaaagcaaaagtagatacaaaaaaggatggttcatcacaattcaagaacttgttcatttctcaggaaagattgggtcaatgaaagagtgatacataggatcagatctccaaagaagagccatgtgaagatgagaaggagtgagtcgatgaatctcttcaacaagccagatagtagcttcagctttagtaggatgaatgatagaatccaacctctgttcttcagaatcagtaccgaatcgtgattgatcccatcgttgtaagagaacattcgtgaggtaatgtagaggctgaccataaagctgtttcattgaaatgcttaatccaacccagcttgtgaacggaatcaacgagccacgattcgtcgggattggtacttgcttcatgtagtcttgatacatctctgctcttctcagcaacgaacctgactcaaaaaatttcagagcatttttgtaaaaatcaaaacttttgaatcaaaatggtgagaaaggaaagaaacaagggaccattgaaatcgtgtaccttcatcagcgacgtctctgtgagaagtatcgagcggtgaaaagccatcgctgatctcagcatcgacgtcagatgaaccggaatcacctgatggtcgtagttccattgtcattgagctttgcatggtcactgtcgagcagttagattttgacggcgtagaaagcagaaaggtacgaagacgatgaccacacgaggttccttaaaattagggtttttagaggaagaagacgaagagaatgacttgtacacgtgtcagtaaaaatctgcacttgtcagatgtgggg

SEQ ID NO: 39002 - DNA, 519 bp, Arabidopsis thaliana columbia
gtgtgctctaaagtatattatgacataaaatacgttttggattttaaaacacttgaccttcttaagtgctgataatgcttctttcttatgttttgaaatttgattaacttaagcttcatatatctagtttttcggctggtgaaggggttttgttttttcagaattccccaatgtggagagtgatgactcatcagtttcaagcgaaaattactcaaactgtgttaattcctttgaaaaataatatttctagtagttattcgtgtgcttcgttggatctttttacatgttcgtattgtcaaaaacttgggagaatataaaagtttgtcttcttattttaatacatgttgtgaaatattgtctacaaaactagtgagtgagtttgagacgtatcaaaactattgtctccaaaacatttggtttcgtgtgctttctcttatttgtgtttcattcaccaaaagtgtgtcgtgactagtgagttgatattcttttaggctctaccaatttgggtcacagtacctt

SEQ ID NO: 39003 - DNA, 592 bp, Arabidopsis thaliana columbia
ttttctggagatttcatgtttgaaaaccgaactgttgggaagagcggttcttcatcgttgacctccttgattagaggagcttggccgctgattagatattcactaaaaaccaaacctgcaaaataaacagagatgttattttcgtcttgtaagacgatttgaatgaattggacgtctgcaggagtgggatttacttgcacggtatgggtttagagtccggagctggatacactggtaagatttgagattggtatacatatggattgtagtcacaactccaaatgcagcaagggcaagacttgtagaggttcctatgcaattggcaaccactattcctagcagaatacccactgacttgctcaccattccttgagcttcacccttggcaattacctacaaaagaagttgttgatgcatacactagagacccagaatagttgagaaaaacaaatagctgttgataagtgatcaagactaaggccatataaaaattattgtagacctcagcaaagttcctttgagaagcaaagccagcattgaagcaacttctagtagcagcctgcagacaagtaaatgataagttcaatagaaa

SEQ ID NO: 39004 - DNA, 642 bp, Arabidopsis thaliana columbia
  unsure (1)..(642): unsure at all n locations
ctagaggatccccagtttaaaaattgtctaatcagagtttaagcacaaaaactagaaactaaaaaagaatcaaaaacattcccaacaaatatcaacccttagattcagaacatcggtgaatccgacggtgaaggatctacaaagttaaaaatgctgtccaagtagttcttgttgtcctcatagtagttgcagtcaccaccactactctcgccggccgtctcgtttttatcgccggagaaactccggtcgattgaatcaccaccgagcaagagacccgtgaacccttcttcgattccttctcccatctgcgtagtttcaaactcgtgcatcgttgaattgatccaatcgtgttcaggttctttcatcagagtcacaccagttgatgatccgacaaactctatcttcgccgggattgattccttcatctcagagaatgacactgtagatgtcggagattcaagctgttgttgatctgcattgtcttacaaaactcaaacaaagttccaaagtttaaattttgcggagacttagtgtgtttctttggtttacttcgtgtggttttgttgccaattaggtacaatgacttgtgagtgaaccatgatgatgatgnaggtgagatgatgttttggtttggtaatgtgt

SEQ ID NO: 39005 - DNA, 816 bp, Arabidopsis thaliana columbia
gcttgttatacatgttaacagcattatcaacatcagcgtcactgtaacaaaacataatccgagaaaacccttcattcactttgggaagttccttactctgaagcatcttattcacaacagctgcagctcttccaccttgtagatttccttcatgaccagttcttttaactgatctagatatacaaacctgagcaggaagctccagaaccactgcatgaacttcgaactcaggaccaccaagcttaataaactctgaacgttgctccctgtcaagattgcatctgtctataaagacgctcttgccttccctaagagaatctgtagccatctttaaacactgagcctttgttccagctttgccattgttaacaatgtcctgaaataagttaaacaaatgaaatctaagccaacacaaaattcttacattgatagcaaccaagacagatatttcttacataagttttgtaaatacttagtctcgttgaagaatttcatcagtcagcttatgtgcaatataaaacaatcgataaaaaagagagacctggcagatacgagaccaagggcggtgagaggaacgcattgcggtgtcacaaaacgtcgatttgccgcttcctggtggaccaatcagaagcaccactatctgcttcgctttgtctgcttcaattgattccggagaggtttgatttttaccagattcttcaatttgcacttccatcttctctcgttgatcggcgaattcctctgtttctccgattatacaattgcagtgccctcgtaatgcgtgtcgtgtggccgcctgtatttgaaatacgtgac

SEQ ID NO: 39006 - DNA, 507 bp, Arabidopsis thaliana columbia
cgggtcgggcctgcgacgcccataccattagtagccgccatgtgcatgttgtttcttctggcctagaactagtaatgatgcttctcgttctcttgcctctttcactatggtcggacccttctcgtcaccttttacaaacaccacttctgtttttacctaatccaacaaattattgagtgatttctttctagatactagagtaggataaaatgttttaaatatatgtatgttggacagtgatatctagttaaaggggtatactatggttaaatgaaatattcatcaacatttttacgaaaatctaatgatctgtgtagtgcaaattgaaatgaacatttcgctaattctacttaaaaaaaataaaaaaaaattcaaatgataatattcataaaaaataatgtgcaagattattagttttacctatataaattaagatttcttaagaaaattgtttaaagatttattcgtagataaacaaaaaagtatggtaaagagacatattatgaa

SEQ ID NO: 39007 - DNA, 706 bp, Arabidopsis thaliana columbia
gactctacaggaaaatattttggaacatttaatggagtacatgacgtggagttactgacttctgttcaacaataaaattgttacattgggttacaaatacatgaaccaattatttttaattttgtgcatgaatttcaacaatgcattaatgcgaaagaaaattagtttcaatcattcaaagagtggcagcaaatagtcaaaagctgatataattattattttaacaacactagttaaatttcgcatgtatacaacttgcaatgaatatagcatctaaaaacctcataatatttgtttttttctgcttgactttaacttgtcagtacttttcgatcatttagaagttagaagacattaattattcatggaatgccatggtgagtatacgaccacgtattcacatccacttcctcatcattttaagagtcaaaaatatctgtgagaggatcctggcccattaaaattcaaggcccatttagtgtaatatggcttcatgttctctctttcctaagaccgtttttactgttgaccaataaagtctgaactcgtgatgacgtggcgtgaaatcgagagacccacgtgtcatcggcgtgccgttatcctctttccacttccggtctccgttcccacctgagtaaaccatactggtcgtgaaatgacgattctcgctgggttgatacgccggtgttttagtagattagttccg

SEQ ID NO: 39008 - DNA, 524 bp, Arabidopsis thaliana columbia
tttttcgtttgattttaattgtcaaattttcaaatgtagttcgtttatttgaatatttttaaaaatctcaaaagatgattgccaaaatgtttagaaatgccttatttgtataaggtggtgcagtggtggtgccatgtgacttaggataaattataaaatagcatatctagagaaaaggccttatgattgtataggtttctagtttgacgtacgttgaaaaaaatcagtaataaaatatagcaaattgttttcatgatatgatttttattctttaattaattttactataaagaaatcgtgctagaattttataaacgcttatgtgagtgaatatgttgataaatgattattttgatgagtacttaaagctatcatgattttatagtttttggaggttttgccaaaaactaaaggattctgaaaatatatcaaaagtggcccaatagaagcccattaagaccagttaaaacagagaaacgactctatatcgaacgtcacgcgcattactcgcgcgtgtgaccaag

SEQ ID NO: 39009 - DNA, 679 bp, Arabidopsis thaliana columbia
accaaaacttccagtgaaacacttgctaactagtgaagctattctaaggacataaatgatgtcaaaattgggccactaatgttgtgagctcaataacttgcttttagtacactgtatcgagcttagttttcaagccccatctagtgttattttggttttgtctttataaaaagcttgtaatatacactaccgacaaaatcaagtgattggatttatcattatcacccatcaaagcttcgaccgacagtctttaatggaacacgataattccatggaagatatttatgtgatatttcgtatgaatcataatgaccacgtaagaaaatttgtgatcgagaagagaacaccacattggtcacactgtatgacaataactgatcactaataaatgtctttttcggcaacgacagaatgatatcaactttagttagcctatcatcaacgtccaaatataaacttttctaacatagagcaacattattaagacaaataatatgagtattaaactccataaactaaagtggtgctgtcaaaaaaaagaaaaacttaaaagtgattagagttttatttatttattaatattgatagtgataaagagatttttatctctttcaatttatgaaatgtgttcataatatcttgttgtcaatatggagtattatttatttcaatacaaaaa

SEQ ID NO: 39010 - DNA, 589 bp, Arabidopsis thaliana columbia
atttgtcttaaactcacgccttatcagatcatcaacaatctttttagaatttcctgaaactgcttcgtctccatcatgcattgaatcagataaaacattgtctcccccttgcaatgaagttaatggttctgaagggggagttgtgatgtttgtctaaagtaaattattcactaatatctacgaatgtataagaacatgaatcaattgcggcagaccttatctgttttaaactcacgccatatcagatcatcaacaatcttttcagaatttcctgagaactgcttcgtctccatcatgcactgaatctgataaaacattgtctcccccttgcaatgaagttaatggttatgaagggggatttgtgatgtttgtcgcatctgcaacatggttgacaggagattcagacgatgtggagaggttaggtgctaagcgtactttcttggatggatgacgagttgacagtctggacctgtaagacttgacagattgcaggaccttgatctttttcagaagatttaaattctgagatcttaacttcttaacactctccgcaaattcatgtcttatggaagacactgcggggtacgag

SEQ ID NO: 39011 - DNA, 647 bp, Arabidopsis thaliana columbia
agaagttaagatctcagaatctaaatctcctgaaaaatatcaggctcctgcaatcttacaggtccagaccgtctactcgtcatccattcaagaaagtacggttccaaacaaacctctccacagtctctcaatctcctgtcaacactggtgtagaggcgacaaacatcacaactcccccttcaccaccattcacttcattggaagagggggtcagtgttttatctgattcattacatgctggaggcgaaacagtctaagaaaattctgataatattgttgatgatcagttatggcaaaagatatccatggagacacgcaaagattcagtttgttccgcacagaagcatctggtaattgttatgaagtcctttcatattttgtccccacataatgttggtcatatattctgtgcatgttccttttcaggatgaaactccatcagttatattacccaagtttatatctactgatagcaccgagctccctccctctgatcaaccagtctatgacactgagtctaaatctagagacgagggaaatttttcaatatcggtttcaagtccataatatgtaactattatatacctaactacatttgcattttaccttagcatcttccatctcctctacctcctgctgttttcgat

SEQ ID NO: 39012 - DNA, 622 bp, Arabidopsis thaliana columbia
caaaatattagatgttatgaaggttgattacatcagtcgagaaaacgtagccagtcatcttcaggtaacgtttcttatatacaacataattgttcattttcaacaacatttttgcttttattcttgaatagcatctccattttttttatacttcaaaatggagtaagatttcaaatctatttagttattgattttcagaatgaccctttataatttacttatgaaaattacaaattcaacccatatatttgtaattttaccttagttatgttatactctgatccctcatcattataagtgatgtttaaggtttctacacataaattatgaaaacataaatctttcatttaatatacctcttttacatagaaacaaaactaaataaaatgaattcaaccaatttgaaaacatactctaaaatataattggtcgaaaaaaacaacatttagatattgaattattgcatagaaacatgagagcatcacttaaaatgaaacaaaataaattttcttaaacatcacttaaagttatacatagggagtaggtaatatatgtcattttaatattaaaatattagttaacacataattaacattattgtttatatgttttactatgagat

SEQ ID NO: 39013 - DNA, 889 bp, Arabidopsis thaliana columbia
tgaagagttatgtaagaagttgaagatttgcggatttggtaaaggcagatctgcctctagcataaccgcagtctttgagaatatcaattcacccacaagtgttttcgacattgcattgagagaaacctggtcaagcttacctaaagagattttgatgcttgcattctctaactactctgagtttgcagatgttctggtagacaagaagaaacagtctctcgagttcttagttgttccagaattcccacagttaccgcctttcttgttaaggaatccttcaagccggagtagcaaatggtcaaagaaggagcaacccggtgttgaggtcgttggtcctgttgttccacttccagttctcatcacactccatgagttccataacggatgtctcaattcagaacaagagttctcgcctgaagcagagttctataaccgatgcaatcaaatctccaaagccacccgccagatcgcaaactcaggtcgacacgagacaaccatttcacttgacgaagaccgagccgatgaaatgtggctcaacagtgattcacaggaggagaaaaagacgttcattgcttatcgtccgataacaaaaacagctgaatcagacagactacagcaagaagtcacaacgtttgtctccagaatacgtggttgtaaagaaggtgatgataatgctgtaggaagaagagggcttgaactgttcgatgagttgtctccggtcgagatgttcttcgaaaatcgggaagtgaatttcgataaattcgatatgaaagctatgcttacggacaagacgtttcactctcaatggcaagatcgatcatcttcatatcaagagtttctttctcagtaccatcttaaaaaatgagagagatatctcccacggcttcac

SEQ ID NO: 39014 - DNA, 755 bp, Arabidopsis thaliana
cacatgtagtcaaattatttgatagagataatgaaaactgagctagacacatgttgcaaaacacatacatacaaaatctcatacaaaaagatctgtatatctataattataaacatatctctctcatctctcactctctctctcgcccacacacattcaagaagaatataaagtgttattaagtcatgggaccatatcgtttctgtagcttacattcgacctttttcgtggactacacgatctgtctctctctcactctctctttctatctctaaaaataaaagcttcagtcttttttctctctttttttggaattaaaaggtttaacctttacctttttttcccttcactatcgataattgatcttctctttcggctgaatataaatctgaaaaaatggatcaagatcagcatcctcagtacggtataccggagctccggcagctcatgaaaggcggaggaaggacgactactacaacaccgtctacttcttctcattttccctctgatttcttcggttttaaccttgctccggtgcagccaccgccacaccgtcttcatcagttcactactgatcaagatatgggtttcttgccacgtggcatacatggattgggtggaggttcttcaacggctggaaataacagtaacttaaacgcgagtactagtggtggaggagttgggtttagtgggtttcttgacggtggtggtttcggcagcggagtaggaggagacggtggaggaactggaaggtg

SEQ ID NO: 39015 - DNA, 648 bp, Arabidopsis thaliana columbia
tagaccttatttaatccaccatgtaacgagaacatatattaacacgttaaataccatagtttatttcatgtttgaaatatatatgaggtctaacaaaatactacgtaatcaaacaaaaagcttacctcaccataaatatacacatttttataaaaaaattgttgttttctattatatacaaattaaaagctaaaaatagaaaactatactaacgaaataagaagcatttttttgtgaaagaacgaaaatcataaacataaccataataaaaccttatttagctgcaaactactatataattaacattattcttatactatatatgatagaacaatctaagataaattgtgttgttgatgaaaattctacaatcgtcaatatgatttcaccgttccaaaggataaccgatgaaaaatataagtttcggtttgtaagatttaagtctaacagagatttttttctttaacacaaaaaaagaagagatatttcaatagtctaattttttttaaaaatgaggttttcttaactttttttcgaattgacatgaacatgataaccttttataataccaatctatgaatgtatgacaattaaatcgtgttgttcgttgtatatttggctcttctatgtgtgtgtttgtgtgtgtgt

SEQ ID NO: 39016 - DNA, 786 bp, Arabidopsis thaliana columbia
tagaggatcccttttgttggcaagtacactcgatgagaaagagacagtacgcgtacttgatagggccagtggatctcttcacgtggaagtcagccatgtagtaccaatccccttctacgagactaccttaaacttatacatgtagttcccaactggaaggattgcatcgattttcgaaccctaatccaaattaaagaccaaatcttctactatttctaatcttgttcaacaaaaaacggatcctaaagacatgcaaagaagaagaataggttgaaacgacttaccttttcgtcatagagaatcatcttcatcggttcacgagcgatgtctcccctcttattccagatgctcaataacttgacatacacgatccagttggtcctctcaagattgaaattgcccaaaaaatcgactcttgccatcagaagttgaaaagttgcagataaaatgctagggttaaacagaagagttgagagactcaccgattttagggttaacctagactctaatatatatataattgaataaagacgcaacccttcactttccctcctcgggggttacgttataatagaataactgtcttttattttgcaaatgggcctatttcattaagtgggcttttatatgaggttagtttgatatttggtcaataatttgtggccactagttttgtatgattgcatattgttatgcgtcaccgatgtgtcaattctgtcgattaggtcactaaatattcacattagtatcatatacgtgcgcggacataattagtaacaaatatga

SEQ ID NO: 39017 - DNA, 647 bp, Arabidopsis thaliana columbia
aagttcatttttctaaaagttaattggtgaaaatcaattgcaaacaatatattactctcttttcttagtagtcttctatataagattctgtttgatcatgagataaaaataaaaataaatactctttttaatctgtgggtaaaaggtaaaagagacatgttatggttggatctgacggcccacgtgtcgctcgcactccgatctcttttcacttttggtcccagtaaggctgtccgtatggagacatcttcccatgcctttggacatttgtgaaaacaagatattattattagaacaactgaacaagatattgcaagtgttacttttatttaatttcactgtggtaagataaaatttgaaaatttacttgttgctctgatcttgatgcaagtaacctcaagttttgcccattcttggagaatgtaaatataacttcgatccccaaaatgtgcctcctgtcatgttggaataactggtcagattttcaaaaggtggaccatttgtctggtccataatcatcaatcccttatatgtctatgtccacttcttaaagtttttgtgtctattgttaaacgagttggtttggtttggatcatttgaaatgaatgggtgaatgcatgaattctaagagtttgtcatgatactta

SEQ ID NO: 39018 - DNA, 597 bp, Arabidopsis thaliana columbia
ctccgccatttcagctcatccacctactttgtccggcgcttcatctcgtcctcgctctgtctctccccggtcattatctctctcgatagactatgtttcttcattgaatttcatagattaatgtatataattgataaagtatcaaaatctctgcattggtgttttgaaagtcaggatcttttgcagaattgcgtaatcagtgaatccatgaagtcgagagattagagaaattgaaagttttgcttagttgataatgagaagttaaatgaagcttctttttgtgtttacagattgttcaagtcttgtgttaagtgcacttatgctgaagctggattaagcagcgcttcatggtcagcccctattgacattgtggcagatgtcaaatccgaaagggtacgaaagtgaaagaacgagccttttttacttgtgtgtatatatgattttcgtgtctcaattgaaaaggctttttcttttacttaggttgtagttcttggtgggaatggtttcgttggctcagctatctgcaaagcagcaatctccaatggtattgaggctgagagtgttagcaggtatagaaaaagtaggaacagaatgctt

SEQ ID NO: 39019 - DNA, 980 bp, Arabidopsis thaliana columbia
ggtatataacatcgagcgttcgtagtccatgccatatcccctaagccagatctaacggcaaatcgattcgtaaaaatgatagagccgacaagatgctgacacgtttaggctctgtctaccggttcacgtgtattacggtcatgtcctgcaaccagaatccaataccctaaaccccactttcagcttttcctttgtttcttgatactttaatagaagcatcacatttattttccaagatgcttaagtcattattttaaagactggtaggtcctatacccaaatgcacaaaattacgaaaacacgtgtggaactgctaaaaatcatactcaagtacctaacatatttattaactactgaattaatccaaataaattactaaaatattttataccaaaactaaactaaaaggtgattcacaaatttcttttaaaagaagaaaaatccattacagtaattttatttggtctaatagaactaaaataaataaagataaataaaaaaacagaaactatataaatagcggctgttataaaaactacaaataaatataactcccgtatttgattctttcttcaagatatcaatcaagatcaagagtaagacagagacacaaaggcgagacctatgtcgtcgtcggtggatttcgtgacggaacaggggagatgcggcgacgatggtaacggcgccggagagacagtaaagaatggcgaaattgatcatttgctttccgaaccgtcggctccgactatttctctccctacggaatctttcctcagagcagcgacgttactcaagaaccaggtgcgttacgataactatgcgacgcccagacggctaatgtaagcctagtccgtacgttcgctcatatatgttttttggtcgatgtatgtataggttgtggaggccacgtggaaaggtggtgtcgaagctcttgcctctggttcgggtccagtgctggatccgactgtgtacacaggact

SEQ ID NO: 39020 - DNA, 674 bp, Arabidopsis thaliana columbia
cgactaacacaggaaactggatttggattgtataaaatgcttaccctaacatattcaaggtcttctttgagtctattgagttgcccacctatttctgcatcttgcacataaccaccagatgtactccgatgtagcttctcgagacgtcttatactcctttcaatctttctccgctctacacaaagaaagatgtaattgttttgtccgagtaagccaaatgattcagcggaaaaacaactcagaacaatacaaatatacaatgcatcaaaaataaagcactcaccgaagaatctgacctttctgttccttaggaagattttacgttcaaaagcaagacggaaatggatatcttgctgcttcttcagatcatccaacttcttttctagagcctctcttacttcaggaggaagatcctaagagacaattgcatttgtacatattcatacatcaaaattcatctcttctccattaaagacatattgcttctcgaaatcaattcatgatctctcataagcaagttaatcgaccatgatcctattataatcataagaaacaaattcctcaaaagatttaagagaaaacactgaaacctactttgattagctaaattttcaatctaaaaggccggagaaggtaactctaacgctaatttcgtaggaagagaagaagagtag

SEQ ID NO: 39021 - DNA, 683 bp, Arabidopsis thaliana columbia
gggagatttccgacgcacgccggagctcaaagcgagacgaagctggagggaggtaggtgtccacgtggcggtcgcagaagccatggtttgattgtagagagagtaagagaggataagaaaatatgaagagaatcgtcagtagaagaatggtagaggaggattagggtttaattggaattaaagtaattgtatcaaatgtattctgtgtttttggttggtttcgttacagaatattgcacaaagggagagcgttggacagtgatcagcctcacactaacacacctaaccacctaattgcttttatttatctttccatgtttaacacatatggttggtttaattcacaagtgaaaaaaaaaagctagatgccacgtcagcacgaagccaagaccaggtgttgaaagctcttgaatggaaagtgttttcgctttcattttaaacttttgagagaacatacaaggaacaaagaagagagtttatcacgttttactgttttagtttccgctttaccgaaataggagtggaatatatccaatgacaacttaagcttctactaagatgacaagtacaaaaaagttacaaaaagctattgccatttttaacacattaatctataagatttgagggttataagcaaggcaataaactatacgagattacatgttgagtggttgaaaatgttg

SEQ ID NO: 39022 - DNA, 528 bp, Arabidopsis thaliana columbia
cgaaagtatcagatgtttatggcttatcgtcttcgttgatgtttattactatttacaccagaaaaagggtgccaatgattttaaacaatgaaaaaaataaccaacacaaacttaataagtttttgaaatttggcaatattcagatcttttcgtcaactaggtgttgtaacgaataagaaaacacttgataacgaataatggtaatttgtcgataactaacttgaaatcgacaagtaaaccacaagaaaaaactatattatacgtataacaattagaatggaacacaagccgtccatagctatctaatttacacgtagacaatgactggtaggtaggaggattaacaatgaacaatattgcttgtgacatttgacttcgcaactgaaaagtgacaataatacggtaggagaacaaaataatacatcttaaaaatttgattagcataatataatcaatatcctttatcttacaaactctttggagttaaactacattgtttaatctttggacttgatcacaattattttg

SEQ ID NO: 39023 - DNA, 1218 bp, Arabidopsis thaliana columbia
cttattcgttcacaggtccggtggaggtcccgaccggtggcggctgctcacggtacgcagctcaagcgccggtgcgtcctgtatcgacctaccggcccgttttgaacggacccatgttgagtcagttgaacggacccgtgttgagccagttgaacggtcccgtgttgagtcagttgaatggtcccgtgttgagtcagttgcagggacccgtgttgagccagttgaacggacccgtgttgagtcagttgctaccaagtgttggatcgtttagttacaaccacgttccttgtcagccaccgatttatccaccacttgctcagcctgagattcttccaccggtatgcttccccggattgtatccgccgagtaacatgccgggaagtccacccacaatgtatcaatctatatttcctggcttatcatgtccaccagaaggttattcaacggtggctccgccgctgacacaaccgggactatatccaccgatgagtccttacagatattaattgattgtcaacgtctggaagcctagtcgtcggtttggagatttgttgattttatttaactaatgatgtcatcaattcccccaacttgtgtgtgtgttctttttcttcgaactcaacataaaaattgttgtgtgtttttttctctctttctaacaaaatcacaccctaaattgttacgttctttacttagacgtttttggtttgtaaaatgctctatctgtatcatgtttgtactgtcttgtactctccaaaaatggttcaccattgatgaatgatgcacctggttaatatatataacaaacctttttggaaaaagaataaaaattgttgcgttttttttatttttgaaaaatcttcttcataatattatttctacatttttttagttggcatagataaatgcgagatttatgtaacaatcaattaattatccttcaaaataaacaataggaagaaaaaaaaaaaatgatttttaatgaaataacacatttttttattgtattttcatttataaaaattcaaatatattttataacctaatggtaatagtatattatagttatacactatagtaggatctatgatatctatatctggagtttatctgaatcgtaaagcaaagaatctaatttttttaaaaattgtcttaataaaaataaaaaatctggtgttatcacaaagaaataatatttctgaactgtaaaaaaaaaag

SEQ ID NO: 39024 - DNA, 629 bp, Arabidopsis thaliana columbia
tcccctattgcataataacaaaccaagacatcttccattatatctttctcacctatttatatgtttgcatattgaataatcataatctgtaatatataaaatctagaaattagttatattctattgaaaagggcaaccaagaaaagaaccctatacgaaagaggcttgcgacatccaaccttgtctttggaaaaaaaaattcattcgtcaaaattgattgattagtttttattttccaatattctacagtttaattctcatggtttaattattcattgcgattactagagaaatcgattttgatggtaaaatgaatttgctttttaagattccttcaagttgctaataatgctagtgaattagatatctatttaattgaggagtcgaggagtatggcttttgatttagaaattatgagcttattcttttggttctaaattacaaagtgattgttgagctttagaccattttgaaccggagtcattcgtaatctttatttgagaaaaagatggataagtagaatatattacttgaaaggtcatatattactattttgttgtgattataaatgtagtcatatgtactttcgtatgtacttacgaaaatcggcattttttctttaaaaatat

SEQ ID NO: 39025 - DNA, 1393 bp, Arabidopsis thaliana columbia
cgtacccatttcacatttcatgcattgatcgtccatcaaaaagaaaccctttctctttagtttccaaataccaagcaatctcttcttcttctttttatttacctttttctttcttggctttttcttctcctctgatagaaactttttccagtcaaatttaataactttaaagtaaaactcccactaaggtttatacacactcttcatatatagattcacattcacccatttctcttcttttttgctctctctctcccttctcttctctcttattctggtctcaaaaatggcatcaaaaggaaagaaaccactaagaagaacaactacaagaagaagaaaaagaagccacttcaagaacccatctcctccatgtagtatcaatagtgacgtcacttcaacgtcatcaacatctacttcacccacatcaacggccacgccatctccggtttcagcagagagtggatgttgtactccggagaagtcacgaataccggagatgctgacgtgtccaccggcaccgaagaagcaaaaggtggcgcaaaactgcgctttaaggaggagacaaatcgctttctttgctcctccggatgtagagctcttcttcgttttcgcacttggtcaacaaaataataaataagttaagtttataattagggttttgtgattattatcatggtatcaatatctagtttctagtttgattcaaatacaataatatttaaagtatattatagagagtgtagtgtgaggttttgcttcttttcttcttcttcttcttcttcttattttgcttttctccctccttggctcttttttaattttttcgataattttgaattaggtgggtttgaatttctggtagggtatgattaatcaaataccctatctcttttttagttaagtatgtaagtgaatggtgcttcctaacatttcaggcttgttagctttgcagtttctattttgggtttgtattttggcttgagttaattaggagtctcaatgttcttcttgcattttacctctatactttatacgtaatctcatcaatgacaatttccatacaacagtacttctgaatccatctcctttttattgggtacatcagaaattcatgaaaggacaccaattttatcagagtgaagagctcaaattcaaaacttttgatccgagttcaaaatatgtcaagtttcctaagaagacaacaggtctataaagccaaataaatagtggatgcagaatgatatgtacacaaaagttttggatataatccaaagttataaaaagattcaactgtttcttattggatatcaagttcataacgattgcgaaaattacatctcacatttgtttggaaattaaagacattacctcatcataagtactgtaattatat

SEQ ID NO: 39026 - DNA, 1017 bp, Arabidopsis thaliana columbia
atccattggtacatatctttctttgattaccactcaggtttctctattcttgttaattatactttttagtccttaaaaacggcaaataaaaatatatagtggtcagagttatatggttacacacttacacttacaggcgttaatattgatccttaaaaagaaaactctttttacctttttatagatcagtccatcactttttttttctgttcgactcagtgaaaacttttggtagtcaaaatttagaaactttaaagtgatactccactaatgttttgactcgtatctcatactatatagtatatattctaacttaaccaataaccaacgactctcgtcttcttctttttctcctatctttctctcacctaacctcgcaaagaaaaaaccatcttactttctttttttttctctgaaaaacctcttttgattaggtttaaagatggcatcaaaaaaagcaagaaaaccaaaccgagccgaaaagaaactcacaagaagctgtttcaagaaacaagttcctcaacacaacaacatcaacacaagtataactctcgatcaaacatctacatctactattgtctctacatgttcttcttcatcaacgactttgtcttctcctctagacacaatctactctgttccctctccatccccagcagcggtgctgacgtcaccaggcggttgttgtaccccgaaagccaagaagtctaggataccggagatgctgacgtgtccaccggcgccgaagaagcaaagggtctcgaaaaactgtgtgttacgacggagacagatcgttttctttgctccgccggagatagagctcttcttcgtcaacgcacacgatcgatgaacgtacttttagttaattattagtatcttttttttttttgatataggatcaatacagaaagtagtattagcaggtgatcaaaattcatctctttgatttgttaatacaataacgaagagtaaattattatgttttgcgtaatgttttttcttattttggtttgtttg

SEQ ID NO: 39027 - DNA, 589 bp, Arabidopsis thaliana columbia
tgcagaccttcagtagttttacctgtgacattgccttttacagaatctaaagaagcctggtcgatatggctggccggttttccattccctgggatctctttctcttctttctctgttgctttagccttcttgggttgtggcttgacttttatgatcgctttaaatggacgagtcgcaggatttctcttcccgattggtttttgttcctgtaaaagagttcaagatatatataaccccttgtgattcaaatgctcagatgaagatctgcaaattttatctaacattccaaattgaatcatgagatactcaccttggtgactggcgctggtggtggcagtgctgcttcctttggttcgtgaaggattgcagatcgtgctgcaaccgctgcctgaaaatagaaccatgatacaatcttaatctaacaattttgtaagcttttgttaactgttattcaagattcaaaagaaagttacctggaaattacgaagctgttcatcttcttcatgtgccaattggacgttatatccctctttgactataacaacaagtgcaaatgagggtgtaagatgcagagaagatatagccaaag

SEQ ID NO: 39028 - DNA, 560 bp, Arabidopsis thaliana columbia
aaaggttttcaacttaatccactttgagtcatcatcgttagccatccatcttttcgagtaacccaccgtgtacactatatattcaaaagaggactagagtaagagtttaaagatttttttttaatacatgtaattatatataagatatgtaatcaattgttattaatttgtttaaaattttacggcattgttaccataatcaattaattataataactaactatatagtcatttttcttgtattttgaaccgattcgaaacagtatgctttgtttctactccaacatgataagcttatgcctattaagtctgctatggtttgtcacgctatcaatttattggtgatgtatcacggccattcattatctaccggtaaattttaaacaacctctcattcgctttcacaccaagctcaaacgtcttcataatagttgtcaccatgcagagaaattctagaattacaatcaaattattattatacaattaaatactaccacgtgtgaaatcctacaatgacgggttaaattcgatattaatatgggatggtgtattacgggtga

SEQ ID NO: 39029 - DNA, 524 bp, Arabidopsis thaliana columbia
gctagattggaggccgagcgtcgcacccctggtccatcgacagaaaaggatttcaagatccagcaggtttctgtccatttcagatcaccaaaatatataattgaaccaaagctttggtacttagtttatggctattttgtgacattctcagatggaaatggaaatcggagagcttagaagacaaagagatgatgcacaaattcaacttgaggagttacgccaaaagcttcaaggggatcagcaacaaaataaggtctcttaatctacctctctgtctatctactgtactaaatatattcacaagcgttggctgaagtttaaactaaaccttttgttgaatctcagggcttaaatccttttgaatctccagacccaccggtcagaaaatgtctttcctattctgttgccgtaacgcctagctcggagaacaaaacgctaaaccggaatgagagagcaagaaagactacgatgcgccaatctatgatacggcaatcatcaactgctccatttacattgatgcatga

SEQ ID NO: 39030 - DNA, 589 bp, Arabidopsis thaliana columbia
ctaagcttatcgaggctcaagagaatgacactccaagctaccagattcgagcaccacccagagctatagcaacttcgtcatacactccaccaccaagacaaggttaccagagcacttccaagggaaatgagttcaaaaaggctggtaatgacaatggatctgttaatccctgtagatattgtggtgacaagtggtttcctggacataaatgtaagcaaagggtcaggagtatggacgtggaggaggacgttgaggaggatgaagggctggaacctgaacaaatgaaacaagaggttcagcaacagaatgcctctgagactgaagtggagaccatgcattcaatgggtggaatttcatcagagaaatctatgatgatgaagggtagaattgggggtagagaagtggtgatactcattgactccggagccacctcaaacttcttatctcacaagctagcaccggagttgggtttaactagcaccaatactcagagttttgcagtaagggtggctaatggtcatatattccatggcaaggaaaagtgttcaggtgtgatgttggaagtcaaggagtggagatgatggaggat

SEQ ID NO: 39031 - DNA, 936 bp, Arabidopsis thaliana columbia
actacaaaatttcagagcgttgtataatgaaaccaaacataggcttaaccagattatgctcgttaacctttagctgaagaagagatagtacacatattatacggtggtcacattactaggtgcatggaggtatattgatgtcccaattagacatataatcactagttaaaagtgtgcttaacacccccgagccagaccatgatcaatgcagattcggggcctttgaagcaaactacaaaggaccaaatctttttttaggattagaacgacaaatcaggtactaagtacaaattacaagaacttctttaggtatatgataaaaatagtaaacatctattattccaagtattaaaaatagctaaaatttaatgattatacatgcactgcagttattatggttatcatccaaattttattctaaccatttaacatcgattgtttcgtacgttttgtcagttccataccaatgatttgtattatgttctctttgtttcgtctaatccggttttctgcatcatcaccaattccagtattcactctcattcgactcataatatgaagtaaaagttcgtaaactattaagttggacttcgctttattttttcgcattctgacaatagtatcttgttttgatcatttacagtataatattagtatcttataaccactaaggccagaatagtaagtatatagtttgatcatttaatttacacaatcctttatccaaaaaatatattgtatacagtatcatatatagggtttgcttcacagtcttaacttttcctgactcgaagagccaatctcgagagagcaaaaggtcccacgtgctttatccaacactctttattaaatcctgaataaaagtatctcaaagtgacaaagatttctataacataaaaaggtttggctcttataagtcatatctagaaaaagaaa

SEQ ID NO: 39032 - DNA, 521 bp, Arabidopsis thaliana columbia
  unsure (1)..(521): unsure at all n locations
cgaactaaatcaatatatctatcgaaattcggatttatctagacttattatgaacaaaatacttactttcaatggtaacgttttaattttttaaaaaaattcagatttatgcttacaaaacgttcatatataccgtcttcttcttactgttcaatgtcttgattgattttttggtgaaagtaaactatggaattacatgtctttttaaaaacttatggagttatacacacgcatgcattttcattaatacaacactaatttcgttataataaaatgcaacagactaggctatattgtgtttggtttggtgtctacgcaaggcatgtgtactcgtcgcatacaaaacgtaaaaatagacagcaaaaaagaagctagctagatacgataatctcaaggctcaaaagcccaaaaattaaattgggccttaaagttccgaacatcatagaacaggccattatacaagatatcctaaaataccctttgccttgtaggatgagtanattaataaaggaattgactat

SEQ ID NO: 39033 - DNA, 875 bp, Arabidopsis thaliana columbia
aaaagagattcttgcttaaaattgaaagagctgttgggatgtatatgtttgctgtgttgatcccattgagattgcataaattgttatgtgctttatcgttcgtgattcccttaaaagttggcagatgtgtgattcccttcaatttaaagttagcatgttattagtataagcggacgagaagagtaagtttgttatgctactaaaagaaagaagactaggtttgttaaaagggatgtgactggtcaggtgtttaattggattttgagtctgttacaaacaacatatagaagaatgtgtactaagtagcttataaacttctttaacgcctttatatggaacatttcttagatagcttttaaggtgttttgttttttgcttcagaaacctgtataaattaaaaaaatgaggaataattttgtttataagatgcttcgaaaacctggatactactattacttataagatgcttttaacaaaatttgtaggtatcatatgtattaacctactaggcatttgaaagccggtcctatagctctttcgctttatgaatacttagaaacaattttgcacagacaaaaagaattattgaaaatactacatgaaaaaaaaataagagatacgatggtttgggtcttaactttttcaagttaaacaaatttgactttgtttttagaccaagtagtcaaataagttgtgataagtttatttttccgggttggaatagtgcagcttttgccatgtttatcaagagttcaagacgggattatacaacaatcagactagagttaaaagagataatcaataaagcacgcacaactttcacactatgttaatttagggcatgactgggtgaaacgcagtgtgtgcggttgcgg

SEQ ID NO: 39034 - DNA, 592 bp, Arabidopsis thaliana columbia
cagccaccacaaatcaaaaatgaaaaaccaagacttgtagatacaaaaacgaaccgtagtctatgacaatccacttgctattgtacccttgcacagaaggtaacattacatgtttagctcctttctgcttttgcttggcctgtgattgaacacaaagaatataagaaaacaatgatcactcttatcatcttagtcttcaaattcactcttaacacaaaacacgtactcattatccatccttatatcaacaattgaacaatagcaacgaaggaattgaaaaagtggaaggtgaaatgtgtatgtaccctataaactaaagcttgagcgatgtttcttaagtgccaatcggatctaccggtggcgatgacagtgaaatcagcccagaaacaatgattatgtgtaggaatcacagtcacgttatcagctttcacgtcggcgagaatcttctccacttcgggaagtgtgagaatctctgagacattagagatcccggcggatgaagaaaaagagggagaggaagcgaagatgcgattgggagctagcttccatgattgatttagaagaagagacgaacaacgagatcgaagagtcg

SEQ ID NO: 39035 - DNA, 769 bp, Arabidopsis thaliana columbia
cgccagtatgttgggtttggggtgttacaattctcccccacttaaatcgaatttgtcctcgaattctttattgtgatctcgtttcattacctcacttacttttaacttacttgtagctctagtgaaccatcgactgcttagaggaacataaccaacacacgaccttgtagttgagcttacgccttttcaatacgaaaactaacacttccttcttaacacaagctttgctgtaaagacttagaagaactattcaatacaacttctactgaactcttacatcacaatattgcctctacttttatttcttcttcgaccttggtcacgttagcattgctactcgtctcttagggattccgtccctcttaacttacaagcctccaacatgttttttgttttttaatactttctctctttttcattctccagtacttttatcctctagcttttcatggctatcctggtgcactgatccttacctaaaacttctttaacgccatactaaagcgaaaagaacatgagaatccaaattacatttccataatcacaaggaatgtaattaagtcttcccaaaaagaaactaagcaaatatgtaaaactcactcaacaaaagatttactctacgcaatcaaagaaatcaatcatcaagttcaagcaatacacataatcaatcattcaaaaaccattttttattttttttaaattcgttttcaaaaatctgaccctccgggtcggaaccggagtggccttaacctggctctgatacaaaatg

SEQ ID NO: 39036 - DNA, 485 bp, Arabidopsis thaliana columbia
aagttttcatgattttacgaatcacaagttttagatataaagtataatataaagaagttctgagacattggcctagtcctactaataaagaataaatctagacttttggaccattttttggtaaagagccgaattttttacctaatctgggggaaaaagattttgtttattaaattttattttcctctttgattatcataataatcaatgtaacacaaatacaacagttttatacataataatttcaaaactcctaaataagattagtcaattcaacttttctcaaatatactttccaatttaaaaatacattaattagtcaactgcacattaattaatatatagatttcaacttaataatacattaattatcccgaaacaaataatttgtcagttcaacatatatttatatatctttaaaaaaattaaaaccttcgtttttttgtaatccatctgagcgcttcaagaatgtcgtccatgctcga

SEQ ID NO: 39037 - DNA, 935 bp, Arabidopsis thaliana columbia
tgaaaactcgaagagatcttcaatgtcttcgtcgatgaaggaaggaaaccctaggaacaatgatgaaggttcaacaatggaggtttcacggacgatgagtggtgtacacgtgtacggatcgatgagatcgagtctatggaacaaagtcatggttttgttttagagtgtttttgactcggaagctcgtgaactctgcgaatccggtcacgagtaaggtgtattaataaaagctcttttggattggtagtgataatggctttacgaataaatgagctttatttagaatttgatccaaaaatttgatatcagatttaagacagaagatggagaagacgacaaattcttgagtttaacgatgttgagattgaacaaaagagcaagaatggtcaaaaacggtgggccttgagggtaagtttgacatttacgatggggattatccggtttggccatttccatgccatttcaaatataaactaataaaagtttactaaagcttattgtattagcaattaaatattactagtgaatagtattttcattactggcgagataagttggtttgaaaatttctttattcgacgtataaattggttttatctatgataaccagcccggttcgatgaacagatgaggcggatattgaagataaccgtgtgtttagtggggaaatgacgaatttgaccttgaagcgtgtgaggtattacgtcgacaagagaatctttcggtgggattacaaccgggtaaaagatggcacgtggggcctggtaactccaccgtgagccacaccaaacaaatcttacgttattttgaatgtgttttatcacgaagacaaaaaatgccaagagaatcgaaacaaacaataaaaacataaatagaaagcaatgacctatcgataaatctgcagcaataaactctgagtgcaacgtcctgctctg

SEQ ID NO: 39038 - DNA, 775 bp, Arabidopsis thaliana columbia
gtcaaactgttaagactaaccataggcataagctattgattgattatatatgtgttttatgtttggatcctaaatatataagagagtgaaatcagcactatgcatgtcaccaacagaaagtaaataagagtatcaaatactataacaagtacctacaaatttgcaaaagaacgatccaacttgcaaaaaaggttcttaaattcaaaaaactattgtcgcttgggggaaagctttatttatataagacctttccttgcgccttaaaccactggtttcagcctttgagctctcagtctgccaggtcaatgaggttctgcagatatatgtgaaattatgatcagttgttcatctttaagtgttcagacagtgcaataataaacaatttgtcagagttaatgaaacagtaagctattactgaacataaaaatcacttgataaaaagaaaagatgttatagcagctgcgagaggtgtacaactccactttcattattgtcaaccaatgtattgatcatgggtgtcataagagaaaagttctactaggttgcaaagtgtgtaaagcagagaactaagctaaagaatgcaactataagctgactagagtaaaagtaaaggctttatagggtcaacagaacaacactagctacatgcatagtatgagtttgatttcctgtctgggacctcactcaagcataagcaaatgttaacaatccacagaacaaacatatcaaacaaagtgacagtgatattttctttggaatgcaaagccttaagtgg

SEQ ID NO: 39039 - DNA, 558 bp, Arabidopsis thaliana columbia
ttcttaatgtccatatccatattgtataagattcgagaagaatattttagttctacgtagaaaatatacaaatgttcctcaaaacataataaaatgtgcgcacgtaataagtcggaacaatagggcgaaaaaggtgtacatttgataaatcgtgatttatacactaatgaaatttaagtgcgaagatctaacggtcctgacccctagggttaggggagttataatgattagtcaacaattaaaacaaaactaatcaactcgttgaacaaatggcagctttgacttccgcttctttagttgtctgaaaaaaagaaagccgagtcaaattctctgtttaggattcgctactagtcagctcgaagaaccattcaattcgagacacgtgtctgtccaagtctcggggacctcaaatacacgaggcccataagtaaatgggcttacttaagttactgcattgagaattgtagaaagctggattttttattttaacaaaatttagcaaataaccatacataaataaatagcgattgtgtaattatataaaatgcataatcaaga

SEQ ID NO: 39040 - DNA, 371 bp, Arabidopsis thaliana columbia
cacaatatttattgagtttatacattagaaacatttgattattttttggtttttttttcataaatctatttatatataataattaaataaaaatatattgttaaagtatagttgttctcatacttttgaaaaatgttatgtacgtatagggatgtcaaaatgggtaacccaactcaactcaactcataatcaaatgagtttagggttaaatgagttatgggttgacccaacccatttaacaaaatgggttgggtcaacccataactcatttaatttgatgggctgagttgttaaatgggttaacccatttaagtaataatttgtaacgcccgtgaaccggaaaatcggttagggtttgtttttaaatcatc

SEQ ID NO: 39041 - DNA, 784 bp, Arabidopsis thaliana columbia
  unsure (1)..(784): unsure at all n locations
taaattatttttttctataaaaaaatttgttctaattattcataacaaacaccaactatctatatatacattaacaatggctgccattaacttttaattattgatttttttccagcaataaattgattaacaaactaaaaatattccaaatatattcagcaactatttaaaacaaaaaatgtttgacaaacaaaaatataattgcaatcccttaaaatgagcaaaacccacctaaatacattctttatctatccaataaatcttttttctccaaaatttgaactagattttggtaactattttaaacaaatatttgtttgacaaaccaaaatacaattgcaattccgtaaaatatttattttaattatatatttaaattagcggtgtaccgcgggttttttttacgggacggatttggcgagacgggtttggtaggacgttacttaataacaattgtaaactataaaataaaaataaatagatttaatttgcaaacttttatatatactaatttaaaaaataagttgtccccgcggtataccgggtntaaaatctagtttaatagttaaacttatagtaggataatatctgtccaaattgaatgagaatagtttctcaaattttttcctgggagaaacttaattctctttttctcctactttttcttccttctcttttactttttctttttttattatattttttttattgggtatcattgagagactactgataaaaatgctctaaagtttcaatctcgaagacgatctctcttgagtttgag

SEQ ID NO: 39042 - DNA, 595 bp, Arabidopsis thaliana columbia
taacatgcaaagttttcagatattatgtcacgtgtcacgtaaaactccacgacaacgaaatgttatcacttcttcttctgtcgttctcagaaacacagagtgtcaaaacctggtcaccggaaaaaaaataaactctgttttcagaccgaattttctcaccggaaaatgttacgtcagcttccaccaactattacggcggacgcacgccggattggcttcccgtcggttggattgctcactctacagttctaaaacgcggtcgtcaaactagggtaactactttaaactctttactctctaaatgtggagcctttttgtgtttctctgttctttcatcttccaatttacactgattctcagcttttttgatgtgaaatttttgcttctgttttttagtactttgatcaccatgcacacacccatacttcattcaagaaatttgaccataaatagtgataatttcaagaccaatttgagaaagctgacttgtgattgagaaattttatgaaaactcagacctctaattgtagatttagttggtttgtatgcatgttgatgcacccaatgttttacttcatcttgtagacatacacgc

SEQ ID NO: 39043 - DNA, 650 bp, Arabidopsis thaliana columbia
gtataaaacaataacatgtaattttgtttacataaaaaaataaaaacaagtaaagtatataataaaagggtagtgtgatgtattaagagtttattgcaaataaggcatttgtcttagatatatattttattttaggcagatttaggcacttctttcctggggaaagtcgtttttacccttacagagagatgatgttgctctttctttgttgatgaacttttacgttttacattagaaatcaaaaatacttgcgaccaacaccaacaactttggagtcattgattacagagtgatgtcagcgacgattagaaattcagacgactaacaattggtcctcatgagatgtgaatgcgatctagatttttaacatcccacattttgagatctggaaaaaaaaaacaagaaacaaaaaagtcccacgatttggtattacgatttgcacgtttttttgttcagtgatttttgtgcaggttaaggaactcaagaagtgattgatactttgttgattgctcaattgatgttcataatcatgtctacaagtacattgatttttgttcatgttaatggtgtttgatgataatgaggatggttgtagtgttgtgttattgtgtgtatgtaagaattgtagactgtatatttgacggtttggg

SEQ ID NO: 39044 - DNA, 767 bp, Arabidopsis thaliana columbia
attgtaaatctagctaatattaggattgttatcgcaccattctcaaactcaaactataattttagagtgaccggtggtgttccgcgaaactctttatacttagagctaagataaccggagaagccgagaaatcctatactaaagcattcattgttatcaagcttgattagttcacctagtatctaaaccagagcccttctatgagcctacctgttctttcttaaatgcctaggctcatctatgatagttcaaacaacaagtacctatggtaggcatacctattatctaatatcaagttttaggtgatcaatctaaaactagcaataaaaataatcaagatgaagaactctaagaataatcctaagcggttttcgatctactaatccatctaaatccctattgagactccttaaacccaacaaggtgattacttagacatgataacggtaacacaaatcataatctgaatagtttgcattgatgaattaggatagaagtgaaaggagttcagaatgctctctaatgggattggattcttctctcaaaatgtgtatcaatctctgaaacaaaacttaggtctaacaaatgaccaaacaattaggtatattcgtgtctaaaaacgtgcatggactactttgcaactaaggcaaactccagggcttctcaaagacttggcagaaggcagaaaatcccatagccgaaataagggtgtcgatcgacataggttgggtgttgatcgacacatcttttgaaaaacggtctttgat

SEQ ID NO: 39045 - DNA, 848 bp, Arabidopsis thaliana columbia
ggaaactgctctaaaagtgagagtcaacaacttggattaacaaagggtggtgaagttaagaagataatccaagtatgtatatgatagccatgagttcataaatcaatacaaagacatgataattgtaaattaagttaatagatagagaatggcatcagagtagcgagtttcaaattgaagcaagatactcaagttgtaaattcaaagcagggttcggtcttactttagagaaacaatcgtttatgcaacagagaactagcaacctgggcattgaacttacttcactgaatcaaacatgcttaaaggttaaagtcatcattattccctatgcaaatgagcaatcctaaatgcaagcactctatatacaatcctaaaatgaaatgcaatctaaatgacactttgtattgaaattgagaattggcaagaattgagaaatgagaatttttatgaaattctcaattctcaatttttatgaaatcattttctgaaaatttttcaaatttttatggttttttctatgccttagatgatacaaaatttgaaataagaaaagagaacacaatgtcaaatatgtcttgaaccctcccccgaacttaaactacacagtcccttgtgtgataaaaatctgagaaagaattcaagaccaaaacaaagaacaaacaaaaataaggaaaatgttatagtatatacaatggtggtggtggtgtacctcagtggtcagaggtgttttcccctcattgatgccatggtacgcacccaattcatctccgagtgctgctcgttttgagccactgatcttgctcgacctctgctcgatacctgctgagactatggcgagtgacttaagt

SEQ ID NO: 39046 - DNA, 548 bp, Arabidopsis thaliana
caccatcgcgactaattcaatggaataacagaggaaagggttaaatcccggagattgttgaggaaccaccatcagagaatgtagagaggccactgatggtgactgatgcggaggagaggccaccagtaataggggatgcaacagaacccataaagaagcgagcttataaaaagagaaaggggagagcttctgaagatatggaagaatagcaggtggtttttagcgatgatgattgtgcggttgtagaagatgaagactgtgaagaggttgagtgtgcagcgactggtttagaggaaaataatgaggaacaagggtcgattgaagcttttccagaacggtattgtgatccacctgtagggttagaagaatgtaatgaggaagaaaatggaaatggaggtgtaggtttagaggcagaacaatgtgatccagctgtagggttagaggaaggtaatgaggaagaaaatggaaatagaggtgtaggcgatggaggagtagatgaagactaaggtgaagtaggcttagacgaagagcaatgtgacgactttgca

SEQ ID NO: 39047 - DNA, 736 bp, Arabidopsis thaliana columbia
ttgctcattaaactcttaaatattagtttgggccaaataatatggagagggtgaagcccatgtccaacaataagccccccctagttcatcagacgagaattttgttgagtctggtgagcgtgtttcttgagtcggaatatgtcgatttggtcttaaacagagattacgccgtaaatatatttttttgaattttatgccttgtgcacgtttttctaggagcacggaactctgatgatttatgtcgtggatacgctttctccagagtgcataatttttttcggtggacaatatcccaagaatttttactgtagataatttcttcactatatatatctcatccttttcacttctcaccatttcaccaaaaggtaaatcatctttttctctcttctttatctctttctttccttcttgcgattggttgtggttcgtttcctccttagttcggcgaacgttgattcaaactgtggttcagcttgaatttcggatttggtgtgatttgttgagacattgatttgatgaggctggtttggcaaacagttggtttgcagcggctggttcgttgagatggagactttgatttggaggttcaattgccgttcggtttgaagaggaggagcttcgttaggtttacagcggcttggttcggtgaaatccttgttcagcgaggagaagaagcgtgcggatcggttcggcgagagggagaagcttgaatcggtgaggagcttgcttggtg

SEQ ID NO: 39048 - DNA, 609 bp, Arabidopsis thaliana columbia
ttcgacgttttggcttttgtggctttgtcggatcggcgttatgtatgattagccctttgttgggtttgcgttgtatttcggatgtttgtgtggactttgactatcgcgctatttgacgactctctttattgatgatgtttgtggtttattcttcgtttagcatacttgatattgtatttgtgactgtcttattgtattcattaggcgcgagctgcagctcggttaatcctattcatatgctcggtttatctttgagttttcatgcaaggttgatctcggctaacatttggcgaaatgtccttggcgttttaaacttggttttgaaacacattatgtatatgttttagccgaaacaacaagcttagtgttcagtagacaagacggactcatcgtacctgataggtgcggttctggtgtccggcttatcctgtatatgctctaaggtcggcaagaacgtgcaagccagaacttggcttattatgattccgccgcctgctggctaatgcgaggctgtctcagcttttattctctacctaagtaaacatgtggattatttcgccactgcattcatgtggaacgcgaagagctgcctacgatcccttaggaagg

SEQ ID NO: 39049 - DNA, 683 bp, Arabidopsis thaliana columbia
tcttgcaataaaacaaaacaacaaggtctactcgacataaattaggaatagatttaattaacctttttcacaggaatctttcacaaaattatcaactaatcagaattattctttattagaccatgatatttgattcgccaaatacatcattattgtatattctttcatatgtatagcgcaacctaatacttctttttcaagttttgaatctttgactttttataaatccaaatatttaatattaaaattaaaatattaataaaatcactcttgacagtaatatctgttgtatatgtaaatcctagatatgacaatatgcggaattcatccatgaaaatgaaaaacaagggggggttgctaaagggatgaataaatgggacgcataaccggatatgctaaaatgaaaatacgaaaaaaaaggctaatgagatcgaaataatgaatcataactaaagttccgtttcgaattcgctagataaaacaaaggcttgcctattcctattatgataaaaaaataaaagactttccgcaaaaaatttttttattcatatattttttattttaaaactaggtttcagttagttgagcttgaaaatgactattccttcattgaatgaataaaaaattgaattccacatccgcttgggtgggacaacgagatcgagtgcttcacccacttttta

SEQ ID NO: 39050 - DNA, 552 bp, Arabidopsis thaliana columbia
tcatgttcgatgtctgaatcattcaatgccaatttttttactaacaaaaaaaaatcactaccaaaccaaagtaattatgtttttaaccctaaacacctaaagatagatggttatcataattcacctactagtctcccattcatatctctaagttcttaaccctgctaaatcttagaaacaaaatcatatcccaccatttttacaaaaaaaaagaagaagatcgatatatacaaaatcatgtacagaaccagagttaaaatcccataagaaaatacgaattcggactaaagatttattaaaataggtatataaaagtgatcgaaaattatgtgtaaatcaagtaaagaaagaagagtatatctacagaatcaaatttgattcaggcactattactccttcgtttcttacggacatggtttggttcgtgaacaaataaagtctctacctcttggctcccgacgtcggtggcttcaaagaaccgaagatctttggacaatcttgtcttctttgtgagagaaactcacgcggtcgctttcttggcggcggaggaca

SEQ ID NO: 39051 - DNA, 580 bp, Arabidopsis thaliana columbia
atatacaagaaagagacaaaaacaatctagacaatgtgctaaaccttgtatcccctgcgcaggaactcgagtgagcttcctttctcttcttgtagtcccagaacctgtaacagctcttccttcgtctgtttgcatccacatcaataaaagcttgttacttttttcccagagattggataaaaaagactatattcaaaaggttaaacgcttttagcgcacatacttcacccagcgtgaaacgagtagggctttctgcaacacacgcaaatgaaccatcagtttgcttaagcatcacctgccatggccctgcattttttttccatatcagatatggatagagaaaacactctctcatgttcaggacactggaattgagaatgattatgcaaatctgatagagagactgagacaagcatcacatcatgcttagtgatcaaggaagtcacaatacaaataggtacagctatgatatatattgttttagtcttgtaaagaatagtctagcatttaccaggatattgtcgaaaaagtgctccgttgtagttcaacacaaatggtgccactgccactgtcttagcca

SEQ ID NO: 39052 - DNA, 528 bp, Arabidopsis thaliana columbia
ttccaccttaagttttaacattgaaccgttcaaatcaaatagttgttcagtttcatgaatttagcatcgaactatactttttcacgtaacttttttacattatataatcaaagacaacaaaaaagataagcacattcacgatttatatcatcaaatcttgtagtgtatatatggttggaaacttaggatggttaaattgagaaacatcatcattcatatataagtttgttggtaaacatatacgatcactagtctatggtacgtgacccaaatacacaatcaaagaaaaaatatacaatgttttcttcatgaaaactatttcatcagtttataacaaaacaaaaaaataataattatgcttcttctaattatattgtttcattttcattttgctaattttatttgttcctcaaaattgaaagcaacttaagagaaaaaaaataacgatctaaacgacggagccttcgtagatggttgaaagttttagcctgaaagatcgaaccgccagcttagctcgtttagaagtgt

SEQ ID NO: 39053 - DNA, 627 bp, Arabidopsis thaliana columbia
caatctgctgtctttttactttgtttacttactatttcactcataccctgctagcttaatcttgacatttaactcattgtttgaacaaaagaactttgagaattcgatcctaaaatactgcaattgatctcttatttgagagagtagttctaggtaatttgaaccatatcacacgcgtgtaacacccctgaaccatcctaaaactaaggacaaatacggaagcgtcacgttagacccccgtagctcgtcaaccaggtgcccagaacacgaccgttcacatagtcgaccaaccatgagaatcttttcctcgtgttcgtggcctaaggcttttcaacccgttccgagaacacgagttgtgttagtcttggactagactaataatatcattggttcaaccatctatttcattaaagctttgagtctttacattatatatatacgaataaaacgttaccaaaactcgtatatagggcggatccttatttattttccgaggaaatcatatataataaacattatcgatatttgctagagctgtaaaatctaagctagttggcctaatgatcatcgcgccgtttacagattcccgctaaggttcctataaacaaaaaggtagcatcatgagta

SEQ ID NO: 39054 - DNA, 570 bp, Arabidopsis thaliana columbia
aaatatgaaaataagccaaacctgtacatgaaaatgtcatcacgaggcccaagactcttcttacagttacagcaacaactgagaaaactgtcgggtggggaataatccgaatccgattcattaaccgggtcggagctccggaagaaaacgacgccgggttggctctcaacgatacagttatcgaatatatgaatggttctcgggttaggcccgtgacacgtcacgcatgtgtaatcctccgataactccatatcgctcgccgggaaatagccggagatgattctgggagacccaagacccgactcggaacccggtttcttcgtctccggttgagaattcctcgttttgaatccgaaatccgacgaggaaatcggagaatccgggacccggatccgaagctgagacccgaatagaattgtcccggatctcggtccgggtacgggtgtatcgtcttggattagagaatcgacaatggcgagtccgattcttttgggttcgagtttgagacgggtttcgggttcttgggtttcagggttatcggatccaaatgggtttttcaaacagagaaag

SEQ ID NO: 39055 - DNA, 625 bp, Arabidopsis thaliana columbia
gggttcgggttactttttgataattttggtttagttttggttaaagtttgttttcaaatggttaagactgaattggtgtacattaaaccgacaaaaaccagatatatgtgctaatagatctcgaagtattaatttggggagatttagctatagaacttacgtttcggagagaaataggtttaaaactttgttttcatggacatgtagaccggggttgaagtttgggctctatctggcatgatgcggtatttcttgtggggaaatagaccgtttttccggttttaatagatatgattcatttccggtggggtacggatttgtctaaacaagatttgtagaccgaagaaaaatatatagcatttggatctttgtaaaaattaagaatgtaaatgaacaaataaatagaaaatgtatgtatttttctagagttcttgtatttcttgactatcatttctaaatttttggggtatatgtaaatatttttcattaggttaggtattacgttcgtatgtatttgtgtaatattatttgaataatgaatagtcaaatttgaggtttaaataaaagccgtacagtattttatcaattcgtttaaagtttagatatcaagtactagagtacatgt

SEQ ID NO: 39056 - DNA, 450 bp, Arabidopsis thaliana columbia
actttcactttcaattgaggaagtagacagaactgaagttacatgaaggacatagatatgcaaccggtaaaaatgttagtagatcgagatttggtaataaaaaagatgaagctaatgataatttctacgatgttcagtaactcatacctcaaacattggtattacgaatgtactccaaagttttagttacttccctatcccaaacattagcctcaagttcagcctctctatctgatatctcggagcaaaggcagcatactgatacaaaccaaaactgaagatgagtgggctttagtggggctttgatttaggcttagtgttaagcccaatttccttttattgtcttctacttaaacttttcttcttcttatcaaattttggtcaatatcggtcaacaccggttaatactgggtaatgccggattctggtcaaagtaggatgtcgtgtatg

SEQ ID NO: 39057 - DNA, 1193 bp, Arabidopsis thaliana
actttcaaaaaagtgctaatcacgtaatattctctaattaatattaactttgatcatttttaaacaatgtggcaaaatgatagttatatcaattatttaagggaaatttgcaagaataactaataaaaaattataattcattaactaaccattctaactatgtaactataatattttttgtattatatgtaatattactaatttgttcttgttgtctcaataccaccattagccaccaccaccgccggtgaccattgtcggccatcaccaccaactccgaccaccaccaccatcggccgtcaccaccgtcggacactaccaccgccgcggccaccaccatcgaccaccaccaacaccgaccatcatcacctccgaccaccatcaactccagccaccaccaagaccggccaccaccaccgccggccaccaccatctgcaacctcttctactaccaaagaggctaatttagtaattatagtactctctagtattagtttctgcattttgcatattatggtgttagtttcttaattaacttgtgttagttttgcaattcacccatttttaactgatatcaattaacatctttaatacaaactaatattacgtatcatttttttaatctaattgtttttcgaatttttcatatatatatatatatatagtttcacttttatgttatgtatgtttacaattttaatatttctaataattattatgttttgtcaaataaaaagttttataatattttattttaaaatatatataattttttaagaactcacttaaggattctaccattggacaatagaaaatgtaaaaatttaacaagaactctaaactttaaattattcaaaatttattattataaacacataaagagtacgaaattaggattctctaatagacttgctcttagagtttctttaaaattgaaggtaaaaatgaattttcgtcttgaaaatccctttttgtcgatgaagaagccaataaacccctgcgaaaaacagaagtgttttttctttttaattttaaatcgaaaatcaatgatattactagtatttctccatccgaacctaacaattacacgcaaaaccatggtccgtttctgaacctcttcatccgaaccacctttactttttttttttgaaaatcaaaaaatcaaatccctaatatttcgagatattccaatt

SEQ ID NO: 39058 - DNA, 527 bp, Arabidopsis thaliana columbia
ttcttttttagcaagtggcgattgtatacattatatgtaaagattactttcctattgttaaggtgtacatatttataacaagtttctatctatgagataaaaaaaaatacatggaacgttgttattaaagtatagaaaccatctaccgtataaaaaaactaaaaggaacaacattctttgtagttacatctcttatgactaagtcaagaaaaatggcttgcgattaatcaatgacaaaaagtgtagatgttaaaaaaagatgaagagtatatatatatcaattataaatacaattaaattgaaagacaaatcgtgatctacaagaaaaaaaagctacatacaaataagtatacgagtgaagcgaaccctttttgatgacttttcaggcaagcaatcacaacatataaaagagccctagctttccccagattgatagctatatatacaagtacatatgcacaaacgctgagacattcctacacttctcttcagaaagcaatgaaattcttgttgagctgatcatgaaa

SEQ ID NO: 39059 - DNA, 721 bp, Arabidopsis thaliana columbia
tcaaacaccaacaagaaattatgacctttagctttcgagagtgtaatcttgcggtagataattgtctatcagtatagtaacaaaacttacaacaatagacgatattaatcttggagttatttcaatggaagaatgtattctgttgagagaagaaaaacaaagacaatacaaaacacaacaaattgcaaaagatttagatctgcatctgccccaccaatgtagccagaccagttctttattttgttgctttgccatttcaacatatctaatttttttttctcaatagtctcgattttgtgttcacacttcacacaaaaatgaaaatgaaaatatcttttgtagtatgttatttatggggagggacaaaaacaatgaacacctggcgatataatctcagtaactactatttttactcatcccttttaaattagtcaattttttccctggttttaaaattaacgaggagactaatttgtaaattattacaaaaaacgagattcagtaaaaaaaagtttttgtttttgtatttttgtgtgttcaggtgtgagcgtgtaagagaggaggtttgacgaggttttctctgaaatggtttcgaagttttaaaataatattaaaactcaggaacaatccgagtatttatgtagaatcagaatcacattcttggatctgaacaagacgacgatacatacacaaacatggaaggaaaaaaagagatgggtag

SEQ ID NO: 39060 - DNA, 505 bp, Arabidopsis thaliana columbia
taactaatctacaaacagataagcttgttttttaatgtgttgaggaaaatgagagactaatgatcagttttcacgggatagagcaagaaacactgtagctgatgagatctgaactttgagatcagcaacatcaatgtcatgcccgccttcgactagtccccatttgtccacctgcatgaaacatgcgacaaagattagtttttatagaatgtcaaagcaatagattttggccaagtgagtgacaaaatgaaacctgtaaatcttcttcaagtctaatcaatttgattgcatcatcgatctggagtttcccacagaagataccgagggcgattactatagagtgagctgatgcttggagtgcatcaatgcttgcgagttcaccatcattcgttttcttgagcagttcttctacggctttcactagcttgtcgtcttgtttcccccgaagatgctagaatacactttcggtttgaccgaaactctgactctatccactcaagtagag

SEQ ID NO: 39061 - DNA, 568 bp, Arabidopsis thaliana columbia
tttctgaaagacccgaaattgtgaaactcttgaggttgcagatgctttgtccatgtactggggaaaatgagatccggaaaaggacaatggttttgtttgatcttctcaaggaatacagatgggatgcaaaagctgtgttagtactaggagtccttgccgcaacatatggaggactattgctaccagttcatctggccatctgtgatcccgttgcagcatcaattgcaaaactcaaccagttgcctattgagagaaccaagttcagaccgtggttagagtctctaaacttgctcattaaagccatggtggatgtaaccaaatgcatcatcaaatttgaaaaaattccatttaaacaagcgaacgtagacaacaacattttgggagaaaccttgtctaacatctatctgactacttatcgggttgtcaaaagtgcactcacatgcatgcagcagatcccttatttcaagcaaacgcagcaggtgcaaattttcaccttcttatatcttctctgcaaaatgaagaaccagcacacagaaattgttccagcatattagcagtcacattgagt

SEQ ID NO: 39062 - DNA, 455 bp, Arabidopsis thaliana columbia
tgatctagaagcaaaatatcatatcgtgcaagcagaccattggcacgacgtaaatctcctgcactagatcaatatcaagtgtttttgcatcagcttcaggccatttcactaacaccaagattacataatcaagattagctgcagcctgttgagcacgagaaacagttacagcttaagaatcttaccagcattgataagagcgtcaagcagaccatagataagagatgatgacaatttgggagtcccagcagcagttccatactctatagtctccagcatttggaacgcttcatcaatcctccgagccttacccaatcccttaaccaatacaaacgattcgacatcaaattcaggttgacacacgaaatcaaaattcaaaattagaggaaagaccaaaattcaaaattagaggaaagaaccaaaatcaccttcaagatagtagcgtaactaataga

SEQ ID NO: 39063 - DNA, 506 bp, Arabidopsis thaliana columbia
tgaataagttcttaaaaataaaaatatatcttcaaaattcattttgtatatagtacatgttagtattttttatagtaacaacaatataaaaagaaaaagataaacaaactattatgatgtgttattttgtcgtatatagtcacgtgttgcatgattagcccgcaaaatttgttttgtataattaaactaaaatcttataagaaaaatattaaagaaaactatgtataatataattataaaattcaaatatttatcataaacaacacatagggggccaactattatgtgcgttattttgtcgttaatagtaaaaatttatattcgtgtcgtatgatttatggtcggtcgcatattcatcgtaaagaataagaagcgttataaaataaagtattaaaatattaaagatacttttttttgttgatccattacaatgaaagaatcaaaactaatttttgctttatgttagaaaaaatgtttaaaacaacagaagaacatgttaagttgca

SEQ ID NO: 39064 - DNA, 463 bp, Arabidopsis thaliana columbia
ataaaaataggtacttctctctctgtttatgttacgctttcacccttctgcaatttttcttcatttttccaatacttctctcaatggtgatgacggtgaactacgttgacaataacgaacaattttttggtttagaattagtgatgaattggggattaattgatttgaatcttttttaagagtagaacccttgggtttcttagatagtattcttagggtttatatttcttccataacaaatcgtttaacttgattgattggattaatttgagacgacgttttggtgacggagaaaattggaaacattagagatagtgtttttgatggacttaaaagtgatggtgttgacaaatatggtgcttatgaagcaagtgcggcagtgagaagggattgaagatttgagttgcagaaaaaattgttgacaacgatggtgttgttacaacactatacctctaacaagggg

SEQ ID NO: 39065 - DNA, 1089 bp, Arabidopsis thaliana columbia
tttttttttgaataccaagaggttttggactgaaacccgtaatccctccgtacccgaaactacagcatataatattacttttgttctaaacgtcattcgaactggcgatctctaagtttcgtctagggtttttactaattgaattaacaacacttggttataattagtaattatttgtcactagctttcttcctctgtatttataattgatagcatattaatcagtaacctatatataagtaagtatatttgaatttttgtttttagtagtagttctatttttaatgaaaacatttttaaacctaaatgaaaaaataattatcatttttgttcaactatccaaattcaccttcgtataatacatgtcggattcaatttcgtgtaatatatgtcgtttgaagaataacgggtgagagtgagatagaagcgacctgaaaacgaaaggcaactctttttatacctaaagattccttttttcctagtcagtcaaaagaagtcaacggttaagtcagttgacttcagatgacgattaatgacgtcagcatcagtccttcctctgttaaatagaaaccaaaccacttcgagtttcactcactcacacacacacacataaacaaacacacaaagacacataaacaccacaataaactaaaacccaccatgtgtggacacgtcagcacttctataacctccggcgacaactgtccatgttttctatactccgacgacatagtggctcctcctcagctgcttgatcatcatcatcatcagttcccgcctccgcctttggcgcttcttatgatgagccaaaactctctatacgcggccgaggcggtttcagggttcggttactttgattccggcatgaacggtggtggtggaagcagcagctgcgactcgccaagctctatggggagtggcggagagagtcttgttatgcagaggagtgttagtagccataatggcttttccggtaattacacagcggcccatgatttcgttaacgatgatgatgggccagtgagacgggcccttagcgccggagatctacccgtaagtaatattatatacacacttgcagtttcgaga

SEQ ID NO: 39066 - DNA, 578 bp, Arabidopsis thaliana columbia
tgtaatgtcgcttaccaaagagaaaacaagttttactaaaaaaaggcaaagaaaacctaagaaacagaacaaaatgttagaagtagttgaatttctttctgtgatatgtacaaacttttaattagtcgatcatgttggtcattgtcgtttgcatcatgtggtggactaattgtctcgtccttttttaaggcttgcgtatggatttgaatttttacttattgttgttgttgatgagtttgtgttattgtgttaagtcatattctatatcgtccggttcttccttttaaaaaggaaaaaaaaaacaagtactaatcgatcaacaatacaacacattgatgtatagtacttgtaaaaagagatttttgttttgtcaagaacatgcgagtgagttgaagaaatttatagaatcaaaatgacaaaaatacatgcaaaaccacgaaaaaggattgaactaattaaccccgtggataaaaacttcactcacattacaaaatagaaatcctcaaggaaaaatgagaaacacaaaaccaagttaagaaattaataatgcattcctcatgttttaagacattgaaaat

SEQ ID NO: 39067 - DNA, 656 bp, Arabidopsis thaliana columbia
gttttaattgcaataaccaagccacattctcttactccctggggtgtttcagaatgcaagcacaggggagaatgaaacacttcttgctgttgggactgcgtatgtccaaggggaggatgttgctgcaaggggccgtgtgcttcttttctcttttggaaaaaatggcgacaattctcaaaacgtggtatgtttaattgggttctacaacctggggaatctttttctttcttttcattttcaccttggatgttcgatttattgtgaagccacttttctataggttactgaagtctactcaagggagctaaaaggtgctatatcagctgtagcctccattcagggtcatcttctaatatcatctggtcctaaaatcatcttgcacaaatggaatggcaccgaattaaatggtgttgccttctttgatgctccgccgctctatgtagtcagcatgaatgttgtacgttttacttccttggccagattgcctagtgctgtgttggttttatgagctaactttactaaactgacctgtcttggctctgaggacagttttcttttacgtgatctggctttgtaaatgcttctttacttgcagggtaagagtttcatccttcttggtgatgttcacaatagcatatactttcttagctggaagg

SEQ ID NO: 39068 - DNA, 521 bp, Arabidopsis thaliana columbia
tgggaacaccatgggacgtcgtgatctagcggttggagattggtggaggaggttgttttcaccagctgtgattgaataaggaagagataaatagattaggagtgagaacgtcgcgccgattgatgagatcgacggcagtgccatttgatctccggttggatttttcgaccgtaccgtcggagaaaattggaggggaatcaaaagagctgagtgagtggagagaagaggggagactcgaacgtaactttagatctacgggaaccaaaagcagctttctttgagacaaaacccagttattgaaacgacgtagcttttgtgtgttaacgcatttttttaccccttacttttaacatcgctgtaccagtgtttatttatactgtagaatggttaaataccataaaaatcttcctacaatttatttgaaatctttggcatgtggtaagagattttactctatagtaattaaaaagtatgtattgttttgttgtgtcagtttttttatagatttaaacgaaaaaaaa

SEQ ID NO: 39069 - DNA, 459 bp, Arabidopsis thaliana columbia
tctttctctcttctccttctgctgttttccgcctcacaccattactctcccagaaatggcggcgacgacgactgctacttcattattctcatctcgtcttcacttccagaatcagaatcaaggttatgggtttccggcgaaaacccccaactccctgcaagtaaatcagatcatcgacgggaggaagatgaggaatgccactgttctctcagctgcttccactgataaagccatcaccactgctcaatctgtagctccgacggcttgtgataggtgcgtttctgttacaagtgaaaaacgaaagctttgctaatttcgtcaatgtggggtgagaaaaagaagaagaacacttttgttccccctaattcgaactgggttcttcttctctctctcggcctcgcttccaatttctgcaattaattagcttcttattgtttatgatttgctcaacagtgtttt

SEQ ID NO: 39070 - DNA, 583 bp, Arabidopsis thaliana columbia
tgcaaaaatgtatatgtagattgagcctttcagatccatatgaagtaatttcatctgttttttttaaagcttttgttgctttcagcattctcacaaatttatatcagaatttgcaggaactagataaattattgcactgaacttcgataagagtacagtattacactaaaaaattctataggaagaaattttttgaacaattcacaaaattgaaacttattcatctcttcatcagtaccctttttttgtaagtaaatcctataaacccacaaaaagctaaagaattcttgttaacttgaaaacgcaatagatgaagaacagaagaagactcagattgcttctaccagtccatgattactaattttgtatgacatgaatcttgagatactattactatactctatacatatgtagcaaaacttattgtttttcttgaatatttcttgtttcttcttgaatgtttagtgctaacgttaatattaattagaatacttattcaaccaaataagtcaataatcacatggtacaatataaaattttgcacatatatattgtttatacttataagcgatacattatatat

SEQ ID NO: 39071 - DNA, 738 bp, Arabidopsis thaliana columbia
catgacaatttacagttgatacccatctcctcttaagtgattctgatccaagcatctattatgcgacgatattagtaagacctactaaagagaagagatggactcgcctgcttgtattggcactcaatggtgtaagacaagagtacagggctaatatcgccggcatcagggcgagagacagagacgatcactgcttttggtaattcttcaaaaatacgattagtctcctgcgtaggagccggcgcgaaagagaagagcgaagagaccatcgaaggaaattgctcaggctgcatctgaaagtagcgtccaccaccactggcgggagacatcaactgctcagatgccatttctctgatctcttcaaacctccaattacccaattcgatcgctcaattcaagatctagcaaacaaaaaatctccaattctcccgtcgcgttgatcctgagtttgatccttttcgttatgcttatactcccccccgggaattccgatgagaaaccgatcaatctgaagaccaaatcgtaggaagatcgatccagagcgaaaatggattacaaaggaagacaaatgtgagggaaaattcaaaagtcggggagagagagagagagagaggaatacacacggtgttggtttttgatatacaggtgcacgaagaaagcaaagtgaacaacatgaactatgtctacgtctacgtcgactttgacctctctctcccggtttactccgataccgatccg

SEQ ID NO: 39072 - DNA, 545 bp, Arabidopsis thaliana columbia
gccagtgtgctctaaaggcctgaccacggttatgaacgatcgcatgcgcgtccagccgtcgccggcacagttagctctagggagcggtgtctcattgtaagtgaaggcgttgaagctcttctgcggtcgctgctgccagcccgctccctgactcgcaatctcctccttctactatgccgggtcggtgagggcgattactgcgttcattgacggcggcgggagtccgtggaatacgaccagcgagcggctgtaccgcgccaggtggttgatgatctggacagcgctggcgcctttgcccgagtattccaacgcgcttgtcagccaacccagtgagctttgaaatctctaatggctcgcctgtgaactggcagtcccaagcgtgcggtgtggaagagcctcctcttgtacttggtgatatccgggtagctggggacacgaggacttgcaaaagagcccgaggagaggaggacaatgtcttgaactgcttctctctgccttgtttgtatctgatacattttcaagcagctggtcagctacgtaccaga

SEQ ID NO: 39073 - DNA, 527 bp, Arabidopsis thaliana columbia
tgattaatttggtacaatcaacaaaatttgagagattaaaaaaaattcaataataatttgagaactaactttcttgacgggaaaaccctaaccaaaaccgtgcgaagagtaacaagtatcataagctatttttaaaaaaatgctccagtgtagacaaaataaaatattaaaatatttttaagacgtttcagtagtagaatttttttttttacgatgactagttgcaagatgaaaatatttatagaaacagaataaatagaagaaagtaaagtaaaatacatgattaatttcagttttgaaccagtagagatgatttggtgagaaaacgtttgtttttgttactgtattacgttagaataaaaaaattaggaaatcccaaagacataacgaggaaagtgaaaaccaataatctctttgtaacccttaattgtttagttataacttataagcgtatgtatttacattttcctttaataaactaacgtattagaaactaatgtttgaaatttaattgtagatgacagtgg

SEQ ID NO: 39074 - DNA, 553 bp, Arabidopsis thaliana columbia
tggtgaattgacaccttcaagcaaagcagatctgcaggtagttagttatttcggttcatttcttctctgcatcattttcagtaaattatactttttaactttcaaatgtgagcgcttgagttgcttttcatgcaccttaaagtgattaaatgacaaacagctttccacagtaagagagttgtccatcatgactgcaaagagccatccagcagcaatgggatttgttcctgatcagcacctgagagaaggcgaattggataatgataatttgtcttctgatttgtcggacagggaaccctcaaggtaatcatcaatagagtagaacatcctttcggtttatgctgtcattctaattgccttttgtggtctccgtagatgtcttatactgagaggaaatggggagctttcacttcttgatttggttgatggacgagagagggaacttacagactcagttgaactattttgggtgacatgtggtcaatcggaggagaagacaaatcttgtcgaggaagtttcttggctagattatggacaccgaggaatgcaggta

SEQ ID NO: 39075 - DNA, 616 bp, Arabidopsis thaliana columbia
tgcttgaggatttctatcacgggagtgaattggtctgttgttgaacctgttgtctagggatagcttgattgcgcttgttaaccattcgaataggctaggacaccactctactcgattaccccatccttaggaatttctcgtctatcttatttctctgttttatcgttatcgcttaatcgttctcattgcctctttcttagtttttacaatcactcgaccaacttactcgaccacacccagtgtctggcaacagactgtgcagtcgagtatagctgtttcatatcctgtctattactcgaccagttactcgaccacatcctacttctggcatcagcctgttgtggtcgagtgattttagtaattctgttattgcttctgttttctgcatgttcgcttaggactgttagaaaccccaaaactgttattgcttggcttgacttagtgacttctgatcacatctcatctgtttgcatcacacccatttggattgacacctaaaatactacaacgacatgattggtgttttaggaataattgactaaaaacttattatcaatttggcgccgttgccaattgggtgtttgtttgctatacttgagatttcagaatatttaag

SEQ ID NO: 39076 - DNA, 469 bp, Arabidopsis thaliana columbia
catccttacacattacatgtaacgtttagagccaaaaactcaagactgctatatactgtgcaggaactattggagagatcaagatactgctcttttcataattaaacacttgtatcgcgagttaccagacggaccaaactcgcccacggaatccaccgaaggagatgatagtccaaaagactcaagtagacctcatagctggatagacagaagagaggctgattatgatgatgaagagcttcctttaacattctccgacaaacaaatcactagaagcttctctgcagaagccaagaaatatttgaagaagccttaagactttgaccgtaggtttatatcgtatatccggtgaaagctccctgattttgtttttgtttcctgtgcagaagtaacatctagtgtagaaaatgtgaaaagtaaaaactccgacatggttttgccacattgtaaccataattttacatataat

SEQ ID NO: 39077 - DNA, 799 bp, Arabidopsis thaliana
gcagcagtgttaatgaagactcacccacaagtgagcgttcccttcctcgtggaaagacaaaagaaagcactattagtgttcattctgaaagtagtgtctctggagaagttgtgacagaggcaggaagctcgagtagaggaactggtagaagcattcatcagagacctgatttggtctcccgagatgctcgtgtgagtaatagtgagcaaaatgcaagagctagtgtgaacaagaatggattaagagacttgaggaacaaatctggttctgatgttcttccatctaattcaactccgacaagaaaaagtaacatctttagaaagaaaacctctgatggtgagagcagctcttcgagtagagggaataagacggaaggatcagtggttgggggaaagaatattagttcccctcaggggaatggcatcaccatgtctgaacctaggaggaacagaaacttaccaagtgttagggacaacagtgttgtttcaagtagtactaggagatcaactggttattatggtagaacaggacgtgctggagcggttgcaacactacaagcacctcggcctccaacaagagctgatctcaatccttctagatcggcagaagcttcgcgtagtcctttaaatagttacagtaggccaatcagtagtaatggcaggttacgtagcctgatgatgcctggtagccctcagaagccggcctttctcgctctttgatgaacagtgatactttcagacggtataacatgaatggagttgcagaggtagttacacaagctttcttgtgtgtgatggtg

SEQ ID NO: 39078 - DNA, 633 bp, Arabidopsis thaliana columbia
gaataaaagagattttcttgaaaaatccttgtgtacttctgatattagtcttgtccggactaacaccacttacggacatggtacaggttgaaaagccttaggccgtgttcgtgaggaacgatgttcaaggatggcctgaccttagtaccagatgtgttcggggaactcggtcggatcgtctacgggcatcacaagtaacgctttcggattcgttcttagtcctagaacggttcgggggtgttacatttttactttgagtcatcaaccgattttaacttttccagaattctctttactgtaacggttcaaatcatgttttcacaaagatttattgcgcccggagcttcttcaatctttcattcccgcttcttctgaatttgcagttgacccaagtgctaaccattcggaaaacacaaagattgtaaagaaaggcattattatcccttcgaccgattattaccgaagctttctcattcttttatctcaaaccatgcccgactatatgattgtagtcatcaccctccttgccgatgagctaactcatgtagttcttctcgttcctacaagtgtctcggacatggaaccgtacttaacgtcactttgtctgttgttgattgtgactattgtttcgac

SEQ ID NO: 39079 - DNA, 1169 bp, Arabidopsis thaliana columbia
tcaaaatgccgataacatttcaataattctccatgaccaggatgaaattcacgattctgaagtagggtttaccggttgagaaggcgacgcattgagaaacgctctgagagaagctaagggaagaggataaggtagccgaagcaccacgacgattggagaaggaagaagatggtgacgaacaagagattcccttaagcgaaaggactttgaattgggattcgagggtcgcacaggaagaaagacactgcactatcgtcgccatcgatttctacaagcttcctcttctctcttctctgctctttctccctctgttagtaaagagtaatggctccatttcgaaccagtgttatccataaaggaagagatgatgtctggaaacgcaattactatattacccttggtttatcgtcttaactccagtttagcccagtgttttggatctcccgcgtgggctaatggcaaacgatgagaaacggaccaaactcgttattcctttttttctttgattaagttcaacactaaaaattaaagaacacaaatttcaaccgccaaaacgtttactcctagccttcgttgtttatagaaagaactaaagtttacttatcgaacagccagagaagatataaaaaactttggttaacaaagaagttttaactttttttctttagttgtctttaaaatccttcgcctgtcattacttctggtcgtgcgcctctgtgcttcttcgacatatatggtccacttcgaacagcttcttgcaactgcaacaaatgtcaaacatgtcatcagcaagtaaaagtacaacatcaaagaaaagccttttcgaaacttccatcttaaagagcgcagaggaaaagtatggaaccttgtcaccggtttttagacgacgagggtcatcaacaaagttactacacaagaacgcttcgtgaattgctttgcagcagttataccttgcttccattgctgagtaaaaaaaaaatgagatttagactcgtagatcaaagaggttgagggaggaagaagccaatacaatggctggagtgtgggtgatgcgaggaatgttacttggtttacctatttttgcagtttcagtggttgcaccgtaactatgtttattatctctctttggccaagattccaccagcaccatggccgagcactaatgctgt

SEQ ID NO: 39080 - DNA, 512 bp, Arabidopsis thaliana columbia
  unsure (1)..(512): unsure at all n locations
ctagagnntcccgttgaattccggtttttcaattaggtttggttaaatggcataaaatctggctatacaatctattcaaagatatgtttgaatcttattctagctattaaaaacataaaattttaactgataaatttcaattaaatttttatattttttatatacatagaaacaattttttcttttaaaaaagagtatttataactaaatgactatagatttgaaaagaatgtacaaactaaccttgagtcacagtatcttgtcggaaatatgttggagaacacgtgtaattacgtaaatgtcctttgtaacatgttattttttcgaaatacatgcgataacataatatcctctttttatcttgttattttctcttattacatagtatttataaaaagcacatggtattttttggaaaaaacattctattcagtttaatatctgtttttatcatgatattttgtagtaataccgttttttattaagacacacgtgatttctttaaaaataaa

SEQ ID NO: 39081 - DNA, 529 bp, Arabidopsis thaliana columbia
aaataaaccatttatttgaggtcaaactatttttttccccatatatatatccaatcaataataaattcataatatatttcattaacgcgattgaaatactagtaattaattgaggactaaagaaaaagtaatttcctttttatctttaaaatgtgcaaaaaaaacaaaaatgttaattgggtgatgaaataacttgttttcaaaacgggagttactatttgacaatttaaaaaagacccatctcgaaggagctagaagcgataacaaaataaaaaggaaacaatagtaattagatggcgcaaaaataagatccaacggctgagatctttactcgtgaacgttctcgaaagctctttgccgacccactcttcattcatatataaacaaacacctctctgccttctcttcctcacacaatcataaacacaacaacactcacaaattctcttaaagctcacagacgaattctttctatttttaatctttccggcgaacaattctgatctctaataatggcgggtaaaggtga

SEQ ID NO: 39082 - DNA, 584 bp, Arabidopsis thaliana columbia
taacggccgccagtgtccgacttttgtcaacaacaatgacttccttcacacgttacctgttttcttatcctctccctctcaacatcacttgaccatcttaggctaccctgcttctgcctccgttgcctgttttccgacggttcatcccgaccatccgattttcaaatccagtggttctcatgtcgtgttggctacatcccaccaaggtagagattgcaaaggagggtactgttgtcaacaacgtgtagacattttggatcatcattataacgtggtcaatagtgacaagggtaaagatcagtgtcttgatctctccctacatttgtgattttagcattatcatttgttagttatggtcttgccaaaattgactacaaactgttccatccgtatcctgattttaattggtattccgagaaataatggacgatatatagtgattaaactatttgtaattcttttacgttttttttggtttatcattcttgaaatcttttggactttgtacatttaactttgctaaggtacttaggtttataaaataccgatgtagagtgaggttggcaaaaaaaaaaaaaaaaaaa

SEQ ID NO: 39083 - DNA, 411 bp, Arabidopsis thaliana columbia
tgtctaccaattaccaagcacaagcatttctttgagaaaagagaaagtttgtgtttgaatgccattgctttaatttttcctttttctctaacatatattcggtttaaagccgaaattaatgttcaagaatcaataaataaacgtaatccaaaattttatcatattgctttaaaatattctttagagatgtcgatatggaatatatgctgatgttgacttaaaacaccaatgaaaacagcgaactacgataaatatctactaatacaactaaagcaatgctcatttttttttccaattaccattctatatatttgatttgagttgtatcttagttaatttctaacatataacatactatattactaatatagcgacctatatatgttttcgaataacacatgctaataatta

SEQ ID NO: 39084 - DNA, 579 bp, Arabidopsis thaliana columbia
  unsure (1)..(579): unsure at all n locations
cctgtctcctcttcaagtctctccttttcgtggtggttccgatgtggtgactatcatggaggataggtggcagatcggtgctcgttgtagtcagatctattccccggtggagccgtcacgtttctccgatctggttatggaggtttgtggttctgatctggttctaatgtctcaactatcggtcttgttcttgttagtttgggaactggagttgatttgttgtatgttccggctggttctgatgtggatctattgagtactgttcttggattttgttggctttgcggtggtgctgtctcgtttggggcgtatatttagtcggcgtttcgtttccttgagttagttctgtttatccctttagtactgcagcaacggcctctttgtatgcggattcttcttccgattttgagtttgagtgacttctagggtttgtgttttgctgtgttttttgactggttatggtttgaagcctcaagttcagcttttgggtagccttgtttgactcctagctctgcctatctctctatcctcctcttggttttcggtgtggtgacttggtggaaggtctatnttgtgggt

SEQ ID NO: 39085 - DNA, 485 bp, Arabidopsis thaliana columbia
tcaaagattattggtcagaatttccagtcagataagacgtattaaaattacatacaagaagacgtcagaaacttgaagaactttttgttgcccagagtgattgagggggttgagaagcttactcggcatagatctcaagcaaggaaacagagaatgcagattcctctgactttgagatggaagaaaacggacatgttgtcattgccttctggtgtatagctggaacaactccatgagcattcgtagtaggacatcaatgttccatcgctcccgttcacctaagactcgtagatgagactccaatgacccttcaactccagaaagaggtgggcagtgctgcaaatgaaaataacttaatatgagctattctcagttacaattttaaaaatggataatgtattgagtctatacctgagctgagctcaaagtgtgagagagaagacctctcaagatatgatccagcctgttacccattttatcactgc

SEQ ID NO: 39086 - DNA, 1372 bp, Arabidopsis thaliana columbia
tagtttcagtttgttgtctcttagttattctttgttctgattttagtttctcaaaccctagtttcgtcgtctcctcttcaaatctctcttttttgtggtggttccgatgtgatgactatcatggaggatgggtggcggatcggtgctctttgtagtcggatctattccccggtggagccgtctcgtttcttcgatctagttatggaggtttgtgtttccgatctggttctaatgtctcaactatcggtcttgttcttgttagtttgagaattggacttgatttgttgtatgttccggctggttctgatgtggatctattgagttctgttcttggattttgttggctttgcggtggtgctgtctcgtttggggcgtatatttagtcggcgtttcgtttccttgagttagttctgtttatccctttagtactgcagcaacggcctctttgtatgcggattcttcttccgattttgagtttgagtgacttctagggtttgtgttttgctgtgttttttgactggttatggtttgaagcctcaagttcagcttttgggtagccttgtttgactcctagctctgcctatctctctatcctcctcttggttttcggtgtggtgacttggtggaaggttctattttgtgggttcttcaatcggatgctagcctcctataatggcatctactagctctctgttggaacctcttttggtttcccggctgagttctggacgttatggtgggtcgatctcttgccaggaagtagtttagctgggtctttgaaggtccgtgtgtaaggataagtggttctatttggcgtttcccctctccgatctcaaggtcttccatgatccttcgccttctcatgttcattggcgctaaagcggttgtggtggttaggttctgtgttctgttcttcttgtttcgtcgtcttcgtttctgctgtggagatggtcgtattaaatctcttttcgagactcctgtcagttacctctcctcagcgccaaactgttctatggaagtgttagtcggctgcttgttgggaggagttttcagtgttgtggctttggaggctttagctattacttctgtagctgttatctttgtatattttcttctaaggcttgatttgtttgttcgccttttttggcctcatgtctctgggggtttctatgtacccgccggctttgtctccaaaaggattttattcctttttggctatgtataactcaaacgcattcaatcaatgaaatccttcagacgaaaaaaagaaaaacagaaaatcctagcgcctcttccgtttctctctctgttgaagaacataactggagagaaaaaaaaacgacatgcgacattggaatcccgtttaaaatct

SEQ ID NO: 39087 - DNA, 392 bp, Arabidopsis thaliana columbia
aattccagccgctcgattgctctctgaccaacgaattctagaagctcatactggatttgatctccgtcctctgcaaaaacaaatctctcagaagttttaagaaacagttcagttctcataaacagttgggtgagaaagaaagtgatacctctctgatcaagctccgcaacaaatggctcttccttaagttggctggatatacgtctcgaccgcaaacgatacctaacacatccacaactgaattcacaactttcaacacaaagtcttgggattacgaattccgccatcgtgccaatgaataaggtaagctagctatgaaccaaaacttgggaagttgcctagattgcaaatttcagattaggagcaagagtgaagtttaattacgggcagta

SEQ ID NO: 39088 - DNA, 549 bp, Arabidopsis thaliana columbia
aagaataagacgccaaaagaaaaaagggaagaacattgggttacgtcgaaagtcctttgataagaatttgattttgcatagtcaaatttggaccaacaacaaaaatggagtccacgtgaaatagaagagagagacttaatagcttctcatgcataaagttatgaacaatcaatgataaccaatgataaataactaaacagtacaaaatctctgtatttttattggatttaacaaaggccatgaacaatcacttcaatatttataatttttttaaaaagacgaggcaattcaagctgatttatacattatgattaatgataattatattatggcatttgacttttctcacgctaatgtaaatggtcaaaaatccttatcttcaactaaacttcctcgacaaaaccttaactagaactatgtatgtaatttatcaaatattgaactttaaatttctttaaaagcataatataatcttgacctataaaattagcctagcctttcgaattacaagttttatatttttaaagaaacataatcttcaactagaaa

SEQ ID NO: 39089 - DNA, 479 bp, Arabidopsis thaliana columbia
cagacaacattatatagctagcatcggatgcaacatagattacaattaatttacactagacgactgttccatgcttcttctatgcagacttccctccaaacacccttataaaactggatctgaaagattctctaactcctctccagtacgtatagtttgacccatataaccacagattcactgctttgttccaaccatctctcgggaactcaatttctctaccaatcctggactcctcccaatcttcttcagtgtcctccaaaagcgggaccgcttcaaaaccaccagactccaggtgcttgatccacccgcgcatcagatagttcaccacctgctcgttttcatatcccaaatggtgggttcattatacctaattgcagagtttgaagaatttattgactagttcattatacctcagggacttcatcgtgtgggcagtgacccgctgggctgatctcgtagtatggagcgttggggat

SEQ ID NO: 39090 - DNA, 585 bp, Arabidopsis thaliana columbia
attaactggtttatagaataagtggatctcgctataatgtggatgatctcacacaaatgctttttgatcatcagcttcagttatttacattttggacaaatttattgtttttgttgtgtccacttgctcttttcttggtgctatcaaatttgatttctgtgaatcgtaattgtgatctgcatttgcaggttgcttctcttggcgtgaagtttgttagatgacggatgatgatttctgagaaaccattgggagtggaggagtctatacggcaggatctggaggttttaaccgtgtcaaggaggcttgtgaaaagtgttagccagaagttgaagaaaaagattcataaaactgaggtggtggaagatgaagagattgcaaggggagcggtgaattgtttaagtatcagtgttggttgcagagttgctgataagggtgaggattttgaggattcaagtaataagagatggtctagtgctagtgaggagggtaagggattgatgacaatttgtggacatgaagaaactaggttatattgtttttcttatggggttagagagaggttctggaagaagaataatagaaaat

SEQ ID NO: 39091 - DNA, 1754 bp, Arabidopsis thaliana columbia
tcctgaaagttaacaaaaagaatgaagaagatcagagatgaagcaatgcaatggtcttgttcgtacaagatagattaagtttttgactcctttggttcctcgaaacatgtctccaagaggcttcttcagttaatacatcgcagacagtgaagaaacttaatacctgcccaaagatcttgaacatctcaattcccattagtatgttctggtctgagacatatgtggcgttccaatccattggtgcgtccgggtgtactgaaacctcggtccatgtgaggtacacaagatccaactcccacagctttctcactgccttgtttctcctcccaatttgcccatctccttcatcgcaccatgaaacagagagcatgaacaaccgatggttgcaggagacaagtttagggtagaactcatgaacccgaggagggattggagatgtttggattgtaatccagaagcctctctcaatgtcataccctgatagcttatcattctcagaataagcatagaagattccattgcatatcatcccacaacttacaaccccaaaacccatcgggagtctctgcatttctgaccatgtgtttgttgctgagtcgtatatttcacctgaatccagtggctcatcgaataagccagtgcctcctatggcaatgagcacaaatctcttggagctgtttcggttaagccgatcaagcttttgtcttattaatctgtgggatttggttccattttgatcagccgagtttctgttctgtcgtcttaccgatagcctgtgagggtcttcataaacgtctgactctccgccaactcttgacaggtgaaagcgtctatcttggcgattctgtttggtctgcatggtcgaaaactctgaagtaacttcagtggcaccaacaatgggaagtgatctagcatgtctcatagacgcgattttacgccatgctttgatcgaagggctgaataccaagatccctctgtgggacttgaaagagtttctgtccatagaacgacctccaactatataaatctcctcatggatgcttgtcacggagtacataaaccggcctttaagtagatcagtttcaatcctatgccatttgtcctgagaaacatcatacccgtgaatatcaccagaggagcatccatctttaagagcagcaaacagaaacaaccatcggtgtttgaaaggagccttctcgtctcatctggagaaaccgctgagtgttggccatggattgccatttcttgcaaacaaggtgtgcattcaataagctggtcaaaggaagcctcatcaaacacatttccagaatatcatcgggaagataaacgtgcttgcggtaatcctggcccgagtccgcaaggtatcttctattattcttcttccagaacctctctctaaccccataagaaagacaatctaacctaatttcttcagttccacaaatggtcatcaatcccttaccatcctcactagcactagaccatctcttattacttaaatcctcctcaaaatcctcacccgtatcagcaactctgcaaccaacactgatgcttaaacaattcaccgctccccttgcaacctcttcatcttccaccacctcagttttatgaatttttttcttcaacttctggctaacacttttcacaagcctcctcgaaacggttaaaacctccagatcctgccgtatagattcttctcccaacggttctcagaaatcatcatccgtcatctaacaaacttcacaagtcagaca

SEQ ID NO: 39092 - DNA, 491 bp, Arabidopsis thaliana columbia
  unsure (1)..(491): unsure at all n locations
cccggttccgaagaagaaaaacaataagacgaattcagcaaatctgctgaaacgttgagtcagaaaatgatagtaatgattcaaaaaatgaataagaataaatgttactatattgtttacttttgatgtttttactaaatataataaataaatgaatacctcccccacacaatgattaatatatacttccaattttctaattttaaagattttgtaatttcaaaacttataaattcctaataaatttctcattttaaatatctgaagtttttggatattttaattaattttagtattttgaatactttgcgacgagttgctattgaaattgcaaatcactagcaatttgtgagggacttatgtgaaagacgcaaataccttggaaataagttgaaaacactaataagtcgtttactcgcaagtacgtagcaaagtttgcgagggacttgcgaggctttttaaatatatatatacactgnaactgtgtttga

SEQ ID NO: 39093 - DNA, 245 bp, Arabidopsis thaliana columbia
ttgtggggcgggtgaggtgtcgaagtgggtcgtggggaccggttgggtcattcgtttgcggtgacggagaattatgttgtaataccggaaatgcccctgagatattcggtgaagaatcttcttagagctgagccgacgccactttacaagttcgagtggtgtcccaagacggagcttttattcatgtcatgtccaaactcaccggagaagtcgtaagtgatacttactttagacagtcaatggtc

SEQ ID NO: 39094 - DNA, 470 bp, Arabidopsis thaliana columbia
tgataacatatagatttctctaaggaaaaatgaatgttgcattattgcattttattttaatttatttctgaaacatgcattatttcattacagtcgtattgcagattagaaagattaaaggcggttttgtaagcgttacaaagattcgaggaccgggcagacacattttgttaatacgaacgtaataaacccatatgcgtaattcatgactctatttaatccactaacacctttttatttatatggacgaggatgctctaatactttattgacgatattaattaaataaaaagcatgacgtgggacaaacaccgtacttagtacgtaatacaagtagttataacgtgggaacaaactagtaagtaacacatttaaataaggaaatagtaataattgccgtagaagccaagcaagcataatgatcatatctactttgtgactgtgactttaagaccatgtttcatacggag

SEQ ID NO: 39095 - DNA, 719 bp, Arabidopsis thaliana columbia
atatactattcttcaaatcacaccgtagatcgagcacgtctgaaattactatcaacttctctgtaaccacaaaacccaaatgatcttaccgttctgaccacaaccacaaaactccaaatcgaaacttaaattaaacaaaccaaaagttttcccagttgaagaccaacaagtctgtacacaacatttaaaatctaatcctagctaaacgatgaaggagaaaaacaagaatgccagctgactcaaccaggagacaacaagaactcatggcagtaaaacaaagacgaaacacataagagacaaatgtgacactgataacactagattttaacttttttaagctcttgttttttatacatttagcttagtttcatgtctcttttcatgcattcttagtctcttttccttcttttgcacattttgcattgcattacatagcatacttgcatttggagtgttttacaggtgaatcaggtacttttggactcaacttggaggtttctagcacaagggatggacagactcgagttcgggggatctaaggaaggacttaaactatactcggcttatatactcggctggaggcgagcggagcacacttgaagaacaaggagtctactcgaccaaggcactcggctggaggcgagtaatgcacttaaggaagaagagaagctgctcgaccaagccactcgaccaagacccgagtgatgtgacaagaggaa

SEQ ID NO: 39096 - DNA, 490 bp, Arabidopsis thaliana columbia
tacgataggagattcaaatttcctcggtcgatcacgccaccgatgcactagacccgccacacttttcaaggtatgaccaactctccaacaaccggctctgcattgttagatcccagtttatcaggtttcttaaaatgggatctaacaatgtagagccggttgttggagagttgatcatactttggaatcttattttaagcaacctgataaactgggatttaacgtctcaagccaccaccagaaaatctaagaaactttcgagtcaaaatctcatcaatccggtctgatagaaaccattacggtggatccagaggcttattggctcatagtccctcatgacaggattagtcgttgaccaccaaatagaactacaaaactcaccgtttctccgacaatcttcgttgtaaccgcatattctaactcatcagttgagccaaggggatctccaaacaaccagcaacgtcctcaactagcatcatgctcaaagaga

SEQ ID NO: 39097 - DNA, 614 bp, Arabidopsis thaliana columbia
tgtagaaaaggtgaaacacaacaactgttttacaaggtttacaacaacgaacttaaatataaaccaacagacatgaaagtcaagagttctaactcctctttcttgtgacacaacaaacataactaacttacttaacagacacgacacttaattaataactaactacattacaaacattagaaactcaattacgaccaacaactataacttgttacaattaatgtatataattagctagagattatccaaatttagtgttattacgtgtggagatgcaggaccacatgtaacacccgccccgcaatatagattaagacggcatgttattcatctgatcttgccaaaaaagttttctttaaacttcatactcgaacaaaatattgcacacaactcctcacgcttactaacctgaggaaaaaggaagaaaagggggtgagtaaagaatactcagggagaggaatcaactctgcccactgaaacataaaacactttctaaagctatacaaccatcatcataacatataaacttagacacaagcaatcaatctaacatgctttaacttctaataacaaattcataacaatcatcttatttatattaatgtaaacataca

SEQ ID NO: 39098 - DNA, 1006 bp, Arabidopsis thaliana columbia
tgaggaaataaagaacgagtttaaaagaagcggctttattcttgtggaagaagacgagattcttaagagatgtaagcgagacactatcccctaatctaatatctctctgctcagatcttttaacttttgtttatatctgactgtttttttcttacaggtgttactctctgcataaattacagtcttaagccttctgatcttgtttcaagttgggaactttatcatctcaatcggtaaaaatcacatttttcttattttccattgcccaatagtaaaattcaaagcttttgttaccgcttgagattgtattgatgtttaaatagtgaccaatttcatgattagagtggttgtgttagtgatggcgaagagaattgagtttgtctgtttttccattgtgtttggtttgatgcaacagacaacttcttgatcaaactgttaagaaagatgacatggatgggtttgtattgcatcttcagaatgaacagaaagaatctattatgagagtggaagaagctggtctgcatctttactcaaatagagatgtagatatgtaagtgctttttgaccatgtttcttcttactttgcattagctttaaacagattttgtttttgaagatatagagatttggttttttggttcaggcttttggatggggtgcaagaagatacggaagagattgttactactcctacaaacaagtctcaacggttacatccggatccgtttgattcgataagtagatcaagagattatggctattctactgggaagtcagttggacatgtgacaccttttgggtcacgaatcgagaagtttgtggtgaagttcaatgtgggtaatgtggcggcacatgcagagaatggaaacaacaatgatgtagaaaacagtgaggatgatatcattaagagagttcaaaccagccagcggtgttctctaaaagtcaatggctcaggccctgaaccaggttgcaggttcatgtatgacagaactgaggacaggtttag

SEQ ID NO: 39099 - DNA, 834 bp, Arabidopsis thaliana columbia
agcaattatgagtgataaaagatgataaaactaccttaacaacattagcagcacaagccagtggaagaaaaagatgtggaactgcagccgtcgccaactctacaccagcaccgagctccatcaatagatcaccagcaaaccgtaactgcaagccaaagtgagtttaaacgtgagagagagagtcaaccatcgcatttgttaagtaatggaataagtacctgtttcaaatcataatcaaatttctttccctgcctcgcaaaaagcattttcccaacacgcccagcaccatcctacaagaattacattgatattcaacaatgagtgagtaagccatgttttaaaggattgttatacatgcatgatgcatgaaaggatatacgagaaaggaaaaccttgagaatccaattgatggcaacagcagcagaagcagaactgtttcttgaagctccaacagaattaagaagagtttgagtagtaaacacacccatagctccaccaaagaaatgctacacagtcaaaaagatcaatcatttacactgaattctaaaaaaaaacttttagagagtaacgaaacatactttcaaagctctccaagtcatataaggaacataagactcattaacactcccaggaaagccttcaggtacaacgtaagatctaagaaacgaacccacttcctgtaacaaatcaccaaaaacaaaaattgaacacatttcacatatttaggaaaattcaaaaaaagagttcatcaatggaacaaggcatacatcaaaaggagtctgaggagactccaagctaatagcacgaactgaattcttcttgaatacccagaac

SEQ ID NO: 39100 - DNA, 495 bp, Arabidopsis thaliana columbia
ccccactccgtttcgtcatagctaaattcttctctcattgacattaatcattgtggttcagtctcgtatttactactatagcacaattatcgtgtacttgctcatatacagatttcataccataaatattggttaaaatagaaaaataagactggaaacaagaaaaaatcgtgctaatatataggttttattgtcgacatgctatattgttctcaagcttcaaaagaaaacaaaagaagtatatatatatatatatatatatatataagtaaaaacatgtggttagatccaatgatccatgatccatcgtcttagtaattaatataaaaatatctatgaaattatatatatatatatatatatatatatatatatatatactcaattttaacatactttacaatacatctagctgcacacatgtacaataatactcttgtaaacatataaacatcactgcaaacacaagcgatatttactaaaatacatattcga

SEQ ID NO: 39101 - DNA, 557 bp, Arabidopsis thaliana columbia
agccctttaaatatttaaaatattatttatatttcttctctgttgacccccttgaaattagaaatttgtatcgaaaccctttaaatttgatcatatttttcttctactttgtgttttgatactatttttgacatgttttagcctttttgtttgattcacccataaatatttaacctactttgtggtcttttttaaggaaataattttatttagtaatttaatttttttaaattactaattcttttaagttgtagtttaattcggtaaaaagtatttatgggtccgccgcaatgaattaaaatgaatttaacataattcaaatattacctcaaaagatgcttgaacaaatagacgatcggtcggttagacaatcacccggagagacgctcttactgataacctgttataaaatatttaaagaagaatgaaaactaaaaagagtaaagaccgaaacgagagttttcttattgcttactcattctcttctcttctctgtacttcttacaataaagtaatagacttaacgaaaaagtaatagacttactaagaagtaatag

SEQ ID NO: 39102 - DNA, 503 bp, Arabidopsis thaliana columbia
tgatttttcgctagagacaaaactattaataacagatgtgtatgcgtctggttcaggttctaactatgacctatcttaagcattcttgcagttactagcttgctcggatcatcattaatagaacgagaacgacataagagctttccaaattctaagcaacttttaattcgttagacgggattagttcatcaataattttattttgttttcagcgaacaaacttagcggctatgataaaatgttttattcaaactgaaaaacaacaaagatagaacctagattaaatacctacaaaccaaataattgctcgaaaaacgacctaagattattgcgatattcagtttatcaccgacaatagaaaaaggggaaaaaaaagagttatttgttattataaagaaagctgattgaaaaaggaccaagtcttaaaatgaccctttgtaccgagtacttgattatgttgtctataaaagggactgaaaccacaagacgtatgcacacaacac

SEQ ID NO: 39103 - DNA, 528 bp, Arabidopsis thaliana columbia
caagcgtagttttttctctctgtctttttctttccgatcctcaatttcacgaggcaatcaattcaattctattcaattcgatgttcttactctctcgttgaactgtaactttcctcgtatatctagtttgtttcttttccgattttgtaagaaccctaatgtttatagatttctcggaaagggttaaaatttgtgtagccccttcattgtaagtcacactatgtatgtaatttgatctcttctatatgtatttatgaaatcttgtaacacccttgtttaaaaaatcgagctagatcccaaatttttcagatctgtaatctaaagttcctcgttttttattttaattcggacatattgataatggcttgtaacaaagtctcagcctaattgaattggcagagttgtaatttctttgaaaagatgtatttgtttgttaagttggtcatgtaaaaaagcaagcaaggatattgtgtagaatgttgttatttgtaattttctgtggaaggatgtattgttacagttttttaa

SEQ ID NO: 39104 - DNA, 449 bp, Arabidopsis thaliana columbia
gggtaccgagatttcatttgtcatttatctctttgcgatatctttcatgttgtctcgttaaaacttttctaataaaatccattggtagaaaccacagtaaggtaaaaaagtataatcatacaagctctccctcgaatgactatggacatggggtgcaggatgttcgacattttttcttgttaccatgtaataatcattgaatgcttgagacgtaaattcaccaacgttatctaatctaactcctttgattggataatcaggaaactcagctcttagttttgattatctgagttagaaatctcgcaaataccacatttcaagatgataacaaacaaacatgtgaccatctactagacatgtctatcattaccatgaaataatataatggtatacatggtgggtgtataggttcacaaatgtcgcatttgactcgttcaaggaattttggt

SEQ ID NO: 39105 - DNA, 1351 bp, Arabidopsis thaliana columbia
ccggagcgaaaccgaagctcttaactttatgttgcaagctcagagcagggcttctaagcttgggacagagtgtttctttggattaggagagactggaaagcgagaacagaattggtttgctgcgacttgctggaatcttgggtcaaggtgtgggaaggaaaagaagtatgagctctgtggtgaattcttgaggctggcatctgaattttatggctatatagatactgatgagtctggagaagacaaactgatgatttgcaggtccataatactaagtgtcaccgctatgattgctttggagaagcaaaccaagagcgcactgactgaaacccaagtgaaacttgctgcagaattgctcgtgagagcaggaaaggtcttatcctcctctttattaatattacctgcagagttttacctttcagtttcactgatgtttggttatatatttgcagattatgtcttcttcgctctcagatggtaaagattgtatcatggagccagaactcatctttatgtacactttacttgcgtatgacatacacggaaggctcaacaattcggcattccagttacttgtggtaaagacgtttgctggttccaagtcttgtcattacaactatcttctccaacttggaattttcgcctctcaaagccctcagtccaacccggacgtgtcaacatttgctcttaacgaatgcctatccgctctgatcgcatctgcttcaccagagtacccaaccatagctcttataatcaggaagctgatctccatagccagcgtccacaaaggcgatacagacgatgaagaagcaatcttaaagatgtacaaacaagcatacagaatcatggttgggttgaaggaaggggaatacccgactgaagaagggaaatggctcgcaatgacagcttggaaccgagcagcgttgcccgtgaggctaggacagtttgagaccgctaaaaaatggctgagcatcgggttggaaatcgctgataaggttacaggtatggatacttataaagcttgtatgcaggattacttggctggttttcagaccaaagtttcttctgcttagtttcattcatattaactgtctcattagtttaaatgtccatgaaataaatctgagatatagaattgttgaagatgtttagttcatatagtacacactaaatcccctagaaaaactaattaaaacatgtaaaactatatttctaatcgcttcttgcaaacagaatctgctctaagacatattcatctctcatgggaattatgcaaatcttactaagatcaaaattcatttgaccgtagatttttatgatggaaagagtttgtggtcgtgtagagttatta

SEQ ID NO: 39106 - DNA, 518 bp, Arabidopsis thaliana
caagatttttctaatagcgatggattgtgttgaatcttatttatccggagataattctgatgaatctccggtgatgcatacttggttttctccgtctccgtctccgtctgactcttcctcttctccttcatcttctgcttcttcttccattgggaggaatagcgacgacggtgagaaatcgtcggaggacggtggagatgacgccggagagaatgaagttgagtctccgtataaaggtcctcttgaaatgatggaatctctcgaacaagtcttacctgttaggtgagaaatctgattctttctctctgtttttgttaaagtaacgatttttaagacttaaaacttctaaattcggtatcagttttggtttctgattttgttgtgtgaatgtgtaggaaagggatatcgaagtattacagtggaaagtcaaagtcttttactaatttaacggcggaggcagcttcggcgttgacttcttcttcgtcgatgaaagatttagcgaagccggagaatcttac

SEQ ID NO: 39107 - DNA, 779 bp, Arabidopsis thaliana columbia
ttaaagataataatagtaagtttctctgttttgatctttgttgcctttatggggatgtatctataatcaaaggttttttttcttcttttcttttctttctaatgtctaagtgaaaacccacttccttcaccagttcaacggctaactcgagtggtcacacctccagcctccctgccgggtaaaaaccaccttcatctccaaccacaccggctccaccactactccactagttatgctaaaaggtaaacaaaaatatattatgttttgataggtctcaatcaaaagctatggattaatcaacatatcatttctatttggtagttaaatctgactttattgatacatatatagacaaataccaacacctaaaaatttaaagaaaaatacagagaatatgaacatgaatttcaaaagcaaatcgtaaacataattatattagaatgtcccacatctttgagcattatataaaagatgtagcaattcttaactcttgaactagcttttggaataagttaggccacattcctaatatggtatcagagagtcaggttggcccaacaaataaattcccacaaaaatggttttccatctatgtggtccatacaagtggcatgtctttttgtatttccgagatgttgggcttggactgttcccgctggaccgttttccctcacatctggagtaagcttattagaatgtccacatcgcttgagattaaatttttggacattatataaacagtgtggcaatcttacttttgagatacttgtggataagtt

SEQ ID NO: 39108 - DNA, 628 bp, Arabidopsis thaliana columbia
cacgagtccgacgacaacgcaacacataaccgtaatgacaacttaacagaacaacaacttcgcagccgccatctcttccttcgtatgagcgaacgacatcaacatcaagaacactaatatagcttttcaagactcaaagatcaatgtgctggtctgttcatacacgaattaggtttgtgtttctctatgacggctcgtaaagaagaaagaaagtatatacatgtatatatatactctacacacaaacgaccatgacctatgtcgtttaaggaataagatattgggcttattggggttgttttcttttaactaaacaaaatggcccaattactaattatggaattggggatgttacaacaaagtttgtttcccgacctggtttgcattttgtggaaaacgtccatgaccaaacccatgcccttttcgagctcgtcaagtttatattttgtgttagccattgtttcgagtggtgggtggtgcaacacatttctttgattttcttttgggtggaatgggtatgacgaaacataatttcggaccaaacactatttgctctgataccaaatgatagatttgattttgtcaaagcttgaggaatcagactaagtacgaaaactgaaagataata

SEQ ID NO: 39109 - DNA, 576 bp, Arabidopsis thaliana columbia
tttttagttgttttacatttatatctccaactccaaataaagtagaaaattaaaaaaaaaaacagagcagcataaaagttgaaggtgattggttgataaagctatagttgtcatctacatttgtaattcatatattagtacgtctctctcttctctttctctctctccctactaaatactaatgtgtgtgaatgaatctctgtttcttgttttggaaccgagatggcttcctaacaattgggcttttctctgcctcttcctaggaatctgaagctcttctctactctctactctatcactccatctgtgtaagttttactcaacctctttctctttttttctttgctttattcttttagattcacataggttttcgtgtgtttgattttgaccaacatttgggattttattttacttctttttggagtttgtttgctattggggatctctagtctgtgaaaaagatttcagttcttgcgtcttatcttctcgtttcacacaatctttttttcttactttagacaacaagtctgtctcttgatgatgatcacatatggggtttgtcatcgtgtggtt

SEQ ID NO: 39110 - DNA, 901 bp, Arabidopsis thaliana columbia
tggcgacggcgacgtaacgagagtttgagggagaaacaacaaggacctgtttgcttgtaagcctccgtgaattccatatttgagtatgtgcaacgagattctcagaagagaagaatcaatgcctatgatctatgataatctaagctcctggattcactgtgatacgagactgcgagaagccatggatatcgactttttcgagagaaaattttcaaaattgaaatgaaagagagattgtgagtcgggtcgggtttgtattgggtgggccagttacggggatggatttcagattgataatgggcctgaggcctattattcattaactcgtttgttgctggaatgacaataatagccttatttaacaaacaccttcacatagacgaaatcatgatcacctaaaaatcgaccatattttgatgttcacgtacgtaaatgcacattcatcttaatcacgtgaaagatgtttttccaactgatacaatagagttgttgtatttttagatcagacagactttcactataagcagattcaacattacatataaacataagacgtttaattgtaatttttttactaaaaaaatttgatcatagaattttgaattactcataaacatgaaacgttgaattttgaagctgctacatgttggaacagctcgaccaatgtcgttcacctcgggggggttttaagggtgtgcaccggcgcaaatgaatgcagaggctccaattttttttatttaattctctgctaatttgagggtccaaatctttcaaaaatttctagacacagaacgatggctgggattgaatattaggttttatctgggaaaaaaaaagatgactatgtgaaactgtcacgttagctacggcactgcacggatcgatacgcacaaaacatgac

SEQ ID NO: 39111 - DNA, 259 bp, Arabidopsis thaliana columbia
ataattatcttcggttttgggataaaactgaaaagattgtgacccacgtcgattgcaatctgcaactactgccatcaatagatgatttagtcaattttaaaattaatcactatttgcaactaaataaatgttgatcatgcgatacaatatcctaatggctagtgatgaagttataaatggtaaataatggccccttccctcctacttttcaattttggaaaaaatattattaattaatcttttgaaaactttagagcat

SEQ ID NO: 39112 - DNA, 541 bp, Arabidopsis thaliana columbia
  unsure (1)..(541): unsure at all n locations
taacttgcatcattctgatgcttcttgtgtttatgttggttaaggaaactcatttatttctttctctgcagatttttccgtgtgaagctagagtaatgaacttgggatcaagatttatgactgtttacattagcaagcttggcgtaagtctctactgattcatttaccacaattaaatttatctaaattcctgtttacagtctgctaaacacttgttgttattgatgctgtcacagattgaacggagaatatactacgaccaaatcgaaggcttgtgtgcagactggctagaggcaacatcaacgttaatcgtcgataaactctattccaagagaggtggaagaggctttttcaagcccatgaaggaagctgtctatttggtgagtccttgtgaagtgtgcgttgcaaaatgcagtgcattgtctgtccatgacactgagtcaccagaggccgtgtcaatagatgaggttgccctgcggttttcctttgaccatcaacttttccgaccattctgtggtctcatgctgttggtnagatgatg

SEQ ID NO: 39113 - DNA, 550 bp, Arabidopsis thaliana columbia
gttcccccccatagaataataaaatgaacaatttgaaatcaacaagagccaaataatatgcatatataattttgggaattgtggtgttgttttcatttggaccatatctccatgtgaagaaccacttgaccaggagaatatttttgtcccaattgatttcacaatctctagggttttggatagctgagaacatgatcctttgtcctctttacgaaattgatgcaaaaccacttaacaatttgtcccttcgttgaaatttatgctttcgatttttatttgggggggttaggggagggggtgaaatttatggacaatgtgtaaagtataaggaacaacgacacatatatatgctgttagttaggaaatgttaaaattgaacaaactttatagcaatcaaatctttataagtactcagtatttcattaatgcccacatgaccattgactgaagccaacatcaacaagagggtatgcttcaaaatcaaactcaaatctatcaaaagctataaaatatattcacaagtgagttaatgcataattttggtaaatat

SEQ ID NO: 39114 - DNA, 1107 bp, Arabidopsis thaliana columbia
tgctttttgcagggatactgggtttcgggatggcaatgtgcttaaacttgttgtgcatttgttattcctctcggcctgtgcggtttccgggaatacaaacttagtataaagatagtctcttctgttcttaaagttcggatttgaaagggtaaattgctgcatagatagatgggttctcttacaacattgagacctgtagatatacaagttctttgtagtttgtacttttgtatgaaaataacttttgtggaattacagtgagaatgtgtgatttgtgtacatcaagtgaaagagctgttgtgaatgagattctaggttcaagaatgttttgaaaattttaaattttttggctcctgagagaagtgtttcttgtcaactcattaaaatgagtaaaaaggaaggggcgttccgagaatcgaactcgggacctctcgcacccaaagcgagaatcataccactagaccaaacgcccttgttgttctaatcacatttagtttgtttattaattatgatttctgtcataacaattaaataagtgtgcaaaattatttgttagctagctcctcattgctatttttctaattttatgggtattgccgtattgccgaattaactctaccaataatcacaagattatgaacactaacaagtaacaaagggcttcaaagacgttgaatcaaagtttgtagtggaaacgtttatgcattttaaaagaagcatataataatcgtataccaatgtaatcacattgagtagtttggactctcccttctatatttctcccaccaatgctacaaacaacagcaagttccatttccaatgaatccaacacttgaagagttttttttttcctcaccatctacggcgtctcctcccataccaaaacgcgaacgcagccacagatgcagccacaacgactccagtagctgcgtgccatacatacaaaggcttctttatcatgaccacacttgcagattgcttcaccatctcagcgctcggaatatccttaacttcaggaactttctgctgactcacaaccgtgtgagcaaacccgagtccttctctttccaattcttccaaatcaatagtcacagctggtttcaattg

SEQ ID NO: 39115 - DNA, 521 bp, Arabidopsis thaliana
gatagtgttgagagaatcctctcgttcagttttggaaccggacgaggagattgacttgattcctgagtttcttcatatgcttcttcactcatctattgtcacatcaatcgttaaaactaacagatttattgattgtgcagaagaaaacagagcatttggaaagatctaataaaccaagaaacaatcagagattagtattaattacctttggatcttctttcgtttcaaagggacaaaaacaaaatgtaagttctgcaaaaacaaagctatcatatatatataccagacaaaaagagtttaataatagcataacgatttggtcaaaatcgaatttaatgattcgagagatattctttctcagcctttcaatttcttttaaagaaaattcagtatttaaaaatggaagacaaacaaaacattgtacttgtttatggtgtttcttcttactctttgcctgcacgttggtataatcgtgacttccaatcgcgatcacgatttattttctcagaacacaatctagt

SEQ ID NO: 39116 - DNA, 1212 bp, Arabidopsis thaliana columbia
aaggttgtatctcttcaacctatatcttttacgatttctattttgttatcaatttgataaccaactaaaaatttgtttcttgctttgttattgtttatttgcttcaagatctttatttaaaaaaaaaacatttttcttcagtttattatttatttttgatttattaaaaaacccacaaaaatcatattttgttgaatttttgaacttttatttttataaaactagtaaacaaaaataaaaattcgtttcacatttgatattttagatgaattttgtttttattttggcattgattttagaaaataaaaagtttcatattttgtcctctttaccttattttgttcatttaattttgatacagatttctcttatttgtgcaaagaataccacgaaaacaaaagagcaacaatgacatatttctctatgtacagaaggaagaaatcaaccaggagatgtgtttcaatgagagttatgaagaactatggcatgaatagtactctaaatcagattttgaggatgaatcttgccatgaagtaccggaaccagaaccgcctgactcatataataccaataaaggctattgtaaaccatgcaataaatttaatgatgatttttgcagccatagtttgaaatatcaattgactcgagatatttcttttcaggaaaagcgaattatattaagcagagagaagtcatggctgccaacgtcctccaaggagtgaagagaaggtcgaccatcacactttgttgcctcacgtcaagcaaaaccgagacacaagttctttcacacatatccacgagtagtaccggaagtgactaaagaagtgactcagagaacatcaatgtggcgtaaaccatatccatggtagacgtgattacctagctaagagagactcaaggattagtaattaattaggaggtgagctgaaacatggcactcgacaagacccactactatccaaccccacccgaacctaccaaacaaaactaaggttatttctagaaaatggttataagtattttggacctgaatcttttgattttgcaagacatgagaaggggaagaattagtctacaatgggaactcaaaatggataagtactttaagtactattccattcctaaagaataaaagctccactattctcttgaacaactcatgggaagggcaaacgttggtggaatcgagaagaaaaggttgactgtggtata

SEQ ID NO: 39117 - DNA, 1068 bp, Arabidopsis thaliana columbia
ctcggccaaaaatccaaaagtatcacttcatccgccattattgtgaaaaggaactcttctttgatggattttgcttaaaccttttctatactccaatcgctgattctttatagagtaaactagtcgagttatataagaaatttgtatgcgatgctgatgtcttattactattgactgtgaacataaaaaatgaaaaattaattgaatcttggaagctaagataccgtagcaagcaaggtgtgaatgttaaacaagtcaactcaatgttattcaattcgatatgtttttttaaatggagttttaagagatgcttaggccactgcttacgtcattatgcttatctgttcttgtttttatgttaaaagaaaatacatgaaacccaaaacataaaattttctatatattcttttgtttccacatcacacacacacatactatggtactattttactagtacactacaaacttgatcaccaacaaaacttttttttgtttctcttcacatgaaaaagtaaaagcaaagtaaatggattacttttaaatctatgaatcgtattctttagtgacaagaaacaacatccgttactgagcccagtctaacatttgtcattaaaacagcccgttggcgtagttaaacagttctccattttccaagtttgcgtttttaaatgggtggaagagagaaggagaaacaatgtcgtcaacgatggaagggcaaaagagtcattgtgaaattaaagtcggttccaattattattttcccatttttcttaagtagtttattaagtttaattagaaaaaatgttatttaatacttcaatttacaaaaaatggccaaagtaaccgtgaactcgagaaatggccgttttaactctcaacaaaaagttgacttctgttttaaactttcaagtttgcgttgactcggtctaattaaccaccgttaaaactccttctaacagcgtaattgacagccgttttaatccgttaagcatctgttattatagtcttacgacctcgttttcgtgctaaagagaaatcaaaatcgagaatagaaattctcaaaacaaa

SEQ ID NO: 39118 - DNA, 498 bp, Arabidopsis thaliana columbia
gcgggatgatgagctaatgtttacggtccatggtttatcataatggcagaaactcaaacaaatattctatctagtttcatataatctccttcttttaaggtattagaggtaatgcatgattcgtgactatgttgcaagaagtcttggtttcaaacaattagctttggctcaactccatgaagaagcaaacatagttcttcgaacttaacagagatctattagctggccatatgaagtacacttagttttctgttagaagaagcacatggtgtgtgaagtaaaaaataagttatcatgttaattaagtaatcagttttattagacccatacgttaagagtctctcaagttgattattttatctgaaaagtcagataaattagcttacctgttttgaaagcttttagattagatcaacctcgacttcttacctgtctttagtcaactttgaacaaaaaataatatggattatacaagaagacgaatacatgagactatgg

SEQ ID NO: 39119 - DNA, 472 bp, Arabidopsis thaliana columbia
caagagagtaattgtgaccttttaggggtttaaaaaagttccttatgatgcaccttttagcctaactagttgtttcaccacttaagcccgtctcttgtcatctgaaaaagagtttcaactcattccatatccacttgaatatgatgggcaagtaggcctcgctcgccaaagaataaaatagtggggtcttactagctccctaagtgggcctcgccaaagaataaaataaattttacttcatttcactaattagcgtatcatgcaattttaatagtagtagcctctggttgatgcttctgtggtgaaaaaaggtaatcaccgacaacacatcttttgaagaaggtacattctccacgacatttcgttctcctgcctcctatatttccagcaaccagaaaggtgtaacactaataatcagccttaattacataatcgattcaaaaacgaaaagggtatattgataataattatg

SEQ ID NO: 39120 - DNA, 330 bp, Arabidopsis thaliana columbia
gggtaccgagctcgaaagtttggttttgattgagattctttaactaactcaaaatgaaacataaaattttctggaaccgaataaattaataaatttgtggtttcaattcgagaatgtttgtctggaccgaattacctaaacaaaacaaacaaattagaaatataaatgcaaaaacagctaaccttgagcggtctcttcaacaaccggtcctttccaacctcctttgatccttttttggtaataataatggttaacctccttggatccattgctccaggaataagactaaattagtaaatgacctaaaagcatgtttcctaaaccatttgg

SEQ ID NO: 39121 - DNA, 541 bp, Arabidopsis thaliana columbia
atatgcatttatgaagataattaaacttttaaatactttttaatatttcatacatattatccatttctcattccaaaaaaagagtttaattctcagtttcagaataaaatgtgggccttatacagatttagttggcccattaatgtacaggtgacaataatccaccaactcgtttctcctgacacaaaaaatatctcatcatgtcttcttcttcgtattcgtgtctctcatttccttttttgactcttctttccaaaaaggattagatctgactcactattacgtgtcacgcacagttcattaggtacgctcggaaaattttatccacacatctaaatatctgatttatgatcaaatcacccatttttatttttccttttgtagcttctcaaatcttttgtctttattcgatttaaaagttgatgtactctgcatctgattgttttgctcgtgttttattaccacgttgtggttgaaatttgacggcggaagttcatggtggggtatgaaccagttggattcagatttttttgcaagttga

SEQ ID NO: 39122 - DNA, 579 bp, Arabidopsis thaliana columbia
tacaaagaaaatgtaaataattatacatactctttaacatgttaccgacaaattactctatcatatggttaatttgttaattatcttcaaaaatttgattattttgtgcatattctcttaaataagtaatctcctttctaaatgttaacttattcttttttttgtcgtcaaacttttaaattaaaacccaaaagagcaaaattacaagatgaaatggatccaaccatacaataaaagccaatataagcccaaaaaataaaataactagatatgccaaaatatgccagcaggtctagaagcgatatgtgtgacttacacattcttgcgcagattggaggtggaagatgcaactgactcgtcaccgactcttcatcggttcgtcagcgccattaccaccgaagctggccgttgatcggaatctctatttccgattaagatttcacacaagcagctacttcttccgattcaccatatgtctgtttcgcaaattcattcagatgagtagaaacaagctctatagaaaaaccatcagatcttgaggcccggaacattatacgagcaagtggcataccagtagca

SEQ ID NO: 39123 - DNA, 787 bp, Arabidopsis thaliana columbia
cacatatcaaaagctatgcaacgaggatgctcttaagctttattgtggattgcttttacagcatttagaattaggatgatggatttgactttgctaatctttattgtgaattgctattacaaatgtgaataggaataataattgttataattttaagaaccaaacccatatggctatagtagactaaaagcattattattagttgtctcttatattagttcttaggataagaatatctcattttaactcttatataagagataaaatgataaaatgtctcttatataagagttaaaatgagtataagagataaaatgataaaatatctcttatataagagttaaaatgataaaataactacttttcagtagattggtaaactggttaaaaaaaaaaaaaaaaaaaatcaatagatggttagtcatggtccattaattcagatcaataggagtataaattcgtcaaactttgttcataccaaaaccagaattgcatatagagttcaacaacataagcttgatggttgctgtgtttcaaatcattcacagttatgttttctagctcaaatttaaattgtttttgagcaataatttgaagctgagggttgactatataagatatcggtgactcagttaccaagtgtttatgtagttacatttgtagaatttggcacatcaaaaggtttattctgtatcagctactagttctattctatattccgttgtgtggacggatgacaaacttttgtactacaaaaaagaaaacatttttctattttaagtatttg

SEQ ID NO: 39124 - DNA, 1424 bp, Arabidopsis thaliana
aatcaatataaatatcccaacaattttaccgacttcccttgagatgttctcgatgagatccttgtgcattgcacagcttgcaggcataagagttgaaacctacgccgttttcgtaatgggcctaataataggccttaaaaagcccagttacctctttctattcacggaattgatcttatcgagcctccactcatctctaagcctggcaatgaaattgtcggctttcgtatcaacgtccgggcttgggcagaatgcccggcatatccgccgccgctgacggcagctttagtctcaactccgccatcagattgtgtgagttctagaccccaaccgatatcgaacacttcccgttcaggggagctacatctagagctctgattactccgtatcttcgcgaaatcaccactcacgacatattttagcggcggaactctaaacggaggcggtggtggaggtggaggcgtaatttggattaacggagatccttggccgttgttctcttcattgaaattcttcggtttcgtcggacgcggaggtcttccggatttcactctccgtggtggtgtctgaggatcaaattgggtatatctcggcggtggaggtggaggcggcgccggaacggaatgaatctttttgttgctcttaactcctatcttgaacaatccgtagaatactgattgtgacgatcgcaatggaggcggaggtggtggtggaggaggaggcggagacggtggtgggattaacgattggtattgcggtggttccgttacatcttccaccatcggagaagattcgattctctcttttctcttcgatttctgaagcttcttcttcttcttcccttgattatacagagaagcgaaaaccattttaatctctttcgccgcattgctctttcttctttgaagagttccttgttttcttggtggcgtacgcgctataagcggctgaggaggtggtgggggcggtggaggcggtggtgacggcggaggctgaaacgttcgtttaaacttagtctcactgcgtttggcgttttcttgtaaatctctgtttctaacagaacgatgagtccttctcggtttctgcggaacttcaaccggcggaggtgggggaggaggtggtggtgttgccggtggttgttgcggcggagaagacggttttacaacgaacgtatcaatctgaatctctttaggctcagattcttcttcctcgatttcagttttagaaagattctgaaattgttggtaagaactcgaatcctgcgatcggtacttatcgatttcgaaatcatcataaaaccggaaccgtcgatcgccagtttctctaaaaactccttgtctgagatcaggataagagctactactacgcctcaacggtacattcccggtaaccggtaatccatgagaaaaacttcgactacttac

SEQ ID NO: 39125 - DNA, 569 bp, Arabidopsis thaliana columbia
ttatgatgttatcgtttactcacaaacaaacaaaatcaaactctcaataatacgatgattattccatcattatacaaagtcatatacgttatcttgttatattttgatttgctcttcattggtaaatatctgaaaaaaatatcgggtgaataaactatattatttttattatcattttattattcaaataaatttaaattaactaattagattatgtcaaaatatgtttgtcagaatatctcagaggttttaggcagagaaacgttctctttttccttccttttctattttttattattattttaattataaaaaacaatgagagataccattaatgaatccaaaaaaaaatctatctatatctgtatttataaatacttgaaaatattggatcctatattcaattatattgttctaaaaaaggacgagtatggtatctccactccgcgacttttctctagcttatcacaaacgtaattttctcatcctctatatctttacccaattttagttttatctatagtctatatagtttcatgttttttttatatatagtttcacgttttaat

SEQ ID NO: 39126 - DNA, 494 bp, Arabidopsis thaliana columbia
tttttatgcgaatcactttagctataattttttatttaacagaaatgatcatattcttgaaatagttaatgagactacattaaagaatgaaaagaatgtgaaatggaatatggtattaggaatttagcattcaacatatattcttacgtcgaatcattttgttctttacatataatcagttgcaactttactgaaacatttattcagaaggatgataagaaataagtatgatttcggatcggaaaagtttattattcgtttatactttatatatagcccataccgtaagtctttaactagttaattcaatattttgagaaacttattcgggtccaaatacatggcccatttctatcccggtccattacagattaagaaacaaaacatgtaaattactaactaactagtagtattgatttactactacactagataaagcccgcctatttaggccggtgtactcgacatttgtaaatctcgaacgggtctaaact

SEQ ID NO: 39127 - DNA, 270 bp, Arabidopsis thaliana columbia
aaacctcatcagctagagcgataagttcttgactctcgctatccgaaaaccatcccaaataacaagcatgctgtgacaattaacaaaaatcaaaagtattatatgtcaaaaccaaatgagtcatcatagatggtgacaaagtgaaaaccttttgacctcaaacattccaaccgacatgaagtcaaaccaataggattctctttactaaacaagaaaaaaatgcttcttcacagaacagcagcagtctgcagattactctcttcattacct

SEQ ID NO: 39128 - DNA, 483 bp, Arabidopsis thaliana columbia
tattttacacgtgtcaaaaatctaagatcgtgaaaaaattgacacgtgtcatgatctcgtgagttactaactttcaaaattgtacttcatataatagaattttacatcaagacaaaaaaaaatcaattaaaaaaaaaaattattaaacagtatttaggaaaacaaatcttaaacaaattaattttatttggttaaaaaaagatgtttggtgtctttattgtcttaggaagaccaaaaaaaaaagattgggtgtcttaaatctaaatttattactccttttgttcctaaataatagtagatgttttaaaaaaactaattgcatcaaaaagatagagtttttacttcttaggtattatatgcagtatttcttatttagttttatgaattgtaaacttcaagaaacaataattatatatcataggttttaaaattagcaacaagcacaaaagttgagccatggggatcctcgaagcacaccacgac

SEQ ID NO: 39129 - DNA, 565 bp, Arabidopsis thaliana columbia
  unsure (1)..(565): unsure at all n locations
tnnnnnnnnnnnnnnnnnnnnnnnctattgattggtttgatcttttgggaatgaggagattatttttttttgaatgaaaatttttctgaaaataaatttgatgttttgtgtttgcttttttgtaaatctattagatatagttagttactcagtgagcttaagtctcctttttctataattgttgtatacaaatttagtattaattgtcacagttttgtgattgaggtcatctcttatggcttacacgttgagcttcgttatatagtcgagccattttgtaaagaaaatttgagaaatataaatttgtattgctacgaatcttaacttttttgtattattcatgttttatgtgaaaccatatgcaattatgctatctgtattatttttcacccggtttcggatcgatcatttttccgaggaaatagtggagaaaatcaatgaaaaggaattacacttgagatgtaacaattattccttttatttcgtaaaatttaacgaattctaattatatgttaattctagatcttaattactcgtgttataatacaaagatcaaaaagagaaa

SEQ ID NO: 39130 - DNA, 383 bp, Arabidopsis thaliana columbia
  unsure (1)..(383): unsure at all n locations
tgcttgtgagacgtacgtttacgaaccacatgtttatagttaatatgatttctttaacctatcatgcaacgtattggccaaattttatattgagtatttataaaattaaatacgtataaaggcatgggctcatgagttaggagagttctgactactgttttattaaggatcgacactcaattatttttctgttttctaagtcagatttgcatatcttcaaaactatatatcccacacactttataaatctcaattctcgtggatgcgttagacacaagaataccatttacatcaattacctacatgtcaacaaactgtcaatacatgtgttgttaagataatgtagtttgccntactaggtcgtacactcagtgacatacata

SEQ ID NO: 39131 - DNA, 1066 bp, Arabidopsis thaliana columbia
tgttgtcatctttcagattgtcaattcaaagaagacgatcagatctaattgactcgagagagagagagagagacgtatgtttgggaggctgagaccaccgccgtcgccgccggattgtctggagagatatccggcgaagatcatcaaagacgatcctctctccgtctacggtataataaatacacactctttccattttcatgtgattctgattgtccaatagaaatctctaggttttgaaatccttggtttcttttgatggcattgtagagtcaacactgttgaaacttaagcaagggtcaacaagacaggacactacttcatcagaaacagaaggtgaagagaatctgtcatcaacatcatcgtctcatgtcttgtcttcggatacacaattaggagacactcatgatgcaatggctatagactcgtgtgaaagctcgaaacagataaagagcaagaacccatcagtactatccatgtttagcaagtacaagaatcaagctcaagcacgaaacatgaagacagagactcaggaatgatttgtaaacaaatgtatcccaagttcatgtgtgttgtactttgattatgtacaatttaactacattgttagtaaggagtctatatagatgcctgtatcaaaacatctctcaatcatgtgtttattactttagcctaaacaagctttatgatctttaaccaacggtgttgatagtactggtcatgtaggggttcatccataactaaacgtctaaaccttatattaaaatgggtctaactgatcaatcaaaaacatttggggtcaaaacaatatattggataaatataagggttcatcaaaaaaaacttaacatttcttcttcactgtaaaatgaaataaagcttatccatactcaacttcttcactctctcttaaaccttcaaaaaccctgaagagtgacgaatgaatcatgcagatttgccaaaccaagctcaatttcactttccctaatcccacaaaccctaatttctgcaaacccaaagctcttcaatggtcaccgcctcgtcgcatatccttgctgccttgtcg

SEQ ID NO: 39132 - DNA, 854 bp, Arabidopsis thaliana columbia
  unsure (1)..(854): unsure at all n locations
ttcctatgagtgtttggttttagatcttctaacatggaaatacaactttagcttacgggataaggttgttgttctagttcttatactcaatcatacactcaacatctagtcatatttgaatctataaatgctagccaagcttcttcttacttctccaagcattgatggtataggcgaagtccttatgactttttggtttcgaattttctaaaagggaaacactactttagctttctaattttgatttcaattttagttcttatactcaatcatacacaagacatctagtcatatttgactccaaatactaatcttattattaatgcatgtggctaggttatccgcctagctactgatctaagggaaaagatccccgatagagtaaccctaatcttggaaatagtgtcaccagtccttcatgttgttgcttgcgatagttgagtaacagagcttagagtactaaggaaatcgattctttatgcgttaaactatgcatccctgcctgcgatagttgagtaacagagtatagggagatcagacgagtaagtgtttctataacactcgtcccgccttattggccaagatggggtgttattcatctgatcttgcaaaaatgttttctttaaacttcacacacgaaaaaaaaattgcacacaactcgccatgcttactaacctaaggaaaaaggggaaaaagggggtgagtaaagaatagtcattgaggggaatcttctctacccactaaaacatataacactttctaaagctttacaaccatcgtcataacatatgaacttagacacaaacaatcanactaaaatgcttgaacctctaacaacacacttattgagtgga

SEQ ID NO: 39133 - DNA, 457 bp, Arabidopsis thaliana columbia
tgcaaaaacggaagaagatctttatagaggcaaaggataaaaacgtcaattcacataaattatcaccggtaatacctagaatacccctcgacgaatgttttcgtggaggggccttgtgcttacgcggtttacatgcgtgatgggtcattggccgtggattgcatctaaccaatccaaaaccgccatgtcattttcaacatcttaaatcattgacgttgacttgttttttttgtatgtttctctcaattttctttctagaacacaattggcaaatacaaattcataaaatgttacgtatgaatatgatcgataaccaaattttaagatcataacaccatttaaaaaattacattttgagtatgaatattggaagagttaacttggtttaagtaaccaagatccaatctctaatttggtctaatcacatagcaaaaccacatttgctctcaaatacaaa

SEQ ID NO: 39134 - DNA, 927 bp, Arabidopsis thaliana columbia
ccctcttcttgttttgaagtgatttatttcttacccacaaaatttagtgaaatctgggccggttgactaaattctcggtataaattagatccggttccttttttttttgttttgggttttgggtgcaaaattttatttttttattcaatccaggggccggttcaataaaattaaagtccctgagttcaggagaagcaacaacggcaatactaaaccaatacaacggttatgcctcaatgataatgtcatctagcataataaaaataaaaaagaaagaaaatgtcacctagcatttttatttctggcatgttaaggcatcaagcaaaagatcaaaaattgtttcatatccatggagagatgtatgggcctctcagtccataactcctgaaaagttaacctaaaaacaaattgtttcttaccatgcaacaagagtttaatttctaattaatagtggaatgttgtcacttgtacggttgtaccagacactgtctaacactagtgtaattcgctcgtggttaattctctagcagaaagaagattcaacacgtccagctattctcgtaacatataaatagggtccatagagtatgtgtggctatgtacccatgacgtgtttgcatgacgaatggcaaattggcgattggattacatgacttcaggcaaaataattgtagaatattccaacttggtacactttgaaacgttgaccttagaattatttgaccaacgactaaatcttcgttccaaatcttatattacgtactttaatcaaaagatctgaagacggtacaccaaacagagtaactctccacgagacgacttttgtttgtctaacgttttcacaaattaaacaagagcaactctttacaaacgaaataatcaacattttactgtttgtcgttcattagaaatgcaaattaaagaaga

SEQ ID NO: 39135 - DNA, 532 bp, Arabidopsis thaliana columbia
tagtaacgtccgccagtgtgctctaaagaacccttggaatgctctgtaactagctcgctgaggagaacgaggagtgggattatttctacatgtttacgagactagattgtggtctttatgtgggatggaccgtcatcagcatctacggcctgctgcaatagctcaatttattggcgcttgctgcttttccgttatgggataaaatagtcaagataggtctcaggagtggccgtgactgcggttgcttgccgcaagcagctgatctatatgtatagtacagcgtagtctatttactctactatcagccccccttcctccgccttccaacaccaccaagcgaccgcaataccccccttgagcaccacagccgtccacagcgcccccattaacccaacttcactcttcgcccatagtccgcctagcgagatccccagcatcagtccacccacggccccgagccgcctcaactcatccgccatcttcccgcgccccgctccccccaagtacgaaaacagatcacagtacacactgg

SEQ ID NO: 39136 - DNA, 513 bp, Arabidopsis thaliana columbia
atcaccatcttttgagatgatggaaagtggaacagtggaaaagtgtaacagtggaacagtggaaatggtctacattgaattgacgggttctttgtacctcaataaaagactgactagtccagtggaactagataggttcaaaggtcagggagatgatcgaacctggttaggatgtggagatcttgcttaagcaagaatgaggtgtgtattatagtcttgcatagtgatgtaaactatatgagtgttgtatttgtttctatgtgattgttgattgtagtttaaaggtagaatcgtgtatcgtatttctagtgagcggaaaggatcctctcactgagtaattctttactcaccctttttttcccttttttctcaggtcacggtgtgaatcgtgtgtcgtcgctcaagtccgtctcgcttatggtgtattttgggacctcgggtttattttctactattgttattttcttataggatttattaaacagttttcaatgatttaagattatttttaag

SEQ ID NO: 39137 - DNA, 302 bp, Arabidopsis thaliana columbia
aatacataaataaaaacctaagatcatcattaaatatttcaattgaattgtttttcaaatatagtttagttgattgatattgttgaataaatgtagtttattttagtttttgacttttattgtatcactcattcaacttttgttaggttttaattatcagggtaaatgcctataaccttacaaaattagtttttgtttaccatttcaagtaacaagcacgaaatttaactatttacataatattaaataatttagtatccttgacataattttccagaaacctttgattgatattgtaaatt

SEQ ID NO: 39138 - DNA, 335 bp, Arabidopsis thaliana columbia
acttctcgttatgagaattcaaaagtaaatgggcataaaaacctacacatgaaaaaggaaccaagctttactatagcaacaaattagtaacaaagttgagatttttcgaagtgattcgtttcaaaagcatagaatcagaagagataacaactacaatggagtgggatgacttactctgcgtcttagtctcagacctctcatgtgaaccctaatgaccaagtgctagtttgctacaagggatggtcttgtggtgtatagtccgttcaaaagtgcttctttcaagtcctatcagaaccaaatttacaaggataatatggaatcagggaagtgaaaag

SEQ ID NO: 39139 - DNA, 574 bp, Arabidopsis thaliana columbia
  unsure (1)..(574): unsure at all n locations
acaaagatgtcttgctatgcatgaaatattattcttcacgtcgtgagctacgaacacaattctacatcgtgaatcctgtgacaatgcgatggaccagtattcctgaaactcacagggagttctcaatattacctatcgggttatcacggaatgggtcaaagggaaagtactatgttgtcaagctgacagcgactacaccttctcagcttaaagtttacgtggtagattctaagcgcggtcaaaggaaattctattgtatcgagcatccgccttggtcagagtcgggatggtggccaacgcaatgccaggccgtgaactttaacaaagctctacactggttagcccatgacggacctattgtagcttataaccctaagtataggcatgcatgcataatcatccatcgttcccaagagatgcaccatgcttctcatggtcatggcgccgtcgtttcagagaccttaaccgtctccatgggccatctacgcatcattcagctcgtttgctatccctttcccagtgagttactanaacctagcccattcaaacaaatctagacactaataataataat

SEQ ID NO: 39140 - DNA, 176 bp, Arabidopsis thaliana columbia
  unsure (1)..(176): unsure at all n locations
actgggctttaagtccagctgttaccgcagctggctctaccaatnttcaatttccttgggaaataagaatgggaaccaaaacgcacaactttggtcgcttccctgtgaaaaaggaacccttgtcactnnttgacaaattcaagaaagccttgggcttcattncctcccatttcacg

SEQ ID NO: 39141 - DNA, 575 bp, Arabidopsis thaliana columbia
gtaacatcaaaacatagccaaaggatttatcttttcatgattaagcaaaggaccatgagataacctaaagagctcaaatttgaatattactgccagaaggaagatgctcagaatatagaataatgctagactcgtccggagacacaatttttttcttgatacatcggtttccataaaagtctcaaactttatatcacaagtcttacacatggacatgaatagtaaattgtgaaaacttgtattgttctctggactctggttgattgactctgttttggtttgtctcagaaccaatcaagaaccaaaaatggaaacattttaaactttttatgggtaaattcttggttcttttatatgaaaacataaccagatcattacgaaaacaattggaacagccgaccataaacaacagcaaattccgcaaaatccctgattaggtttcatgtcactactcctttctgtttttccatatggtaacaagcgagacgcccattagagacataacaaccgtctgcaaaatataaaaaaattccggttaaacaaaaacatggttaatagaagaaaatagatgtaca

SEQ ID NO: 39142 - DNA, 573 bp, Arabidopsis thaliana columbia
gatagataataatttgaactaatatatcaccctttctatttctttttaattagaaaatatgcataaaataaccaaatttttgaggataattaacaaaatagtcatatgctacagtaacttgtcggtaacatataacagagcacgtgtaataacgtgaacgtcctttttaacatgtttttctccgattacatgtgataacataatattttttttatcatgttattttctcatattgcacgtaatttataaagagcattcttgggaaaaaataacattctatttagtttaatatcacatgttatttttcgtattacacgttttttttttatcaaaatcacatatgatttctttaaaaaaatattatgttcaggttaaatttttccataacaatgttttttcttacaaacacaccactatgtgcaatgtttttctttaaaaaaatcactacatttttttaaaacatcatgtcttttaattaaatataacatataaaatttaaatgttacacgatattttacaaaatctcacgaaactgtgcttattgttgacttgcacacacaaagtatggttttg

SEQ ID NO: 39143 - DNA, 500 bp, Arabidopsis thaliana columbia
ttctatttttattttactattaagattttaaattttttttttgttaagtgtaaaacattaaaattttgtgtaaactaattgaatataacattcaaacctgtaagaggtgtttataggttcaatatgatttatatataattaaaatagtttgctattttgtttagaatcaaaatatttttaaatgacatgttgtaataattgaccaaaagaaattagtgtgtgattttgttgaaatgcagagtacaaagccttaatttataccaagttatggtatctataacgtatatgaataccaaaattttattatttttaattggtgttgtattttataattcgaaataattaggggaacgggcaaaacctctctgttctctcgcttatattttttttagagagaaagcaaatcagtttcaacgatcggatattttctggtgttagccgtcctgactttttgggctttctgtccgatatcaccggctctggtagcggtgttggttggc

SEQ ID NO: 39144 - DNA, 567 bp, Arabidopsis thaliana columbia
caacttcgactaaatccctctgttttctttctcttcttcctctcagttttgtctaccaaaactatctctctctgcttatccttactaaatccctttttgcttcctttctttctaagtaaatgcgataacggtaagtataaatcatcatcagtatctttatcatcctcgcaatcttcttcttcatcatcatcatcacttgaaacattccatatgttgtacctatatggcatcatccttacccatccatccttcgaatccggctgaatctcagagtctccgtatctctcaggccgcccgcttcttctcttggaccgacgcagctccattacctcctcttcaatctcctcctttacatcactatcttgacaagtatcctcagctggattgaacaaaacaaccttagacatgacaacaccgtcttcaaccgtaatgttcattgcactcaaagagctactagagccttcgcaatcttcatccgtcacaatctgataaaccatcttctcgtgaacggttctaatctgaaacacaatgtttttcaaaactggatgtaacaagcaaacatgtaag

SEQ ID NO: 39145 - DNA, 527 bp, Arabidopsis thaliana columbia
ggatcccccaaatattatctagatattaaatatgttagcatgttattattttatataacatgttgttttaactgctattatattaattatgtaagaaataaactaattctttaaattgaactgatatttacataaataaaaatatattaattttcaattctaggtcgataaaagatttgtttaaaagtaaacttatcgcgatatcatattttttagcatataaaacaaatagataaatgcttaaatcatatgatgttttactatatcatctgatgaatagtgtttcggtcgcatgtgagcagtgttatcgagcggtttatgaactgtgtcgccacatattacgtcagaaaaaattgggcttctttcatgattggggcattttccaagtttttagtgcatttagggcacattgaagagaatagacacttttttggagttttttcactattttaaaaaaatcaataccagtttacccttattctcttcaccttaaatcaagtagcatgggtaagaaatggttttgacgg

SEQ ID NO: 39146 - DNA, 519 bp, Arabidopsis thaliana columbia
taaatcaccaaaacactattggtcaacaattttcgacaatatatggaaattaggttggattatcatgcgacttttttctgattaattttatgtatttttaatttacgatgtaattcggactactaatttgtattatgataactttacattttccatactactcaagtccaagtaaaatactattgtatatatatctttggattttacataaattaatggggaggcctaataaaatatactcggagtatatcatttgactttgaaatttatcgagtcaaatcaatgattgtatttttggtaaaaacaattattatgaagactttgaaagtttttaatgattttaatttcaaaaattagtaaatgctggtctggttatccaccattggaagagaaaataagaccttttcaaagctagttgataaaaaaagttctcggtcctatccctcatcttataaagaaattattaatacgtttagggatcaattcacagaagatttaaaacaaatggaaaataggata

SEQ ID NO: 39147 - DNA, 518 bp, Arabidopsis thaliana columbia
ttgagcctttggattataaatcaaactcacatgatcaatctgcctcgtagccggcgtgaccatcccttcgacggctttggtcaaatcactataataactctctgggacggtggatttcttcttagcagcaccagaaagagaaaaccaaaccttaggtctaagcacaggagggatccctttccgaatcaatctcttcaacgtaatcgcattagtcaaagtggagagcttgagagaagttttcaaagcgataccgtcaccgatcaagagaatctccggctgaagataccaattagctcctttgctagcttcaagagcccaccaaactcgtccttgattcctgactttctctctaacctcgttcaacacattaacgtcgtcgacatttccttccaccgtgaacccgtacaagtcctggaatttaacgacgatgttggctcgtcttgcgtggatgcttggacggagaatcggaatctgagattgtagctcatcgttaaatcacgtctgctttggatccaaac

SEQ ID NO: 39148 - DNA, 611 bp, Arabidopsis thaliana columbia
tagtaacgcaattagttgctgaatccaacgacaaccaaacgaagaatacatattgtcgttggtcgaggatcgttgtcgctggattcaactacatacaaacgaacatgacctaatatttacgagagacatggaaatgtgttgttcaacttctctttttaataggtacaataattaagtaattcagttaatacttcccctccaaaaagtaaaccacctaattgatcacataagagatcacctaactttctactactaagagcaagctttattatatacacaatgaatctagtaattctctcataactaaatacaaaaatcacctaacttttgacaatataatgcgtatatgttcagttcaaaatgtatgattcgacgtatcaacttaaaattgaaatcacacattgtaagtcttttttttttataaaccttataccaatatatttgacaatttttaaaatttttgttactcgtgatgtgatgtctatagatcagtgaagactattttcacactttacattcaataaacaacaaagttttttttgtatcatatttgatgtactaagtctcactaattatagccaaattccacgtgttaatattttatcaatgag

SEQ ID NO: 39149 - DNA, 431 bp, Arabidopsis thaliana columbia
atactaggttttacccgattttagaaaaaagtcggagacgagtattattatgattataatacttacactatctcatttagaagatcttatgccgctactcggactcgaatcgagatgctctagcactgcatcctaagagcagcgatgtctaccaatttcagcatagcggtgacttgttcaaaacaatattatcaagttttgatccaatcgtcgagattttaatttaagtagccgaagccaatttaattcaatttccaattgataattaaaattatttcaattgacgtccttgacctttatattcgagatcgcgaatacaatggtaaatgtatttaagtaataggagtttgaacttcaacccaaagcactaaatgtacatgctcattatcattcatttacatggatatgaattgagattgatatgctaatgc

SEQ ID NO: 39150 - DNA, 522 bp, Arabidopsis thaliana columbia
  unsure (1)..(522): unsure at all n locations
tattaaattatagtaaccatgtcaacgtgaaatctatttttctttttataaaaggtcaccaaattatagagagatgttcaaatccactactttgtaccttagaaatgtgcaatcatattgcagggatgttcattgttcaatcccatcaacttgtggctatatcctcgtcttgtcttttcaccgtggtcgtattatagaattttgaaactaaagatatagatagaatagcactccttttcttatgtagtcattgtttgttttttatatcgattaatctttcattttcccaaaatgtactataactaaagaaagataacttgtttacattaccaacaataggaatgagactatttgtaactaacatgttaggtctttatctgagaaaattctgactttgacctctttagttctaccggttgctaaaagaaaattaattgacctacatagtttttgttttagaaacaaaaaattcttttaacctttagcaaaacaaaattccattgtgttgttngtaatggagtg

SEQ ID NO: 39151 - DNA, 538 bp, Arabidopsis thaliana columbia
  unsure (1)..(538): unsure at all n locations
nnnnnnnnnnnnnnnnnnnnnnnctaaagattttgtcgctgatggcgaaggagaagaaaattcaggaaatggataaaggagttatttagaaatgagatatttttgaaggaaattttttggagaagatggtgcatccgggaggatgactcactgacgttcgcccttcggcgcgttgctggcgcaacgttatccttcctggtgcctgcggttaataccgctatctcttcgataccttcattgctgaaggttacggagaatatggtgcatccgggaggattcgaacctccgaccgctcggttcgtagccgagtactctatccagctgaactacggatgcatcgggaaaacttattctactgctgatattgataccgctactaaagccatatcaattaagagatggtgcatccgggaggattactcgccttgcggctcgcccttcgggcagttgctaaagcaacgttatcatccctagtgcctgcggttaattcagctacctcttcgataccttcattgctgaagatttcggagaatatggt

SEQ ID NO: 39152 - DNA, 516 bp, Arabidopsis thaliana columbia
caactataagctcggataaaaatggaaattaggtaccaaaatggaatgctgtcgtttccaaaaataggtgattccgtatactgttttttacaaggcttctagaaggcaaaaaagatgcgaattaggttacgtatgcaaatgaaatgaatataggtagaagagtcatagagaagatctttttataattgcgtttctacggaaacttcatagtccagtggtccagcattcttatttatgtcttcatccttttgtatttattgactctgcttcatcatttaaaacctttgtctttaacccaaacagatgatgatgacattttccattgactattattatttgtgcatgtcaaaaaaaaaaaaaaaaaagacttcatgtcgaccaagcccagtcagttcaccagttacggccaggcccatttcgattttgtatcataagatacacatcgttgttagatgatgatgatactattgacaaaaacaaaaacattatcataaaacaaatatcttaccgagcaga

SEQ ID NO: 39153 - DNA, 707 bp, Arabidopsis thaliana columbia
gtatggttaaagaagaattcgaaaatgcaatgaataaacaagaacaaaagaataaaaatacgtagaagtctcttcggtcccgtggttgaccaagagttcattaatatttttacactaggtctggagtttgatttccagagcatgcaattttttataaattaatgatacaaaacttatagaaagtctagagtaccggatgcagagccgttcgtggtagtcttaaatgtcgaaagaggatgttcatcgcggggatgtcgcacatgcagaaccgtctgttgaagatctgagtgtaggggatagagctgctatggaatcattgttcgtggaacctgtttctcataatttgttgtagatagtttgtgtattcccaaccacaagtccaaaagttgaccataattaaatggaaatgggcagtccatggttttcagacccaaataacaaccttaggcccggtaacggggaaccaaacccaagattgtaaagaagaccaacaaaattctcctaatgggccagaagcgattttattctactctataagttttctactcttttgtttgagattatctggtattgtagttagttacttgatttcatattttacactttacagttttagctagatctagcatatagttagtggattgtgcagtctatttgcttcgttgcatttacaatttgttggtgggttgatttataattagattggt

SEQ ID NO: 39154 - DNA, 581 bp, Arabidopsis thaliana columbia
cccatcgttgcagagttggtgagatgacatgttgtttgacgttatggtgatcgatcatctgtaaaggagaagatgagttgggcacagccacaagagaggagaagatcatatcgtaatcatggaaaaagagcgagagtgataaagaaagaggaggtaagaggaagaagaagatcacggagatggaggccaaggagtcgtcacggaggagaagagatcatcacggtcaagtgttaggagagcacaagttggattatgattgtgagtaaagcttagaggaggatgatatgagcagattggagctttgcacagagcaatagcatcaaagaagaaggaaaagaggaaggaggaagaacagttccaagatagggttttgtaaggatcattcccgttgcaccatagagaatcagttgttaaataagacatctctaaacatatcacgttgccatgaagccataccaactgacagagtttcaatcggtattatattcgagaagatatgagtatttctttatgggcaagtaactgcagaagttgtccaaatctatttccacgtatacacacgaacaatgtgtgactactgg

SEQ ID NO: 39155 - DNA, 569 bp, Arabidopsis thaliana columbia
tatgggtacaattaagttaattttagtattgacttatttggtaattgatgctaggaaagctgcctaggtgttttgagttccatacagggtagtttttttttttttttttataattttgtctacatattattagtttattacgataattgtattcaattattttaatttattgcaatcacagaaaattataatagaatgcattaaaaacaaaattgaacttttgctttataatattgaatacctttgtaaacgctgttagaaaactccattgtaattttgtacatatgtcaaaacaaacaaaacatgattttatgaataaaccgtagttacttttgaactaatttttaaacatatcaaaagctataataattgaaggtttcaggtatgtgtcatacctcttgatgtcggaaagtttggtcattcgtctggctctagaaggcttgagagttcgatgttattgattgagtcatttaatagtttcgatcttttattgtcaagacaaccaatgtggtagtctattcatctaacgcttgtaatttatcccatgtgagtatgtgactttgtttgat

SEQ ID NO: 39156 - DNA, 512 bp, Arabidopsis thaliana columbia
catcactaattttaaaactgtttcaagtcattaccaatgaatcaacaaaaatggtcaaaacagatgaacaaagaattgattatttgtaatatgctatcaacaatctgacatataccttttcaaactcagtgagaaactatgacatgatctatgttatgagtgtagtcctctgcttgaaatttctactccacacttgctgttagcaccaactgaaaggataaaaggctaatgagtaacacatgagtacagtcactaacagataaaagattgaactataattgttgaattccacacttgactcttctttatatgtgtcctagatttggttcagctatatgatcatttctatttttggatttggctgaattcaacaaagcttggtggaatttttgagtttaatatgtctgtctctttgttcttggattgatatctattcagtatgtcctatatttacttacacaccttcaggccatgggtagagctgcaacttcctttgcaaagttagctgacac

SEQ ID NO: 39157 - DNA, 466 bp, Arabidopsis thaliana columbia
catatttcttggctttgtattaacaatacacctagccagattcattcgagcatcagatgagtagactatttgagatagcttcttcaacgatcgtagccaatactacttttgatgctctcaaacttctccgatcagttgaggtaacttgacaagttcaataacatcaatttcttgagatttgtttcttgaacttgttcttgtctttgtgtcttttgcagctgtttccttgtcaggttccagacattactctcggtgatccgttgatcttgtctggaagatacaaaggagagttcccagatgaagttgaacttagaggcacactggctgatatgagctgtttcacaatagagttaacagtgcagaaggctaaagacattcctctagacaaggtttacttaattctgccttaaatgtaagaaatgcaacaaagctccttttgctaacattcaaaaaacaggttcttgcg

SEQ ID NO: 39158 - DNA, 264 bp, Arabidopsis thaliana columbia
ttatttgaagtaaatggtgatgactgtatgttgttggttgggaaacgagttcggcttgagctgaagctttgcaggagctttcatgactcatgaattcaggtcctggttgaaggagaactaagttagagcttatgagcatatggttccagtaaagatcgtctaataagtgaaaagaaaggagtcttcatcttcactaggccaaggtgagggttgtatttgcgaacgatggtatcattttctatgttgatacttcttgaagcatga

SEQ ID NO: 39159 - DNA, 606 bp, Arabidopsis thaliana columbia
ttccggtgaaaaatcatggaaactttcttcctctgcctcctcatggtcttgtaaaacgcatcgatctgaatcatttgttgaagaattgttgtgatcggaattgctcccgtcgtggtggttgttgttgttgttgttcttcttctcctcctctctggaacgatctagaagatgacgaaactcttcgtcgagaagagaaacagcacggtgttgaaccgaactcgcccggtttaaccaagaagaaaccggtgttgaatctaatttaagctctctcaatctcataaccgatttcgaaatccggttaacggcgtcgatgaatacagagtcctctgtttcgtcccgcccaagcccggaagattccatttttgacaccaatgaatccaccgcctccgggaatgactccaccgctggtgagatctctcctaacggatctttctcggaagaaagtgtttgaatgaaatcgacgacggcttccatcacctcgacgaggctatgttcggaggattccgattgtgattccggcgtcgatgaatgcagttcatcggaatgttgtttatctcgtgatctcagatttgtgacatgatttccgatgatcatttgcgtgatggt

SEQ ID NO: 39160 - DNA, 2150 bp, Arabidopsis thaliana columbia
actaaaaaatgagacttaaaatacatagatgattcaattcttgagagaaaaatgaattttgccatgataacgtaattaaactgaaacagttatgtaatacttactagtattgttctgcaattatggtttggtcccaaaaaaataacaacataactctcctgtctctttcatgttaatatttaatgttctgttttggacatgtcctctttgtgtggaatttaccatgaaaaatcaggaattgggttgaccctacgaaatgaagactctttcattgagcacaaacaccaaaatctagacatttttttgtttgttgttttggcgtttctttaagttgaactggtgaaaagaaaataattacgaaaccttttagaattaaaaagaagacagaacccgactaaacacttttaaaagtccaaaagagctggatcggttccatatgctttttgcccagttaattctttttctatctgacatctctcaaaaatttagcttagtaaaaccattataccattccaaaatcaaagttatgtagctaatacatcaaatcctcatcacattctaacagacaacgacaacaacaacaacaacagaaacataactgattaaggatttggatggaacagcaattttgatgtaataaggatttagttgtttctttaagaaacatttgaatagatgaaagatacatataatgctcaatatggctgcttctctggtccaccatcatggtatatagttattaaaccaaagacaaatgaaacattttcataatgccagaccaaaccaaaccgaaaaatacatgagagaaaaaaagtcaaaacagcatcaaacatctgttgggcatttcatcgaacactttgaaggcatgctaccaagaaataagctaaacagattcttcattgatctgaataagattttcttcttcttgtctcttctgcatatccttctcgtattgattcaacgcttcctccatcctcatctgcgtaaacccaacagtctaaggtcgagcacaagctttctcataggaagacagagagaagaaacagaccttgtagctaacttcgatgcgatgcattacgtagaatccgagggccccgccgagaagtgttccagctatgatccgtgcgtaaccccatgtcattgagctcaacgccattaatttcctcactttctcttgtctcttcttccttcgattccaactttacagctctcaatctctttagaattccttttcattttaccggaaccaagattagaaccgtaccaattggttcaattctttctttttggtacatttaaaccaagcttatgtccgcttcggtttagatccagaatcaagtaaactggttctctcactttaaattacgttcgaagaagtcgatttaatatcctagtgacccaatacgcacacaagattgaagcttctgatcgtctcaatttttatttatttatcgagaagtcggtttgatatagaaccatgatcaggtaatttcggtacgcttatacatttaataaaaacacatttataacggttcggttcaaagaaaactaagctggcactagatgcctttaaccgtccggttcaaagacaaattcagaaacaagagccaagtgatcgcttcccaattcctgcaaaccaaagacgaataaggctttaagcatcaatcatagaaatgacctcaccaaatctaaactgtttgatagaaagacatacttgacaaggaaggcctttggttttgcatagaacatcaataggaagtgtgtcaagaactcttgcaggtaaaagaccatcagagtaccttaaccagaccacacatgtatttctaattagttacttcatcagccaaatattaaatttgtccatttgagttttggttgtgtttagaatgttttaccagagataatcaaccgttccgagaaatttcgagtgatatgaggttgctagaggttcaccaacagagtccctggtatttgctgagccctgttgtgtaccatgttcatgagcaaatttaaggtcttgtcatatatagacagggacattaaagctttgtttgttaccttaactgaggcgtatgagctattgagtttcagaggatgcgcagcccagtacgagttctcatgtctgtttgcgacgacggatctcttctttt

SEQ ID NO: 39161 - DNA, 506 bp, Arabidopsis thaliana columbia
catcatattcttattctcttttttattaatttatttattagatgcatgagtaatacatgtacttaccaaaaaatctatttttcaatgtatctaatcattaatcaaaattttgaaaatcagtattcatcagtatttttctttttaatcgtaatatactttcctaatttcctcattatgtaatcattagttcctgatttgttttttttagatatgatttatagtttttgagaaactagttgataatttgatgaattataaatatgttacttgtctgaaaatacaatctttcaccaaaagatttagtttcaattgtagtaagtgcgtagtgcttagttattgaaaacctatgggcgaatacatagtggtaaatatcatcaatttgctaacacacatttttccgccaactggtaactacccatgtacgcatataaatatagaagcatgagttagttccaaacaacaaaactaaaacaagagaaaaatgctttcaaagatgaagctggtgg

SEQ ID NO: 39162 - DNA, 135 bp, Arabidopsis thaliana columbia
tgcacaactacgtggaccataagctaaccatttaagtgtttcttcatgtctgtttgaatcaagaggtatctaacaaatttaaaaagaaaatgtcagacacctatatgcttactgataaagtatagtgttcaagtg

SEQ ID NO: 39163 - DNA, 507 bp, Arabidopsis thaliana columbia
gtcttccaattgaactctctgcactcttaatcgttttactaaaacttgtaagcaatgacataagttgctggaagaacttgcatcatggactaaaacaagacaatcagccagccacgaacttacttggaagtttccatttactaatgtcatgataatgtatattaaataggaccttttttctatcgtaatgtcagtaacgctgggtcttttttacatcatttcatttgtattccgttgaggatttctcagcttaaagcccacaaactgtagcttaaaaaacatgagaggtgaagttcaaaaaccaaaaacagattttgttgtaagtttttgttgttttataaattgtttcatacatgtcatacactgttatgcttatttcaggtgtatcacaatggagctctaaaagtttgtgttgtgttctcatatcggactcgtatagtgtcgggtagatgtcatacacctttatgcttattccaggtatgttgcaatggagctcagaagtggttg

SEQ ID NO: 39164 - DNA, 405 bp, Arabidopsis thaliana columbia
ggtatgtgcaaacatgtttaatcttgttccaatgtgtatgcatttggtcgaaagcaaatccgttcatgtttctagtcatcgaagtccttacaaagtagaatcaaattagctgagtgtgtctgtatttatcttgttgattgattacaggcagcagaagagtgaagacaacgaggaagcttggaggtaaaaaaccaaacattgatagagttacattacgaaatggtaattgatcttgcaggacaaggcttttgagataacgccattgttaaaaaaaaacttttgcttctcagtgtggttttgtacactgatgtcaaaattgttaatgacccactcatttggtatgtcttgaaaaatcttatgttcttttacttgagaaataattcctccggcttgatttgtgtgcct

SEQ ID NO: 39165 - DNA, 407 bp, Arabidopsis thaliana columbia
ggtagaaagcaacctgttagacgtcaggaagcgaccgaaaaaatatcactgacgatcagaaagcagacaaaaccatgtgcacagttacaatctccgtagggttcgaactcaggtcagagaaaacgcgtaaccgcaatactgcgattgactcaaccaggtaaaagccaaatccgctgcagtcgaatggggaatgtcgatactcgacttggacatagctcttaaaaagtttgtgacaatttacaacgatatgacaggtcgaaaatgtatccgcccaatccctatacgagtatggttctacggcttcactctctccctcctttacagaacgaatagtggctcgcacaaggactaattgcgaatctacccctttcagaggtacacgtcaacgggtagcactagcccaatcg

SEQ ID NO: 39166 - DNA, 704 bp, Arabidopsis thaliana columbia
ctaaaaatacagactctactgtgtcaatgccggaatctagctcaagcttctcgtctctctttcttctactcatcatcttcttcctccttttactctctccatcgctttcttctcccgaatctgaagttcatgttttggatcgtgagctgttagagatccagacgaatccgaagccgggcaagactaataggaaactcaagtgctgcgagatgcggacgagatctcagtgttcggctttccctagatgcaggtggtgtcgtagtgaagctcttgatgacttgtgcttcagtaaagctgaagccttgcgacttccaagtcaagtcttcctttgtgaattatgaattaacaggtttgatcttaaatagcttgttgtagttcttgcggagtttcgatggagatagagagaaagttgttttctttctaatttttttggcttgtattgaatcgcttgttccgttttgtaatctctgtttggtgttattgttgtaattgtttttgaggtgtcacaagttttgaattgtactggatctttttgctcatatctattgaaaggtgcttcattttgtgtttctttcttgttatgttttgattttgagctattcactttagctaccatgctctcaaatgaatcgatcatactgtatgattcttgacttgcaacattgttagagagattacgtttctgttaagtaggagatctctag

SEQ ID NO: 39167 - DNA, 972 bp, Arabidopsis thaliana columbia
ttcatgacatatcgaaatcgaaactaacttagcaacggtaacgaagacctcctccgtcctgggaaattggatgcctaactcaggaatggggagtggaatcagaattggagcctccacgacggagctcttcgatcaaacctccgagctcttttctcgctgattctctaccgaacatgaatccatacctggaaattgagtaaggcagcttaaaccctaaagatgagacatggaaagagaagaagacgagaattgaagaagaagagcttgaaagacgggaacaatcactcaccagcatgagacggcggagaatacgccggagattgccactgtttggatcaacgagaacgatttttgcatctttctgttaaagttccgtgaattttccagtccattttctcctcaaggattaaaagacttgagcgggagagaatcacttgatgggcctcggccaatattttagcccagcccactttaatcaaacacaaaggctggctgctaggatttgctgaaagggtttgaagaaccataagcacagttacctagatgatctgtaattcgtctctacttggaccttgtcacagaccagatatctttactctttcccttgtcggttttgtcaagttgatttgaatctggaattctcatgtcattctctaatttctatccatagaaatctagtaaaacaaaggtgttattttcaacacgttgtaaaagtaaaacaatgtttcgttacttctcttacatgggttacgcttgttacaaagatcttttgttaacacacattgcttactcttcgacaacatatgtacagttttaaaccagcctgctcataaaacaagtgggagcgaagataaagtaaacctgtaatacttgctccatagccagatctcttacttactgcttatgagatccgacattggtccaagtggttcccttcatgaaaatctcacggagattgcgaatctgacgctg

SEQ ID NO: 39168 - DNA, 439 bp, Arabidopsis thaliana columbia
cgttattggatcaaagttgaaccattggctagtgcaagtgaacattaagcaaattagaagatttatagcgtttgtgtttgcactgcacaaggattcatccctttcatcggttatttctatgtgacatatgtctttgtgatttgcagaaagtcaaggatgaggtacagagaaggaagaagcagtgtaacatatctagcagccataacaacgatcacaacgagttccatgagcgtctaagtccagctcggttttcatgcgtagactctcaacttcaaccaaagttattggtcaatggtcactcttgtgatgatcggtccctgtgaatacgaatcttgaatcaccttttttttactaacaaagctcttctgagttgtgtaagcttgcttcaacacgttgatgaattttggagattttaatgtataaaacgcgttgaccagcg

SEQ ID NO: 39169 - DNA, 579 bp, Arabidopsis thaliana columbia
  unsure (1)..(579): unsure at all n locations
tttcttagcactttttttttatggtttcattgaccactggattgttataaaccatgcgcttgtggtgttgatgtttcatttacttgcaataattcaagggaaaatgagcagctttccaagtatggagatactaagtccgcaagaggtatcatgcttggggaacttaaaaaactgattgaagcaaatcctctcttccgagacaaacttcaatttcccagtttgaagaattctagattgagaaccttaataaatcaaaggtacaagctttgtttttttaacttttgctcccgtttttcttttggtggaacaactaactgaacgttgcttctgctgaatcatagtttgaactggcaacatcagctttgcaagaatcctaggcctaacccggatataaaaacactatttgttgaccatacgtgtgggcatccaatggtgcacacactccttcccctacaactaatcatttaatgggttcagtcctaaagttggaggctcccaccattaggtgncacggtgtaagttctctaagattcagcttctgttggattagttttacacatgaatttactttgctagttt

SEQ ID NO: 39170 - DNA, 562 bp, Arabidopsis thaliana columbia
taatgtcaaatttcaaaatatgtaaataaatatacattcgagaaagaaattcacaaactgtaaacaaaatttttgtaaaataataagacttgattggtaattgtgcgtaaaggtaaatatagagttacataccctatcaaacaatcagcatcaataaccatacatgtaaaaagctaagagcaaatcattacctttcttcattctgattgttctttttctatttctcaaaaaaaaaaaaaaaaaaaaatcaccaaaaaatgaaattaggaatttgacgagcttaggagtggacacaatcagagggtaagaggatcaacttccgagtttcgctccttcatcggactccaatcttctgcctctgcaataaacaacagagagataagtaagacattaccatttaccacaaacaaacaatggtttctattttgctgctctctttgaatataaatggccgtagtttcttcagagttttggattatatatgtatgtaagaccgtaagagaaaagaaaaggaacatacttggcttttcagagatgaccataagccgccggttgtaatatg

SEQ ID NO: 39171 - DNA, 468 bp, Arabidopsis thaliana columbia
tccccatgttttattatacccttaaaatagtgaaacactcataaacgcataatctaacaactttccattaaactagtaccacttgcctaaaaatcgtctaaaagacacttcattgctaagcaaattagttgtcactacaaaatgacaatatacaaacacttaacgcgcaaatgaaaaagataatcgtacaccaaaatcaacccttattatattcctataaaaagtccaaatattagcccccagatgaaacgtcacgaagtaaccaaagtactaatcacttactaatgactcaaaaatgtacacggaaatcaagccgacaatctcgcatccgcttcgatcatcgccgctcgcgcggttgcttccccctaaggcggaacgtcccctaccgatgcattttgacatccacagcttcggcagatcgcttagccccgttcatcttcggcgcaagagccgtcgatcagtgagcta

SEQ ID NO: 39172 - DNA, 477 bp, Arabidopsis thaliana columbia
tagtaacgggcgccagtgtgctctaaagattcggagagccttcagagagttcagcaacaatgtttgttgaaaatgcagacctgaagacgatttggagatctcttcgcgccaccactcctcatcaaacggtgcaagtcccttaatatattttcccatctctgtgagcgtgagacccttacgaccagcgcggataccggaagcaccagggaacatcgccgtcaaatcaataccctgggtctcaaacttatcaaagagcttcgagagcacccaatcctttttgttgagctcctcgatgagggatcgctggcgcgcttcctgttcagcctcggcgttgatcaaggggagtagtaggtgtctcgtcattgaagactgagcttccttggaaagaaacactttccagacaagaggctcaaggggggcagggagtttagagatcactctgagctctaaagtatgatctcttcctcgtgttctggg

SEQ ID NO: 39173 - DNA, 678 bp, Arabidopsis thaliana columbia
atatatatatagtttgtagtttcatttgtatcaaatatatcattcaacatcttaactacaatagctaatgtagctcattgccaccaaaggcgtgttccctattttgacaaggattgatgagaatagagagatgaagcaactaaagacaattgaatcttatcaatttggtttgttttgtgacacccgattcgctgactttgtgcacaaggcatgccatgtgtgcctctcggaaaccttaccaataagcagtgcttttgtgtactattactcctgagaaaagaaacatgcatccatgacgacataattaaataattttactcagtgaaaataatccattttacccacatgtttcaaaacatacttctagccctaccatcccgcatcacaaatcctcataagggatatattagcatgcaacaaagaaatgtagcaacctagtaattaaatagtaattcattcattctagaattatgcattttctagcaaccatgcatgcctacttgatgctcattgattcatgctatgaaaaaattactcctttgacgaagggagacaacaatgacgacatggcctagtcattgcttggtttgttgaaaactcagaaatcacatttcacataaggttgcattgaaataaagacaatagaaattgacaaagaaaactagctagaagcacaca

SEQ ID NO: 39174 - DNA, 210 bp, Arabidopsis thaliana columbia
ccgttatgttgggtgcagtggaataacatcaattgaatatgaacaatggagttggggaaggtggaagtcagcaaagagaattacatggtaagagaaagcttttccgaggcaatgatttcgctttttccatagcgagaatggcagtggctcagatatgcgagagtgttgaggttacccgtagcaggaatcacagacacgtgagggagtgag

SEQ ID NO: 39175 - DNA, 493 bp, Arabidopsis thaliana columbia
atcattatggatgatcccaataatcaaacgaagctttccgtatcactaacgcaataattaaggatttttcattttaataaaattcgtttttttttcctctaaaaaaggggaacatatatgcttcggagaaagacctcaccgaatattgaaatcaattaatcaatcaataactcccactaccttgtaacaaatgttcaaatacaatttgtgttatttaatctgattaaaagtgtaaagcactttacttttggttaagaaccaaccagaggaggacaaaaacaatctaactgtgacgctttctttacttttataccatcataaggttatatatcaattcaaactaagcttattataaataatcatcccatcaaaaaaaaaaaaaaaaagagtcaagcactagagaaacaaaaagattaaaaaaaaaaaaaaaaaagtgaagtaagcaaagagaccgacactatgttttaactagaacgtatgtactcttcaaagt

SEQ ID NO: 39176 - DNA, 117 bp, Arabidopsis thaliana columbia
taaataaataaatgaataaaataataacaaaaagcaaactatggttctatagatatctattttgacagtaaaataaaacacaagttgatgaacttataaacagatagcaaagtgaaa

SEQ ID NO: 39177 - DNA, 859 bp, Arabidopsis thaliana columbia
taatgtcaatcgtcagatccaatttgtaagagaagggttgagaattaccggcaccggtggcgccggagcaaggtacggctttatcgacaacagcaacagatagatccgacccggtaaggaattggcgggctatggttaacccaatgatcccaccacctacaacaacaacatcgaaggagctacgagaagctgtgacacgtagtgacagagaagctccatgttgggttctcttggtggagctccgagatgaaaatgggtagctcagtggtgttaaaaaggtgggtgattgaaggaaaatggaaaccattggagaagaaggtttttggtatcgtaaaggtttgaactttcaaaagtcaacgtaagaattagcaaagtattacacttcagttttattatgtgccaattactatctcagtgcttcttcacatttccacctactaatcatcttcttgtaatatggagttaatcatccaagtaggaacatgaatccaagttcctcagacatgaatctaatatgatatccgatcccggtttttttcggatatccgatccgtttctacaagactcaggtctgtctgtgccttggcagtagaatcaagaatcttcttagtattacaaagacgattgatgtcttctcaccaagttctattacaaaatcaagccttacagcataacattatattgatggtagattaaacactacgcataaacaacaaacacctcatctgtgatcttcaagcttctactgtgttataccaacactatgatcttctgaaatgatgggagtggcattgcagttttgctacaatcaggcccgaaaagctcagaatcgttatcttgctaaactacttactaagag

SEQ ID NO: 39178 - DNA, 489 bp, Arabidopsis thaliana columbia
gagggacgacgtgatgggagttgtttgctcactgacgacattattccgtgtagatctcagaggagtcgttgcacacgttcttcatctagcttctttaatcactgaactttacttaattagtttacaaaatctactgatgacgaatttgattttagaacgttgtaccaatagctttgtagacgtaaagaaataaaaagctaatacaataatgctaaagttgacaatgatgatgtgaagagttcttctctttttctggacaaataattaagaagacaagtcaaaaaccagctatgcgaatctggtgatattaacccaccacatccattggatagtttccaacatttgcttcatttattatatacaaaataaaatttggaaaaatgattaattatcacataaataaaaatcccaaaaaccattctttaatggtgtggataaaacaagaaataaacccatattggaaagtcgagctgtttaacttttaaagtg

SEQ ID NO: 39179 - DNA, 559 bp, Arabidopsis thaliana columbia
ttttcatttcatgctttttccaaaattataaacagaggtaaaggtactaaagtcataattctacatttcatgattttgttattaaagattttgatgaatttctacttatgcaaaatattaagatcacaacatccattactacatatactataaaaagacaattatatattaagataaaaaaaaatctatattatgacccaattttatttgttgataactatatatatatattaacccataatattttggagtcaatattactgagctggcctgttaataaaaagcattagttagggtttattactcaatccacacacttgaactggttgcttctttctcaagaaactgatttaggtttataccaattgtcctccattcccctatttctcttgttatattccttcagcttgttaagtcgatttgataactggacttagtaaacctaatttaaggactctaactattttcatccgttgaaaaaaagaactctttgtaaacctaagaataacggctaacctctaacgataatatatagtctctacttctacaatatttagca

SEQ ID NO: 39180 - DNA, 468 bp, Arabidopsis thaliana columbia
tgaacaaaaacaagaatattgttgtttaaaatttccatgaaatgattaagcaatacatatacaccacagaaaacaaactcagcttcttcttagctaagcaggcttaaggggcggctggacttatctataataaaaatttgagtatctaaacgaataaattggagatattcttttagtgttatcctaattatagttataaaacaattataaccttagaaagtttcttggaaatttaatggtaatttcattaccgtaaatagtttttctttcttcttcacgttttttttttttttttgttaaacttcttttctttctctataaaaactaaaaagcaaacttctccttttgggtacacttgccaaatgctctcaggcccaaattggcccattaaggggggaaaaccaaaccattaaaatattaaaaatcctgaacacgatctttaaaaaattatcccggtttaagaaaaag

SEQ ID NO: 39181 - DNA, 587 bp, Arabidopsis thaliana columbia
ctctgggtacaaataaaacaaaactaaatgacattatagttgcttttttcttgtcgagcaaaaagtttcaaaagatgtatccattgtttctttgactaacgcgacctattgatagccaatattaccatttaggaatgaaaatgaatcgaaagtactcgtttatatgcgaaactactactactattcaaagaaactctacgttactttttcttgacacacgacaataattggtgatgaataaagctagaaaagctgatagagagaaaatacataagtagagagtaatcaaagaaaggacaattgacgaaacaagaacagacaatgtggggaaaatgggatagagtgtaatggaccagccccctattaatgttcgaccccattcttattattttccttcttatccccgactttcatttttcttcttgtctatctatgttcatatcgtgcgctaaccccaaattaatcttcttcccttgaaacatgttttaaataacggcacagatagtaagcgtagattcataaatacccccaagtaaacaacagaaagcatcattagatacacggtggagacgagatgacttgtgtga

SEQ ID NO: 39182 - DNA, 566 bp, Arabidopsis thaliana columbia
tcgtacatagtggttttagttttagccaatccatcagtaccatgaggtgtactagaatcattatcttcccctctaatattttcagctttatcaggaaacttatcagaagacttggaccgagcatgacgagaagtccaaagtcgaaatactcgagtcttcttgtggctttctgcctgtaaatgcatcccaactctttgacatatactacaaagccgagcatagatcttcttcttatcaatcccaagtctttcacataactataaaaataataatcagtcatgactttatgcatactaaaaatattactattagccaaatctatcaaatgaatacctccataacagctaagcctttagatccttgagcatcaaccatatcataaatttgattatctattgacagctccaaagtctgttctgttttttgaacactccttccgaattttatgagttgctttttcctagaatagttaacatcttctgctgaaaatctttttaacaaacggagacatctttcaacctacaaaaaaaacaatccacattatatccaccaaaacaggacagaaa

SEQ ID NO: 39183 - DNA, 673 bp, Arabidopsis thaliana columbia
tgtaaaaggccgtattttagcggttcattattaatgttatcattcaacaaaccaaccttataataacacatcaacattatgttttaataataaatgaatcacatgcggatcttcgcaaatcgcaatgaagagaaaataagaaatgcaccttacaaagaagaagcataaaatgaggtgtcttttggtgcgttttatttcagaaatacattttaaaaaaacaacaacttaactaaaccatttatatccaaaacaaaaaaaattgatatgttaaaaacattttttaaaatttgataaaatattatactcatatctcattattttctcaccattcaagcattattcttgatctctaattcaacactaaccgcatttgttctgactgtgttttcttgcacatataatacttaaactgtatcgccttattcaattttatgtgtcctacattacccgatttgctgtcttcattcaaaatcttaatttattcatgaaaaaaataaccaaaaacatacattaaacttgtaaatgaaatgataataaaatcaacgtgaatcgcatgtgtaaaattttaacatttattgattctcaatcctatacaaaccaaaattgatttagagaattccatgaatggagtagctgattgtaatcaagaagctgatgaaaagagtgtaagtgt

SEQ ID NO: 39184 - DNA, 551 bp, Arabidopsis thaliana columbia
gaatatgcacaatttcagcattatagtttggtaggcaaaatggagtgagaatagagtttcatagtatatactaaggttcttaattgtgcaaatagttgatacaagtcacatgggccaagtttgtaaatcttaaatcgaaatatgccttcttctttttttgcatgaaaatgctagtaatttataagtgtgtttttcaataagagatgctaaataccaaaattaacctagttttcagtgagcgcttgcattattgtggcctactttactctttagtccattcaataatcaatgtacttacataaaaatgttaaatcccataatcaaccaaaaggaccaaggcatttaagcgaacccttagagcatcctcaatggtagtttttaagcttaagtctcttaaacaaaattgaagtgtaagtatagataaataatatttttaattatggggttcttaaatttggtgaaccaagacgaatatcgtcttactaagagacaatttgcctagatttcatcaaagttaagagacttatgaatatttaaatcatataaatttt

SEQ ID NO: 39185 - DNA, 620 bp, Arabidopsis thaliana columbia
tcaggttttattggttcaattccgtatcgtttcttatgtctgctttaatgtaggctgttcttcgtcaatgggttatcagaaactgcgaattgaactagaaagttttggtcttttgtaaattattaggagcttgtcaattaggggcatattagttttctcatggatttgcttattgatagcttctgaaagagtatgatgtcttcttgggatgctgatttctccatgagttattgttaaagaagttattttatgcaatgttactctccatgaatttcccaatattagaccacttgataaaagtttgttatctttcttaggcttaagcagtatggatcacattttcaataaaacttgtgatcctcttcttcgaatgcactttcagtcgtgatatttgcagcttcttagctctctgcctgatttctttggacgagtgtctccttctataatcatgataattcttttatctgctacctgctttgaaagcagcttaggactctggtcgagatataatcacaagtgtccaacgatagtcaatttatagttaaaataagacttgatcccttctttttacgtcttcgagaagatatattatattttaagtaacaactaacaatattata

SEQ ID NO: 39186 - DNA, 418 bp, Arabidopsis thaliana columbia
tcgtaatcatggtcatctttggtttaatattttatcaaaatccataaattgaacatacgagttttattcagtttgtcgctttgaagtttggatgattcaatcaaaacacttaagtagagattaaaactcttaaaactccatctaaatcaaagattaacgacccttaaatgatgtgactctactttttgtcaacttcaaagcacccaccgaaactttccatcattttgcaacttacaaagactagcgtgtggtttttacgattagaaaacggcgtgtagtttatatttataattcaaacacggaaaccatttcacgagctgcactccaaaagtacacgcgtcatcgttaaccaatcagaaacgtcaagtgagatcatcagtccagtgattagcttccacgtggaacatcgacgtatcta

SEQ ID NO: 39187 - DNA, 571 bp, Arabidopsis thaliana columbia
aatctcggtttgattcggttatggttaaccgaagtgaatataaaacttgccgtttagctttttacttttgaccgctcggttatttattgcctgggactttgaaccgcagtgttcggttcaggtcggggtagtcggttcttcgggtaattttgattaaggggaaaggttaccgaatataccaaaccaataatttggttcggttcggttcagagatcgatcgtagaggaaatgatgatactcagagaaacagaagctgaccgcagtgtagtaaagaaaaaaaaactagacggcatgaagttggctaaccattttcatattaaaatagttatcatcagatttaaatcaattagtttaaacaatcatgaaattcatgacaaactatttgcaaataaggcgagagattcgctatatacagtgcaatgccggagaatgaagctctacattcatcaaaataaggctaactgcttcctatgctttttgctttcgtcgttgttttcggttcatgtctagaattgtgattgagatataggtgatgttgcacacttgatctatcggtaccgcgaatgttgta

SEQ ID NO: 39188 - DNA, 476 bp, Arabidopsis thaliana columbia
ttgaagaaatccgatgtcagtggtgtgaccttcgatggctcctacaatggcggctaccacaacactagctacattcaaaattaatgacatttcgtgatcttataaaattgtttaacatggaatgtggaatgaaaacaatgcaatgtgatatgttaaaatgaaacataccaaaaagaaagtatatttttctaagaatttggatgaagatattgttgacaaaaagatatacttttcttaaagaatgagaatttaagggtagagaatccatacataagataagttattaaattcaattaaggaatgcatagacaacaagtaattcaggttaaaggaaaaaactaagaaaatggaaaagaagatccacatcagactcttatggtaagtagaagttgcttgacacatcgcatccattcaagaatttctctttaactttttgttaatatgttttagttcttttatcaacactcatgtcaagt

SEQ ID NO: 39189 - DNA, 480 bp, Arabidopsis thaliana columbia
gatgcaaactaatacaaatttctatcaatttgattaaagtgacgctaaacatgttaatttatacatcacttattataattgatgtttaattatttattttgtgtcatttgcttataagtaatttaaacttgtaccatttatacttgtgatactatttaattgatgtaatctatccttttttttgtagtgatggatcaatatttatttgttgtatttgtgtgtgtaggtaagagaagatgtagagtttgttgagctcacaaagagtttcttctatgaccactgcaagacgaacccaaagccggctctttctgaacactccacctacgaagtgcatgaagaagccgaagacgaagaagaagtagaagaagagatgacaatgtcagaggaaatgaggcttggctctcctgatgatgaagatgtttccaatcaaaatctacactctgatcttcatattgaatcaacccatacgttaggtatata

SEQ ID NO: 39190 - DNA, 138 bp, Arabidopsis thaliana columbia
agaggacctagagggtcccctatgttttagatctaagtttttgaatctatctgtaataaaaaaagaaatgtaaaaaagaaaataaaaagcaaccaaatatataacagagcacttaaataatcaaatcatcctctgtat

SEQ ID NO: 39191 - DNA, 775 bp, Arabidopsis thaliana columbia
gactaaacgctagttcattggaaccaaaatcaacaacaataaggcttctgacataaaagaggattccactgtgaaatttttcatttaccagggaattgctcggcagatgcaggtagaacctgaggtaagtcacccatgtcaccgttcaccttgttcatttgcccttgacatgccccaatcaggttctctgacatataacaccggcaaaaacttccgtttttaacctctacctagcaaaagaagcatggcccagatcatgtaagttgtaagatttttcaggtcaatgatgcaaaattttgtaacggttgataagaaaaattagagctgaccaccccctcattcttgcaattcaaaagcaatggtgtaagtcataagcttaatctgggaatatgggaatagtgagattgtgtcaactggggcataccaataacctgttaaacatggttccaagtggctgagcctgtttcaattgcaatggacccaaatttatatcattaggcactgctgaaaagagctagatttagaccaaacttgattagcacaatgcaattgtatgaacgattgtcaatgaagcttcaaaaccctacatttcatcacaggatgttagggaatttgactgcaaccagagaaactcacgtggaagcgtacagttgctacagggtagtgctgaagcaatcttgtctttgttgtcattcatactctgctccgttccgttggagctgagtaactagattcgattttagagggacaacgacagcagccatattgtccatgc

SEQ ID NO: 39192 - DNA, 382 bp, Arabidopsis thaliana columbia
catgcataaagagtatttaattaaagacttacacatgatcttgaatcttgaacatagtatagcaaaatcatatctctgtctacttggctcaagataacggattcaccagtatcaacaacaaaaccaatcaagccttgcaaaacaagacgtgatattgatataatggtgtcaaaatttccacatatttcaaaatgaacaacgaaatcatcttactaatcaagtagttcttgtctagagtatcatccaagacctcaggaaagggtacatttgaccgagtgtgtttaagagcatcttttggtggaattgtgttcaaaatagtcgattcttcaaaaacacatcggtaaatgctgttggtggttcttctatcgtcggtcacatgttt

SEQ ID NO: 39193 - DNA, 332 bp, Arabidopsis thaliana columbia
tattatgggtagctagaaccgcttgatctatatttgttccgctataaccgctcgaaccacatttattctatttgatccgcttaatccgctctgctagatcagttttccccattagaagtcgtagtgtttagattacgtacattatataacacattgtgttaacacttttggaaccacaaacagttcagtaatatttttattattagaagattgttaatatttgtgaatggaaactaatgtgttttgtctcaattttactgacagaccgcttttcttccgctacccattcaaacccgagattactcaagggtaggatgtggataaatggttca

SEQ ID NO: 39194 - DNA, 592 bp, Arabidopsis thaliana columbia
gtttaatcgtctaaatagaagaacgcactaagaaatggccgattattaagaaaaaccgttatgtagatttttctctaagttatacgtagattgcaaaaaatctgatattggtgtcattcacagagttcatgaagttaaatttcactttccttgtgcagctcctctttcagaaaccgaagccgctttaatggagcattaggaagaagccttgaatcattataacacttgtgtttcttcaacaattgttcttgggggaatttgaagcctgtgatcgatctctcggtctcacacaggtgtatcaattatttaccatttaacaaggctttcgtaatttatcttggatttgttggtaatgggactgactcttgatgaatgattcatgatatcactatttgtttgtgttgtgtcaagtgtgtgtgtaaaaagaaactcgagcttaggtagaagcattgctcactaatatttggttttcctaaaagtaccagatttgattattttgttataatttctaagatgtaaaaaaaaactatagaagaagaagagtttgatttttttttccttctttctaaaccacttgcgtttatccaatatt

SEQ ID NO: 39195 - DNA, 985 bp, Arabidopsis thaliana columbia
caaaacaattaaccaattattatttaactaattatttatctattaagaaaaactgctagtttacagagaagaataatctctgcttcttctgcgtttaggtttgggagccggtggacattcaagcggctgcgaaatcctaaactcctctgctttaggcattgcgcactcttcttattcttattcctcatcttctttctctggcttcttctcaaccatcgtcacctgacacttaaccggcgagagaatcttgatcagtttctctccattacagattgtcttcttcgccgtctttgctcattctatgttttcttccttacccttgttattactctgcacctcttttcccgcaaaattcataacttacacgaaatatagaaaacagaaattcaaagtatcaagaagaatagacagggaataaatacatatatctttggatttatcacattaataaaattatattaaagacgatttttttttcataatcaaaaacaaactaggacatggattattattattttctttaatataattagcataattacaaatttcacattgccacactaaaaaaaggctatcaccgttgattaaaaaaaataatctatggcctaaacttcatttcattgagaaaagatcttaatcagtttccaattgaaaatagaaatagagacacaagagagagtttacacccaaaaaaaagagacacaaagagagagatatggtttatagaatagggcaaagagaaagagtgtactacagagatttagctttaaagagtgtagcagaacacaatagtcgttcagaagaagaagtaatcacattttcgaataaccaaagttattatcatactgagtcatgaactcgtcgttgaacttcttgaagctatccatgatctccggcatctcatcttctgctggcaggattgttgcctcagatggacacactgtcaaaatcacaagtggaatgagttcatagaagagacagatga

SEQ ID NO: 39196 - DNA, 577 bp, Arabidopsis thaliana columbia
ttcaagtatgttaacaagggacctgatcgtgtaaccgtctctatagagcctcatcgaaaagaagttgtctccgagcaaaacaatgtaggagaaacaaataatgatatcaaaaccgtcgagggtgttgttcataaaacatacagagaattgtaacacccgtgaaccggaaaatcggttagggtttgtttttaaatcatccggtttaattggttgggttaattggaaatcctaaagtgtgcctataaaagaaggaaactcgaaattagggctttagttagcaacttttcgttttataaaggagaaaaagagagaaaaggaaaaggagcagaatcgttagggtttgggaaaaatcagtttggtcatatcaaatcatggtaaaaggtaacgaaatttagtagaattattcccaagtcgtttatcgttattctccagtttacagaactggatttggattaaaacaatttgagttattcgcagtttagtgagacacgttttctcagacgcgaattaggaccagcggagattgaaattgcgatcgtggtatcggttgtttccgatcgggacaatattttgtggg

SEQ ID NO: 39197 - DNA, 413 bp, Arabidopsis thaliana columbia
caccatctctgatctattgagatctatctggccagatttctcagaacttgctgcacaccacgaaacttgaaaccctgtaaagatttaatcctaggagagttcatcttttagctcttggatgactttggtagtttcttctgttgctgcatgcacttactgatttcacctttctctgctgacatcatatacatcatgcagacacccagtgctgagctgaaagaggaatgatctgaaacacagaagaatgaagcttcaataatggacaatgccaacaggaatatgaagagtcattgttttactgaaagaagtccaacaaggtgcaatcacacctcatagcagttaatcgccataacattgaacccatatataaggcttattagatggagcatttatggggacttcatagatgcagt

SEQ ID NO: 39198 - DNA, 433 bp, Arabidopsis thaliana columbia
gtcaaattaggaagataatgagagaaagtggggtactgaaagaagtcgggtctagctggattgattcaagaacaaaatgtagtagctattaaattttgagttgttggttatgttaacgcaatgtcaaactagtcatgaaatcaatcatgaggctagaatctgagagatgaatcgtgtaaaaagaagaaatagtattacattttttcccttcatgaatcaaagaacataagtttggagtcataacacaaaaaacaaattcttgtctctaagtttagagaagaaacttgcatccctcaatagtaatactcttcatgaatgtatcttgtcaccttgggactgaaagtccatctctatattagtaaacagcaagagaaataaagattaggacagacacagaaaactgatctttacaaagtaagaagaaagacggatg

SEQ ID NO: 39199 - DNA, 538 bp, Arabidopsis thaliana columbia
aaaagaactaatcacattttcacaattgatagatataaatatctcagtttgaccgtttgactaattttttttttgtcatcacctcaaatttgatcactggtttgaattttgaaattagttattgaaaaagtgaaaagattacaaaactatttaccacaaaagataaaagaaaactggttgtacgtaatgtctctgtgtcctgcaaataccaaacgtataaaaacaaaatagtaaatgctgcagttgtgtagcatgaaataacgagggcgagtttctgagatgtgcagtggatgtttttgtcatcttgtatccttttctattcctattcctatgttattctctcgctcctttaaatgttttgcaggtcgtcgttttcacgtatataatattaacttctgctttttctcttttattttctttttaaaataacgttattatccgtttataaaagtttctttactctttatatactcctatttcaactcactagtcacaaagactacaccaaattgttcgttataaattgagtcagttgaca

SEQ ID NO: 39200 - DNA, 489 bp, Arabidopsis thaliana columbia
tactttaacagattcgattagcgcctctcatcaattcaataacgtacctggtagtctcgggaaagagattgacgatcccaaacaaccattgaaacagagacgaagaggatgatgagcaaagcaagacgtcttggtcttcggagataaaacgctgggttgaaatatttccatatcccatgactaccacttacaagtttattcctcgccatctcaattccgacgatcagatctgatctcggaggtgacaaatttttgaaaaaggagaagaagaagaaattgaaaccatgaattaaaaagagaggaagagatcggatcagagtaaagagagggaatgatccggtttaaatgagttggtttgggtttggttggttattggttttggattttggtttacttaaaaggaaaaagtgaaaaacaaaaagtaatttattgttttagaagaggcccaaatttaatctaggacgaagccacagtaaaagcatgcgttgt

SEQ ID NO: 39201 - DNA, 520 bp, Arabidopsis thaliana columbia
agcatttgctatgttcatcatgtttttgagtttgtaaccttgtttaatatgttttatgattactctttatgtatcttgtagatactgaattaagagagataaaaggatgtggtggtactgtttctacgaaaaaatgatgcaaatagacatatccatagtggaaagcatcataaaggaaactagaagaaaaaattaatcgttggatgaagtatgaggcaaagaggatattggatgacacattgaacagtcatcctccatgctttccttacaaccttgatgtctttgcttgttaaaacgaccaatctaagttagtttttcaatacagttttttctgtgaattttagtttagatgtagctttctcaatacaaaaacagatgtttaattcgtcgtaagttgattacaactaaagcaagaccaagatcaatgtaaagaacagagaatggaaggagctttaggcttgtcaccaataacaaaaggattttaaattgatattttataagatgaaggaggagagttgtt

SEQ ID NO: 39202 - DNA, 242 bp, Arabidopsis thaliana columbia
agccggactctgctgtcttagtgagtgtctttatttcttgtcaacattaagggattagtaaacctatccacggaagaagagcttcttcgtcttagtcagtgtctagaagaaaccatttcgtagttactgtctgaatgttctctgtgaataatgtaggatctatcccttgtggatttcagctatgcatgtatcaggaatgtgtacttctctcgtactaatcttctctgtgccatatttcgggt

SEQ ID NO: 39203 - DNA, 462 bp, Arabidopsis thaliana columbia
tcagctattttacagaaagtattttcactatagttgaaacctcttgacattctacaactaataacatcataaaatttaaatgtgattaatctttaaacgcaatttttttggttgacaaatgaggacatagcttctgagacaacaacggcctatctatggagagatggcgttatacggtagggcggtggtccaggagagacatgtgcctatctatgtgagaagattaaggttaggttgaggactttctaaacttaagaaggggtataatagtaagtgatggtctagagtgagatctacactcaaaagtcaacaccgtccaaacttcaacgaatgtgtcggcgtcaacgattctaacgttaattgtatttctagtgaattagtacgttaattatacgtctaactgctagagatctctgcaaacgcgattttagatcgctggtcgcgaaaaaagagaaacgcgta

SEQ ID NO: 39204 - DNA, 604 bp, Arabidopsis thaliana columbia
tgttttgttttaaataatgctattttttttctgtgacttttattttcaaatctgactatttaataatttcatttactacaataattatatgaattatttattgtcgtaatattttttaacggttatcgtatctaaaatagttattcccagaatccatgtaagcttctcgaccggactttgaaccttccccattggacacagccaaaaggaaccgtgtccatcttcggttcctctccctctgaaaacttattcctttcttttcaacttcctagtcttcttacttcacatatcatctctctttgtttagatctcttcttcccacgattacaaaatcctgtccggtgggtttccccgatcggggtcggatctgattcctcggaagcaacgaatctcgaggcttctttttggttttggctttcggggaaaggctggaatcatttctctttacggagattaaacataaagttccttacttcagctgattagcttcattcgtgcttggtctgcccttcttgatctgggtttaaaacaaatttccttttttggcaaattatttctgtgtttggggttcgaattcgatctgctccgggtgtttagtgattga

SEQ ID NO: 39205 - DNA, 295 bp, Arabidopsis thaliana columbia
tttcccttctaacatcctttttaaaaaaattgaatatgattatataaatctaaagaaaaaactaaaaaaaccaagtaagtaaaagcaagtatataaagtatgttgacatttctatctatactgccccccgctgggctgatgtgtatgtgtgagtgtcgctccccgctagtggtggcgcttctgttggcactttcatgccgcgtctttctccccccttgtcgtcgtttttttcgccgcctggctttccctggcccgttccatctgtggtcccccccagatccttccctcgatttcc

SEQ ID NO: 39206 - DNA, 749 bp, Arabidopsis thaliana columbia
ggtaaaactggaagtatacttggtatagcagagttctggaacgagggaaataagacgaagactgccaatgaaaactctactccacaatcacctagtgagatggaatccttgaaattgccatccattatcttaccgccttcttttaaacgaagagcttctgctaccgtcagagctgaagtaaatgagaccacccaagctcaacccatggctacaagggattataacattccaagggaagacacatgtggccccgaggccaagagacctcgtagtattcctgatgaagtggtaagggaaacccaagatcgagataaggaaactcaacccatggctacgaggggttatgatgttccaaaagaagataaaagtggccctgaggccaggagattgcggagtattcctgatgaagtggtgagggaatcccaaggtcgagataacgcagctcagcccatggctacaagggattctaatgtcccaaaggaagacaaaagtggtcttgacaagagatctcgtagtattcctaatgaagttgctcaagctccagataaccacactaataaggatttggcaaagcaaggatcagagtttcttctaacatttctcaacaaggacaacaggaaaaatctggtaaaagccattcatttggtcgatttgccacatcttaccttctcattgctctgaatctattgtttcttttgttctttacagaattccgaggacatgatgagttgatagcacttataggtaga

SEQ ID NO: 39207 - DNA, 322 bp, Arabidopsis thaliana columbia
tgctctgtttttgaaacagcgggattacactgagtgcaaatgcatggacaaacgcaggacacgccgtgcatcaagtgtatgatttattgcacatgatggatcgtgacgatatccccgttggtgtcggcggcgaaggtgggattagcgacgacggtactattcactctgacgtcggtggttattttcccatcatcgaacaggtgtcttcttatatattctgcttatttgttttcttgaataagttttgatattagtttggttttgaaaatgtataaaaaaattggtgtgcttacgggatgacaacaacaggggaactgtagat

SEQ ID NO: 39208 - DNA, 960 bp, Arabidopsis thaliana columbia
taacgttaaaagtagtggtatttcacttgcgccggatgtactatgaaactaagaaacataatgctcagagagattgaagtgtcaatgatgacacgttgttgggtgggaagctctagtcaatttcatccttcacatttaaacacctctgaaacagtaactggctaactgctcctacccattatagagatgcagcttccttgacgtgcttgatttgggagtatgttgtaccacctccgcaaacgtatgcatttcacacagaccacaggtccacaacagctgactgctttatcttcaaaacacgcctctttgtttcaaagtcaagagtcgaactatcaacattggcagaaattgctcaccagacttctaaaccaaactcaactttaaacattctccaaataccgctataaggtctccctaaaactctccatgagatcaagtaacagagtattccaaagaagatattaatatccgggcctacccagtccctacggcactacaggctgcctcatccgatgttacttggggatcacaattcaccacaaaggtctcttttggataatacaaaactcaaccatacaaagagcttattcaagagacacttaaatagattgatagattcgtatacataccagaaacttcggcgatcttctttttcccttgagaagcagacgtggtcgcaattttggtttcagattcctgaggagctctaacagctagagtcaaatcaaagcctccattaggtaagcttgctgataatttcgtcgaatcactccgttggaacccaaacagagaagccgaatcctcagaaagccctccgttactcgagggtgatgatgtcccgagaagcgaatccggaggattgtaactaccaacgtgaagaagagtccgttcaggagttaagtatcggcggaaagcggcaggtccagggacgggcacaggagcagcagcagcagcagcaac

SEQ ID NO: 39209 - DNA, 474 bp, Arabidopsis thaliana columbia
tttgccatgactcggacggacaatcaacctctgtgttaatcttgaattcaatttgctttagttaatgttccaaggtgcattgttcaatcactgttatttcagacccaaaaaaagtatcactattagtttcacaagacttgaaatttatttgctttaattattgttcctgctggtaatcactattacctaggctatatgtatttttttttttgtcaaataatttgattccattcaaacgaacaagaagattacagagatccataggagttcaaagaactctgaatttagtacatcaaaggataaagcattcaaaaatgcaaaacatagataaatacgataatacgaccgtagatccaaaagagctagaagacatgagctaaaaagcatcttaaaacaaacgagacattggagagtcgaagcacatccacgaacaaatcgaggagtggattggtcctagacattgcgattgtgacg

SEQ ID NO: 39210 - DNA, 311 bp, Arabidopsis thaliana columbia
  unsure (1)..(311): unsure at all n locations
atattcgtctcaatatgtttgggagtaacggtaattaccactttggtgatgagtcctcatgtacccagaagcgtattagatatctgaggtcttatggctcaatcatgtgtagagtcactctaattcaaaggctatctcctcaaggatacttacacaatcttacatggtatcagagcacagctctctgtgattacggcgtcgctctgatatcgcttcgctagggtctttgcgttactcaaggaganccnctatcatgaagccagaaaagatcggtcggntgtgtaggatcaagtcgcgacgattcgctgtca

SEQ ID NO: 39211 - DNA, 675 bp, Arabidopsis thaliana columbia
atttgaaaagaaaaaaattaaaaggcttgagtccgatcaaactactaattaaaagccatcactaaattgagcaagaaggtgtaaagacatttatatgaaaaaaaatatatatctttttaattaatgtttttcaaacataagtttacataaaaaataaaaattcactcgaatcaaaattttgttttgactcgaatcgaattgaattaaaaaagtcaactacactaaatattcgaaagaggaaactaacaagtttacacacaaaaaagcccacgtgactcttttttctccaagagacgtctcttttcctcttctctcctttgttctttcttccaaatttcccaaatccctccacaataaaccctagaaaatcaaaattcgctactatttctctgttccctaatttctttcgatttcaattcattagtcctaaaaagctttaatttttctaatcccccagttctccttcttctgcttctgaatcgtcgtttaacgtattgctccgtcttttcactttctccgccatggctacgcaacaacagcaatccgccattaaagtaagctctgaaggtgaacttaagcttctttttattggggtgtttcaaattgaagtcttttcaattctcctgtgtttggttttagggcgcgaaaagtgcttatggtggagctggtgggatt

SEQ ID NO: 39212 - DNA, 807 bp, Arabidopsis thaliana columbia
ataaaagaaaaggacatattttttaaactccaaataataactcaaactaatagactagattgaaaataagttttgtctccagagaaagaaaatatattacattggaattttaaaggtgtgaatgtgatgaggagccaatttcatggttgggtttggggagcttccactatagaagctcagcgagggacccatacaaggagtgaaggaagagccgtacgcgtagtagtgtatacgggttcgtattggtgtgttgcacttttggtcctaaactcaactaataatacctattttctttttctttttcctttttctttttcgatctctttctttctttaggatctctttagtcttatctatcaaaataccacttcgtatttggggtattcctatcaataaccaaccatacaaagcatcaatgcatcattctcatattcatatatcatacttgataaagaaagttccatattcactgactgtccagatatttattatttgaaaagaaaaaaattgttcaacgatttaaagagaagtttttgaaatgaccatgtaaaaagtgatgattttaaagtaaaagagatcaaaaggcataggagtgctctttcgaacttgacacctattgcaagatatttaaactttcgagaatgttgctcttctatgatattttcattaaaatttaaataaagaaaataaatatcctcatttcaacttgaaccaccactcacaagagtctaatcaacacttaaaatcattttgttccacaaatatctaagttaattccaaaatacttatcaaattatagggtatata

SEQ ID NO: 39213 - DNA, 508 bp, Arabidopsis thaliana columbia
cagttgattagaatcttaataatatggatcattagtcattacttggtttgtttgtctctctggttgatctgacttgaatcgtaatcttaaaaacagagttccatgtagatctggtatgtgttcatcgccaatccatgtgacatcgtctcagttgatttctagtgagatctttcctgttccgatgattaaggctctcttataccctggtgctgtagtcaatggccttgcatcaacatgacatttccaaagtgggaaaatgtgttagatatctacaatctcaccaatgtgaaagaagcttctgcagtgaccgatcttcaacgcctagaggttcgcttattctatctcaagagctcctaacacagttcacttaagattctactaatagtctcacaagtgatacattttgtacaggttcttgcagggagctacttttctgtagctggggcgtttgtgggtttgctaaagcctggaaggatgagcatgtttgggtcattgctactagtatggg

SEQ ID NO: 39214 - DNA, 615 bp, Arabidopsis thaliana columbia
cctctgtataataaaattcctatgttttgaagctattgtgcatctataacttttctatttacaatgcagcagatttggaaaagtcacagcatcaacgtgtagctgaactccaacggcttcggtccatgtatgtattatgtggtactccggcaatataactttcagctttcactttgaccgttactctggatttggataaagtcttttagttgagaaaaattgtactcagaaatatagaaattaggatttttagaattgagggcattcagtatatatttagggcatagaaaattgtggacttttcacgcatacaagttttctcactctccaaggcattttcctggttactcacagctttggaacaagtgagagacaatggattgaagcccaggtggagaatgctaagcaacaagctattcttttgacactcaaatctcaagtaacatcagtggaagctcatattcattttgatctacattctctgaggtaaaaagaacatgcagatctagtcgaacatcaaaggacgagacattgataaaatcatcattaagtctttaacttttcatactgtattctggtgttcatgttcttatctgtgcaggagaaaacatgcag

SEQ ID NO: 39215 - DNA, 560 bp, Arabidopsis thaliana columbia
tataaaaattacttttctttgtgtgaaaaacccaaaacatcactcttttaggaacagagggagtataaaataagaatccaaaaacaaaataaacaataattcgatattaggaaaaatgaaaaaaaaagaaaaactaagaaaacaacaattaccaaccgcaagtcaagaatcaagatcaatagcgtgagacggacctaaacacattaaaccaatacataaccggggtcttaaccggacaatctattataatctccttatcttccctaatagaaccgtaattacgaaaaaggacagtcacaaaactccaatctctctctctcctctccgtctctgcgcgcatgatcccccccatagtgttccactacgcaccgcccgtgactctctaatggtctgtgacttgtaatccatctctccttatgtttatttcaattttatttctttccaaaattttaattaatttcacacacacacacacctatacatatatatacacacacattcgtctctaatggcttcttcgaaactccatcatcatcctcaccgcagaaaatcccaatacg

SEQ ID NO: 39216 - DNA, 542 bp, Arabidopsis thaliana columbia
acacgcacaattaaggaatgatccatttcttttagtcaaatatggtattcaattctttccacttttttttgtcgaaatcaaaattcaattcattgtacgcctttttaccagtatatatatttcttttggtgtaaaatcaatataaacatctttaattttgtgtcatgcaaaaaaaaagagtaaataaactaccaaaatttatattttgggtttatatgtacattgcatctctaccaaaactgccaaataactctgacattctttcagctttgggacctaacttagtttgtacatataggaatgatatgtaccatttacattttttttaattcatatacaaggactaggtttaagtagttcaaaactagcgagttgcaactgctctatagtatttcagcaaaggtaaataaaggaaaatttaaaagattatataacaaattccgtcagaccaataagatccagggttttaatgttgcaaacattctgacattctggacagtgcacgctggacaacagagaatttcctctgcacgtggtagaga

SEQ ID NO: 39217 - DNA, 411 bp, Arabidopsis thaliana columbia
gattgtaagcccacaaattgtttatatcaatctatgtgggcttaaacccactgggtactcaaaacccggataaaattgcaagcccacaaattgttttccaaatccaaaaaaacacgggcttaatatgggcaggtcttgttttacacaaagtctcacacgggtttactctattgggtcgtttttttttgttagtagttatgttagtaaaacgacggcgtttagatcaatttatgtgaatttaaatataaacattatctccatatccattgttttgaaaacggtgcacgtgtagctatctcattggttagaaaaacacacgttgaaactctctaaatggtttggctgacctgatgagagagatttaggctcattaccaattaggattttttcccggtttttcctttaaaaaac

SEQ ID NO: 39218 - DNA, 351 bp, Arabidopsis thaliana columbia
ctttctccgagtaatggattcgagtgccttggtatactaggtaatgagtcacagctaattctgcttacgtccctgtgttgtttctacgatcatgaattcgaatctgctggattttgcgtctctctgttgaaattgcacataaggtgctcgacgaaatgttactgattctgatcgaatctaatttatcgaaaattcagtactttcgattcatcagtataaatccatggttctgcttaagtactttgtcaatatacattcactgacgcactgtgcgaagtgtagattaatctctgctatgtcgaattggagatataaactatggagaatacagagctcgtagcagagagctag

SEQ ID NO: 39219 - DNA, 539 bp, Arabidopsis thaliana columbia
gtcatgtgtataatagacctgaccgcacacgtgtgggtttttgtacttgtcataagttttgcttttttatttttgtttgcttaaaatggtgtttaaataaaataaaagaaaggaagtcgaatctgtaatataaaagtgaagtcaggggcaaatgtaatggattttgctaagatcttcttgtctgtcttcttcaaatccttttttatttttctttacaaatgaaggcaacttgtgtgttacactgtttgttacataaaaatagttttttgtcgcatagcgacgacaatgaacataatacggacgagaacctctggcggaaacctccaccaccattcggcccaacttttctattgatagatctcttcctcttcttttttttttgtaacatttttcttacaacaaatgatttaccaaaacaaaagattcattattacaaatgattccttataaatttctactatgtgtgtcacgggaaacccaaagggacagtacattttatttatgttactttatgactgacagctttgttcttcatatgt

SEQ ID NO: 39220 - DNA, 102 bp, Arabidopsis thaliana columbia
ctataagtaagaaactttagccattaagttgttgggaaaatgattcgacgtggaggaagtaatagataagtattttaaggtaggcacctaccggcctccaag

SEQ ID NO: 39221 - DNA, 182 bp, Arabidopsis thaliana columbia
gaatttctgcaagtaagcgtcatggtgcttgccgttgtatcgtcatgtgaggccatggaagtgtcactctctaaaacttcgctagaagaggaggacaatttcacttcacgaacgaggtttccactttttcttatggaagttggggaggctgtattactacattgaaggcctgatctctgttt

SEQ ID NO: 39222 - DNA, 552 bp, Arabidopsis thaliana columbia
gatatagtgaagatggcttcgtatgtattcaataactattatctgatggaatggtctcgcagatgaagcttgcaactttagtaacaacgcagctgttacttctctcaatcctagtaagttcacattttctttcaggatcaatgtctagcagatagttatgacttttgctaattgaaaatgttgaaagtttgatgctttttctgcaatttttcgttttcaggtcaaggaacatgcaagtttccttcaaggtaattaagtaatccacatttgtattgccaattagcgtttgtgtgtgtgtctcatttatagtctgtttggagcaattttgatccatcataggttcttttagaaaatgatttctagtttgatgggttttgaacttttgagtgaaatgaaatcttttttttgtttttttcattagcttctggcttagaaggatgaagttacttcacttctcctcgacaattgattttgatcttggtgattatattgttcatattatcaatatgatgcagttactgcagaacatagaagaagtttcaaaaactatta

SEQ ID NO: 39223 - DNA, 579 bp, Arabidopsis thaliana columbia
tgttcaccaaaaaaaaaaaactttggtttgtaaaaagtccccacagattattatagatataaggaaaacatatatgaaagaaactagttttttaccaggattgcaatatgatggttggtaaagagtagaaagggcttcgataactccaagtctacctcttggcctaatgttgtttcccatatcgttactctcagaagtgcctgcaggagtggatgatccagaggcaaaattcttcacgtccggtttcacatcatcacattgttcttgcttgataacaatgcttgtgttttgatttccattacgcttgctgtcttctttagaacaacctgatttgtttctctttgcgttaacgtttgtgagttcggtcccaaatgcccgctttttaggcacattacgatcacataagcttgcagaaccatcaatgaatctgttttcaaatatggttttagatcccaacacctatatgccggcttcttagtctctgggacatgagtctgcatgaacacaaaagatgagagagatttgagtaccaagattgtgcatattgtaatattttaggacatgctcatatagtaattg

SEQ ID NO: 39224 - DNA, 387 bp, Arabidopsis thaliana columbia
tgtaggctggtagataaagtcataaaaataggattaacataagctttccaagaagaactctgcaaaatcagaagagtatcaaatccaaagtatatacctcagaatagttaggagctaaagctagagcttggcttatatcttcaagagccccagagtaatcaagcattcccaattttgctactgatctgcaatcaccaaatcccaacaatctagttacatgtacaatctatgaagaaacagtatccaaaagatcaatacagtacctcaattacgtacctgtgtttgaatattctatgcaagcccacgtagggtttcagctcttaaacctgcaatcatagacacatccatggtcaagctccataagaatggagaagaaattgagacaaa

SEQ ID NO: 39225 - DNA, 647 bp, Arabidopsis thaliana columbia
cctctatcagctttatttcttgtgtctcaagtaaggtttttaacgtgcaggacacgcttgaggttaagaacataccaaatgaggcatctcgagccactacaacaacacatggaaactactacaaagtatctgacctcccaatgaccacaggaccagccagcggtttgcatgggctgtgaaaagacggaaagatcctgataatatctctactcttacctactatcaacccagctcgaagagtcaattgagtggaacaagtgttgcatttgcaaagaacacttttggtttgaacctgaaaccagacaatgactcagtttgggaggttcagggaaacaactatgatgatgttatcgaggaggttcctagtcatgagagtaagcttagccgtattggagaacgacacggatcacttgatggttctggtttggatttcagccaaagagaggaggattctccaaagaaaactttagtaagtgctcttgtttttgtttaaatctttgagactaatacaaaaatatatttgaagttaaaatgtttgtgattgtttggtgttacaggagcatctacaatttggaaaacagagcatatcaggaccgttgatttttaaatcaggaaagattgacgagattttgcaaaggaatgaaagt

SEQ ID NO: 39226 - DNA, 512 bp, Arabidopsis thaliana columbia
taacaactacaaagatatttaaaggtagaagaattagattttacaccttatagagttcttcccatttccttaccaaattggccattcgaggttgcaagagaggatccgctagcaaaaaaggatctgcatcctctttaggcaacgtttgccacaaaccatactcaatacaaagtgacgggtaatgatttacctccaaacactataaaagaaacataaacataataacatgtagcaaatcctttaatcagtatgagcttacaatgccatgaaatgtgtcaccttttatcagtgtgagcttacaatgtcatggacaaaaatgaacaatgtcaacaaaggagtaacaacaaaaacattaacaggatcagctctaaaaggataatagtatgagcataaacattgttattattagaatatcaaatggtgctcaatgtgagattgattaaattgcgacagtatcccaactgaatatcaataattactacataccaatgatgctcaatgtaaaattgatt

SEQ ID NO: 39227 - DNA, 558 bp, Arabidopsis thaliana columbia
gtctaagcagctactacaccaacaagctttcttaacataataatcaaacaagagaataaatgaacgaagtaatgatttagcatagtagtcttatgggtcaacaaccaagtaaaaagaaagtcataaacacaaaacaattcatgcatgcgtttgggaaagttgaagagattatcaaaatttaacatagagacaaagattgtcctttgcatgtaaggatagcttttcaaataaataaaaaataaaaaaaatcaagattctttgatctaaagaaatctcccagataaatcagaaaaccagtaaaaatgaaagattttttaaacacaaatgaagcaaattcctcatttcacaaaccagaaactaatacatgtgatcatataactcgtaactacacacaatgagagtgcattgggaatcaaattgatgaaaataagaaactggatcaaccaaagcccagaggtttatcatcgatactcaaaccaaactccagatcagaacaaattcaaagcattaaagaaaaataagctcacgaattggaaatagagagattaaaactcacgt

SEQ ID NO: 39228 - DNA, 574 bp, Arabidopsis thaliana columbia
tatttattgtgttagttatagcagaacttgttgaatattgtatagtatagttcttttaaatatgtgtatagaaaatgtcaaaacaacacttttgcaaaataaaggaatgaataattttgttgagttcattctttattacactcaatttgagctctactcttcgatttttttgttactttgtttttgtcgaaaagtagatgttattccataacgatgatttttaggggattttaaagccaaatatatcttatgtttttatgttattcactagttgattttgttacataattgttagatttgatatttttaaaagtaacaaagtatcgtactctgcttttaaaccgtttgcaacggacaaatcaatctgttatttgcgacaatgctactgggcttcagttactcatgtcggcttaacaccgagcccactgaaacatggcccaacgggaagctccccgttgggtttgctcacgacacgaagatttaagtgtaaccggagaagttgcccagaaacctcagataaaggtttgtggccacaaattgtgcttggttatgttcacaatgtgagtaagtaatt

SEQ ID NO: 39229 - DNA, 916 bp, Arabidopsis thaliana columbia
tccctatactcttcatttgttttgattgtcttctatatttaattcaggggttgctggtagacatgactttggagtttcaaatcttggtccctgttattgtggcttttattgagcggttgattcactgtcacaagcatcagtggttaggagagcggtttcttcagatagtcgatgagaatctgcttcccaaacttaagaaaaaaaacttattaacagcttacttcccgcttttccatcgaatagccgagaatgatacaatacctccttctcgattgatagagctgcttacgaagtttgtaatttcacttgttgagaagcgcggacttgatgtggggttgaaattgtgggatcaaggaactgaagttcttggcatctgtcgaacattgatgagtcaccataagagctctagattatttctcggactctctcgccttctttccctcacatgtctctatttccctgatctggaggtccgagacaatgctaggtatgaccatgacacccacgtaaacgaatctttctaatatttatgaattgtgatgacgttaactctacctcataaattggtacattgtaggatatatctgaggatgctggtctgtataccaggacagagaattaagaacattttgaagccggcagatgctgtcactccatcaacccattcttctacattttttagtgttcaaagtcctcgttttcgtcatgatcctagtaaatctcggaacctttcatcctatattcatcttgaacgggttacgccctactcgtgaaacagtcatggtcattgtctctaccgatctctaagtgttggaactgatggatatagcattatagaaaacaaaatccaggtagatgaagttgagccggatgcagtcaagaacttcagattttgcagaactcgaagaattgaaca

SEQ ID NO: 39230 - DNA, 582 bp, Arabidopsis thaliana columbia
tctcaggatctctgtcactgcattcaaaccacacaaaaaatgatggaatgaataatcacagaggattaaaaaaacaagaaagcaaaatctaagtcagcaatgtaactcaaacctcgcatgaaaggtggggaaacgaggcaatgaacttgttgaagtgcttgtcccgttcagagtccttcctgaagttccagcctcaacatttcgtctttcaaattcattatgtgaagatatattgttccgcacaccacaagcttctgcttcctgtaaacatgataatcgaatcagaacatatttagaaacggtaaaggaaaacgagagacaagggggtaaaaagtaagtacatatgagacttcagtgctagtagctgagtcagataaatcatcagcagcaccaaagaccttagcaccattacgtccaagtccattttgagctgcgacgtgaggcaaaccaagatgaattctataatcttgaggagagtgttgctctcgaatatctcttcatctgaatcagaagcaatgtccatgtctgaacttgaaccaccattgttattccgtctcacgggttaattgatgaagcaatgga

SEQ ID NO: 39231 - DNA, 561 bp, Arabidopsis thaliana columbia
ttttactaatcaaaaatttcttttaaattttaaccaaacaaaaaaagccaagggtactaagattaaatgtcaaaataattattcatggggtcaaagacaagaatagatcacataacatgggggtcattgtgaatactttaacccaaaatatataattatcttaagagaattaacttataattaaaaaaaactataaatgtctgtctgagatagttcaaactgacccctcctacttaaatgttgcctccgccactgctacttgggccaatgtctgtctgagatagttcaaatccatgtgagtatttacctgaatttttttgagagatattgagtcatatcaattatgtaggcacaacatgtactatacgcaacacaaatattcacctatttttgaaaacgaaagtgatgactagtttgaatgtccacatatccaaatgtaaacataatttagttgcataatgcatatgcaacgttgaacactctacactatgtcgaataagatttggctttttatatttaaaacagacatttctaattagcatttcacatcattcttgtgta

SEQ ID NO: 39232 - DNA, 542 bp, Arabidopsis thaliana columbia
gattgctagttcaatttttatttttgtcgatttctactttcttagttcttggtataggactatatgcaatatttcttagtttttctcttccatttatttggttggtggcaagtggcaacaacttacgagtcttccttttggcttgttctcacgtttttttaatctgcttcaattttcgaacatctgcaattaatttttataacatctattatgacgtcaaaagaattcgttttttcaataatattggtcccgttgcatataattcttattattcatatcaataagctaaattatgacaaccaggattttctgaaaggtctttttctgatgggtaagtgataatttagtggaagttatacatatgagcttttatttatagtttaatgttttttttttcgattatatgaatagttaattaataataagcttttggagtgaatattttgatcaaaatacaaaaacaattctgcattctttaagaattcgcaatttctgaagaaattttttatttaagttttggctagcttcttctgtgcaggtgt

SEQ ID NO: 39233 - DNA, 473 bp, Arabidopsis thaliana columbia
aaaaagccttaaacttggaaatgggttttggtgggttataaaggttcagagacttcaaatgtatataatagatgagaacttaacatataaatccaaaataaccctttaattaaaaaggttttaatgtaagagcaaattgggcatgtgtttaaaaaaccttataaagaggatatctgcacaattatccctttttgctaaatttaataatctctttgttgttataaatggagcaacgtcaagctttattttgattatctttgtctcctaacttgtccctctttgcctcattcatcatcgctggcaaactcaaagatctgtttcatcaggaaaaaaaaaaacacaacaactcagagaacgttttccaaggagagatttaaacttataaagaaatatttgtggagagaaaaaagatctaggtccattattccaagaatctaggtttttaaaacagtacgagtagtaggagaatcttg

SEQ ID NO: 39234 - DNA, 781 bp, Arabidopsis thaliana columbia
ctcaaaatattcaaggatcttatcagattaactaagggtcattgtggatcttaatcaataactaataatcatttgattacgttctatactcttatgaaaaaacaaagtttcaattttcaagttgtgcatgtgtaactttaacctctccagaattagcacatggtgatttttaactccttttcacttttgttttttaatgactattctaaatagatgttcgaaaaacaaaaaattagcttccaaaacttataaaagctatatatatcatactaaaaaaaatcatcaaatgaattatgttcccagttactttctaatgaatccttttgttctaaatatatcatgaatcatgaaaaataacattcaatacctacatacaacttaacaaaattacattaagaaaaaagcccgcggcttggcgcgatcttcgccctagtctatataatacttcttctgttcttaagaattcgatgttctagatatttttttgtttcacaaaaattgatgttttgtaacaacatcattattatttttatttttaacaatagaaagaagaaaaaaatatagttaatattattaaataaacaaaaaaaattgtaaaaatttacttttcttagtttgtgtgaaaaagctaaacatcattttttcggaacatgagtaatattaagagaatattacactgtgtgacacttttacaaaaacattagccggtttagacattttaaaaagagaagacactttgtcaagttaaattgtccattttgcccttttaattataaacttt

SEQ ID NO: 39235 - DNA, 517 bp, Arabidopsis thaliana columbia
gagatttgcaaagtgatcagattttaccaccaagaaaattcacaactcacaagaccaagggagatggcggccggatatgccaaattggaaggtctgttactggatcctgaatcaaataagtaaatcaggtgacagttcacactatcatttttcacaataaaatgtacatttctaggtctctatgtttagaaaatacatactgcaaaagggtaacaactaaggttgagttcctcatatcgccatgatccccactcttcagtaaaaagaggccacatccaatgagttacatcactccagctaacctgcaaaacacacagaaaaacgaaaatttcaggagaaaataataccaattgcacgtttgtatcacaatcatatggaataccttgcctatgggggcttctttcaagtacttgtataaatctggtagctcctttctaaactgtctttcaaaagcctgatggtggactgttcaaaagaagaatttcaagtgatcaacttccattttccaggatgtgac

SEQ ID NO: 39236 - DNA, 577 bp, Arabidopsis thaliana columbia
tgcttaagatatttaatcacaccatcttccaaaacgttacgtggattcttaatcagccagaaccctacaaaaacgaataatttcttagtctaaccatttcctcgtctccaagatactttaatcaaatcaagtctttggacatttgaaatatttcagtacctatttgatcctccatatactcaatgagtctgaagatatccatacccaacaccaccctcatagtcctatcacgttccctggtgattttaaaactagtgtcgaaatccttgaatagaactaaacaagccatttggtaaacctacccatctaattcctgcttctttagacaatatgttacagtttcttcttacttctccagcttcaatcacactcaaaatagggtagaccaatcacatttgctaacaacagccgctaaacaaactttgtcaagacacctgttctgccgtaaaggttatggataaattcttattaaaaatttaacaatatctttttttttaagaccgtgtgctctgtttggtcttgggcaaagcctttctttggtttcttgacattggtacagaacatatcgattacaaaa

SEQ ID NO: 39237 - DNA, 550 bp, Arabidopsis thaliana columbia
tttcccctccaattactctactgggatctaatgcagatatatgaaatttatatagatttttgttgtggtcatggaattcagagagatatgtgtttgttgtttttagcttttgaaatgaaactctaaagtttttgggtataaactcccatttgagtctttcatggagcttttttaccagcacaattgaccattgataatttttttcccttgaatcagttttttcagttaagatacttgtcttttttagattgtccgaattaaatagtttttgaggaaaacaaataagtgaagagatgataatttttgcacccaaaaaagcaaagaatgaaaactttattctaaataaaaaatttacaattagtttttagaaatgagaagaaatgtttgactgcaaaaaataaattaagttgttagcaagttttggttttgccaatcaacgtttttaatacaatgtacataaacaatttcattctttctaatgcaactattttttaaccaaattttctgagagaatgaaattggttagcgttcttgcggtaaacaataaatt

SEQ ID NO: 39238 - DNA, 607 bp, Arabidopsis thaliana columbia
taataatatacttaagccatgatgttattagctaatcaaaaacaataaaataacctgagtcaacggtcaactacacggagacacaacaccgcccctaattctacctaactaaagtctaaagttactactaaacaagtaaattaagctttcccaatttgcagtaaataaattattaattaattaattatcaatagatttaaatacaaaaaaaaacttattttggatggccttatatattttatgaattagtaacggtgatttaattttttaaaaaatatttgtatgcaaacaatcgatcaactaattaacatgttcacatttcacaaacgtaacatgtagaatttcgtcgagttcatatgcgaattttgttttactcaaaaacaacttgaaccactttgcatcatagaaacttaaaatatatatatgcttccagaaacaaataaatatcttcttaactctttttttgggtttatttttaaaattagtaatgttaacttgttaaaagacagaattagaggaatattaaaagcgaagttgcacgcgacgtgaggcagacccgtgagtcagattttcatgtggagacagagtggcagcacgcacgtggggt

SEQ ID NO: 39239 - DNA, 539 bp, Arabidopsis thaliana columbia
tgtatagattgtacctattgaagttcaaaatgataagcagatcaattgctgtagaccaaaaagcacatagaagccaacgggaatccaaaagcttagaagataccctccagataatccaaaataagcttttatctgggacactgtccaggagatgctctctccttttaattctttagtagcttgttccaatagagcacaagcggctatatgggcaccagctgattgccccatcaggtagatcctagagagacaagcagatacatgcagtttaatagccgagagaccaattggaagatcaaatggtaaataaaaacaaagccaatgagatgaaacctgttggggtcacctccaaatgcagagatgttattgcagacaaatgagattccttgagaagcatcagtcaccatatcactaattgttccatgaggaaagttcctataccattaagaacggatctcttggtaaatgcatgaaagttcttcctatattcataaaagacgactagttttttgaattgtggaatttgtttccttgtagtc

SEQ ID NO: 39240 - DNA, 507 bp, Arabidopsis thaliana columbia
  unsure (1)..(507): unsure at all n locations
tgaacctttctcttttcccccctacagagaatgtcagaagtatcctggagccatgactggtaaacatgaccagcgataatagtttgctcataatccatcgctgaagtagctgtctttcttgctctctttttcgctggttgtggtctatcgtgttcctgcatgcagaacaaaacccaattcaatgtattttctactagatgagggtattcctagtaagtgaaaatacctctttgtccggtatgttttgttcctccatctgctcagcaaatccgtccctacgattctcctgttgctcctggcgctgagggcttgtggggttgactcctgcagatggctaaagattagtaaatttgttctgctctgttcacgaagctcagtgttcatatcattcagaagcttcaacaaaaatacattcccaggtcacatacatgattattatacaagagactcgcncaagtcattgttaatggcttcataaacttaacactatttaaaaattgaaaacaa

SEQ ID NO: 39241 - DNA, 516 bp, Arabidopsis thaliana columbia
ttttaaagatatatgaatgcatgaaaactatttgtagcaatattttaatataattctaattacgtacactacaatgataaactaataacacaagttgatttttttataacacaagttttgacgtagtcaggattttctcctatatttctaaaattcaattataaatcaataagtatttaattgaatcatccatcataaattgttaccaattgaaaaaaaaaagttttatcttttactatattgtaagtatttcttttgaatctttaaaactcgtcataacaataacgcaaccgattgcaattcttgatattatttctctatgacgtaggtaaaaaatataaataaaaaacttaacagctacaagaaagttataacaatatattaggtgattaaaataatgaaaagccgcgcgtggcctgatacggccgtcaccgttaatgtcttttcacactaacactgcaagttttgttgagcgtgtacttaacggtgttattccgccgataactctggcagcac

SEQ ID NO: 39242 - DNA, 532 bp, Arabidopsis thaliana columbia
gacaatttaagcttaaaacatgaatgttgaaactaataataataccttttggagaagatcttcatactcatctggagatgtgtgaagaggtggagatgcccactgaatgagaagggacctagcatattcatatttcaaaggtaccaaatggtaagtgggccataaactcgtaaaatcaaactgagaagtcaccaaaatcttataatctggtaaatcaatttgaaattttcgaagcaagaactcggatccctgccacacatcatccaacaccaacaatatacgaccatcttttgtgagttcctccagaagatctcttaagccagtttctgcttgagaatcatcgtcaaatgtaattgctccgcaaccagttgtcctggagtaagttttgtactatggccctgaaattaggagtattcgacacaacgctatagaagattttcttgaattctcctgccaatgtaacaaacactacatgagaaacaagaaacatgtgtaaaaatcgaaactttaagacacctcatatatatacata

SEQ ID NO: 39243 - DNA, 437 bp, Arabidopsis thaliana columbia
cctactacatgcaagtaaatagtagattagactaaaaccaaaaagaaagaaaaaaagcgtaccgttgaacaaaaaaaaacacgattttgcaaatccataatgttttaattagcggttcactatctttcgccagatccgtcactatttcgcaaatttcatgtcaaacagaattgatacaagatcttgagcttccttcaccaaattgattctctgagtccaagttgcaaagcaataaataacgtcgttgcaagttgctcattgcatggcaagtctcaattgatcggaatgtccttctttaaatatggttcggtttggctccaactcgatcgtcaaactcaaactacattaatatgactcttcatttgtttgtcttttaatttatttttttatctaccaaccaatccggtccaagagccaaataattactctaccacaag

SEQ ID NO: 39244 - DNA, 368 bp, Arabidopsis thaliana columbia
tgaatatgatttaagcttgaagctgttattgcagatccagtttgattcaagaacatatactacttgctggaagaggagacaacttaggatcgaatatatttagtttctcttaagaattttagtttctctttatgataataagactagttttatgagtatactaaggatgggtttcgggatttggagggtataccgtggtgttatcggatatgtggtgaagcaaagatttcaaggtgattagttatgcttcaaattgcaagtattttagcatttaatgattatgtgctattttaaccataaaatcattgtacatcaattatatccattgataataaaaccgtagaatatcctcaattgaaaggattgtc

SEQ ID NO: 39245 - DNA, 737 bp, Arabidopsis thaliana columbia
  unsure (1)..(737): unsure at all n locations
tttttgggttgatatgtttgatgggtttagtgagaatattggtagtgggagacaagagttgatttggatagttgagtgttgctattgtttgtctcaaaagatttccactttatgtttttagtcatttccaaatcattaacatcaaaagctaggtcaaattcatacttcatatgtcccaaaatatttatcaaggattctgcttttagaccatcaacttctagtgatctcttattattattggccagtatatagcaattctggagttgggtccattctataatccatagacaaatttctttcaaaactttgggtagatttttgtaatatcgtctttaagtttattattcagaacaatgttacttctagagattgtaattttacgtatgtagattgtagatccatcatatttatttattatcgtagaattatcctaaacacgtgtatgaaatattttggtttaaatcgaacgagtcacaaaactcaaaatttgtggacatgcaaattttgaaatgtactcatatttcttttggatataagtcttcgtccaaaacaaagtcttgtttgtgtatgatgttgaanttcacaaatgactgataacgtaacgcaatttnacacgagtgacctcaatataaaaaagggattgtgttccatattgaacaaaacgagactaatgacgcatgattaaactaagaaatgtagatttaaatgttctataagacttgtttaaaggagtaaag

SEQ ID NO: 39246 - DNA, 784 bp, Arabidopsis thaliana columbia
aggtacaacaagttacaacacaaactagttttgttcgtctctaaagttctttgtttcagcagagaatcaaacaatcatccaagtcaagtgtctgtatccagcccattttgcagcaagtcggacgccaatggctaatgctgcagccaacaacggcattggtggtgccctccttaagatctgactctcttcttctgaggaggtcttcgttgaattgtgatacatggctagagccagataccctgtgatagccaccactctcacccatggctcccctactcctgccagaacagctgcagaaggaagagccgaggtcacatcgtctctcttctttatcaaccgcgagtacccatacaaacctaacaagacagtccagaagaacggctctgagatataactctgcaccgctgcataccccaccagacccgcaatagttaccacatacggctgcttgctgattgactctggtgcaactgcttctcctatagcaagcactgaggatgcaagaagaattaccgtggttaactctctcacaggcgtgtaagccacaatcccggagtagaacgccctaacactgtacattgcagtctctacaaggctgatgagagaagtgatgggatcgcctataaagtggaagacaagagccaatgcaaacttcgaaaggtctcccacaaacgcaaggatagcgaaagccgcttttctccagttggatagctcaaacaaaacagctctccacgcataaacgagaaaccccagcgctacaacagaagatcaagatgttacttca

SEQ ID NO: 39247 - DNA, 754 bp, Arabidopsis thaliana columbia
tcctgcaggtaaaaattcgagtttaaactagtttttttatgccttactgtctcttgtatatatatttctcatgcttttcagacagttatgactgattgactggttatatatacaagtcttgtgcatacattctcaactgcatcgttgtttatcgtaaaagcagttgtctcttatatatatttgctgccatttgtccacttcaggaaggtcttaggtcaagtatggagtcctcagtcataccttcctttgagaggtcatgcaaaaccatgtttgagcaagtagactcaaccttacagaaaggaattggtaagcacacgagcgcaacacagcaacggattgactctggacaatctcagcttgctcatactctgagggtatgatagaaaatcgtccttcttccagattttttggctctttcttctagttatggtagcaaaatccttttttaatcctcatgttaaacatgcttttatacaggaaaccattagttctgcatcatcagttactcaagccctaaatcgtgaattagccgagagtcaaaggaatcgcttagctctcacagctgctggatcaaatcccttggttactcaactaagtaacgggcctttaggtgctcttcttgaaaaggtttgcacatctctggatcaaatttcttaccatgaatattttgtcattttctgcgtgtttgacatgtatatacgttaactgcaatgcatcattgttgtttcaggttgaagcacctatggacccaaca

SEQ ID NO: 39248 - DNA, 378 bp, Arabidopsis thaliana columbia
tcacaataaagacaaaaaaaaaaagaagaagataagaagcaatcgtaaaaagtgattctgggcatatgaataggagtatctatccttatccctcaatagagagagatcatcttcaagaccccttcttccttctacttcagtaaccaaattcttcacaatggcaaatcacacaagataatcagattatccatagacacaagaaacacctctatatcaaccactatcacactacaacaaatactagctccatcaactctctgcatttcaaaaaaccacacacacttaatctatactatcttcgtaattttcctcagaaattaaagcagagcgaagaagcaatataataaacaccaagatgagacaagtgaaaaccgtacc

SEQ ID NO: 39249 - DNA, 509 bp, Arabidopsis thaliana columbia
cttttttcttctgacccatccacgattcagcttaaataccttaattttatcggcatgaagaatactctacgcgtacgtatatatatatacgcgccaccaaatgggcaaagatggtcaaaatcggatattaaattacagtcaacagacggcgtcgcctgagagatcccggccacgtattacggcggagattgttggtgaggggatagaggtagagagagtaacacaggagtcgttgtcgtgctctctctctctctctcgctacggagcagaagaatgtcactaaaccacaaaagagatttacattagcgattacaaaccggtttacttcgattagtaattatttctagttgaaccatcggtattttatggtttactttaccagacgaagcgaactactcggtttgcgaattgaaccgctgtgttttttggaaccgctacatgctggcacaacttgcccactgtgacagatattcatcaggatcggcaaggagcatgaggttgcaacttgc

SEQ ID NO: 39250 - DNA, 580 bp, Arabidopsis thaliana columbia
tgaaattaataactttcaatctgaaccgttgaattattcaatccctagatgtcttgaagctaccctcaaagttatgtgatgacatgaactcgcgatctctctttgactccatgatccaaatcgcgtctaaaactaagaacatcacgaaaaaacagataactcttagcatattaactcaaatcaaaatccaaaaagtgctacatctaggtctaagtcttacctacaactccataaaatttctttaccaaaaaatgaaaaaaagaaaaaatcagcttgtacatatttaaacataatttaaagaattatttatatttatatatagaaaaaacttataaatatcattttcacaaaaacattctattacccatccttgtttcttttaaacatcaaaacgatggtgtttcttacgactaaaagacggatggcccaattgtgagcggtacaagaatttttctagggtgtacttcaaatgggagccacggttaccagagtttggttgggtttttggattttgttcttttggtcttttacagacgcacgagagagaatctcagcttttacagaacaaagaaagtggcga

SEQ ID NO: 39251 - DNA, 595 bp, Arabidopsis thaliana columbia
gtggatatatgaagcagatgttttggggaaccagagttctgtaaatagaaaccttcacgcgacgttgaaaggtttttgagacgaatataggaggagaagatgggatgtgtttcttcttgcttccgggtcgaggacattgatgagtacatgaatccaaacagctctgtctataggaactgtccctgcataagatgccttgctcataatttccttaacctggtaactgcttgcttcacattgctatttcagtttatgcttcttatggttagatatctcgaaagttttcatgtttctatagttacaatttctagttcttgtcacagttatttactttgatctgtaatctgattttttgagcccatattaatcgttgcagtatatttcggtcttcagaagaggggaaactcgctctctcccatcttcggttcaagctactgcatcgataacttcctcttcttcacacgataactttttgtctgaagcattccgttctactccaagacctctgccttatgatgctgatcctagatacttccgctcactcgtctcaagacgggagaagggtcaagtcatctcatgaggaagttgaacttta

SEQ ID NO: 39252 - DNA, 592 bp, Arabidopsis thaliana columbia
tcccaataaaaaatcgaaattaggaaaaacataactctctatcaggtcccctccaaaatgtaaaaaaaataaaattgatattttacatttgggctgaaatttgcattgtaggcccatgggattccggtttgataactttatattgcccaattttatatcgatttttaatttcaattttaaagataaaagtaaatgaactggtaagccactggttttggttctgctcttaccgttatcccaacttccatatccaaactgaaagacactggttttggttttgtcgggaaaaggagaaacttcaaaaagatgcccactttgaatctcttcactaacataccagtcgacgccgtcacttgctcagacatcctcaaggacgccactaaggccgtcgctaaaatcatcggcaaacctgaatccgtaaccaactctaaccctctgtttcggccatttctacgctaattcataaattaaaacttcaaattttgttcctgtttagtgttttgattacatgaaagcagagtagaatagaaatttccttttgttgataaggttcatgacgttggttgtattatcacatgaagtgtcgatggaa

SEQ ID NO: 39253 - DNA, 676 bp, Arabidopsis thaliana columbia
cattttaaaaagaatttagtattgtattttacgtaaatatttctataaattaatatttatcaatttatcggataaattaatatttatcaatttatcggatatattaatctttattaatttatagtatagattaatatcattataaattaataaaatttcatggtcccatcattattaatttatagagtttctactgtacgtatatgttttcgattttgattaaacacacatgtttatgaaacacaattggtattaatgccaactacataaattaatgattcttctgcaagatacactttacgtccgggtcttgctttcctttaatgcagtagaaatttagaaacttcttctctcgacatatcttggggtttggtttggcatgttgttgtggtaatacgagcttcgattcgactaaaactgagagaaagcatatcatgaactatagttggattacaatcatgtctctgttggtaatttgtaagctggcttcggcgaaagtagtgttgatcgggaaaaacactaattctatcctttgatgatgtcgaggcaactttcagtaagtattctcagttattacgtcatgtgacaatctgtggatatgtacactggaaaagtacaagccttggattattttactaggtgcagtttggatactgtggagttactagtacatggc

SEQ ID NO: 39254 - DNA, 1258 bp, Arabidopsis thaliana columbia
gtccgggaagccagtcttatcaaacggatcacggtgctgcattacccactgctcataatactaagagggaaaacatgcttctgcatacaaaatcaactgatagtttctctggtaccaatgaaacactgagtgaaacaccaataaagaaagctgaccccattaccgatttggaaaataagggcgctgctacgcttttgaatgatagaagtgaggcaaccaaaatatttcaagaatatccttacatgtttgccagtgttggtgatttaaagataggagatgttgaagacttgcttaataattataaacagctagttttcaaatatgtttgcctttccaaaggcttgggtgatgcaacatctttaactccatgcatttcaccattgcaagcgtctaaagtctctgagaatcatacaacattgtcttcagattttcaaacgaaaagcgaaactgacaggagcgttgataatttgtttcgagctctacaaggtgagggagacaatgttcataatatctcagatgtaaaacaataatcagacttatctcttccaaatgtaatcggattcagttcttgaatgctacatgtaattttacattcactaattatacggttctacggttatacgacaaattgaaacacttaccggttttatctgagaaccggttaagggttcattacaagatatgaaaccaagataagcgaaaagggtattattgtaatttcgcttcattttctgctcctctgccattcccacaccactcagaggaacagagcttaacggcgactatggaagggattggactgcgaagttgcggagatgatattctccgtctcggattcaagctacgcggtggtaccggtggccggattcagattctccagcgagctatggtgataaaaatgagagaccgtagcaagaacaggaaaccattgcagagaggacgaatgctcagtatcgaagcgattcaagcggttcaagccctgaagcgagccattccacttcttcctcctcctcccgttccttctacttccacgacttcttcttcctcagctctgcttgatcgtgtaatcatttctaaattccgtcggctcttgaaattcgatatggtcgccgttctcagagaacttctacgccaaaacgagtgctctctagctctcaaggttcgtctctatctctatctatctctcgctttctacccatcatgttttagctgtgtttctatcttaactgtggaatcgtttttaggtttttgaagagat

SEQ ID NO: 39255 - DNA, 345 bp, Arabidopsis thaliana columbia
tttacgacaaaaaaaaaatgacataatttaaaggccacaatatcagttggtaatttgtggtagaatcttcttgactcaccagtcacccctattatctgacgctgtaacccgcaagtgtgctcgtgatcctccaatggagaaaatcattcaagtaaaagaagaatgaaactatcatcttcttcatcattttcaaatcctctttaccgcatatctcctactcctaatcggtttaacgatcttttgttagctaaaaccatcatcttctccattatctgaccactttcactttgcctcgtcagtcatcaccaacttcaaaatttgatactcgacaaacaaatcaaaaca

SEQ ID NO: 39256 - DNA, 1386 bp, Arabidopsis thaliana columbia
ttttatttattaattgtcgtatactagcaacacctaaaaacaactcacagcatggcttttgggtttaaagaagatttagattcctagtggctcaatagcaattcttgatatgatcaaaccaacagagaaaagagaaagaagatctaaagcaaaagcatctcccacatgtatgagattggcattacttctaaacgaacatgctattcaacacagcactttacgaaagcataacagaggtaagaaagactatatctatacgattaatgatcttaatctctacagaatatggaacatactacaaatcacaatcaagattgtcccatcttatctacataataacatagaaatgaacactgaaaaacaaacccaacaaggaaagattgaatcttatagcagatgagcaaatctatgatccatcatcacatgtaattagaagaagaagaagctaacatttggcaacatacccgtaaattgcagaccacaagaatagctcttaagagtggtggcatcaacattttcttgagctgatttgaatctgttaactcttgtttgaagaatctgacaattctccgctatcgactctccacctatatacacagaaacaaatatcaagatcctaattttaactactcaaaacctaaattcaaaatgtcacatttggggaagcagtgataagaaaaatcaaacctttggaataaggaacaatgtgatcatactcgaaacagagacaaccattgcaatttccgaagcgtttgcagactatgttaccggcgacgtctttacgccacctctcgggatgtcgaccaggtacgatgtcagcattagcccagcacttgttcttcgcctttccatcgaagaaacgaggtctctcttctccgttagattttacattggaacgtgacggcgatgaaggtggcgacggaggaggaacggcggcggcggtggtggagttagtaaaggaggcggagaaagatgaccccatcgcattgccgtcctctctctctagaattttgggtttttgaaccgggaaggtaaattaaattcggttcaagtaaacatagaccgaaccgggtaattttggcttcttgttaaattagaccggaattttgcattttccttctctttttggcaactcttgacgcctgaaaaatcttttgatcggagattgctaaatcagacggcgaaagaaactccgtcgtcttcgtccatgacctccgtgtatatactcttctgcgggtttgtcattttcggttgaatttctttctgttttcatttgagtcttgtttcaatcgcatgattccacttcgagtacttatacccatagatagtgtgaaattagtactactgttgggtgagtgtgtgcgctgtgtgtggtgttctgtgaga

SEQ ID NO: 39257 - DNA, 411 bp, Arabidopsis thaliana columbia
gagttcaaactctccttcttgaaatttaaaccatttttctatattgacagtgttgcaagcagatgaaccgatcgatttgttcatcttgccaggtatggagaaactgattcatttccaaaactttactttatctctttatctaatcaactttaattttcaaatctttgtggtcaggtcttgcgtttgacagatgtgggcgacgtttaggtcgtggaggtgggtaagtttccattgaccttaagttttctttccatcatggtctgacctaataatatgaagcttttgttaagcagtttctgcggttgtactactttgtaaagcgattacacaatcttagtctcacttcttctcttaccttctgtcataacacagaaatcttgccatcccaaagaatgtagtttcatactagca

SEQ ID NO: 39258 - DNA, 514 bp, Arabidopsis thaliana columbia
acccaaaaaagtgacatatttaaaacacgtagacttgttatggtaaaacaaagatttcatgtttcggtcgaagattcgtttgccgtaagtggagaagatcagctccttaaggagaggatactgaatcataacaaataacagcgccgggaaacaagcgaagaagatcgtcggagcaacgatccaagggtcgttaaagatcgtgaataaggccgacgagaatgccacaagcatcgccgctatcgagacaaacaatgtcgaaagtccagcgatcatattcgcaggcagcgagaacaagaaatcgtcgaaagcgtatctcgcggtgagtatcccgaggaatatgaggacggaagtgcaggcggcgaacgaggagatcagatcggagacgatgaatatgacgaatattcgttcatgtcggtgaaagggtctaccgctgagttgtcgtccgtgccgccggggacggtgaagattgccgcgaagtgaccgtgacgatgagagcgctactaagctgcaagac

SEQ ID NO: 39259 - DNA, 686 bp, Arabidopsis thaliana columbia
atttcccttctttacccatcatcgtgaatagcgccgacgagaatgctataagcatcgccgctattgaaacgaacagtatcgaaagtccggcaatcatctttgtcggcagaaagaccaagaaatcgtcgaaggagtatcttgcggttagtatcccgaggaagatgaggacggaggtgcaagaggcgaacgaggagatcaaatctgagacgatgaatatgatgaatcgccgatcacgtaggtgaaagggtttaccttttgaattgtcgtctgtgccaccagggacagtgaagaccgccgcaaaggtgaccgtgacgatgagtgccgcgactaagctgcatgacatagccgtgtctttcatccatttctctgcttcttgtcgcagtccttggtgctcctttgtgaatatctcgatcggtgtttgctcttctgtgtttactctctccttctcgatctccggtgcgattctctccacttcctgcattaatcaaggaaacagtttagacctctgtttcctctgttttagctatgcatgagagaaacagagcaaaccttgaaccattgtaactcgcgttgcaactgcaaaggtgcgccaacgacactagagagcttggaaggaggagacggaaagccagcgagatgaagcacaccatttccatcacagtccttgtctgcgagcaacaagtact

SEQ ID NO: 39260 - DNA, 631 bp, Arabidopsis thaliana columbia
cttccaagctcgctagtgtcatttgcgcacctttgcggatgcaacgcgagttacaatggttcaaggtttgctctatttctctcatgcatagccaaaacagaggaaacagaggtctaaaaataaatctggccttaatgatgcaggaagtggagagaattgcaccagagatcgagaaggagagagtaaacacagaagagcaaacaccgatcgagatatttgcaaaggagcaccaaggactgcgacaagaagccgagaaatggatgaaagacacagccatgtcatgcagcttagtcgcggctctcatcgtcatggtcactttcgcggctctcatcatcacggtcattttcgcggcggtctttaccgtatctggtggctccgacgacaattcagaaggtaacccctttcacttatatgaacagaggttcatcatattcatcgtctccgatttgatttcttgcttcgccgcttgcaccgccgtacccatattcctcgggatactcaccgcgagatactcctttgacgattttttggtcgcgctgccgacaaagatgatcacgggactttcgatactattcgtttccatcgcggcgatgcttattgcattctcattggtgcttataacaatgatgaa

SEQ ID NO: 39261 - DNA, 611 bp, Arabidopsis thaliana columbia
  unsure (1)..(611): unsure at all n locations
caaatgaatctgttctttgtttctgcctcggtctcagtttaatcaattaggtttctgcagaagactttctagagtaatgtcagatttgttaggttcacttttattgtttcggtatgagcactgtaagtgagtctcgtcgtttggcaatgcatgattagttgatagagaaggatctctgtagtttttggggttaactcgtatttgtaaggctagtttattattcatctcgttgcttgaagcaaaccgatgcataagtgttttttgttgttgggaccatgcatggttctaacaatctatgcactggttaaagcatgttctaacacaattagaactgtgttacaaaatcaataggacaaacatcacatttgcattcaaaatggctgataaatacaatgcatgatgagtagaaagctcattacatttaggtttctttcacttccaatggccgtgtctctcttcttggctaaaagctacagaaaaattgttttgaatntcacctaccattattgtctttaacccacatcaccgaatcttagacccagcaaagctaccaaaaatgctacaagagaatacatcaaagctcaancagccttagaacagaagaagatggt

SEQ ID NO: 39262 - DNA, 549 bp, Arabidopsis thaliana columbia
cgttcggtaagtgagaaactgttcatagtgagtacatttggaccaacatatatacttaaagcaatttaaagatctctgtgccatcttggggtgtttttctgtgttaatattagctaaatgttatgccacctggcaagggcttcttggaaattatctatgctctttaagcaagtggtggagatctggattaacatgttcttcatctgcgtatatatgtgctctatactttttttacttgcaactgtgtttgctgcaaaccaggctttatggcctcggctttaaaactctagtgtaggctgtatctggggaggataagatactctataactgatggtttagatcggtttagagtataatgctaaatctgtttttacatgtgctcgttatgaggtactcagagaagtagcaacactttcccgtttgcagcatcagcatgttgtacgttactatcaggtaaaggtcctttctgctcttctgaactttctactgattaatgactacattcagtgagatatcttcaaattggataccagcacgtgtactacatat

SEQ ID NO: 39263 - DNA, 444 bp, Arabidopsis thaliana columbia
tagagatatagttctgtgacactcctatgcacagattcaatagcttaaatggttggaacagacacgtccttaatgagttaataactctttccatagataagttggtagacaatttgaagagatcaagttaattgtactcgcaatgtttgttgccttgtcacattatcatgaaccagattaattatcagtaaaattaatgatgattacatgaacaacattccattgtagtctagttggtcaagatactcagctctcacccaagagacccaggttcaacaagttccggcaagctggttcatctaattcttcaggggaccaaatggaatatgatacttggttctcttagagacatgtggcgctaggattagattgaattcagattatgtaactgatgagcatctggtgcttatattagtgtggaagtggttggactagataatcatg

SEQ ID NO: 39264 - DNA, 534 bp, Arabidopsis thaliana columbia
tataatagattgagtaatgattagaaagtaaaaagtgtattgctgcatttcattcattcaaaacaataaggcaaaataggttgtgacattgagagtcaaaattaggcattaaggttttgttgaattttatttgtacgttagatgaataatcgaatatcagaatactgtattcaaagtttcaaagtatttattggttaagtagtttgcaaaataatcaaaaaatacaaaaaacaaaattttgttgtctaactaattttccactccaataaacaattaaaaaaagaataaaaaagagagtaactctttaataaatctgaaatccctaagctcaagacgagttttcatttctcgagcaatttcactcttccgagaacaaccctagattccgatgatgaggggtctcgtttccggcgccaagatgctatcatcaaccccatcgtcgatggcgacaagcatcgccacatggtagaagaagctacagtctgattccgatggttattgagcactcatcgcgaggagagagagcttacgaca

SEQ ID NO: 39265 - DNA, 465 bp, Arabidopsis thaliana columbia
ttgcgttgatcgactattgaaggatcacaagcaatcgactactaaaggatgacaagtaagaagactatttaaggatgacaagtaagaagactattgaaggatgacaagtatttgcatacacaccacacaaaaatttaaagttcacaagtggaagaacaatgacaaggaatctacatcttttatatgctttgtatacacaccacacacatatttttatgctttgtcgacacacatattttaatgcttttttttactatatattttaccatgcatgacactctttatctcattctctcttattccacatactctttatctcatatttcttcatccacaaactctttatctcatatttcttattccacaaactcaattctcgcttcttctacaaactctttctctcatatttcttattccacaaactctctctctctgaaacaaaagctgtatacttaatacaaaatt

SEQ ID NO: 39266 - DNA, 619 bp, Arabidopsis thaliana columbia
ttctcattaatcatcatcgacataggcacacggcgactccatcattctctcccattaaaaaaaatattcaggtaaaaacttttaaaaaaaagttttttttttctttttttcaattggtaggaggttaattcccaatcaattttaggtttaagcatatatagaaaaagaaaaaaaaaaactcaaattcatccattttttttgtgtttttaaattttttctttaaatgatataggagtgtagatgaaaaaattaaagccattttccaaaaaacaattgatatgcatgaaaatcctggaaatgagattcatttaatttgttgtctatatctcacttactaatcttctcctttttgtaattccaaaccctttttattactttaggttagtcacttactctcggctctctcttttcttagctctgttttttatatctaaaataactttttaaaattgttgtgcttgatttgcagagatttggagaaaaacatgattgttgaaagtttcttataatttggagaagtactatctcaagtttgttaaattagtttataattcaagagttttagaaaaccatattttttccttcatttttgtgtgtataggaaaacatacattttttt

SEQ ID NO: 39267 - DNA, 615 bp, Arabidopsis thaliana columbia
tgcagtaacagtcaggaggcgttatacaacgttgctcgagcgtatcagcatgtaggactagtgactcttgcagcttcatactacgagaaggtgttagcgatttacgagaaagattacacgatgccgaaacttcctaacgaggatccgattgttgcggaagagcggaacgctgtgaactgtgacctacgcaaagaagctgcacacaatctgcatttgatctataagcacagtggagcgtttgatctcgcgaggcaagtattaaaggatcactgcactttctgagtctcgtaatcattgtccttgttttttcaaacgaagataaaacactagggaactgttccagtttatttaaagggaacaaagtttgtttttcatgcattacttagttttctcacaaatcttgatctgtatattgcactccgacgatctatgaaccattagcagatttaatgggggaaatgcctgacacaaccaataataatcttatccataaaatcgatgaaactttgtccacaacccacttcaagatcatcctctaaatgaaaaaattcgtgtaaaggccaacagactacgacaccgctttgagagaaaaccgactgacattttcggttttta

SEQ ID NO: 39268 - DNA, 606 bp, Arabidopsis thaliana columbia
cttgcttgccaaaacgagcaattatatcctgcagattgattaaacattccccagaatcagcaaaaatgcaaaacctttaagatagataatcatcatcatcatcacagttcaaaaatcagtccttttacccaagataagtcaatagcccaactttcagtatgagcaagactatgaacaattgcatgcctgctctgtaagctaccagctcttcccagcttcggcatcaaacttggagacaccagtttcaccggaagtcgagccggtctgtccgggacggggaagtcgacggtgggatcgtagggttcggcgattgcaccttgaagccatttcacggctatcgaatcgccaagtcgtgctttttcgtgcgggtctgatgtgttcagaatcctgatcgccgattcaattagggtttcgcaatccatctctatatttccttctagtttttcccggcggcgagatgtgtaaaagatcgagaagaacatttcaacgacgtcgagcgtagatagcacgcgcaacatagagcgcgtcgataagtctcgtcctcaaccaaaatgtcttcggttttctacatgttaatctccaataggaattatttgataaggtata

SEQ ID NO: 39269 - DNA, 1085 bp, Arabidopsis thaliana columbia
tccctacccacatcttcctcgtgtaagtttgagcttgagaactgtgtatgatacatagattcgaggttgaggagatggtcgttgttgattcacgactggaagctgaatcgaccgtaaagattgaaccggcgttggagtttgattcaatccatcagctagacgatgaacacatccttcagagcctcgacgttgaatagatcatgtagagtcgtgaggttaaatagatcatgtagagcctgtaactagagttgatccagaggctcgagacagagtagattcagagcctcgaggagaacctttgctagactggaaaagcatcgtcggaagtggatagtctctgagactaggacatgttggaggcttgccaacagaattttgcgcagactctagaactgggactatcatagggttaccgacgtcagcgtactgtctaggaagactattgggtcttccattcgataatgaggaagtagtgggtcgatttggggcaatcctcgaaccctttcctcttcctctcttagattttccactagaggagccatcaatccaaagacaaattagggtttgtcgattgagagaaatgaagagaatcaagagaaatgaaagagagaatcaagaataataattagggtttgtcgattaagagtttatattaagagaaatgaaagagagaatcgagaaaatcaattagggtttgtcgagagaggcagattagggtttgtcgagaaagacatagattgtctcttttatatgtgggctgttgagtttgctcgattatacaaaagctcaaataaaagccccaaacgaaataacatagtagctaactagtcatctaatgtggcgactatactacgactatttaaatcagtctcaaattggagacggattatcgactaatgtattatggacactattctgtcgctgaaacgtcgcaagtcaacggcaaaaaggtagcaacttatttatcagtcgccgaatgaagtcactaattacatgctttcttatagtataatgcttcgactatacgtttaaattatgttcttcttccgttcatcccttgtcaatgacagattctttggtctgga

SEQ ID NO: 39270 - DNA, 858 bp, Arabidopsis thaliana columbia
ggaagaatgtcatcatacagggagcattgaagaggatatcaggtctcctcggattaatttgaaggcgttaaatcaaaaggatgttggagttaagttcatcgttgaagacaggctatcggggcctctcacaggaagaagtccaaaaggtgagagctttgattctgaagacagtcagcacaagagacacatgaaggatgttgcaaaaagcattctaaaacatgctgaaaagtctgcaagacaccttaagcatgctttttcgcataaaggatcaaggaaatcaagagatgacgagtgttcaactgtgtcagagcaagactctgaatgtctaagtgaaacttctgatgacaaatctgcatttagcaatgtgcaggacctggggacactaagaagagcaaaacttgaaggaaagactgtcaaggcaggtgaagatgataatgtaaatacatccgcgaactccaaagacgattcgaaaaacaaggaaacaaagaaaaatttagcaaacttggaaactacatatagtgatgccaggaactcttttgctggagccgagaaagtcaccacccccaagaatcgaaaaggaatcataggtaaataatcagaagcttgaggatgaaaaatttgattttgttagttgtagatgtactccaaaggactcttgtacagctttttagttttgagtcttcgtcttactttcgagaatctgtttgcttcttctgttttcttctacttgaagatcagacagcttcagtgctcagcatgttctatcttttaaacaatacagcagaatgtataaaaaccttaaccaggagtttcctagcaagcagtaatacgatccaaatttgcttgagagtcacattg

SEQ ID NO: 39271 - DNA, 582 bp, Arabidopsis thaliana columbia
tgtatgaatcagtacaggtgctattgaagatgtacctatcttgttggctaaacctcagacttatatgaacttcagcggcgaatcggtttgtattttctgttcataactttgcaaagatcagctgcgtgatcaaataatcatcatacctgaaactgttctgttgtcgttttaaaggttggatctctagcttcacactatcgagtaccattgcgccacattttaatggtaaagtcactgacttaagcatcccttgaatccagaactatgttccatatgaacacttttgtttctctctactagatttacgatgagatggctttaccaaatggggttttgagacttcaaccgaaaggaggtcaaggctatcacaacgggtatgaatatacctcttgaacatctaaatgtgttctatgatatattaactgatgtcaccttttatatctgttacagagtgaagagtgtaatggggcatttggatggtcgtcgaaactttcctcgtttaagcataggtacggttttggtttgattcaggtttcaaagcgagactattctttgtttctctctcaatctcttatgtttttt

SEQ ID NO: 39272 - DNA, 1075 bp, Arabidopsis thaliana columbia
tggagcaagggctaccgaactcaaagatccaaatgggcaggttgttcagtttgtacatgtatacttacatctatagaccagagcattggtcatcaaattaattgactttttaatcgattcaagacaccaggtattaaggttgcttgattattcaaggtctagtcgacacctcctagttactgcaggtgatgatggcactgtacatctgtgggacacaactggtcgtagcccgaaggtttactcttttacttattggtgttcatgtggaaaagactgtattttccattacattggctctcctgtcaattttgaaaagctattgggaacttttattttgatggtgttgtacacttagtgggggaagggggggggcagttgggaagccaattaacttttctctgctttcatttccacagatgtcctggttgaagcagcattcggcaccaactgctggtgtttgcttctctccatcaaacgaaaaggtatctgaatccttatcactcttgctacagatacgcaagaaagtcagaaaaaagtggttgcaattgattctgcaaacaatgtgcatgtcaccctcaattttgataagcctgtctaatgctcttgacatagagtttataaacatagtatctacctaacctacaatctagattatctaccgtaacagataattgctagtgtcgggatggacaaaaagctttacacttatgattctggatccagaagatcttcgtcctgcattgcctatgaggcacctttctcctctttggcgtttggggataatggctatattctggtagctggaaccagtaacggtagagtagtgttttacgacatccgtggaaaaccgcagcctgttactgtcctgcacgctttcagtaattcagaggtaaatatttaacccactgcaatctatttagcatgtcctatctaacgaatctggttccatggatagttacattttgcgcttatcagtattagttgtttatttgttgtcctatcctggtttgtcacggcttcacaatttatacgccaatagtacagcgaatgttttttctcttggtgatattgttgg

SEQ ID NO: 39273 - DNA, 629 bp, Arabidopsis thaliana columbia
ttcaagtagagaatgaaccagtaaatggttctttttggaagaagagaattaaattaacatttctagtgtctcgacaacgaacaagacaaaagaactcaaaaatttgggatacccattgtagagttaacacaatatttttcaaagtactttacacataagcgaaaaacagacaaatcgggaaccaaaatcattctctaaacaaaatgtaaaaaaatctgatttttggctgaaaaaaacaacaaaaatctgattgtcagtatcctacaaatcgataaatcgtaagaagaaaacataaaaataatattaaagttgtgtgctaaaagcaaccttaaacaaccaaatagcacttcgaccaatgtcgaaaagcaaaaaccgtaaagcggtgctcgtatgaatgttgaatgggataaagagcggcgcaagatctgatatttggctggaaaaaacaacaataatctgattgtcagtatccacaaatcgataaatcgtaagaagaaaaacataaaaataatattaaagttgtgtgctaacacaaccttaaacaaccaaatagcacttggaccaatggcgaatagcaaaccgtagagcggcgtcgtatgaatgttgaatgggataaggtatatatgaga

SEQ ID NO: 39274 - DNA, 512 bp, Arabidopsis thaliana columbia
cttgtcctttcaacagatggaagtctccacttgtgatatgcaaaagaacattgaagacttagtctcgcagctcgttactgcaaacttggagaaagataccgcgaagacatattacaacgcagagaacaaacgttgcaagaagcttgcaagacaattggcttgctaaagaagcttgtgatgttgcttgatatggagaaggaagtagctgtagaagaaaccgcaaatctcggacacaaacttacttccctcttggaagagaaccgagagctcgccagtgaagcgctgttcatgaaaaacgaagcagttaagcttgctaggtgcgttcttaagatgagggatgaacattttcacaagatgtgtcatctccagaaccaaatctacgagctgcagtcatcgagagagcctgtctacgaaaatgaatcctcgcagagctgctttggattggaaaatagtaagacaaagagcaagaagagaaagatgagtgaacaagaagtgaactggagagaaatgag

SEQ ID NO: 39275 - DNA, 563 bp, Arabidopsis thaliana columbia
gcggcgttagggtttagataacggctgacgtcgaaattggtaacggcgttaagtccacggtactctattgccgcgatgtcgtaggcgattgctgcttcttcttgcgtggctgcacgtgcacagggtttaaaatgttacaaacaaaaaaactttggtactataccatattttcatagaactttcatcccatttgtataaatatggatttttctttttttcctttttcttagaacaactttcccaatttgtataaagtggatttctatcacgtatttgcctaatatagtatgcatattgcatgttcatgtgatcaatacagaaatatgcatgtcatctgatctatttataaataaacattgtctttgcatgtataatctttttcaaagatcaggatacatgacctaataatttgtattaatatcatcgtcgtatcaataattcggatttaattttgctaacgtgtttaattttatgtgtgagatacataagacaaaaatagtaataattgggagagatataatatgtacagggaatgaatttggccataaaagttggatgagtac

SEQ ID NO: 39276 - DNA, 330 bp, Arabidopsis thaliana columbia
tgatacacaaacaatacagaccaccctcaaaactcacatctatctctatctctcttctctgtctctcactctccactttccgatcaccgacgattcaataaaacatagtaaaaaacaaagcaaattctttttttcgccttagttacttcttctacagattatctgaatcttacagagcaccatggatcgttgtatctatggttgctccgtcattactatcttcttctccttcgtcttcctcctcaatgcatccgctttagaatcgggtcaccacaacataactgggtcgggtcaaatatactcaaactccgtcctcgtagctctcctcga

SEQ ID NO: 39277 - DNA, 588 bp, Arabidopsis thaliana columbia
cctccatatatataagtgagagttactgagaagtgagaaataagcaaatcagttcttcatttctccttcttcatataaaatcctctcaggtatcagagcaatttgctccattgcgttgctgatttcttcaattgatcgtatgttttctccgatgacgaagaaacaatccaagctcaggatttacaatcagaaaatgtttcacctcgcgctagtagatctccttcaactcgagagattccgcgtcatgattcttccccgattgataccaatcgtgtttcttctggatctaacgattgtatctctgtcccgaccacccgagaattgctccgatttgctttagcgatgcaatttcgcttgtttggtatgtctgaagttcccgaactctctttcagtctctctaagcatttagcttctggatatctctatgttgatgatgtttgttgcaatatggagattttcgaaatgttaatgtattcgtagagagatggagatttggttagaaaaacttaaatttcaaagaagcttctagtgatgaactttctttagcatctaatttaatatcatcaataaataacaatgtatgagtgg

SEQ ID NO: 39278 - DNA, 579 bp, Arabidopsis thaliana columbia
cataccagttcaagtcggtttaatccgattaaaatgctcggtaacccaccaatttagaatgttcggttaagctcatagggctaagtatggcaaaatttaacgagaattctcaaacaagatcgaaactgaattcaaatatttatattgtaaaacgaaaatttacttaaaaacaattagatcaatccaactagtcacaacattcatatttctagcttaaatttcttttggcaaatatcaagaagtggtgatctagtagtagatcatatatagtcctttttgaaaagggttgaaacattgtatttataatttgatatttgttttaaaaggattactttactgtaactttaatttccgtttaaaagattgtgtggactccattcaaaagatttcaaataacaaaaaattgcttcttttagttcgattatgcttgcttactaaataatacaactagacaattagttagaacgtaaatccaaacttattaggggcttaaggccaatccaaaaacgaaaagtaatggaaattaacaaaataaaataaaagtggccaataatgtttcttaaaatagttagagttaga

SEQ ID NO: 39279 - DNA, 530 bp, Arabidopsis thaliana columbia
ccccccgcaatttgtgataggattatgtttggggaaatcgtttgtggagcctctctgagtctgtgactatataatgtatatagggcttataatatatagacaatgttgaagaatagcatgttcttgttggttatagagactagacatgaagtatactgatagatagattaatcaattcgaaacaatttttctttgtgtgataatttcgatgtgtaattgaatgtatacatgagtaaaacaaatataggggtgtatgcttatatgtatattccttgttgaagaaaaccttgttatcttcaaacatgaaaccgagaaacataagtaaagattttactgtttgttatatgtgtttattgtatttgatcaaacaatatttgaaatattgaaaactgtctataaatatcaaacgttagtttggcattctgcgttacggttttgttgtagtggtgattttgggagtgtttacaaaccacaagctaaagaacgaagaatcactgaattaaccggtttgtttccggttaaaatgtgga

SEQ ID NO: 39280 - DNA, 552 bp, Arabidopsis thaliana columbia
taatgtgacaaacggaaagaatattatgtgtgctctacatggataacaaatttacatataatcagtaccatcgtccatcacttagactgcatatcacctcttgggagatgtagacaaacaaacattaaactgctagaacacactgaaaataccacaatttctcaccaatacccgatcgtcaacctgacaaaaacaattatccatcaccaatacaacattaaacttctctatggttttatttgactttctagtctatgaaatatacttatgtatagtggagtgcaacgatatcattattcgtaacttcaattgatcctagagttataatgaacgaaggactaaaacagagctgctaataatattttagatcgatttcagaatccaccagtatctagagcaaactaattgttcttcactatgaacatcaatgttttaccaatccattattacaaagttttgtgatatccatataactagtccacacacacattcagaaagattcatgaaccttatcacgaacttacttgattgtctagcagaagttggaaaggt

SEQ ID NO: 39281 - DNA, 948 bp, Arabidopsis thaliana columbia
caaaccaccacctacgctgctgaattctttaacttggcaacgcatatgggagtgagcgccaatgtgaggtaccaaacgttgaatggggctgaattcttgctggaaaagtcattgccgccattggtgtttaaaacaagtgtgattgctttgagggttgtgaacaatgttttgggaggaatgtcgtttgttacattggcgaggatgactggatcacagtcggtggaggaggagaagaagatagagatgtcagagatatcagagaaggagaaagaggattgaatctcttagagagtttctttttttgttcctatgttgtttctgttgttcataggtagaaggcacaagaggcatcacttcttgagttgaaacctttttacacgttcttacaaaagcaaaagacatttgttctggtgtgtgtccatcctagtactcctatgtcattggtagggtcaaatttgttgttttctgtatcaacataaccaataaaataaatccaatcacaagttctgattcagaaatgaagattgaatgatttacttataggacatgtaagcttacttctgacgagtgatccatttatgactagagtatagctaagagtcgaacatatgaacaaagaataaatttaaaagcagtggaagaagaagtaatcagaacatcccaagtttcatcaataggcatgaacactagttaagcaataagcaccaagagaggcctaacagtttctcatttctaaagagagagagaggaaaatgtcacatacaaaaagaatgtcaaaatagcggtcataagagaaaaaccttcataaaaaaattagcggtcttagatggttggtgcattgcaaatttgcaaaccattgaaagatacattctttggaattattcatgtgttgaacttgtggtattatacatatatgtagaaagcttccaatttggcgatcacagttgt

SEQ ID NO: 39282 - DNA, 892 bp, Arabidopsis thaliana columbia
gatcacaaatatatagatttttgtactaagtcaaattgtcaatgtttgacgatggttttgatataaacatgcataaattttattgaaggtgaacaattgtaacaacaatagacaggaacaaaaatgggttcgaacaaacgtggtggtcgaggatcacgtcatcattccaaaaatccaaacacaacacatagagaacgcaaacgcagacgtttttcttgagagttacgtctccgacctcactacgatcccgttagacacctccaagccgttatgggaagttcatttactcgacttgaaaacctcggacgctgaaaacgtcgcggttttaaggatccatcactcgttaggcgacggtatgtctatgatgtctctagtcctcgcgtgcacccgtaaaacatcaaaccccaatgagctcccgagtctaccataccagaaccggccgtcttctggatcatcctcgttaaaaaccagttcaagatgttatcccggttcttttggctagttatggttctatggtcggcagctttgttggttttgaatacggtttgtgatgctttggagtttattgctacggcattgttccttaaggatactgaaacaccaatcaaaggcgatttcaagttaagcaagggtacacggatgtgtatggttcatcgtaccgtaagtcttgatgacataaagctaatcaagaacgccatgaaaatggtaaaataattctccacacattttaagttagtaatcaattttatattgacatgtcgaattttttacaacatttgagagatgtgacgtatatgatatttcattaatcttgctttcattgattttcgtgttagtagactgtcaacgatgttgtacttggagtatcacaggctggtctctcgcagtattt

SEQ ID NO: 39283 - DNA, 995 bp, Arabidopsis thaliana columbia
tgatactctttagataatctccggtacgcagattttatctcttctagatcagcatccgttgaaacacctaagaatctgaaaatgattattgttacatgttacaatacatattgaaaaataaaaataaaaagatatgtaatgagaatgtttgttttgctcactggtaatgagaatcaaaagagtctttgattagttctgcaaatttttcgtcactaaggagattggttttgtcctcatcaaccgatttggccgggtcggatcttcctccgatccagccttcgtccgggctttcccagtggattcttgtgtctactcctggagatggttttgacggtttagtcgggccttgtgacgcgtatatacgcgtcactcttcttgctgttatccttctaaatgctttcgtgtcatccgtgaaatgcgcgccgttttggattttgggtaggataatgcatgaggttcgtgcataggtagaagttgcataagccatggctctgtgttgaagatggtttgttctttttttttctgcccttcatgtttttggtttctcttaccgcagaaacttgttccagaacctcatgatatgtgtggtgtagattttctttatatcttttgttgtcctatctagtgtccataggaacaaaaaatttaaataattaaatgtcaacaaaaaaaaagtatgaaacgtaaagatataagagacaaaacgttgagaagagaggggcaatgagcggaagaaataatgtagagataaatgatttctttctttggaagcgatgtctaaatatgttatgcaacaaatgtgtgcgtttgtaatatatatagggtaaaaatagacaattgtatcataattaggatatgacccgcgatataccgtaaattaaatttatttatttatttttctttatcacaaaatataatttgttgtttgttgttgtttgtgatgattaataattatcgataaggttgtgtatgttttttattgagtcacaattatg

SEQ ID NO: 39284 - DNA, 1070 bp, Arabidopsis thaliana columbia
tttcatgaacagcttgttggatgtgaggtaacatcagtctcagccaccactacccatgtggataagactttacctgaccagacaatataacatcaaacttgtaagtgtaaatacatcaatcttgtttcttagcacactaatttcacatgaacatactaatccaggatgtttgctctatagtcagctcgagaacggatgctctggggtttttgttatggttgtgtcttcaaggtctccaaaggcatgtagtaagacttagattttcttctttccacaccggtttagcctaataaccatagtttttcttacataacttctatttgttagatactatggagaatcgtaggactaaagggcactgttcaactagagcgtggagtggaaggtggccgacatggttacatggtttgtatactttaacatgtgaccatctgaatgatccagattttgcttgaaactactcaactcaaatggctgtgatcttatgaaattttcaggccacgatttacggggaaggagggacatcaaggaccatcttttacccattcagcggagtgactgaagagttaaaagcgttcttcaatgatatttcagaaacttcaaaggtaatcctagaatcttagccttggaatgcaggaactcataacatgagtattctattacctaaactctcctattatggatccgtttcaggagcaagagcctcgtctatcatatgtggaaggtgctcgtgacgttgcagttcttgaagcaatgctcgagtctggtgcgaaaaatggagccgtagtccctgtcaacaaattctagctttgaacctttattaagtacgattagactccaacataccgctaaagcttttgctggaataaaaattgttaccgttcaacatgataatacaaactctataatatttcttttgtaacaatcttttattatccaagacttatgcattctgggggattggttctagagcttaaaaataattacaataagaattcaaacagactaaaaagcctataacccatcatctaagttaaggcattaaaaagcacatgtataattagaacaaa

SEQ ID NO: 39285 - DNA, 522 bp, Arabidopsis thaliana columbia
tctagtaacgactgccaccagtgtgctctaaagtacaggggctttcgcggttgcatttaatcttacgccttctgcaaagagaacatgacctgcttcgggtcaacatcattcaccgcgcgtaccgtagacggactcacactgccggccgtctgcgccgtcgctcgggacccggagcggagatcattttcgctcgtctaccgcaaacacactcaaaacagtcacaattccttttctagttgattactcccgagaaaaacaaactgacaaggtgcaaaaaatgagaaaagaaaaagagatgatggcatctgattgttgtggagagaaactgcgttattggtccgggttgcctgccatatcccgtgcccggtccgactagccgattccgcgcttatctccgactccgccaggcatactccgatagggcttgccagtaacagtatgatataagggagatacttcatgccaaattcatatacgacagcttcaagcactctattacatctcccattgagaatgtttgat

SEQ ID NO: 39286 - DNA, 690 bp, Arabidopsis thaliana columbia
gtttgtgttgttttcacaaaataatcactttagtataaataacccttttagatatcatccttacccgacagaacaggtgatactcaatctagcacattctcttctcttttgttctctgtatcgcgctctctctctctctcttcattgattgagtcatcatcttcttggacaagaagtggtccgaaccaaaaccaagccagagaatgaatctctcaggggatcgaacaactctaaagcgtcactcgtcgctttcaacacttgtggctcatttctttggcatcttagctgttgttctgatgctaatttggcttctccactaccgtgaaggcatcgagtatggctccgacaacccccttaaggttttaaatgtaagtttttattttatacactttctatatgttagtatgtatacatgtgaacaaattaaaaaaaaaaaaaactatacacgtgaacctttgatctaaaaatgtatgtatacatgcatgaaataattaaatcctttacctattaactgtaatgaatatctcttgctaattaattatataggtgcacccatttctcatgtactgtggatttctcttcctcgtgggccaaggtaatttcttgacgatctaagaaaataacaattaaaaaacttcccgaatagagattaattttgcatacggttgattcgagtatagaaccagttaa

SEQ ID NO: 39287 - DNA, 615 bp, Arabidopsis thaliana columbia
gttctgttctttattgaggcggcatgtactgtactctacagcaaggcaattttttcctaggatagaaaagcaagccagtgcttgtacttttcaggttgacttgccattctttcaaaagaatagttcccttgacagaaaacaagcagacgtccgagttggaacagatattggcttcactcggggaggagctgcaaaagaaatgccgatgtcaacaatgccaagcagagaatttggaagttttgagcttacttcttcagggagatcaagtatgttgacccttaccaactatttttctcatttctatataccattttcgacatgccatggaattactggaaacaaatgcattaatgtttttatggtattggtcagcatgatgtatccgtgttcagatatctctctacctgtacaaaaaactatttgctgtaccaaaaccaatgaaccctaaccgaaatctcaagagttaagaaatatagaaagcatcaatcacatatagacctaccagatttctcttagacaggttgaagcagctagtgtctagttcaggctcataaatagatttttgtagtcttcttaaacaggatactcaggaaaagacatcatatatatatatag

SEQ ID NO: 39288 - DNA, 793 bp, Arabidopsis thaliana columbia
tgatcaatagaccacaaaagtctatttatgagccttaactagagactgcctgcttcaatctgtctaagagaaacttggttcgtctacatgtgatagatgccttctatcttaactttgaaattctggttaaaagttttattggtttctgtaataaggtttacactaacagatttcaaataggttttagtaaaaaaaactagagaaacggaaaatatctgaacatggatacaccagaccgttgtcaacattccactttccagataagcccataacatacgaatgtaaaagcttttggttccagtatcttggtggtagttcaaaaaagttatttagaaatgagaaaaaaatagtttgtaagggttaacatacttgatctccctgaagaagtaagctcaggacttccaaattttccgcctcgcaatgttggcatcggcatctcctttgcagctcctccccaagtgaagccaatgtctgttccaactcagaagtctgcttgttttttgtcaaggaaactattcttttgaaagaatggcaaatcgaaatgaaaggtacaagcactggcgtaaatgtgataaatgattactgcgaccgtaattatcattttataaattatgcttcaccagctaacagaattaaaggatatctagtgagaacttgcactgaattcgttttgtctgtaatggcctccatgagtgacattttcttctcatagtcgtcaagctccttctgcagctacagatagaaacaccaaattatcaaataccaatttgttctcctgcactgaatgattaaa

SEQ ID NO: 39289 - DNA, 603 bp, Arabidopsis thaliana columbia
ctctagcctaaaaaagaagactctctggattcgatgctaacacgtgtctgagatatattagcttgatccaatcttcttctctaaatgtaatgttgggccagttggacttaaaatagtctctgtaaaccgttttatgttgttgggcttttgctcgttcgttgtatgttatgttcatcttaataaaatcgtcacttgtgaaaaaaataaaatgactctggcctttctagtttctacaattagactctctctactcaataatttataatctggttcaaaaggatcctctgagtgtaaaagcatgattcacgttctaacatgtagatgatttgggaataatacaacaagtgtggatcggaggatgttattagacacgcaagaggatccacacacccactaggacacgtgtttacaagtccgagctctgacatggcttcacgttcccgcgacagttcgttgtcaccgtgtaagaggaggtctctcagatctctgagctggccggggaggaccacgtaccttacccgttagccaattggtacacttacgattataaaataaattactttgttatgataaaaataatatttggtcatgcgatgaagatat

SEQ ID NO: 39290 - DNA, 1498 bp, Arabidopsis thaliana columbia
ctctgttttgggagaaggaatcagttgcgggagaaagtagttatggtttgtcaatcagcgggacagacaagatttcgtacactcaaacacgaacacggtatcacaggaaacattgtagttagagtcattgcatgctttcaacctctccaagattgccaggttattttcttgtttgatgagtttatgttattgcaatatatttagatttttaaaccaccagaacttttttttattgatttcgttttagctttgatgttgtgtattttgcaggctgaatatttccgtcaattgttgaagcccgtcacgtagagtagctcgatacttatcgttcttgtttcaagcctagtttcttctatccatttagttggtaagttccagtctttgcacacataatcttttgacctcccattcttgattataagtagctgatttgtttgagatgatgatgtcctctgttttggatagttgatttgtttagtgttggatgggacaagatcgtgggtttgggtttcctactcagcgcttgtgttccttgtcttccctagctctgtctcatctcgggaagcaagacttgaatttagtatctaaaacctgcggcgacaccaccgacatgttttctactcgtggatcttatcaagtttctacccaagtctctcaatcctattttgatgggtattgtggatgggttcatgggtcatcccacctacagcagcagttcttgcctcctcaaaaccaatgtatgaagcaagtacctcttcaagtagacggtgttatatctaaagctgaggaacaatgtagtcagaagaggttcctagtgtttgatcagtctggagatcagacgactttgctactcgcttccgatatacggaaatcttttgagaccctaaaacagcatgcctgtcctgatatgaaggaagagctccaaagaagcaacaaagatttgtttgtttgtcacggaatgcaaggaaatagcgaaccggatttgaaggaggattcggaagaactaaatgcattgctttactctgaagatgagagtggttattgctctgaagaagatgaggttacaagcgcagaccattccccaagcattgtagtatcaggccgtgagaccaaaaaacatttcttggaagctatggacaaccattaaatgctaaaaagagaaagatactcgaaacctcgaatgagagtatgcgggaccgtgaatcgagctgtggtagttgtgacaacacaaggattagttttctgaaacgttctaagctgtctagtaacaagataggagaagagaagatatttgagactgtaagcctcttgcgcagtgtagtccccggggaggaactggtggacccgatcttagtcatcgatagagccattgattaccttaaatcattgaagatggaagcgaaaaatcgagaagcatgaggttctttgtttgtaggatacctaagacatattagcattggcaagtggacttggtttctaacaaagtagtagcatattg

SEQ ID NO: 39291 - DNA, 720 bp, Arabidopsis thaliana columbia
caatatgtttcacatgcatctaattgtaattattattttttgttctcaattcacttttagaagtgtaaagagaaatttataacgcttgaaccatatcttcatggtttaagttaagaggaagaagcgactctttacggtttcactctcgatgcccccttattttttggtgatgcatctcctttattagggaatacattagacatgttttaagtctctctaaatctcttacgtaaatgcttataccgtttgcgagatgaagagaataaaagacatggaagatgtttatattccctcaaccaaacggatagtcaaacttgttttgcaagctagggttaagcaagaaaaattttgtccgtttgtttttaatttatattgacacgtggcaagttctcatatatatgtcaagcatatagtaaaagatagcctcctttcatatatatgatttgtagttggctattatcttgataatatgcctgggagatcggtttaatcgggttaaacggttcggtttgttcgattttccggttttttcggtttctaaaaatcctgccgaattgagccgaacaaaaattcggttcgagtcggttcggtactcggtttttcggttcgattactaagatatatgaatccgcgagaataaactgaaaatttttaaatcggtaataatcggttacccgaattagtttggatcacaattgtaggcataatgtgctgtttttt

SEQ ID NO: 39292 - DNA, 527 bp, Arabidopsis thaliana columbia
taataaaaacttttgatgaatttgtgtttttctaatttcagagaaggtgttttattcgatctgtcgttttcaccaaactttctattttgatatatcgtcgcgcgtctctcaacaattattactataagtcttcattttttatttgggtcaaataaaagtcttgatttttcagcaatggtcctcacaaacagataagattggacggctgtgattttggtttcaatgtcagctaataatatgtaccgtgagattctctttgatacatttcgtcaaaggtcaaaagtcaacatgccacgtagggtgagaacattagatatttccatttgtagcctccccatccatgcccataaagttccagaagccactaaatgcaaaacacctaaagcactgagaaagcttgtacctttgttgaatcatggcaatggccgttcctgttagtgctcgtcctcagtctcccggtatgattcctctatcacctcgttcagattttcactgattcgagtttcatttctctgattttcttggtt

SEQ ID NO: 39293 - DNA, 717 bp, Arabidopsis thaliana columbia
attagaagattcacaaagtcatcatgatccctcgataatgaacttcagctgatgtgcatcgataatgtactaatatcgagagcgagcatgtctcttgttaatgagtttttcaacaagcctactatgaatataacttatgtgccaaaatctaagtaaccatatgatccacacgtactataaaccgaatggatttgtcccaagtgttttttttttggttttaatgtgaagaatttgtccctagtttatgtttgcaccactcactatagacgacttcgttattatttctatctaatcctcaaatgtaaacgtcaaacaatcctcaaatgtcattttctcttaacgatcgtagcactaaataatcatccgtcaggaccgtcacaactttttaaatacggattctttttttcttcgtcaaaagtagtcgatgttcgtgagttcaaagtatctcctgtcaacagtacatgagcttgccataactaaagttttttttccaaccaaaacaaaggtttttggtagtacgtagctagtagctactgttttgaaacaaaaataatagaaggagaaaattaacacaaaggaagaatttggttacgcgtgccaagatgagctgtatttgtgtggttggggaaagacccgcgtgcttaaatctctcacgtgtgaagacctcaacgaagcaacaaaaaataaattgaaaaatgattaattaataaacaaaag

SEQ ID NO: 39294 - DNA, 737 bp, Arabidopsis thaliana columbia
gcagatattccaaagaagaagagatagtagtggaggagttgcgaaaccgaaatttcacgtacgtggtgaagtgagtatttcatcatatagtagaaagcaattcatagtaaataaaaaaagataccactggtggtcaacatgtaacactgttgtcatgcttggtgcagcgagcattcctctgtagatggatacaagtgcttattttatgaagaaggctttgagagacttgagctgcggcgacggtttccctcccattgtcttggtaaatcggtgggcgtggggctagtatttcatcaaaataggtgcatggaatgtaatgtaatgtaatgttgaattgcaggtaaaaaaagccaaagtatacttgcaccgggagatgaagaaggaagatccttttcataagaaatggcctggatgttaggtaatcctacaaatagagacaatgttttgggtcgatgtaatgtagcattcctcagagaggacatgatgtaatgtaacaacggagatgcttgttactgacttactgtaatggattcaacaaattcatccagaagcatcatcggcctttgggctttgagttacgcgtcacaattgaatcaattggtccttttaattagttttaccaatatacccctccgtcttttcccccttctcgtttaggaaaaaaaatcattagcttcgacttatccgaaacctaacgagtaacgacgagagatgcttcttcaggcggcggtgcagaa

SEQ ID NO: 39295 - DNA, 588 bp, Arabidopsis thaliana columbia
ccccgagaactttttgtccgtttaggggccaccagtttagccatcttcttgagctcaagaacatcattaaaggcttgacttatactcttttcattgaagtcatcccatttttcttcatcaaaacatatatctttaccttgctcaacagaaccagaatccgttccgccaattgccggggataaatatctaacaagaacatgtgacttgttgctctcgggtaaacacttctgtttcgtctccagatgtcttgcataacgctcactgagcagattgcaaagactcatgatcgccttccgaaatttatcattcttcatcaatatttgaacccgtcgcttgcaagccaaaggaggggcaggcagttctggaactgaagcccacatcactccatgaaatttcgccccaagagctgcacgatgtctaacatattgactcaacagtttcctgaccagaaaatacttgtgtcagtggtgcaaattaatcagatgtcataaattatttaagacaggagaaagtttaaagaatgaacgactgaacactcaatcatatggaaattagttgacagtaaaaaagcatgaattcattgaaatt

SEQ ID NO: 39296 - DNA, 639 bp, Arabidopsis thaliana columbia
gggtctctcgttaattccattccaatcttgtttcaatctatcttccattgatattgatattgtttataaatttctttctttttttattttgctcatggttttgattttgttggttatcctcagaatttcatcaatcttccatgattttagggtttaggggtttagtagattgtttaagtcgagtctcttgataaaagattaggcttttaagttatttgtcaaagatcatgccttttgtttttttggaatctgagaaattggatttgaaattaatctttctttggtgtttgcaggatggaaattctgctgagattgcacaaggacaagagctatcatcaccgggccgagacctatggaggcgaggtcttgtgttagatttaccatcaacaacacctgaagatactacaagagatgatctttttagacgaaatgcatctttaacttcaagtcctgttgccaaaagagtcaacttttctccaatgtccagccctagagtcggacaacgtggtgcatccttgagtccttcttcttctacttcttcttcttcaagaaacaaacctaatagcctgaagaatctaatccccaagttaagctttaagaaccggaacagcaataacgataatgtggatatcgagaaag

SEQ ID NO: 39297 - DNA, 557 bp, Arabidopsis thaliana columbia
gaaccggacataggatcctgtaaaagataaagttagagataattgtccgatttgtttgcccttttaatttggagagatatgaaccaaaaacatatttcggaatgggtccctttttcatcgtgtgtaacagttttaccaaacagtaatactttgtgaaagttttgattaattaatgcaaaaagattagaaaaaagcgaaactaatttttggattacactagaaaaaggttaaaatcaataaccaaaaaaagaaaaaggttaaagttacaaaacacaccggtttatagagtgaaatgattattgttctgttgaattgacgtgccagctagcattcaccttactattatcagtcacctatatatcacaattcacaggcttcttgctttctctcattggctcgtcttcttccctttcttctccaatcaccttagcttgctgatcaggtaaactagattggtgtttcgtgttgttttcttctcaacttaggtgtttgatttgagaagtttttctatgtatgttggcatgttgcgttcgtagcattgcatatcaacggatagg

SEQ ID NO: 39298 - DNA, 249 bp, Arabidopsis thaliana columbia
taaggtttattcataacaataaagttgtttggattaccataacactaaatcacagaaatgcaatcttaaccgtcgtgaaagaaacaagaaacagaaaaaccaatttttagaaataggaaatattatcttcactatatcaatcatctacacaaaacccaatatccagcaacaattcatcttgtagactaataacatctgaactaatcagtatcactacatctatatgccttatggcagctcaaagtttga

SEQ ID NO: 39299 - DNA, 524 bp, Arabidopsis thaliana columbia
taccggagcaagaaattgatccgtcgcttctttcttatagcagctcgacaaagtacaaaattgagctcaaaaccaaaaatcgagtcctcttctaagtcaaattgaaatcaaccttggcaaattgtgcttgattcttcgtctagcttctccaattttcatcttcgagattcgtctcttgatttaagcttcgtcatggactgcaaatcgtctgatagcagtggttagttcccgaaaactgtgtagaatttctctcgccttctctatcagtcactgaaaattagggttttcacaacttttgggatttctccgtgcgattactgttatacattgtgttattttggtggattggtgtttttagttgaaattttggatcttgctgtttcttgatttaagctgaaaccttttgaatgtaatgtgtggtaatgattgattcacaaaggtttgattattgagaatgcaacattgattgattttaccggtggtgtattcaggaactgatgatgatctgccaccgtcgcatagag

SEQ ID NO: 39300 - DNA, 978 bp, Arabidopsis thaliana columbia
atcatcttctaagggagcatcttcatcaattacagtgcttagtagatcaactttttcatcatccataagctcacacatatgcacatatttctcactacataattaggaatttttacttaaaacacattctgatgtgaacaatatataattccagttacaaaagaatatttctggaaaaccataaaacatatcacagaaaatatatatatgcaagcaaaagtagcatcaaggaactcaccggatcaacttttctatgcgagtcccaaatgtttctactgtaagtgcatcaaactttctgcggtctatgacaacccttagatcttcaagacaagacagtaggaatggaatggattgatcatcacccggaatggcatctgctgcacattttgcaatgtcagcaagttcactcatctgcgttatcagttttcaaggttttcttcgtcagaaggtatttaacaacaagagacaagaaaacttatgaacatggagcacaaccatcacaaacctgtggaatatcatcttgatcgtggaatgtacccttgcctcctaatatctgttcaattggatcaggcctaggggtcggaatcggggatctaggagtcatgctactggcagatgaagttgtcataccttgatcagacttgggaccaaaacgggttctacatgacattagcggtaaacctctcagatcatccataaaaattgaattatcagcctccggaaaacagtcaagcatgtcttctgatccttttcgcgaccaatcactcaaccttggagagagaacatcagattcttcagtcagatgtgaattggatactttcataccatctgggctctctgcggctgctaggctatccttatgcctgaaggtctctgctatcttgtcaagtgtccagcaactgcatcagtcgtcatcacactcagtctttctggcatatttacagcaatgtcaaacctagagtgactccacatgagttg

SEQ ID NO: 39301 - DNA, 498 bp, Arabidopsis thaliana columbia
cagttgaacttttctaatgtaaatagagaatctatcaattttacgttttaacattcctaacatatgtaaaatatggatttaaatttgataccaaataagtttactaacattatttttccatgtgacacggcggaatgttgagtggtcctataatttaatactaacaatatgtttgtttggcagaaggacatccagaagttgcttgcggcttaaatttagtgttggcatatgtggtacacaaatttccaggttattgttggtataccagaattctttctgtaacgtaaataaaattatacaatcgcatgatttgttcaataaccattccatataaacatcaagcagtgcctttagctatattcataaacatccaattattagaatatttacaacacacacaaacatattcaattcgtggataaatttaaaatgagagtgcttaattataagactaacgttggcgtcgagaagaagaagactggttccttgactgtggga

SEQ ID NO: 39302 - DNA, 526 bp, Arabidopsis thaliana columbia
gatcctctggccgccagtgtgctctaaagcggctcagtggtcaatgtcatataatttctttatgatgaataaaaatcatgattcgaccagatagcagtggctcctgaaagacagcttccgcaatcggccattcccgtcaaaggctccaccggtcggtatggagtctagtggcgggactgttcggcgtatatactccaccagtagaggataatacacctgtgttgtgaggacagctcgctcaagctagctcgtttggatttcctcatgtgtactttgcagttgtgcttcattgcgctggtgatctagagacaacgagtctctctcttcgtctttgacgcgcgctgttagtggtgtaaattttgatagggttgacaaaggacgagagaagtgctcagagtcagtactggctaaaagggtcggggtagcatctactaaccgctcgcgaacttggagacttatctgggattggcacagtaatataatagattaacggtggaaggtaaatagactgaccctagcatgtgaa

SEQ ID NO: 39303 - DNA, 570 bp, Arabidopsis thaliana columbia
agattcttctccggctcaaaacgtgaagcaatttgggctcaagaactttattcataccaaagggaaaataaatgtgagcatcaagaaaagcagctaaattatgtaaattgaaagaataatcatggagatatatgtgatacgaactaattccgtttcagctcatatctcaatttccatgtcaaatataaacagctcatatagaaatacctcaaaattaaccatgagatttgggtttctagaacttacctcagattgaattagaatagagcaacacaaccacacctatgtttgttttcttgagttctagaaccgtgaagagatttttgtttctttgtagagagaaacgtaaaacgacgataaaaaagatgaagaatgtaaaggcaattatcgatttgggttaataatatttctttgccttttttgagtaaaaaattaaagtaatcgattaattaagatatggtataaccggtttacacttgccttaaccaaaaaaataaaatcaattttgtggttttcttggttaagactggttcaaaccggtttacatgcatgtgttggacgtgtgaaaaa

SEQ ID NO: 39304 - DNA, 576 bp, Arabidopsis thaliana columbia
  unsure (1)..(576): unsure at all n locations
agattgtgtaatcaataatacttatatgtcacaaaaagaatgacagacacttcttttctataagtttgacaaagggaagaaaagaaacaactctttgtgatcctgcccctttcataattccatggttcaccttcatgagggtttttgagtcaccttggaactgaaaggccaagttctagagcaacaaaacataaatgatcaccacgattaaattagggcactgaatgaggtgaagaaacaaaagatggatgcaaatggcttaatgaatctactataataatttagcttgacaaagcaatgctaccttaaaactagacaataaaatctcgtcttaaataacttctcccaaaactaacttgtcagagatcattattcacagaacccacctttaaaaaaaactgcaaacacatctcacgtgccatcgactccatctggacaaagagcattgtacattactatgttactgtgtgacactcttatgcacagagcacgaactaacttgcagaaaccggcattccagttaaaaaaccaaaagaagganatacaatgagcagatgtgatgcacttgacagtatg

SEQ ID NO: 39305 - DNA, 790 bp, Arabidopsis thaliana columbia
ggtttaagtcaaacccgggcttaccccgaagactaaccttaaccggatttttttttcgcagaaccaaaaaaagggttttcccattacatctatctttggaaaaccggtttaaaaaaaacccaaacaaaaagttttccgttttccaatgggggaagggattttaaaaaaaaaaaaaaaaaaaaaaacacgatgtaaaattatcggaatccatccaactttcatgaagaaatgttagatataatggcgatgtgttgaggatattttttttttgtgtaactagaagttaatctattacttctagctggtaagactaatatcacgatgtcaaaaatatcggcaaacaatgaaacacaacgttttgttaactcgcgatattaatgttaactaatagacacgagttgtctaccccatttaatcggaaaacaaatatcctccgttggtaaatttgtcgctaactaatagcggataacaaacgttgccaattagtgctttgtcacgttatctgattgtcctcaaatcgagtaacataaacaagtaaatcgctttagtaagatgaaacgggataatcatacatttgataatccgatatctgattgtcttagaatatcgtgatatgagcctaactgatataattaatatcgcgatatccgatatttgattatcctcaaaccggggttccttcatttatggacataaacccgaagcagataatgaacccgtccacctctaccaaataaaccaatattgttttcaaaaaatccgacaatctcgctaatatcccgaagaagta

SEQ ID NO: 39306 - DNA, 413 bp, Arabidopsis thaliana columbia
cactttagtccttaaattaaaaccgatttaatcgacaatcttgttattctttaaaacaatttgttcttattttcaatctttaaattttgcaacaatcgacagaacttatcgttattccgtgtttttattttcatatctttcttaaaatgtttcaaaataatatatgtttaatattttctgatttacaatagttattaagttatatgaaatataattattttaaatttcaccttcccctctcagaaaactcttataagagagcttaccattagaatatgaaaaaaaattaaaactctcttataactttttaaaaattttaataataaaaaaatggagaaagcccgtgaaagagctcttacgaaccaaaaccattcagtccggttaagaattggttatcaagtttggttcctaaa

SEQ ID NO: 39307 - DNA, 560 bp, Arabidopsis thaliana columbia
taaaggtagagattcaacgaggggagatacacggcaccgcagaggcgagatgaagccggctgctgtgacgatggcgagatagaagcgttttctaggttctgaaaaggcagagtagggtggttctcgctctgggaggagtgggaagttaatggtggatgtgggagagttcatgatggtatggatggtcgatgggcttcggagcggaagggacgacaggggtcaagaagagagagaccgttttgacacaagtgaggaccatggtttagtttaacagaatgtagctggaggcttagcattgatgttgagatctgaccgggcaccgttgggggcggaaggacagggctgagcactgcacgcttaatgtaccctattcagctcaaattcccgcatctattaataccgttaatccaatttctgcttacacaaccaataaaatccacatcgtcggaaccatgccgacaaagagccataagctggcacgatcgacagttttcaagtcatgccaagagatcgctcactgcccaccgcagaagacgaagctcagtcatacaaatgccagg

SEQ ID NO: 39308 - DNA, 345 bp, Arabidopsis thaliana columbia
tttttataacactagcaagtgagaggctgagagccaagtggaacgtgtaaaagacaacattagatatatattatatattgctaaatctggattatttcgtttgaagatacgcaacttttgattggaaatcgtaagtcgaaggaaggggctcgatttatgacgtaggctacgtgccaaacaattcctctttagttgaggccagggaagacgagctcgttgttagtgagcgatgccatggcatgaatgaactcccaaaggccagatgttctgttaaaggctattttagttattaattatgtgctgattaactcgaccacatgttgaatcagatagcatgttctaaca

SEQ ID NO: 39309 - DNA, 486 bp, Arabidopsis thaliana columbia
taaatatggaaatagatgtggaaatcatgatcatgtgaagaagaagaagaacacgtgcagatgaactgcaaatgataataatgtgcatgtccatgagttatgtacttatgtgtattatctacgtgttttccatacatacatatataaatcttatattactttatggttttgtcgtaaaagttacgtagcatcaataattgtgattcgttgccataaacagacaactacttgtaacggtataaggcttggctctcatgataaaatgataaccctttttttcgtcggagcagacaaacgcataaatcactaattctaaaccgagatgattgtcgatttgtttgccatatgcataactagaatcttcagttaatattaatttttggtgttttcgatcgaataagaaagaatatacattgcaatatttcgaaatttgtcgtctttctttttatacactagcaagtgagaggctgagagcaagtggaacgt

SEQ ID NO: 39310 - DNA, 744 bp, Arabidopsis thaliana columbia
ctagaggatcttcagaaaagtatggagccatggaggaagaaaaatataatgtgtcaacacatgtataaaaggctcaataacaagaaaaatgtttatggcgtttgaatggatctttcagattagtggttttaaacttcagtatttaaaaatcagtttggaataagtttttgagatttaattataatataaagggctaattcaaattcatataataataatagtataattgcatatacggcaaaaacaacaatacgtattctggtctttctcatatctacaaaataatttgattatgataaactataattatttctaaattttaaatatacactgcaacacgcaaagtatttattattagtagtaacttcttttgttgaaatatttttagtagtaaattcctttgttgaaatatttttagttgataccaccattttcctcttctgcttccttctcttttttcttcttctgttcttcctcagccaacttctttgatttttccttctcttctaaatgtacaaagtcaatcagtgagagtgaaagtgacgctcgctttttcgacgtaattcaataatattctacgtaatttaatactcacgacaatttgcatataaacccaacgatctcttcttacctagaaaaaaagagagttgacccgtacaatactaagtctatgaatcaatctcttttgtcttcatataattaacaccacacgttaacttgttaaacataagactatttaatatg

SEQ ID NO: 39311 - DNA, 739 bp, Arabidopsis thaliana columbia
ttttttggaaaatcattacgtttacgagttattgagaagtggcctaagtagccaaattacaagctcaaataactcatcaatattcttatatatgtaaacggtacacagaagctgtttctgtatctatagttcgtgtatacgtttcacaggaaccgttcctgaaacaagacaaaagataaaccaacaggctgttgaatatggcttgacaagaatcatcatggcttgctcttttagcttcgctggctcttggcccagacattccccggagtgatagatcagtacactggtctgaaccagcactgcgtcttgcatctccgttgcaagataatcctgattgtctctgcttggcttgagtagattgtgtcaggctcatgtagctcggctttcgatagtacccaccaccatcaagaacactgctggagaatgcaactggtgattgagatgtcgatgatgttgatgtttcatcgtgtaaagaatcataactcatgccagacgaaaccggaggaagaagaagaggaggtctggcaagaactctagttgaagaaagattgttcttcctgactgttacagtctcatattcagataacacactgctctcactacttttccttgaaaatgtcccaacatcatcataccagttccaaccaggactgctcttgcgcaaaccatgatgcgtaatcgctcttccgcttggacttggacacgtcctcgactgccaaaacaactcatgagacattat

SEQ ID NO: 39312 - DNA, 375 bp, Arabidopsis thaliana columbia
taccaagtaacccgaataaacaatcgaaacctctgtttattattcaaaaccaaaacaaatcaattgacgttcatgaagaacaccgacgataaactagctctcaaggtgagaggacctagctttacaaggttctagaatattcataaattacagatttattcgatgaaaagaaagtgacgagctacacacgctcatatagtgactaacggccatttctgatctgcaaatcctcgcctgccacgcgtcacttgattccacacgtgagagctcgcacgtgtaatgctatatcaaatctcccccactttattcaaaaccttgaccaaaaggtttaagcatcaaaacctgggtacttcgcctgcaaatcgaaaaggaact

SEQ ID NO: 39313 - DNA, 471 bp, Arabidopsis thaliana columbia
caaaatacagagccagagtttttccacctcttggacaaaacacaattacacaacaacatcttttgttggaagctgctacaagagcatctgacacatcaaagtgccaagtaatttgcttgtcacaatcgctgctcttacaaaaagctttcctccattgagaaaatttcacagaaccttgctcaattactcaattagttggctaatctgcataaattatggacatctaacattcaattaatgttaagactttgaatataacaggttttagaactcagatataagaaaaatagaagaagccaagactgtttttagaaacttgagaaaatagcattcatacttgggaaaacatacaattcagtacaaactcgtaatcaggcaagagaagagacagttaaactcataatctaaatgaagaatacatatatgatagaccattataaaacgtacaccaagtcaaagatcagagttttg

SEQ ID NO: 39314 - DNA, 930 bp, Arabidopsis thaliana
aggtggtccgatgggtatgatgggtccaggtggtccgatgagtatgatgggtccaggcggtcctatgggtccaatgggtggccaaggcggctcttacccagcggttcaaggcttgccaatgagtggaggtggaggatattatccagggccgcctcaggcaagtcagcaaatgaaccaacaacaatatatgcaaatgatgatgaaccaacagcagcaacaacaacaacaacaacaagctgtagctcatggtggctatggcggtggtcacggtggcgacatgtaccatccgatgatgtacgctcggccttatcctgcagttaattatgctcaccctccaccaatgccgcctcctcactcggattcttatactcatatgttcagcgatgagaatccaggtagttgtagtattatgtgatcatcttttgtaatgttatttagaatatggacatgtatgcttgtcttagtcttatgtttttttttttggggatgtccttatcttttttactttggaggattggaaacaaaatgtgctttaattttgttagtggaatgatgtttataatatctcgatttcggaaaaagaatggttattggttattaggttgcagaaaaagtaggatgtatgttatgtagtgtttatcttagtgtgaaaaggatgttgcagccgcctatatagtaggtataacagcattatcatttatgataatcaacttgtatagtgtgccactactgttgtgtgatcacaccatattaaatttgacccataaagtaccaacctggagactcatgtgttgattatgatgtttcgaaagtaaaataatccaaaaaagtgtggagaaaactttgagaactatccattgtgttcgacccagttattttcgaaaggtcaaattagtgtatgattcgagaaatcactacagttgttttcac

SEQ ID NO: 39315 - DNA, 498 bp, Arabidopsis thaliana columbia
tcatatataacatgtaatattatagttttttcagggaaaaaatcatataatgttgtataaacttagaatttataattttacatgaacagtgactagaaagtcatgttagggtaaaatgagagagagacaaaagtagtgttaacttttaatttttcttgtctacggttttacgctcacgtttcacctaaataatctttcacctaatttatttatagatagctattttgttagctatataaacatattctcataaaagaataggtacaaataattacaagcgatacatgaaaagcatgtgggacaacttaaacgaaataacacaaactaaaccaaactttatttcggttttgataacttctaaaaaggaccaaccaagattcgaaccaaaccggatccaaaagtgcccttacaaaaagctgttttgcctcaagcatcctataaatacatcccaaaacccatctctccataaacacatcaaattacacactatctacgaaa

SEQ ID NO: 39316 - DNA, 1353 bp, Arabidopsis thaliana columbia
tttttatttttcaaagacattgtacaatatatcgaataagatacttaaataaatttgtatctaaacttattcgatatcttttaagaaataaagagtgaagaaaattaaagttagttaagaaataaaaatgttgattatgttgcaaattcataaagagaaaaaaacatcaatcaaaattaaagtggtttgttaaaaactaaaattagtctagttgacgaagatgaatttgttagttactttagtgttaaaaaaaattgcgatagtaatacgaatgagcagaaaaacattaaaaatgaaaacgacaagaaatatgtaaaatgggcctaacttcctaggcctgaaaacgaaaaggccgtaaggtaattagtaagcccacattagaagacaatttgtatggtaaataattaactattcattggaaaataaataaccacttgcactataagcgagttatcaccacgcgccacaaatctgtaggtaaccccttttgaaattagccatttttggatatttgaggaaattaagcgcgtctgcctgattatttttgcattatgggctcctcgtcttgtgatcgatatatgactgaaatgggccatttaataaaagccaattaagtaaaacggggccatagtggcccaatgaaattttcttcatacattagtattaaataattaactattcattggaaaacaaataaccacttgcactataagcgagttatcaccacgcgcctcaaatctgtaggttaaccccttttgaaattagccatttttggatatttgagaaaattaagcgcgtctgcctcgttatttttgcattatgggctcctcgttttgtgattgatatatgactgaaatgggccatttaataaaagccaattaagtaaaacggggcctgagtggcccaatgaaattttagtttattactgagagaggcttgtggaaacacgagagaatgcgtgcaagggagcatgtgccacgtggcgagagagtgacgccacaagtggcagaagaaaccaaaactaaactgattattattatttctggctctgttttgcttgccgtgtatcaggtgctctgctccacttacctttaatcttcaatcaacggtactctcaggaacaggaatcagatcgagcaatgctcaggttaatcgttaattaccctctgattcccaagatatcccaccgggtttgtagtaacagtagtagtaagctcgggagttactatgattcttcgtcgatcataaaatatggcggaatcagcgatgttgttggtaagaagcaggagctttttctaagtgtttcggtgaaagcagtggaagacaaaggtaacaatggaggtggaacatgag

SEQ ID NO: 39317 - DNA, 712 bp, Arabidopsis thaliana columbia
ctaaatacaatactaaaatctcagctgaattgccaaagagtgtttacctcaacaagccttagctgaatattatcatcagcaaaaaccgaatccttcaaattctggccacgaagccctctcatcaacacagataactgttcatcttcttccatttgagctcgtactcttttaatctcttttgatacatcgttaattctctgtaccattgccataaaccaaaattcgaggttataattttacacaatccaatagaaattttctatgaaattgctcaattgaaccataacataatcggcagaggtaggagtagaaatcgtacagtggaaacattgttgttgactacttttgacgcagacgatggagaagaagatccgtttacggtggtggacttgggtggactagtctgtgtaggtttaggatcagtagcgacggctagaatctggcgagagcgtttattacggtgaggaatcccggagacgaaggagcggcgggaggagacggagaatcgaattggctccggtccgcaattgacgagacgtggcactgctgcttcccatcgatcggtagagagagattttgaggagatagtggttgtggttgatgaagtagtagctcttctacggctctaagtggaagcggagtgtttggtatttcaccggaaggtaacggcaatggagggtccacgtgccaagaccaagttcatatgatgatt

SEQ ID NO: 39318 - DNA, 821 bp, Arabidopsis thaliana columbia
accaccccccttaatagtaaaaaataatggacgttaatgccatctcgatttcaaacaaaaaaaaaaaaaaaaaagtgagaaagaatagttaattcctgaatttcttagaaaagacaaatgttatgcaaatgatgatagattatgttttaatttcacggtgcagacaaactagacatctgtgttagtaaagcatcaatggctttgagaagaaagagagaacaaggcatgctaaaagcaaatattaggacaagtatttgatttgtactctcttccctcattatgttcctttgcaaagacacagcagaaacatccaaagtgaagatgagtttcatcatcacttgcaggggagcggaatattcgctgacaatcacatcacatgccgtttggattggaacctttttttattaacttaagtcgagagctctgtgttcctcgatttacatttttggtttctattatcaatacgcatcacatgtttctggactaagcagggctataaaggctaatactagtaataaacaatggaaccagcctgtgcttttggactttccccatgataatcttactatttgcttattaccattctttcaactcttcatcgacttctcaaatcctttattcagcaacataacaaaatgaaatcatgttttctgatgcttcatcagattactaaccaagacaaagaatcagaaaaatttcatcttgcaacaggacgtaaatcactgttccaaagtgtaaagcaagatgatgaatgatgatgcccttacttactagggggactccatcagttttatgatatcagagactgtgcttgtgtaata

SEQ ID NO: 39319 - DNA, 725 bp, Arabidopsis thaliana columbia
  unsure (1)..(725): unsure at all n locations
gttcggatccggttcgagtatgcgagtacagtttttatgtcgaggcctaattttatctgttatccttattttgaaccgttgagacagtatcccaaaacaagcatgaatcagacagcaacacaaaacatgtataagaaagaaaacaagtcagacagcaacacacaagatgtatgatacaaaaaacaatcacattcgcaataaagtttttgtgtaagaaatcaaaggcataagaaatctatcgacttggacaaacctttgaaagaaagcgttgaattatataagttcttagcaagatctgaaatacatagaactgaaattagtaaagatccctaattcgtacactaactcgaaagaaccctaatatcaaaggaaatgaaattgaaaattgggagaaccctaattgagaagaaaattaattgaattaaaggataacaacggctatagattcatacatatattgtgacagagctgaagattgtgagatgccgatgcgacgaggatggaaatgaagtcgacaaagccgatgaatatatgaaatcaggtactcgtcggcgagagtcgaagaacgactgatgggggaaaaatcaaattccttcaacttttgagtttctgcaaatatncattttttgtctaagtgttgggaaatattattttgttatggcgcttaattaatttttggtctaagtgttacggaaaactgtctttttagcttcagcaaagatata

SEQ ID NO: 39320 - DNA, 697 bp, Arabidopsis thaliana columbia
gattagtttccattgttaaaaaactgatctattgatagcttccgctttgtgcttttaatacagatacatattaaaaaaaaagggggttttgggactcttatgtagctttaacttatgagagatttcacctgtagaatatctgttttgaactgagatttcacccatataatatgttttgactttcgattcaataggttatgtagttgatatcttttttttttttgcaaaactcaatagcagtagcaaaaaacttaattggaaataatcaaagtgaagggataagttgggaaagagccagaggataacgcatggtgcattattattagtattgtggaggagacgcatctcgaaacatctctcaaagcaaacaaggacccaaaacaaagttccttgcattcttccactgtccgtaatcaccatcaccatatcattattcttctacccattttgtcttggaaatgattttaaattttcttgttgcttcttactgcaaactgtgtataggttcaactactccattgagttacacacttgcatgcacctatggaagttaattttccggttttgattgatattcaagttgttgaccaatggagttatatacccttgatttatatagaaccacatgttttatttatattaacatggtcacttttgtcaggattaatacgacaccatagttgagagaaaaagtgat

SEQ ID NO: 39321 - DNA, 861 bp, Arabidopsis thaliana columbia
ctctttagttcacgccgacgagctcttccgtgacggctacgttatgccttatcgattaaagcccacgtccgcggctaccgaggaagaatctgagccgttggatacaacaacatcggagaagattgatacacgtggccttaacagcaagccttctcctacttcttcaagaaagctgaggagagtgtccaaatgggttttgctgaagtatcttgatttcttgacgccattgtgtaagagattaaggagatgtagatccgctgtaacaacgggaagtatcggtatggattcgaggatccgtgtaacgacttcgtgtaggagcagagtttattctgatgaaatgacgtcgtcgccaagaataagtgttgctgatgattattattggagaaggtcttgtgactctgagagctctatatacgaagccgttcttcattgcaagaaatcattcggtacgaaatagataatatacttaacattttctatttagtttataaattgtttatgattatttgttaatctgtttttatgttaattttaacagagaaataagaagaataatccatggaagaggagcagttagaagtagagatggagaatattaagcttgagagaataagcaaattgcattaacacgttacacatggagtgggagagaaagagagggagcaacttgtgatgtgtctttttgttgattctctctcttgaattaaagagattgatgtgaatgatccatgtgaatgtgtcatctgatgtggatcaagaatgtttttgtttttttacatgagtgggcacatttatagaaatatatatggggctgcaagcagaatcaagaaaatattttcagattttcttggctattttttt

SEQ ID NO: 39322 - DNA, 569 bp, Arabidopsis thaliana columbia
ctcccgtagtagcacaaaggttaaaattgaggacattcttctatttccgggttcaaatcccggttgcggatttaattttaaaattactaatatttacataattgtatatatacactataaattcaaatctaaacaaaatatccgttgtattacaatggttaaaattaaagaacattcttccatttccgggttcaaatcccgacggtggaaaatattttttagtttgagtaagaaagatgatgcaaagctgtataggaattttgataaccacataaatgttgggtgacccatcaacaaatttgttaaaaactcaaaatccatgtgttttggtttctgttaaattaaataattaataacatggtaatttaaagtttggctttaaatgatcacattactgctggattaagagcttttattgggttatacatacattaattcaactatttccaggtacatatagaaaactttgtgtgaacttttagatatcgcgaccatattttaaggttgtattcaatttttcttgctagcaacatcaaccaataatatttaagaataataggtgcttgaga

SEQ ID NO: 39323 - DNA, 570 bp, Arabidopsis thaliana columbia
aatgtttggctcaaaaattcgagaagagtaactttcttgttctcttcctagttgctactgaaaagaaaaacaaagaagaaggagaagagtcaacagtggcggttccggcaaagaaacctaaacccgcagctaaagcggctgcagtggcgaaaccgctgagacaaatgatggaagaagacgtgattcctcctttacaagccattcttgaatctcaagatgatatctctgacatagatttatctttccaagacgataaggtttcttgcttctaacttctaatgctttgttgccatgcttatggggccatctctctaccctatatggctccagttttattggatgttctcaaaatgtcttcttgattaaacttctaagacaattatcattatttgtgtcagttggaaggttttttcttaaagaaaagtattccatattccttttgggcctttttccctactggaaaccttacaggtgaagtattgaatcttttacttgagactcttgttacagaaaatttcaatggaacattatgtcttttggtttgttgcttaaaacaggagcaaaaggatt

SEQ ID NO: 39324 - DNA, 919 bp, Arabidopsis thaliana
gtttcatgtacagtccaagttgctccagcggattacattctccgagtttgaaacttccaagtgcgtctaaaggtctctcggtgctggtttcatcaggttttggaacagcaggagcttcgggctcttcttcatcatcatcttgtttcatgtacagtccgagttgctcaagtgggttgcttcctctgaggttgaaacttccaagtgcgtctaaaggtctctcggggctggtttcttcggctgagcttggtaattgctcaggtgcactcgaactcagcatctctaggtcctcgagaaaccgtgagttctcattaatctctacagttttctccatctgcaaggaaatcaaagtcatacaaaaaatataagaatctccatcatttgaagccaagaaacaaacaacacataactttcatgggtggaacatttaaaatcatcagagaacgtgctccatattttaacatgtttatctttaatgactgtttttagggtttgtgatcctgttatgtaagtcatgtgtttgctatttaccttcaataaagcttggcgagcggcttctctttcgagttctctcttccgcttagcctcagcagcagcttctgcagcggcttctgcttcagcttggcgacgagcatcttcagcagcctctgcttcagcttgtagacgcgctttctctggcaacataagtagagggttgtcaattaaaagaacatataagtaaaaaaaaattgttcttgtaagaatgatccagagaaacaacaaaattttaatatattggcttgttctaatatataaacaactaaacaagtacaccaacctttcttcttctgcagtacgagttcttctctttctttacgcagcctttctggatcgcccttaataccattctgctcccatgagagatcaaatttaagccatatta

SEQ ID NO: 39325 - DNA, 560 bp, Arabidopsis thaliana columbia
tttgtttaaaaatcgttttgttgtgcgtgtttgtgtttctgtttaggggattcgttaatctttttgtgtatgatatatatttggtgtacctccatacgctggaaatgttataattcttgttactaattggagaaaaattgtttggaatgttacagagccagtcttctgcagtcacagatgatgaaggaaaggattccagctccagcaagcatggaactgagaggataattcgaacagtatatgcccaaaataaggtttgtggtttcaaccaacgattatttctttatttttctcagaactatattaacttaattatatgagtgtccactctctgcttgaaaccaacctagtcctataaaaagggcagatctttctggatgtttcatttaactgagggaatctatatgaataagattttagaatggtttattagagatgatgactaaagtagaacaatatcctacaactgttaattgatgtattattattgttgctttaatgaacaacgtcaatacaggcaacaccacagaaaagagaatctttggggaactctggttatg

SEQ ID NO: 39326 - DNA, 785 bp, Arabidopsis thaliana columbia
tggctcttttggtacatagcaatcaactacaactttagaagcaacaaaaaactacctcttctagacgctttcggccttcaaagctgaaaggctttaatagcacagcaacagctaagttacccccagatcttactgcactaagaatattaatagcttcaacctggtcagaaccatatccagcactagccacctggcaagggtaacagtttaagcagaatcagatgctcggccaatactattccacgaaaataaaattcgagaaaaattgaaaaccattagcatttcattaagagcctaagcgaatttcggaaccatggttgttaataatcactgatcaattagacactgtgtatcttttgctacctatggaactgcgaaattcaaaaacgtttttgtagcagaaaacagaacacaaacaatgttaggcgagaaaagtacaaacaaggatgaaggcccttggacgtgactgtaacagctcaattggattcatggtcttcaaggcattatctgtaaacagaaagagagaagcgataagtaagaaagatagcatatccctctaatcttcttgaacaactagctaaatatatgctagttgttcaagaatctgtttttaatcaaattcaaaactcaaacggcaagaagaaacaggaaaagaatagattatggaccttggtgattgagcctctgctgtaacactaaacctccagagctgtccttgctaatactcctcgaaaagtagatttggcaattaaatttgatccctttcacgaatacacagagcgtac

SEQ ID NO: 39327 - DNA, 855 bp, Arabidopsis thaliana columbia
gacctaatccagttctactgctagtaataacctaatacattatgactatcaatgccattggaatcacataacgtaaggatatgcaatagtcatgatcactcacattgtctgaaactgatgttgaaatcttcatcttcttgctttttttccgagcaattccaccatcatcatcatcaacatcatcacatttcctctttttcttcttcttcttcttcatcaacttcttcaacttcgaaacaactcttgatttacctttcttctctctcactttccaaacatttctcctcctgaaaacaagtttctcagatttccaaatcttaaagctagtatcaatcacggtcacttcacttctcgaaaacccaactagatctttctctcctttctcttcttcctcatccacaccatcaccttccactacacttcttctcctctccctaatctccggcgccggaggtttcttattgtatgaactacgcgacgatgaagtagcgaattcacgaacactagggagacaattagcgtcgtcgcttttctgatttaccaacggaacaacaacgtcttcaggagtctctaaagagcaatgcctagggtttgattgtttccttggtaacttcttcttcccgggaattgtggaagatttagaggagccgctgaaattgaatagctcgaagagaacatcgctcatcacgccgtaccattctccaggaactggctcctccgatggactttcagctaattctggatctgaaggaattggagcagatggaggtgaatcggaagcggaactagtggcggcgatttcagtgtggtggttgcggcggagaaagtcgtcgagagtcagtggattgccagaag

SEQ ID NO: 39328 - DNA, 706 bp, Arabidopsis thaliana columbia
cgttcccgattcctctacaaccctaggttttgatcgggaatttcggttcttcttcttcgttttctacttcaatcgttctcgcttttgatttcttcaagttctgatgatgattatcggtaaatttcaaccttggatctttggtagattttgctgttgtctcgtgaatattcatcgccagttttggcgggaaaatgtttctgcggtggtttgtttttgattgaatctgaaacttactattgtcttgtgctctcgattacattcttcagatcttatcggaaagctttagcggcagagagaaagagtgaataagtcgagacttctctggtgatttgttattttctttgtggtttttggtgattgcaaatcctctggtgatgttgattaaaaaaagtctcattttgaagtctggtgatacaaggatccacaaaggaatctcagattctcctactgtagcaatatgatggacaaagacgagccgtttgtctacaacgaggtggattacaagaccccaaagcagagtccccagacgtggccgatggataagatccggcagagccgttttcaacataaaatgtcatcacttttgagtccggtgactcctaaaaggaattacaacattagcaatgcgaagacactcctgctgcagtgtttacgggacgctaaatcagatccactccctcctaggcgctttccggtttcatgctca

SEQ ID NO: 39329 - DNA, 707 bp, Arabidopsis thaliana
agaaatagatcgcgtaacaagtggacttggaaaagctatagtttatggcgttttcggacagatttacacttaaataatattatcctcacatcttttaaattcaattatttcattatcttggttatcagaactgagttttgtcggtaacattgtatctttaaaaaaaattatcctaaacaaagaacgaaacgatacaatagtataaatttgttcttgtcataaacgataatttccaggtaagattaaggataaaacaaaaaagcttataatagcaatttaaaacacgaattcaacgtacgatccaccacaatcctcgtcgtctttcaaacttaaaataccgaaactacccttaccttcttctttccataagaaatcaaaaccaagtcctatggtcgcaattgtatctctatctaaaaatcttctttgaatttgtgtatacacaaatcttattcaacgaatcatttatcaccaaaaggttctctcttttttgtttgtttctgtcttgtgtgaatgactcgtcggtgttcgcattgtagcaacaatgggcacaattcacgcacgtgtccaacgcgtggtggtggcacgtgcggtggaagtggcggaggaggaggaggtggtggtggaggagggtctggttcatcctccgccgtgaagttatttggtgtgaggttaatggatggctcgattatttaaaagagtgcgagtat

SEQ ID NO: 39330 - DNA, 682 bp, Arabidopsis thaliana columbia
atctaagtaagctttgattagagactgctatgagtgtaattagaggcaagcatatttggtttttaggacacaagtcaaagagttgatgtatagagacattatctgttaaagccttagaggaagagctagtggcaattgacatacgagacggtctggttttgcctggtggtttcaaggtctgctttggaatcttcgatggaatattagttctgcttttaaaatcccaaaacaaaacaaatataagaatctgtaaatgccttcagattgttctcttaatgtgtgatagtagaggatactaacctgtcttttggttcggttttccccattttcactgatttctcgagtttctcagaagtcatgcgttcttcaggtcgttctattatttcaagaggctaagcagtttcagggaatagagtcaactctactgcactgcttatggatccatcagtttatgtcccactggaagacaactatcagagatatcactcaatctgtcctcagagtctgcatctgcaagacctacgagttcaacatcttcatcatcaaaattgatacctttcgctgcaccagcaaatttagatggttggtgataatcttatcgatgtttacgttcgtctgatgattgttgtgaacagaatctgaatgctcgctgctatatcaaaccagttgtcacatttgaggt

SEQ ID NO: 39331 - DNA, 604 bp, Arabidopsis thaliana columbia
cccttcgaataattgtcaagctcacgtatacattgcaatgagtgcataaacctgttgcaactacagattcacacatacacaaacaatttcgatataaaattagagatttcgttacacgaagacgtagaaacaacacagaagctccagataaagagagaaatcaaaaaatccagtgagagtacctagttacattcatgaatccgtagcttccgataagccgccctacctcgaacgagtcagcactggttatcaaactcgctgtcaccgcatgcaaccgccgaatcggccgattccgtccacgcgaatttacaatccgacagccggagaatccatcgcctgattctctatgtttcaaagagaaacgcgaaacgcattcgaaggaaacgcgatgaatagcgaccagattcatcgcttttgtttgtgtttcgtcgcttcacttcaaattactttccaggatttaacgagtgtcagtgtcagtataagagagagagagataagagccaggaaagttttctctgtgtcttacgtggcttttaatatacataattaaatgatataatcgtgcgtcgtatagataaatatctgagataatcttattaaattt

SEQ ID NO: 39332 - DNA, 503 bp, Arabidopsis thaliana columbia
gaagaagaaacaagattgacaaaacatgcagaatcaccttaaagacgacaggcgttcctcgaaatggaccctgagatattcgtccttgatatagtctgcatacaaactgctgtggctaatacatttttaacttgaccaaatatattaccatctaataaattgtctacacaaaagccaaaagtgcacctgatcttaacggcaccttctccaatatcttgagattttaatcgcccaatatcatcagacgtatattcaaagtcagatcctgactgcagccctgtataactaggagtatagaagtggtgaaaagctaagtaaacgaagtagaacacagcggcagataaaagagtaaaactagaccaacaaacgtagcataatctagctaaagatgcacaataatcataagaaaggtcaatgtatcccaattcaaatacactaacaaaagcgatttttttgttaacccttcgaataattgtcaagctcacgtatacattgcaatgagt

SEQ ID NO: 39333 - DNA, 781 bp, Arabidopsis thaliana
ctgtcatcgctttcatagccatgtttctcatttgatgtaaacattgaatccatctgctcagagagtcttttgaattcatcctggagttttcctgctacactagcgtttttccacctcgttttccttagagtttcttcggcttggatagctctttgctcttgctccactttaccacgtgtgacagcatcaatgtctgcctcgaatacctgagcttgtttctccatctcttcttccaatgtctccatttgtgattcaagttctttaatccggcacaaagactctgaaaactcttcggactgcttcttgagctcagcttccagactctctacttggttttcaagctcggtcacatccacaagcgaagatgaacattcgtattgtatcttcaactgttcttgcagttggctctgctctagcttgtaagagatatcatgattttgctgtttcagtatctcataatccaaagcaagctgttccatctgtatctcaagctcatctttatcacgtttatatatctcaatctcattataaaggtctgtgatcttctgctccaaaatatgtgtatctttcgcatccacatgtttcttcacaaggtcctcaagtgccttttgatcatgatcatcttcatctgtctcacttctacaagaccttctcattgattcttcaatgttatcagctccttccttactcttttcctccagcatttcttcaagatcttgaacagcaagaatcaactcggagtttgattcttgcgtcttctcgagctgtaaccggagattga

SEQ ID NO: 39334 - DNA, 709 bp, Arabidopsis thaliana columbia
tagatagaaccctaaaaggagatgttatgcatatggaaaagatttgacagttatcatcgggatgtatagccaccggaaagagatcggatcccaagagtcagagatattgagagagaggatgggagaagagaaagagagtagggttaataaagaagatcagacggtgatgatgatgaataagaataagaaaaagagagaagaagacacatgaaaaagtgtacaaccgtgtcctaataatctatactactttgtctctctctctctctgtccttctcaatcatagtctatgtcttttaataaccccgagtgagatagagagacttaaattgttgcaaaagcttcgggagaaaagagaggcgaataaggttttggtactaaagcaagattttgatagagaaagagagcggcaacctccgatccattaccacccaccagcccttgatggagacggtccaaagtttaaaatatcttcttttttcttttttaaataccgttatatatatgggacacatattctctttgaacattttgtcctttggcatcttcaaaagtaagttcatagatttctgtaagacttaactcagtcatgttctacggtccaaattcgtagtctaaatgttaacatgagtgtctaagaatcctcgataaacatcgcataactatattgagactttcgtatgttctttttactttgcatgagacttaatta

SEQ ID NO: 39335 - DNA, 1183 bp, Arabidopsis thaliana columbia
tcggcaaaaccggttccaaagctgttatgttcaataagttttccttaaagataaacaagagattatgtttagtactcccctttggtttactctttgaaggctcttttacacatccttttatcaccattctcagtctagtttcatccatctttcatagcattcaccatcatttttgtacattttgcatctttagtcgagtctaggactagtcttgcatacattctgcattctggatttgtttcaggtgttttgaagctattggtgctctgaaagaggaaaaacagaacagaaagtcacatttccacctacatactcgatcaccagtagcagagagggaagcagtcagctcagtagtccatccagacacttctactcaatcgcagaggagaccaggcagtccattctgctagatatactcgatcggagaggagagtaggcagtccattctgcaattctactctatcgcagaggcgaccaggcagtccactttgccaatcggcagttatactcaatcgcagaggagaagaaccagtccatcctgacagctgacacacatactcgatcacagaggccaagaagcagccaaggccattccgtcaatcaacctactcgaccactacctcgaccctctaatgaatccgcactcaaccagataacctgatcatcggaaagagaagagaagagaaggcccattcgaagccgattcgaagcccatcaggaagcccactttaagccgacactcttaatcacaccgtccatgggccgttaagtgggcctgaagcccgctttcttatcttagtataaataagtctctaagggtttcgccctgagacatgcacttttagagacacgaatttcgcactattattcagcagccgcttttcattcctgcaactttgtattttgatttttcttctaagttattcagattttgctttcatttgcttgtccatctttcgtttctatgttattgtctttaagcatgttgtctgagtagtgattaggatttctgaggatgggatagagtagttgtggaacccctggtcgaatatgttggttaagtgtagatttattgaatcccttcttgattagttgtgtttactgcttattcctttctgatcaactggaatccgatcccagacgttccaacgtccagaaggcgtttaatggaacgtggcgatct

SEQ ID NO: 39336 - DNA, 821 bp, Arabidopsis thaliana columbia
gaacatcttcgatacatgctacatcctggcatgtctcaaaaaatgctgtcaaagcttttacgtcccctgatgagatattctgcctgaaaaacggaacaattttttgaataaaactgaatacaaggacttgagttcaagtttccaaaaatattacatcataaaatatagaagccagaaaagctgtatttttacagtggatgacatgcctcagactcatttcacctaggctcagcaaaaggagacgaattttgtgaatttcatctctacttggtctttctgcaatagtccttgttggatgcataagaggcttgcttcctttacagtatctttcagattcccaataaaagttccatacaatgtcaataactctggggagtcgacaaaggcttccgagaagtcgtggatcattatctagctgttggatgagaaacatgtaaagttcacgctgtacattataggccgcatggagccaaatgtgaggattaaggaaaatgctagatatagcatcctccacaagctgctcagcaaaccctggatagtgaaaaacaaaatagaatataaacttaaagaagttaacataaaccagctcgtgatctacaaacaactttaatattccaacacaaagcacaatcagaaaaacgtttaaaggcaagaaacccgactgaatgtactagctacagaaaatagtttacgatccaaccatatgaaacaaataaaaatattccaacacacaccacaatcagaaaaacgttcttcttcatgtaccagaccacaaaccacaaccgcaatatatggtaccagaatgaagtattagtatgagg

SEQ ID NO: 39337 - DNA, 854 bp, Arabidopsis thaliana columbia
ggtaccacacaatatttcattcgtgatttaggttcaagcggattacacaagattctgccaagtataaaacgcctaagatcatgaactaggtggtgtgccagacatacatgcattaagatcaaactccactagaaagcacagtgtaaacgatcaatcaaaaccaaagaaactgccaacctaaacgagatctaaaatccgcatgaatccccttcaaaaccccatcaaacccaactagaaatctacccgctcatagaaaaggagctcatcaaaggtgggttagaataagccataagaaagagatgaaaaacactttaaaagggtttagatattacttctaggtatgtcgaatacaagaggtaaaactgcacctgaatgaatcttatacaaaacaaagggaaagctcaagggtgcggcggcaactagggttcgcttgggatgaaggtacacctagttttaggttttttaagtatatttatgcttggggccaagaattaggtttagttaggggtaagagccgtcaattccgccagttggataagtgatcaggtcgagtagatgagcttcttgttgaaactaataacggtggaatgaagaggaaacggtttgggcatgagctagtggtcggtgggaagcgcgaggagctgtccgggttcaagtctccactgccgagtggttttggaatgactatttccagacggccaatttctgggatatgtcctcactctccgggccatatcttcctaacggcttcatggattgctttgattccattctgaagttaatattgactcgtctaaatttccatagactctgagatatctggatttgatgcacggagagacctttgccggatg

SEQ ID NO: 39338 - DNA, 1199 bp, Arabidopsis thaliana columbia
tatcgatttaactcgtcatggactcaaattccaggtaaagcggtggcgattcacttttttcggaagcaagaaactcgtaaaagcaaaaaaaaaaaaaaaaaaaagaggacatcaacgtctcatgatgttctgagatttcccattagctacacaaacttcaccaaagaactcctggacctcaacaagactacagctcgtggtggcgaaacaacaaccttatcacctccaaagtaggagcacaagtctaggtagaagcaaggttgagtctactaaggtcaactcaatcgatcaagccatgacacaatgatacagagaagttttcttggcgtttcttcagaaatcattagctgatgacttcaacaattacagccatgacaagacaagatcatattggctcgaaacatttggatcacatcatgtatgaagcatcaaagataagttcaactatggtgtacacgtttactccttaacaggaatgtctccatcttaagttatgcaaaatgttatgacgaaaagcatagatgtctaagaccaaacaggtgggggcgtgttccaaataatataaagcaaagtcaagcctcttcggaggagaattatacagtattatcacttaacgtgattgacgaatcattgctacaagtttggagtccatatttatatcatcactcaaaattcaaggagtcaaaatgcgacatttgtcaacaagaagagattcaagtttgaaaaagacaacttcgatgctataccacaaccttccaatgttattcaccttcatggagatgtgaatttcaattggtggaatctaagtgttgagtttgctcttcacgaaattagattccatcgagaagagatttctccaagttctaactcttggaaaaatgtgttcattcgatggaatttaagagttttttccatagtttacctgctttattccgagcaatcaatcggataaaagtggaagacgagaagattagcttcacttcgcaagaaaaagaaagccgactatgccaattgttactgtcccttccaggaaaccaaagttaaagggcaacaaagagatcaaaccacttggattaaacccatttaacaataatgtggagacaccatctgtaagacccctataccgctatataaatataaacgaaataggagcgtcacgttagacggccgcagtcggccaatccaggtttcaaaatgaa

SEQ ID NO: 39339 - DNA, 551 bp, Arabidopsis thaliana columbia
atcttataatagttaatagtcattaataaagaagtaatagctttcattgaagtgagtctactctaaataggatttccacagtaggaaaactagacatcaggaaatctattcaatcaagacgacttatgtagtagagtaatccccgaagtattgagcacctatagatatatgttattgattatttaatgtatgatacaattcgggatgattttataattcacagatttgacatttgacattatatttcccccgttaatattgtcagttttggttagcttttaaaattgtgtatttgtatttctattgttaaatttcatgatttcacccggtatatatcatcccatattaatattagatttaaataacgggctttatttgggttttcgatttaaactgggcccattctgcttcaatgaaaccctaatgggttttgtttgggctttggatttaaaccgggcccattctgcttcaatgaaggtcctttgtccaacaaaactaacatccgacacaactagtattgccaagaggatcgtgccacatggcagttattg

SEQ ID NO: 39340 - DNA, 658 bp, Arabidopsis thaliana columbia
atactcgaggaatattactgcttgcataaaataacattaatagtctaaatgatgagcccagtctcatcaattgcctttagcaccattacttcttgcaagttgcaatgcatgcacttgattagattctctataaactattattttgtttgttgatatatataccaaatatctcataatacaaatcacagaacgaaatgaaacgatatatatgagtttctaattactatcttgcttgtgcaactatgtctagttgttatatattgtattgatgtgaacggatctatcaatattaaagcaattatagcaaacctaaaaataatcctgatatttattgaaacaattaattgcatgttctcttggtagcagtttaacggggggaaacgaagagaagaagcaaaaacaaaagcaatcacaaagaaacaaagaagggcagggattttctggttcaggttctattacatgataacgtaagcaagggacccaaaagtatattctcacactttggtaggcggtgtcttgtcttttggtctccccgtcgcgagtaagtactacacttaatattggagtataaaaattaatgttttggcaaattatgatcattaagacccattggagcactaattaaacgttaagtcgttaccaattcaattttgcatgt

SEQ ID NO: 39341 - DNA, 546 bp, Arabidopsis thaliana columbia
actaatcttcagggacacttgtcctcaatgaaattaaatgcaccacaaacaaaagatcaatagatatacactacacaacacatctctaattttattttaacttttttccttaacagaaagaaacagataaaaccccctcaagaaatatctcagtccaatctttttgttcaatgcaaaaggtaatcaaaaacttcaaattgggtttgttttgcccaatggaaaaatcacgactaaatctttaatactccatgacattttgtcacacaccttctctcttaaaattggatctttcgccaatggagaaatagatttgatctttctttgaacatttcgttttctcaataaaagacattctctctctctctttctcccacccacccaaccaacactttctctctctatacgtagcgacaataattctggaacctcctctacattacaaaaacccatttatatacatacatacacatacacataacattagatattatatataaacatttacacacgtcttcttctcacacacacacacacactctccaaaat

SEQ ID NO: 39342 - DNA, 909 bp, Arabidopsis thaliana columbia
aaaaacgataacgcgtttgttgaggataacgtcattgaaagagacgaagaagaagatgttccggtcgtcattgacgtagatgacggaggaattagagtttcctttaccatgacttagggtttatcgtttcgtcacgacgatttcgtgagagtgctgctaataaggttttctctatctgttgagagaatttgggaagaagaagaagagaaattgacggctgagattaatttggattgttttatttttttaattctctttctgattattctggaagattaacacgtggaaaataaacaagtcggacggacgataggcgctctttactgaagccttgtcccgtgagaccgtgtccaacgtggcatgggttccacatcattgattacgtggcgtgttgtgagtggttgacgagattatccgattgtgtcggatttaacttaggaatatgctggaatcgaagaatctggtcctacggggcatggtattgacaatgacatttaacaaaaaaaaacattggaaagtgatatcagtggacgtaattagaccgtaacgagttccattaacggatcaaaatagaggccgacttaaccaaaacaaccaactgacgccacgcgagaccttgtgaaattgttagaaatttagcaaattttgataccattatacaatagtagaacctttgtcttcaccatcttgaccatatatatatcatacaaaatatcacggtcgacatgaactcttgctcagacgtttctagtgatttgcctttgatcgctctcgttaaagctttttatcaaagaataccaaataaaaataaaaattaacaagctcaacttacgataaattaacaaattaaattgaatccaaatggtaagcttgagaaacgtccctgtatatgaaattgaatccaaatca

SEQ ID NO: 39343 - DNA, 535 bp, Arabidopsis thaliana columbia
tgactaatcatgatcattcatttggaaagatataatatattatagatcctcttaagttaaacggcatatgataatataaacttaacttttgattttgaagtccagcattacaagcacactctctaatccactatacctcaacttttaattctatatagtacacaaaaaaagcagacttcatttatttgatctacaactttttttaactattcagtcattaatttggagtttttgaagattacaaaaaggaagaagaagataaaaatgctaaaagaccaattaattccttctaatgtagggtctcaatctctctgcaatacaaaaggccacacccgtcggctactgcttgtcgctatcatgcacctatgtgggtctttttctgaataatcatacttctattatttataccttactaaattattgcttatcctccttatataaattatgtaccattatatattcagaaatcattgaaatcgaattttcgaaaaaaagggaaattaaaattaaaatctggcgtttccaagccgtgcat

SEQ ID NO: 39344 - DNA, 432 bp, Arabidopsis thaliana columbia
acactacagtctctaaatctatcccaccatctaatccagttcggtaaaattaaactttttttttgttctaataatatttttattaaaagatttctaattcaaatcaatttaaaatttttcttttgaaatggttatttaattttatagatttcatatatcatatatattctaaacttttttcgttaaatattctaaacattttataaattttaaataactataatatttatctttaataaagtataatattaaccccgtcctaagatttctcctttttaaaagtaattagaattgattgagatatattagataaggaaatactaataattaggaatattaattaattgataataattaatgctaatggcatttcttgtaaataagttttaacttgaggaattatttgctaaaacggctacaaaaatgtatatg

SEQ ID NO: 39345 - DNA, 742 bp, Arabidopsis thaliana columbia
acaccttaatagtttttttttacatcaatcatttcgaaaccacaagttcttagatactcaacaacatttttttttttttttctgtagccaatcgatgttctaaagatcaagaatgttgtattatttctaccacttatggagtcaccaaggatatgtgaagggttttctttgtttatatatttttttaattgcgttttaggacatctccaatagaagtatctaaatgtagatactgatctctatcaaaacagattatggatatcatactagagtacattaaaaatttgcttctaagattttgagttcttggagtcattaacgcatcgctaagggtattttcgtaactttaaataaccccaaataatattttgcttcctccccaagaacctttttgcctctttctacttccgtcggccggattcagagtcataaataaatatataaaaaaaagtttcgatttttgcttttcttcttcgattcattgcgcgaatcatccgtgatgttggtgtctagggttttatcaagagtttctcgcagcgcaggcttacgctcgtctttctcctccgtcgttactccgaagaggaatcagattccgattgttgcaagccgatttcactccctcgttcacggaacccccaacaaggttaggcttttaagctgattttacttgtaattcgttctggattttatcgtcgggtttatgctagggtttaaggggtttgtctaacaaaagattgttatg

SEQ ID NO: 39346 - DNA, 717 bp, Arabidopsis thaliana columbia
tctagtaacggccgccagatgtgctctaaaggttgctgagactcaagaactacgcagaaaatggaagaaaaaaaaagcctactaatttctctgaatcctgacacgtcttttacttggaagagccaaacgtacaattgaccagaaaagctaaagagagttgtgaaaaaaggtcgatgctttaccaaataaatcctgtcaaacccagaaattttatggtgaagacaaatttatctttgaaaaatgtagtttttacttggaaacaaataggtacaatataaaacagaggaccatagagaaaggggaactcagaatttttcttaggaaaggttccaactttactttgaaaaacaaaaagggagaggaaaagaaacgataccatccacgtttttgaaacccagtaaaaccaccagactcgaatccatgactaggaagctcagaactgaagaacccagctctagattccataacatttccgaatttcagcttcagattggtgtttcccaacttccctgcgaagaatccatgaactctcgccgatcgtgatacaacataaggaggaacaaagcgggaagagagatcaaaaggaagaagatggctcagggaatggcgactctggctcgcctgcttcgtcaccaatttggttagctgcggggaagagcaaccgacggcgaccctgcgacagaaaatcgcatgcatttcgaaactaatttcaaatgt

SEQ ID NO: 39347 - DNA, 877 bp, Arabidopsis thaliana columbia
ttgtgtaaacaataataaaaaagaatagccaataagatattttagataaatttcttgattgttttaaaaagtttgctaacaaaaatattagaagtgaaaaagcatcatgtattagagacactaaagtcccacatcggaaggaacaaacttttctctactctatatataagttcagcttgcattaccgcaacgtcgaacctagtaacgtgggtttatgatccgagtggagacaacaaggtgatggtacattgggtcggatctcaatgggccgggttcggcttgggctctttactggcctgcccattccaagtctaagagttgagatatcttctgagcgaaggttcggagccaatatctctttagagcggaggagaccgcgtgaggctggtttcacagagcagcgtccaccttccgttctcgacggtggaaggataacgggcccgttgccttccgagcccactatgacccattaggccgactccaactgagccatcacttttttttggatcatcagggctacaaggtacacaatttacttactcttaagaggaaaaaatctataactcttgtatttacatattcgttttttcagcttggaagtcggaactactaggttatttggatatgaaatcagttaaagactcattgatgtactacgccttcaatacattgttaataatgctattagttttcacatatattggtggctcatttgtacgacaatcataagagagcttcaaaacagaggagaagtgggagaagagataagatcaggtaccaattttctttcaattgttgtttttaagattgaaagttttgcttataagggatcaatggttgctagaatctgtatctctccggtcaaagcgttttccga

SEQ ID NO: 39348 - DNA, 603 bp, Arabidopsis thaliana
accatacgtgacaagtccccaccaccaccatattactcaccatcccctaaacctacatacaaatctccaccaccaccatatgtatacagctctccaccaccaccatattactcacctactcctaaacctacatacaaatctccaccacccccatatgtctacagttccccaccaccaccatattactcgccttctcctaagccaacatacaaatccccaccaccaccatacgtctacagttctccaccaccaccatattactcacctgctcctaagcccacatacaaatctccaccaccaccatacgtttacagctccccaccaccaccatactactcgccttcccctaagcctacatacaaatctccaccacctccatatgtatatagctctccacctccaccaccttattactctccttctccaaaggttgagtacaaatctccgccaccaccatatgtctacagttctcctcccccaccatattactctccttctccaaaggttgagtacaaatctcctcctccaccgtatgtttatagttctccacgtccacaccatattactctccttctccaaaggttgagtacaaatccctccacc

SEQ ID NO: 39349 - DNA, 703 bp, Arabidopsis thaliana columbia
ttgcatgagattaactgtgataggtaagaaattaggtgttattaagagaacacgacagaactttttttaattactgttgtattttcgattttttttattacccagcgtgcccctactaaacgttaccggaaaaaacgtaatttcaaggaattccactgccacgtcagaatttgctgacgttgattaaatgaactcagccgtaacgcgatacaacgacagttacggctgagttacggtatgttgcggctgacttacgacaaaaatatatgagtcataacaaaacggcgaagtatgagtataactcagccagacgttacggctgagttgtaaaatattgtctgagttatagtataactcaggcaacggtatggttgagttaaggatggtcggccgagttataagaagttatacgataacccaaccaacactatggctgagttatgagaaaaaggctgacttatttcctcgagacggccgagttatagttttgaacagcttagttatggaacgatatgacggctgagttatggtcgagtgttataaatcagccgctaatagttggattacgatataactcagccatgttatggctgacttattttcaaaagattaattactataatatcatgcagttatggccgagttgttgaacgttacggttgagttagttgagttacgacataccacggctgaattaactttg

SEQ ID NO: 39350 - DNA, 818 bp, Arabidopsis thaliana columbia
tttttaacaaaaaaaaaaacaatctgaaaaaaaaagaagaagataaagtcgtcaaattggtataaaatttaactttttaacgaaacaagaatttgaaaaaaaagaagaagatagagtcgctcttgcaagtgtaatgatagactcgtgtagagaaattagcgggaacagaaatataaacgacgcataattagaaagtataaattaattaattttgtgtcacatatgggccttttataaattaatatgggcttgccacatgaaagaccatctctctcactcacacaaccacactcgtaaagattggtgtgattaataatggcgctttctctcagccagactcgaccaccaagccttagccatagccatacccttagcgtcatcgttcctaagagaacgttcgtttcgatccgatgcggtccacgagacaaccgcggaccacttctcaaaggccgaatcctaagcaccgaagcaatccaatcaatccaatctctcaaacgagctcatcgaaccgctgtctccctctcccttaccctccgtcctctccgccgtctcataaaatccgatctcatctccgtcctccgtgagcttctccgtcaagactattgcacactcgctgtccatgtactctccactctccgtacagagtatcctcctcttgaccttgttctatacgcagacattgttaatgctcttacgaggaataaagagttcgatgagatagatcgtcttattggtgaaattgatggaattgatcaaagaagtgatgataaggctttacttaagttgattagggctgtggttggagctgagaggagaga

SEQ ID NO: 39351 - DNA, 725 bp, Arabidopsis thaliana columbia
gactttgattggtttcgatgaagcttcgacaaacacagggttttgtctgaatccttttggtttatttccgagagaatttgtgttttttactttaagggtttgaaagaagaagcaagaacataaatgggttgtgctggatcgacacagtctcaagcagatggtaagatcaaatctatcttattttgttggattggagaaaaaaggaatcgttttttttatctgaaatcggtgagagaaaccctagttgtgtaatcagtatgttggaagcttggaatgttcccttcttcttaccttaaagtagattttgttcgttgaaattgagggtttaggttttatctgatctgattgagttttgtttcagtttcgaatctttatggcagtagcaagagctgatgttatcttcgaacttgatatctatgatgatgtttaaatttaattccaatgaaggatttttatgttttagattgttgttgtctatgtatgttcatctctgattatggttggctttttcctttatataaagaaatttaagtgaagaatctacacggttaaagctagtttccgcgaatggactaacttttaatctaattggacactaactagtatgatcaatgcggcaatgcatatggttgatgatgtatatagatcctttagttttatcgggttgtgcattgatcagatggataatttcgtgtgtggtacagggtcagtgaagaaattaggaa

SEQ ID NO: 39352 - DNA, 546 bp, Arabidopsis thaliana columbia
tccacccgaatctctcctcttcccatttcatcctctccatgaccacagatctcaaacctatcctcttctctgcaaccgcaaaccaaaaaaccccattttcatccaccctttttgtatttttcccaatttcttgtccctcaagcttcacaacttctggttccacttcaacatcaactacaacctcgcggttttcgttgtaagcgttttcacaagagtaaacctcctcccatctttgtagaagaatcatgctgtaataagctgagctcttaagctgatcctttgcatttccttccttcacaaatatgaaagggacataccattttcctaccacaacgcttgtattaaaatcactaggaagctcagaacgaatctcagtgtaaataccttttgcatcatcttttagaccaaagtcctcagatgtcgagtactcagcgttccaatactttctcttaagaaactctggtggtttcccgttagagcaacagaagtggcagtgtaatagcgagatgatgatcgtttttgatggatctggaattgctgatatat

SEQ ID NO: 39353 - DNA, 781 bp, Arabidopsis thaliana columbia
tgaaacatagcaaaacagggtttagaaccaatcaaccaaattcaataagcagtctagccaaactccttgtctagagtctacaaatctctggtattcgtagatccggaatccatttgaacgtcttttggacgctggatacctatggtcgaatgtctacattagccagcgaaaaccgcataggggccaacgaatccagaagggatctaacctaatcttaaccacctgactaacctagagattaccctaatcttattcatcctcaagaaccctaatcactactcaagcaacatactcaagaacacaaacccagaaattattgaaatcatatcaaaatgtagatctaaacaagctaaacgacattacttaaagaaccaaatgcaaaaacgaaatagattaagagtaattaagttttgaagattcaagaacacaaagaaaaactaagagataaaagctagatcctttggacaaatcccaaagtgatctatttatactaaagtattgaaaaccctagatttactagaagacaagagacttgaggatgtttgggcgagtgctcgatcttggggatcgagtaaagagggtgctgcaaagtctgcgcctttgtgtccatgctccgagtgatcaattggtcaagtagttgcttcttcctctcctattcttatgctcaaatgtcttgttgggaatcaggagaatcagaagacgcgttgaatgatcaacaagtcttgtagagtaggttcccttgctcgagtaaactggtcgattagaggattgagaaggaggg

SEQ ID NO: 39354 - DNA, 912 bp, Arabidopsis thaliana columbia
gccaaatccgtcccgccaacccgtcccgtaaaaaaaacatatattttattaatgttgatcttatttatgatatatttataaatcattgtttaaatattttgtaattttgtagtaattaaatgctatcaatatctttgcggtttgatgattataatcgaattgttatagtcatgcagaaaagcaatatcaaaaataataattttgtagtaattaaatgatattaaatattttggaagttttattttagtaattaatcgtgtagttaattgggagagattttgggaagattgttaaatgtcaaatatttaattcgaaaattttctttctaattatcaaaaacaaacattaaaatccagtggcagctattgtaaataagtttcaactacaagatttatttcacaaaatggttgcaaaaacgtatatgtagattttaaaaaatagttaggataactgataactcccttaaatgtttatttctcaaataaccttgctaataagtgttttacaaaaagaaaaactaatgacaatgtctttggttcaaatccataatggcccagctgctttcaagcacccttcactattttggatagtatttatggttctacctatttcttagaatcaagcgagcctatttcccttctcgtgctttacgcaacactccaacgaccggatgcctcgtcactaatctcgcaagatccacatcatcaacattgtgatcaataattaagaaacgatcaattgtctcagtcgtggactagaatagaaaagaagaaaaaaaacactattaaaaataaacgaaaacacactctattgaaaacccaaccccataaacaaaggccaataataatattttccttaaaacatgattcatatatgataaatgagattcataagttagtagtaagaaaatgc

SEQ ID NO: 39355 - DNA, 943 bp, Arabidopsis thaliana columbia
caaaacaattttataatataagtcagactgtaaaataagttgataggtgttgattctgaaaatcacacaataaatttgtttaaaggggataaacaaatttacttaactctctctcgctatttagtgaccaaaggctcaatgaaaagaagaacaaagttggttagagacaaagttagggttttgctcaagaacaatgaagaaaactagggttttattattaagtttcggatccttagaatagaggacaactccctcccccctccccctatttatacattattaagacgattaaaagatatgttaaactttcaattcttcgaggcttgaatcttctaatttcctttatcttcgaagacttgctattttcaaaggagaaaacttctttttcttcgaattaggaagtcggctagacggtctccctacttggggctaaagtcggcaaatgacctccttattttggcccattaacaagctaaaccgggataccccggtttgattgaaatctcagtctaattcgtagttcctctggtttaagccggtattgtcggaggtgctaattccggcaccaacaattagtcccccccagttcgggaaaatccaaatgctaaactcgattttttccgaattaaaagaagtgaatattcggcttatacgttaggaagatgcgaattaaaatttgatccgttgaacctccaagatacgtcagtttagcttggcacgcgtcgacgatataaaacaaggctaagcttgtgagttaggtagtctgatggacctcatgagttgttgaggagctgtgggatgctctcctagatgatctgaatgcctagcagagaaatgacctgactgatgagccgagcagtgagataggttccaaatgatcttgctaacaagctgcaaggcaagctatcagatgatctgacgagcgatctaggatataggttgc

SEQ ID NO: 39356 - DNA, 520 bp, Arabidopsis thaliana columbia
tcaaatttgttaaaatctgttcactggattatttgaatacgttacgttttcagaaagcattcaatctgatatagacatcctgatgtatgtttttttttttaattgggtttaagaagtttgctccatataatatttgtgttgatctcctatgtatgattgtttcgtttgcagaatcagctcatgatgacaaccaagtctgtgaactatgtgacaagtatgtcacgctagtcattgattaccttcaagactacgacaaccagaatgaactcgttgaggcccttcatatcagctgctctcagattcctcctctcaaaaaacaggtcttcattgagtccttggttgtttttgctttctctattccttttctcagacgtggttatatgttaactatgcccaactcatgtgtttgttgcagtgtctttcaatggtagatcattacacccaacttttcttcacacaagtctctactatcaaatcagaccaaatctgcaaacggcttaacctctgtcaagctgtgaca

SEQ ID NO: 39357 - DNA, 518 bp, Arabidopsis thaliana columbia
  unsure (1)..(518): unsure at all n locations
tataacacctttttttttttgttaaaatagtaatataacactcaattgctttgttttgactttaattaatttccatctctaagagcatgcctttcgtgttccttaaggctaattgctcactaatttatgctgcttttgaaataaagtattatatatatatatatatataatggttaacatattatcaacttttatgaaaaaatcaaaacatattaagcaactccttttaactcgttgttgtggtcacaaactgtaacaagttttcttcttatccaatgtggaacgagttagcccaaaaaaaagacttgagagaaagaagacaaatatgaatgttttatgtcttataaatggaatgtaaaaccatttcaataganaaaaataacaaaaaaattcttataccaattttcataattaaatcttatcccgaatcccatttgcctgtaataatgagacttttaaaagtttttattcgagaagcagtgattcataatttcaacgatgtcgagaaaaaaaatgtg

SEQ ID NO: 39358 - DNA, 827 bp, Arabidopsis thaliana columbia
tggatccaagtctcagtcgcaatctgtatagacgaagagcttggattgtttatagcgcaatgtatattttgctggagtagcgtcgttaggttggctgatattgttagcaaaattccatttgccggggacatttgttctgagatctgcagtttttcatctttgagtagactctgcttgatccgaggcattcttactacagtttctaggggtattcttgtttcctcttttgctcgattgagcaacagtgattgtgatcacaaaactattcgtgtatgacggaattttgcttgaactttgtgatttatgcgagaaccccattgacagtcatttaaattttcacgtactaactgtgatgcagatttgcatgcaacagatcaagacatctatgttaactgatttatcagaaggttatgatccaatgccagacagcatggcagctcgagtactcagaattatatggaacaatttggaggaccctttgagccagacagtcaaacaagttcacctcatgtttgacctcttactagacatccaaaccactgttcatcagacagatgataaagtgggaatgagggaatctttgttgaaaattgtcaactatcttcttcgtttaggatcacgttgtaaaggaagatatgttccattagcatccttgacaaggcggttaggtgcgaagactttgatggatatgagtcctaacctgttgtacgagatggcaaatgcatatattgatgatgatgtctgctatgctgtaacatcatgtataaaatgttccattgaactgttgcgtgatgaaagctgggggacgaaagtgttgaccagggtta

SEQ ID NO: 39359 - DNA, 616 bp, Arabidopsis thaliana columbia
gtcaagactttcagagagtaacaaaaccagccttcattaatccatcatcactttctttagacctccaaaataactcctttttgctatgtttctttctgtcttagaatttggttcgtaagtgatctccttttcttctatactttattgcatcatacttggaacaatatcattcatcatcgcttcttgcatgccccacaagtacatctctccattcccttttccagtgactgcacatatataagagataattttaaaaaatcatattaatttctccatatgcatacttagcttgaataagacattgagacctagacatgtgaataaacgggacatcagaatctaaccgatcaaacatgacgtagaccaagtgtatgataaatatatagtatataatgtataaccatctattatgcatgattcttaacttagattcttagaagagtctactgttaacgacttaacgtattctattacgaaagtttttaacaaaatttaagatgcatgtatgatcagttttattcaactgggtgaaaatgatataaatgaacataacgaaaacattttcatgagccaacgcaaaaaccttttgttaagagacatgagaatgtatatttta

SEQ ID NO: 39360 - DNA, 266 bp, Arabidopsis thaliana columbia
atcgaggtccacgcactgcaccagggctttctgcgcggcctgcccacggcggccaggtctggtgccaggccgaggtcaccggcctgcagcacgatgtgttcgccagccgctggacggtcacgctggccgacgggcgccacatgcagacccacgcgctggtgaatgccgccggcgcctgggccgacggtctgggcgagctggccggggcccgcgccatcggcctggtgccggcgcgccgcagccgcttcaccttccccacgcccgag

SEQ ID NO: 39361 - DNA, 840 bp, Arabidopsis thaliana columbia
ctcgattacaggccggtgaagaagaaacctgagatgacgcagaagtggacagaagagaagaagagaggaagaagaagaaagatgatgaagatgggaagaagagagaggagacgaagaacacctttggagatttttgatgagatgtagtaacagtaagatatggagattaaggcagagatccaaaccttgattaggtttctcaactcttcttccatcttatctctcttggttctgttggttgctaactgtttcataatgatgcgacttaaataatgttatctacaaccagaagaacatgaataatgccaaaaaccataactggtaatacgtttctaatttgtcaagtttgcgtcatttttattttggatcattcaaaaactatttttttcaaagaggtaaaaggatagaacttcaaagttagagggtttattgtctcatgtactttcattttttttattttttaaacttgtattattcaattatttaatgatttggaaataacatatatgtatttaccagattttcaattcgcaagtaaaagataaatgaatcttagaaaaaactccatattacattttcttttacattataaaatcaagaaatccaaatagattcggaatgttcgtatgacaaatccagacaaacgacgcggcatgattaaagtaagattatagatttggcagagtttgttttattttaaaattcttctaacaaatattgcattaataatatacaaagtaagaatgtcatatttaatcatttgtaagaacttagaaaacatttacgccatatttattgaatttattgagcttgattcaatttaatagcatgtcaagaatg

SEQ ID NO: 39362 - DNA, 607 bp, Arabidopsis thaliana columbia
atattgtaacattgtctacaactttaaaagtacagcttaagaaacatgtacaaagaaactcatatgccaattttttgttttgctaaaaatttaaatatctcataaaaatgaaaatgttcaggcttacaatcgaagattataattctagaagatggatgttaagagcatatggtagcttccaccacacctaactcttttggcatgcaaaaatgtttagaccctaaaagataggtgggaaattacacatatctagtataaatagtcaagtcatgttaaattatctatcaaatgcaaagtttcgtggaaattatatgcccaattctttagcaactcgaactgaatttcctgaagatagttgagaactttaataaactaatcagtgaaaattcatggaagttggcatagtacgtatatacacgaccagatggatgattatacttttgtttcaaagcaagaaacatcaaaccgaactcgtgttcacacattaatttcgacttttgtaatataacttgtaatttaataactttatagtttagaatctgaaagtctttcttgttctgttgggtaacgtcgtggggagtcttagacatagctcaaagattattgt

SEQ ID NO: 39363 - DNA, 536 bp, Arabidopsis thaliana columbia
tacttttaaaaataaataaaatctttaaaatatgattgataaaattttggcttttaatactttaaattaaaactaaagtttttaaagtgtcttccaatcaaccccgtattatagagtgcggcggcttgcggcgacttgcggcggcttgcggcggaagttgctatgcggctcggtgggtttcgtcgcgcgacttggtggttaacggcggatctgttcggatctgctatggctaatcgtgactcaaggctaattagggttgtcggagccaccgtccctgttagtctcgcgatttggtttccactagtccggatcgatcttgactggtctcgggaagggtgcgttgttcatcggacgacggaagggggttacatcttgcattcatcgatttgctaggtaggggaatcggtggagggccgcggttagtcggagttttgacttattccgggaggtttgttgcaggtatggctcgtcattggaagcggatcggcgacgggaactgagtactcctgtcaaaggttgttccggcgatgtactgc

SEQ ID NO: 39364 - DNA, 883 bp, Arabidopsis thaliana columbia
tcttggaatttgtttccagcttcttcacgagcacgtgcacttaacatcttctctaaggcctcaaggactcttgctgcacgtacttttgcatcatctgtaccagacgattgtaacacttccctgactaacaattcaacccagtcatcaccactggtcgggggtttccaccacaaacggcatcagtttcctgagtagcagcacctcctgcggccaattcttcagctttcttctcctcagaagatgcgaaagagtataagctcttcatagcagcattaaaatcacttccattatcttctagtgccttgacgagaacctgagaaagacttgcaaatctagttaaaccctagatactgtacaaaatttacttacaaccaatcgcataaagaacctgtgcaaccgagacgtgaattttcgatgctcaatttacaggcggtgaagaagaagaagaagagagatatcggagacagatgcgtaatttgaggtcaacaaatgcctagtcagtgagatttctagtacaagatgcgaacaaggtaaagctagatctgtgtggattgaatagaaggaagacctaccgtgagttcaatatgaggaaacgcagagtgaagctgatcgagcgatgaggaaggaggagaggaccagattggagaattggaaggcgaaaaacatcggaacctcttagaagagggcggagaagaattatcgtcgaagtaagatctcttggttccgcaatatacggcagacatggccctggccgtgaaaaccaaaacaagaattgacagctgattcgatccaaacgcgataaattagggtttagggagaaggagaagaagaagaagatgactcttgaagaaagaacgtccgacgatcgagagagattgaggaa

SEQ ID NO: 39365 - DNA, 658 bp, Arabidopsis thaliana columbia
tattaacggccgccagtgtgctctaaaggcatacccccaacataataccgggctttagggcccgtgggggctagttgatcctatgtttgcgattattcgggttgctacaatccttgtaactatattgggaggacaggcttactggaatagtgatgtctacggcggaggggagttggctggtcatgaaccaggggctgtgctgggatcagcggcttttttaatcctcgattataattatgtgccccggccaacgagcctttcaagattccttgtaacatgtcagtaagtacgctttcctcgattctacagccctaacagcttcttctcccagcagagcgccatggctaccacggagcccacccacggacaggccgacagtgttgccagtgtcgagagcccggcccaggataacccgggccccaaagaccattctgactacactcgggcactcgagaagcgactcagcgagttggagtcacggctgttgaatgtcgagctacacagcaaagaatcggtgagcaagcgcgtaatcagcggcgacaaccctgaaagcgaactcgagaatgcggcaaaaagtccttcagacgacgacgcagggcctgaaccagaacagctctctgtcgtgcgagaaatagcaggttgactggatcactttgta

SEQ ID NO: 39366 - DNA, 770 bp, Arabidopsis thaliana columbia
gtaaatcctaccacaatcaaacataatggctaaactaatgtctagcctaagcacaccaaatacttcatcccaaaataaatgaagcatgaatgcaagatctaatcaaacaaccaatccgatcatacgtaaaaacgtagatccgactatcaacaataaatgcatgaattatactaagtataaaaattcaacctcatgcctaacaatcataacccaaattaaaacctagtcatgtgctactacacacgctacggtactcaccttagccttaatgtcgagagagtagaattctacccttgaccgcctaataattttgatccgaccgagctatctccaacgcgtactaacgatggatctaagcgtcggaccaaaaacaaaattaagaaaaatattctaaaaagaataaaagactgaggacggaactacttaccttaatacccgactacgactcccgactcgaccaacttctacccgactcggactcgacggactaactagctatctaacggtttaagctaaaggttttggtgtggatggtaatgaactacaagtgaaatctcgtgggtatttataggtgtgggaaacttggagaccaagtcacgttccttggagtgcaagcaaagtaatggatagggcttatccataaccttatccattctcatgcttatccttatcaaaaaccatgtttatccttatccaaactaatacttatcctcatcaaaacgcccatccttatccttacacaagtagctgcacaagcagcttacgacatg

SEQ ID NO: 39367 - DNA, 571 bp, Arabidopsis thaliana columbia
cagcatcaactgttaaatgcaagtccgataaccgatcctgtcgcggctagctgaccgtggccgcaacaatgagaacccgatatttcttcctttgggttgtgattgtaacttaaaaggagactttttgtttttattcttagatttgtagctctctgcatagtgagcagaaattgatgtaatatggtttaagagattcggtgttctctggtgtgtgctgcaaccacataattggtgatagataggtttagttatataagcaaatgtattagagataaggggagacatatttgatggtctttcgtttcgtaaacacacttttcttatgtgatatataaaagaagatttatcacattagtcttcaaaatcgacgtgcttcccttaaccactaaacgtgagtgtttgtttgtacttttgacagataatttggtgagattcctcgtaaattgaatactaaaatcggtctgattaattccatatttgtcattgttcaatatcttgggatgtttgattactggaataatgcatgtttgaagaagaatttgtatgaaaaaatatggaagtcatctagaaa

SEQ ID NO: 39368 - DNA, 1759 bp, Arabidopsis thaliana columbia
tgtttatgagatattcttgttaagcacattcagttttttttttttttttggggtctcatagcgatccatgcatatttaatcgaatatatcctgtgatgtatgtagggtggaatttcacttgcgtcatggaaatgctctgaagaattttttgcagaacagataaagagcagagacccactgaagattgggtgggtctgatgattccgttacttgatgctgtgtttaagatgttgacaagaatttgttacaaagccaatgtgcatatggtggaaaatgcaggtttccaaatgtttgggcattaaggttggtgaggggtctattacaatggtaccctgtgagatcctctgtcttttctcccttaaaccttatatagcatagttgtgagaaattggaattggcgtgttgacacgtatagattatattgtgggagtgcaggaggacagagtaaccgtagatgaggctctgcagcacccttatttccagccccctcccagctcctaagagtagagaagaagagtaagtcattttatcatctagtaactaaactcctttctacattttaactaactatgagtttacttagaagatcgaaaatgacatattgacaaacaatagtatgtaatgtttgaatataaaataatatcagagttcacacaaacggaaattataataagtcaaactctagtatgtaatgtttgaatataaaataatatgagctacagtggattatgtaggaacaaggttaaaacgagcaagggaagattctgaacttgcagagacatcaaagggaagcaggtagccatccaatccaaggttgtggacgattttataaatagcctcttgtcttttcctagtaaataaagtaacatgaagatgacttcgttgtctcggaccagagagctcacatgcggcagctaattggtcgtcaataatagcggcataaaagacctaaaattcagttggcaaatagataaacgtggtagatgatacgagttgtaagcgctacttaacggaagatgatatcggttgtgaaagatgttgaaattttggtatctttatttatcgttgtagttagtattaacaacgttgccgcggaatcttcaacctgtttgagtatttacaaatatggtggagctccggcagttttccgatctcccaattgccctctctggaatctccagaatcgccgatccttctcctcccccgccagtcgttgccatacggcggcgattcaagggcggaggaaataccaggaggatcgtcttctctgtgcccttgatcttcgcattccctttcccggtatgcatcgttgccttgggatcgccaaagagaatcaactgttttttttttattccccaagataagatgattcgcaggcaagaagactggaacaccaaaggatgttttggttggaatcgcagctgtctttgacggccacagtggttcagaagccagtgagatggcttcacaacttttgttggattattttgctctccacatttactttctcctggacgcaacattttctaaggagctcactggaaagctaccaaattcactcatgcatctatacgacctcgattcccaaaggtagtcctcgtgacatagaatgttgttcttctcacgagatatgattttgcaaccctgtcccactcacttttttacacaggttccaagattcattgccgctcaattttcacttggatattctgaaagaagccttgctcagagctatctacgacattgatgcaacatttac

SEQ ID NO: 39369 - DNA, 844 bp, Arabidopsis thaliana columbia
ctcatctccatccttccatccttccctggatcaagaagcttcagtaaaaccaaattcgagctggttttgagttatgacactgtgccttgtgtatgcttttagataaagaaacttcattcatatttgtatttgtcttttgcttgtatgaaagttcttctttaagactcttttattctgtatgctttttcttatatataaaaacattatggtatttttttttaatcgtacatagatgatttatacacatacaatcccaagattttaacgataggtgattctaacagttaaagatttggacattgctgttatttgacagttgattattcctaacgttggagaagaagctgctttcggaatctttgtataaatgcctctgctctttcgttgatgtcacgttccttcaccactggcttcctcgccggaaatttctccaccgtcgccgctgctctcttaggctgttctacggccctccttggctcataggttgatgatctgtaaccagaaaatatgagatgagagaaacgttgattcatttggtggttctttatcagtaatgcttagttcttgctgtcttcttttagtactcaaatgatcatttgtgtgaacatatatatagataaaaacatgcgtatattatttgtaatgtagtatcatgtatggttaaagatgtggctctagatacattgaacttttgatagaataagcttttttggattaagataaacattagtttatagtgctaaatcattagatacgcatatgtttgtgtatttctttttgaagattcctactattgcatcttgatttttttttgtaaaaaacttgcaaagaattttcaggtttt

SEQ ID NO: 39370 - DNA, 497 bp, Arabidopsis thaliana columbia
agcggtggttttgtggctgcgggagtccctgtggatagtacccctgtgagaagtttagatgagaatcggcagcgtctgaatggtaagaatgtgagtgaaggagctaaattgggtgcgaagaagaagataattaagagaaaggttgggtcgggggatacttgcacatttatgagaagctcgacttctttgaaagagtgggcaaaggctaagaaggcattgagtgagcccaggagaaagaaaaatagcgaagaatgagttaatactatcagaggctcttcaaattatgtatccctccacagtttttgtgcttaacacaatacaatgttttttttaattcaaggttttaaggtacacttctataaaaagcatttctcattagatgagatctttttgatgaactgaactttgacgtcaacaactagcatggatacatgtattttttctgaaggcttcgtatacaataaaaagcctcatgaagcgatcaaaagagactgatg

SEQ ID NO: 39371 - DNA, 567 bp, Arabidopsis thaliana columbia
ggtaagaaaatagtcaccgtaactagtgacattaaaacgaaattcaaaccatcaaacgtggttctaggttggaaacaacgtggatttgccttagacgcagacatagagacgtcggagaagtattcggtaaacaagcttcgctgacgatgggtgagatccaaatcaaaaaatgtggtactgaatcgggagtgaaatgggcctacaggagaagtatccggcgtaacgagagggaacccggaaaagtattcggtgaactgttgagagatgaaacgggaaaaggcaaaaggttggcaaagggagagacaaatgtatcccaagacgatgaaggcagatgatgagcgttgcacaatattaaggcagaccaaaataatatgcgtacaacccaataatcttaacgagcctttacgaaatctagaagttccaagatgggacaagcccaatttaaagtcttcttccaaaaatgtgaagtgaggatttgacctaatccaagcgaggccaagaacaagaggcggcgacagttgacggaggtgacaaggtcatcgacacaaagattaagagagggcaaag

SEQ ID NO: 39372 - DNA, 549 bp, Arabidopsis thaliana columbia
gaggcttcacttgaatggtgttgatactagtctcacatcaagttcctcttactaaatttacaaccacatcattacttttttttttaatcgaaatggtcagttctgtggctctatcgtcacgtagttgaataaggtcagatatgttttctaggttgtttcgttgttgaaggtttgttgtcacttgtcagagtaaacatattggagatttaagttgggagtcaagcaactcgtctacgatttttttcttattttcatttggtatcatcaattataacgcactaaacaatgatagaaaacgatcacacacttaaatcatggaaatgtaaatctcttgctatttcttaatctgtattaaaataattgccaacccaacaaacaaattattcttctttctttcgttttggcttattaacacgatcctcggagatcgattgtcgattcatgtagattaggatttttttttttttagtctatctttgaacattcgaaacaaatcggattgtagtaggtgagacaacatgtaggtttagtttcaacttacaactaatt

SEQ ID NO: 39373 - DNA, 223 bp, Arabidopsis thaliana columbia
acatatttttcatcgagttattgcaatgatttttctctaaagtgtaaaattctacaaagatacaataaaacatcttaggccaatgaattgaattatttgttatacatatacagtatacaattatatggagataaattttagtatctctactcaaattagacaatttgtctacaatatttgtgatgtgtcataaactcgtccacaacacacaacattcatccat

SEQ ID NO: 39374 - DNA, 540 bp, Arabidopsis thaliana columbia
catataaatatatactaataatacatatatacatatatctatatatatatatatatactaataattaagctactaatattgactttgatgatgataaaataaacaaaggcaatcgataccacattgtagagtatgagacataatcttagtgcatcaactcgttttgtacgatctgatattgtgttggatttaatgtatcacatgcatcattttcttgaatcaatcgaagatttaatagtttatatactatcttttttgtttttttctggcaccgagatatatatccaagctatcgatgtttggaaatagttcatataaaaactgttttatttttaataaaaatttacccaaaacatataatatattgatttgtgttatatcacactcaattcaattccacatattatatgttgttgaacaaaatacgtctaacgattgagatttatcgtcatctctaaaatctgaacaaaattttgaatgtttttgatgcaatttattagttattgaccatttaaatatctgaatactgaaaaagtgaaa

SEQ ID NO: 39375 - DNA, 616 bp, Arabidopsis thaliana columbia
tcctctagtaacaggcgccagtgtgctctaaaggcgcgagaaggagaaggagcttgccgatagctctaggcctgggacaaaacgagtgaagggaaggggattagagagggatcgggaacgggagaggaagaaggggagggttggagatttagagtggtcgaagaggtgaaatagtcaaatagggtacctagactattggcatagctaggtctgctgtacagctacatgaaggatctagcaacctaaagctcttgtatctgaataaaacctaatcatgaaggatgaggtatgcgatcagccctacagtgcaacaggcacaccggcgctgcttccatcgcaaatcaatgccctcacttagcttttctcagtaccaactcaggccaggtaaaacactattcggggtcccgcgtacctaggttgagtgtatgcctggtctgtacttatgaacgcatacgcggttcagacactcgttaagttcatgactctccagtcataatggacggctcaaccacagtcaacatctggtgacacaataatataaatatcatttaacctttctatgtgcttctcgtccatgctgtatctcaaatactgagtgaagcattctttaatattt

SEQ ID NO: 39376 - DNA, 541 bp, Arabidopsis thaliana columbia
cagccttgcagggacatcaacagcactcactcactcatgctgacatagctctgattcttcttgcagaaatcgcatatgagaatgatgaagattttagggaacatctgcctttgctcttccacgtcacttttgtttcgatggatagctctgaagacattgtgctagagcattgtcaacatttacttgtgaatttattgtactcactagcgggtcggcatttggagctatatgaggtggaaaacagcgatggagagaacaaacaacaggttgtgagtttaattaagtatgtgcaatcaaaacgaggaagcatgatgtgggagaatgaagatccaacggttgtgagaacagatcttcctagtgccgctcttttgtctgcacttgttcagagtatggttgatgctatattcttccaaggagatcttcgagaaacttggggaactgaagctctcaaatgggctatggaatgcacgtcaagacatctagcatgtcggtcacccaaatatacagtgcgctacgcccaagtgtgaccagtgatgcatgt

SEQ ID NO: 39377 - DNA, 656 bp, Arabidopsis thaliana columbia
tcatataattcacaaaatcattcaactaatgcaagagtatatgaacatgcaactaaacaagcaaaccatcacccaaataaataccaaaacctatcatgtgccatatcacacgcttcgagacccacatagatttggctgaaggtttaaggttagcttcaacggttctcggacatctcacgacttctccacatcattttcatcttgatctagcttctttctaagtaacctccctcattcttgagttttcacacaaatcggcagatcaaatcttttagaagaagtctttattcgactcaacaagattcacacacgatctccacggatgtctcggtcgccgacagggatatctcatccacgaacaggttctctagatcatggacttgaattatttagttaagggtaaaggatcttgatcacaggcaaagtttctcaactgcgggcaagttttctctcggttacgggcgatttttatgagtcgggcagccttccggttctctctcctttctcccatcaaatggcttgactttggccaagcatttataggtgaaacagcatgggctccaagcaaacgcatgtcatctggtggtgacacttgcgggacacatgtcgcccgctcatgaagacacatatgctgcaagactgggacgatgacacgt

SEQ ID NO: 39378 - DNA, 538 bp, Arabidopsis thaliana columbia
tggaaaatatgcttttgtgattgaaagtgattaaaaatgacttcaaagttgaggttaccgtaaaagtttaaattctctttcaacatttttttcatttgttcttaacttgttcggctcgttatgcacattttcccacattaagtactatataaaactagccgaaccaaacaaacaaaataacttgaatcaaccacaaagttgacaatgtggtcctccattagtctttcaagctatgagagcttttgggttcaattgtattttaacagagaaataaaaatcaaaagaataacttaaccgatcctgaagtttctatctcatatgactaataaagtaccaatcctggctttgtaagctctatagttctcaccagtacgaaccctaaaaatttcttctagatatggaaaactccaggatccaacaaattctatatatccttcagacaccagaaattgcagtgtctaaagcaatttttttgcagcattattgttaagttagaagcgcccttgttgattttcaagagcgatgaaaaatgtttgtg

SEQ ID NO: 39379 - DNA, 694 bp, Arabidopsis thaliana columbia
gcaacatatattatatatcatgattaattcttataaactttccatgcatatcaatatagataggtaaagttatgttgttacagaaatcagaaagcaccgccaagatcatccagcaatctcttattctctagcaaatagtgaccaaaatatagatatacaaaccttattctatgtaaaaatatatatattaaagctgtatccttgtttattttatgtgtgataatgtgaccaaacaactctcttagactgcaaaaatttggattaacaaggcaccggcggaggagcagaaacgtacggcggtggaagctctggtgtaggattgtacctctgtagaagagcattaaagagtacccatcgggagcatagccaagtctctcaccatgtgctcgcagactgtattctcaagcaaacgacgatcatcgccgaagaacaagtttaactgtctatccgagcactcatatatcatttacaaaatacattaagatatacatttttaaccttacaaaaatgtacaattattccaagatatatttgcttgtatatacatagttattattttctattagttacatacataatctctagatcttagttacggaagacacaattgcgtttaaaatgacaacctcgaagtacaccattagattgtttgtttaggtgagtacattagacacaagggaattacagacacatc

SEQ ID NO: 39380 - DNA, 1465 bp, Arabidopsis thaliana columbia
cacggcaaatggatcataaagtcttcaaaaaaaaatagatacaattgcattgcatgtagtaatggatgcgatcataccatcactaatgcactaaatcccataataactccgtagttaagcgtgcttgggcgagagtagtactaggatggtgacctcatggaaagtcctctgtgttttatccctctttttttcggtttttctcttttttttttgtcaaaaatgtatgactctagaacttttagaccgtgaggccaaacttggcatgtgatactttttcggaaagcacaaagagagctctccgatgaattaggaaggaaaatggaattcttccatagttgcgcgagataccccagagtcagactataatgtactttgccgtccatcgaagcactctcatctatcttacgcgacaaaaattatatgtacggacattgcacccgtatattttgcatgtatcaaagctcatataaacaagatagcgtattcctacatagctggtgggacccacggcaaatggatcataaagtcttcaaaaaagaatagatataattgcattgcatgtagtaacggatgcgatcatacccgcactaatgcaccaattccatcagaactccgtagttaagcgtgcttgggcgagagtagtactaggatgggtgacctcctggaaagtcctcgtgttgcatccatcttttttttttgtttttctttttttttttgtcaaaaatgtatgactctaaaactttaagaccgtgaggccaaacttgacatgtgataccttttcggaaagctcaaagagagctctccgatgaatgaggaaggaaaatggaatttttcaattgttttttttcctactccaaattttgattttaatgtactttttcgagccttttcgttatctttgttatattacagggcgaaaattatatgttcagacattgttttcgaatattttgcatgtatcaaagctcttataaacaagatagggtattcctacatagctggtgggacccacggcaaatggaacataaagtcttcaaaaaagaatcgatacgattgcattgcatgtagtaatggatgctaccataccagcactaatgcaccggatcccatcagaactccgcagttaagcgtgctcgggcaagattagtactagtatgggtgacctcccggaaagtcttcgtgttgcattcatatttttttagttttttttattttgttttttattaaaaatgtatgactctataacttttagaccgtgagccaaacttgacatgtaatacattttcggaaagccaaaagagagctctccgatgaatgaggaatcgcaatggaattcttccattgttttttttgctattccaaatttggaccttaatgtactttttcaggccttttcgtgatctttgctatattacggagcaaacattatatgttcggacattgttttcgaatattttgcatgagc

SEQ ID NO: 39381 - DNA, 592 bp, Arabidopsis thaliana columbia
aagattccacggtatatcgagacatgaaatggatatcttaccctaatcgatttgacaagtttgaatgagaataatctagaaaatctattacattatattaatgtctagtggggatgataaagcctcaaagaaattgacccaaacgaaacagcaatcacacactaacttcttcttagcatttctaagacacttttcgatgtgattattctataaatatccgacccttcaccaagtcaactctatattcatttctattctgaaataaccattaaccccaaagtaagccatatataggaaatacatatatacattatagtcttattatgacattggagaagttgtggtttatacccctggacatggagtgtatatatagcaacattgaaatacagtttcacaatatgtaaataacacaaaattataccaaaaatattgtaaatcacacaaatgaagtagataattttaatttttattgaagtgttttcaataaagtggtgtcaagatcatgagaacccatgtattttcatgaacctgtgacggcgacaacgaccactttagatagaaacctatatacatcatttgcaacttaatt

SEQ ID NO: 39382 - DNA, 774 bp, Arabidopsis thaliana columbia
gtacatacttgcatttggagtgttttacaggtgaaaccagcacttttggactcgattgggagtgtttctagcacaagggatggaagagctcaagttgtgcgatcaaaggaaggacatggagtttacttggggtttctactcggctggagatcgagtggagcacacaagggggaagcaaggactatactcggccaagacactcggctggagctcgagtggtgcacatgatgaagaagggaagctgctcgattgaagctactcagcctggacccgagtgatgtgcccaaaggaggctactcgactttcctactctgcctagaccccagtggtgctgcgccgactttcctattttgtctttttcctaattagggcatcctaatattgcctataaataaacctcttatgtttttgcctaaaatatctttgctgtgtttgctggatattagggttcttatatttgttttgcattttctggttgttgtgttgagaatttggatttaatttcttctacaaacttgtttatcttattgagatctatcatttgctaagtatataatgatttctgggttttatgatttttctgagttttgttttatcatgttcttcattgttcttgagtagttttcttcagagttcttgaggatgggttaggtttaggtggatttctctgttctttagctagctaagtttataaatgcatgattcccttttgttttagaagttcttaatgctattttctttctaatcaattgaaaattgatttcagactttctc

SEQ ID NO: 39383 - DNA, 1161 bp, Arabidopsis thaliana columbia
aagcttcatcacccttgcttcttctttgggtttttattgcttctggttcacacacttttttcctctgcgtcataggtgtttctgtttcatctctcagttttcttttcagctttttagatcctcctgcttcctcattagcttgttgttgttcatatctagcttgttccaactcaatgactctccgagattccacaactaatgatctcaaatactcagcatcaacagaattcaacggatcctatcattaacaaaatacaaaataattgtttatgtgtagtcacaaataacataccattacaagtgttagatgctctgttttgatctgaaatctgaatctaagaagcttcaatgatcgtaaaaaagaaacttgaagagatagagaatgacttttcagtttccttgttaagcaattgagcgtgaactgctacttctagggtttgaactgcacaagaaactctaatagagagaaaaggtttgaaagcctctatgagaaatgaagggttttaaaagagttggtttttctttcgcggctacccgcatacccgcagacggcaacgggcttgtctgctataatccgcagtccgtaatggcctgcccgcgaggcccgctaatttgtggacaaaaaaatcaacgtccaagcccgtcgccatgggctacttggacaaagcctcgcgggctagcggcccgcttgacaactctactgatgaggagatattcgcggagcggacctgatacctcggaactgacctgccgaatatccaggaggatctccgcagaacccggatagagctaccacgtgcgtagacctatataagggagcaaggacgacttggaagagacattcaatctagcttacattcacacacacacttttacacttgtaatctcttttcacattgtaaaagctttgtcataattaatacaaagagaatattacgtaattaggcacttttaaaaaagttaatgcctaattaggcactttaaaaagaccagacacttttgataggttatttgacacatttaccctttaaatacatctctctttcgttatattttatttgtttctttctccttctcctctctcctctctccttctctctctttctcttctctctctttctcttatttttcaagaacaaataatcaagcggagaaaataaa

SEQ ID NO: 39384 - DNA, 581 bp, Arabidopsis thaliana columbia
caatacctgactttctccatgtagatctcaacctagaggagacaaaagacacgtaagatgtctatacaggagagcttgaaaggagacttatagcaagtgcatttaagtcagtaccatagacaatttaacagtgtatcttgcaatatcattggaagagctgatttgctcaaacatcccatggaccactcttggaagaagtcctttattgtgctcatcacagtcctggatgcctggtccctgaatcaatcgaagaaaaccaaaatgagccagaagaaggaatggtccttgtgctacaggaagaggtatcaagatgagttaggtgacctccatggaataagtcttcccagcccctgtctgcatagtataacatgaaacgatcaaattgagatcaaaatctgccaaattaagaaaaagacattgaaagcatttccagataaaagagatcaggagaagaacaaacctgtccataagtgatgattgttccgtttataccatttacagcgtctgaaagtagtagtagtagtacaaaggtaaaagatgcaaaagacaaaggtaggaggaaaccaaaccaaaaatgttga

SEQ ID NO: 39385 - DNA, 442 bp, Arabidopsis thaliana columbia
tcttgacacaactccgtgtctaaacctctctagtgtataattatttactcagaaaccgcccgtttgaacacgatttggagcttcgggtttctgagttattcaattaggataaaaaccacaagtttaggaatattgtgagacctttgaatttgtcttttgaaagagaggactgtgtcctctgttagctgtgttgtgcttgctccctaagcaaactctcaatgtattttagttatcttcgggttttaggctttaccaagaagctgtattcggtaaatgtattaaagaaccctccaaactgctttatattgaccggagagaaacattcttattcttcggaatggtactttgaagtttgaagagttattttaaaaaaagatttaacagcactgtgaagagttctggtcaaacaaacctatttaaaaaaaagagattggaaaacatg

SEQ ID NO: 39386 - DNA, 636 bp, Arabidopsis thaliana columbia
cccaacaaaaattcactttttgttaatccctgtatcatcatttgattcacagaaccaatcaaatattcactttttttgctctctcaaaattcaaagaatcttcatcaaagcaaaacaaaattcgtctatttcactcaaaatgaatttcaatttcgcatttgctacataactcgcacacaagcatgacactttatagatcgaattgaatcatacgaaacctcaggatctaaatttgaaactttgaaaaaaattaataaacattttgacatacccatgataagcatagcgtcaggaagagcaccaagcatcggaagaaacaaaccaccgacaattccaggtccaaggatctcaagaagaagctcacttccagcagagagatacgtcgcagccgtaaacatgagaaatccataaaccaaaatcagaaacacgtttccaagagcggtcttagtacacggcataaacccgtatgtctgctcacaagcttcctccttttcctcagccggagccgaaacaaccgacttgataaccgatccggaaccggcgagatttgaaccaccgtcgattcgatcggagattagactcgttgaagatgggtttagggagacgaatcgagcgtacgagatgaagtgagaagag

SEQ ID NO: 39387 - DNA, 584 bp, Arabidopsis thaliana columbia
cgtgtctattactaaaagctctattagaggtgaagttctattagagaagagagagaaaagtacctctatctctaatttctaaaaaaagtacatactttaccaattatttttgcaaaatgtgtttacttcccaacttatctcttgtatatagggttcttttgtatatatatatacttttaggcacttgtattaaaatttcttgttcacatattatatagaagactttaattgattatcatttggactttcaatttttcatatattattacattctctctctttcattatatatgatagcttacaaattttattttatatattttatgtgatgtttttaaagttactagacaattttcaatttattttaaaatttattaccatttgtattctacatagttttagctaagacatcttaatatccttccgttatttattaattgatgtttaagatttttgcacatcgattaaagaatcatttaagttttgtttatttctaaattaaaacattatttcttgtctaatcaactaatagaaaaatattatgcacgatagaaatcgtcaaaatcaataaaaactagttaata

SEQ ID NO: 39388 - DNA, 551 bp, Arabidopsis thaliana columbia
tatgttatacaaatttgcaataaaacaagattattctttcggtttcaggattttttcctctgttatgttgagtgcgatacatagagatatacagtttatgcaaattaagttagttaaccagtcccatacttggcatctagacgcagaaattaacgtcttccattcttatattgtatcgttaacaaggcaataaaagtaaccaatatctaaagaggccacaaccagtttttttccatcataattagaccaaagactaaaaagaaatcaaataacaacgtccacaactcagttcctcttgcataagaaaataacaataaataagaaacaagggaaagtcctctaactgtgctcatgacgtcgagatccgatgcagccaacgcggaagaacaaacgggaggtatgtgatatgctgccattctccagcaatgctaacaatgcgaccatcactgctatatgttccaagttgtagtaaagctcacatatgcctttgtgcaagttagtacatacaaaacatttatagccaacggaaaatatttggaacggggatttgt

SEQ ID NO: 39389 - DNA, 552 bp, Arabidopsis thaliana columbia
tttgaatcaccatggacttttctgtcatcgtgtgctgttcttttcgttattcttcttaccatgctacagtcaactgttgccattctttcctacctgaacgacaagaaaggtaatggaaacgcagctcctcctccattgggtcttccttagggaaaatcaaaagatgtgagcagtcttctcttctacacacctcattgtttctgcatctatatgttttaccatcagcttgaggttcacttcttgtattatgttgtctattgacttttagtttatcttgtgttattgctacctatatggttttatgaatttttcatatatttgcatgttatcgttactttgcagaaattatcttgttgatatcttttcctttgatgaactctctctagaaatagaaatcatcatcaaaaaatttaacctttataaaatgtaaacgcctgacccgacaaaaggtaagagcatcttcatcggcaaaagttatgttgtccggatatctcttaaatatattaatttattacttttaactatttatttaaatatgaaattataagggaa

SEQ ID NO: 39390 - DNA, 598 bp, Arabidopsis thaliana columbia
cgaacattaattttaaatgaatataatttgctacgtctcactttttagttccgttataaagtggtcgagaaaggaaccatgagaccaaaaatgaaaccaaaataaagaaattcaaatgaagctaaaatcctatttcaacacatttggttgaatatcgtgaagtttccattacaaaactgtctcagtcgtcgtctcgtctcacatgtctggattagcctcctcaggaatgacttctagtgtgaccctttctttatttgatctttccacaactacttgcatcctcttcccaactctgtcgtccattatctctatcacctgcaattaaaattcattcacacacgaacactaagaagacaaagagagtgtgagaaaaagagagtgtgagaaaaagagagagggagagagacgacacatgcctctttgatggtctcgaccggcttcccatcaaatctcacaacaacatctcctggtttgaagccagctcgatcagccggtgatccggaatcactgccaaacaatgatcatgcaactatataagtgaatatgcaaagtttgacaaacttggattatcatttttctttggatctcttgacgatgg

SEQ ID NO: 39391 - DNA, 688 bp, Arabidopsis thaliana columbia
  unsure (1)..(688): unsure at all n locations
gtttaagtttcataatcatattctcatgtattcttgattgatttcgtagttatatgaatcgtgtggatggttatattagattgcatatgtgatctttagattcttatgtgatgtcttttggttgaagggttgtgctgagatattgatgattctatgtgtttgagtaaccatgtctcataatatcttgaattgtagggtcttgatgcgtggtggctcatggtaggaggcagagaccataagcgtatcaagatcgtgatatgtctggccttcgtagtgaaccgttctatcgtgggtcttgtaacgttgttacttgatcgccatgggtgcaaagaactcggagagacggggctagctaccctgaccgagtgtctgcacgacggtgtagcgtttggtagtgatgctccggttgcatacctttgtggttgtaacggggagatcacgggagtgtgtgtgtttggtgttgggtttgaatgcaacatatcataccctttaaaacttaatgaaaactggagtcttaatgcattgcatatttatgtagttgcttcggcaagctacctttcgttgccattctcggttgcgtgtttcatgttgggtattcgngttggggtagctaatgcctgttgcagggaatccaagctgactgagtaatcttagattattcatgaatctacttgtttttgcaggaacc

SEQ ID NO: 39392 - DNA, 662 bp, Arabidopsis thaliana columbia
aatcccctagatacttaacagcagctacaagcaacaatagcaatatggaaattgagtatataccacgatattgggctggtaactttttcggctgagtattgtactgtattgattattcaacaaggtgaatgggcttttaccttgaatctatgaccagcagaagtactacgatttggtaaacagcacaagtactacggaaacaacatgtgattttttaaaatcaaagtaatcatatcagagcaacttggaaagaaaacataggagacaaatattagaaaaattcccggatgtgacaataaaaagcgcgacgaaagagggatggagatacgtatcagacgcatttaatgcggcgtcagaagatatacagcttccaacgtaatatactgttgtatgtgtaaagccttttctttagtgtaacactttttaacacaaggtttgtgtgcttatgctatacgctacagaatggcgggtcgataagttgacacgttggtcaatgacgtcaagattacgaataggcaagtgggggcagaagatatactgaatctatacctcagttcacggtaatgtgtaaagcaaagactaagtagatcacttggttatcttgacgatagcatgcaatacaaataaagaacactgaccacttcgatttgacattcgtgaat

SEQ ID NO: 39393 - DNA, 636 bp, Arabidopsis thaliana columbia
aatgaacttgttgtctagggttaatttattgagcatgtcaatcacctgtaaactgaggaaacgaaactactcaattatcccatccttaggaattctttatctgattgattttattgtttactctactactatttactgcatcatgtcatttgttgcttagtttctgcaattctttactgttactcgatctgatactcgaccacccagttgtctggcaacagactgtgcagtcgagtatgcctgtttcatttcctgtctgttactcgacctgtcactcgacctcacccagagctctgcaaagagctgtgttggtcgagtgttttactgtttctgtttgattttctgttttctgcatgttcacttaggactgtaggaacacaccaaaacctgttatgcttggcttgacttagtgacttctgatcacatcttgattgttagcatcacacccatttggattgacaacctaaaatactacaatgacatgattggtgttttaggataattgactaaaaacctattatcaatttggcgccgttgccaattgggtgttcgtttgttatatttaagatttcagacttgcttagatcaagttctttttaaattttctttccagttacttactgtgtttttcttgtt

SEQ ID NO: 39394 - DNA, 481 bp, Arabidopsis thaliana columbia
ttgggttttttcttcttccttaatatcgtttttcaaaatttcaagtttcagactttcatgtatcttgatcgacataagcgaaatgtttgttatagtaataaaataaatcttcgtgaaagtttcgataaataatgttgtgattacttcatttctttcttttcgtttctttatgttttgttttgctttttgattttggcacgcctaacggtctctgcttttggccaaaaaaaaacaaaacaattcttctactttactgctatctggtcctcaaaatttcactatccaagaatcaaaaataattcccgattctaattgtcggatttagattcatattctaaagttttcctgatacatcacaacgaaagttctaagctttatttcttttattaaaacaagagatcaacaaaagcagaggaattttcaaaaacagaacattgagaagatggagaatttgccaaatcacgaagaaaacgacgatgtg

SEQ ID NO: 39395 - DNA, 813 bp, Arabidopsis thaliana columbia
actctactctagccacgtccgccagtgtgctttaaagtaaattagcggatcgaaattctctctactttctcaattttcgcacaaatctatgtctttttttttttgggcaaacttatcttatcataaaagagaaagagttttaacctctaccaacagaggatacaacatagcaacaacaagtcggaaaagctaaagcatcgacaaacatagagatcaaacataagcgaaactagcaacaacaatgctcaaaaagagacttggggacaagggtgaacccaaaggttctagcaaagcagcaactaaccaagagcatccaaaaaagcaaacacctttagcttggaagaccttgtcgaaaccacaataaggaggaaacaaagcctccaatgacactaacgtcaaacaatcggcaaaggctgaatgagaacagtcttgaacaacaatcctcgcttctacttcaagcagatcagtattgcacacaatgctccctgtaactttatcactaaacacaagtgaagtatttgagaggataaaaagctccataaaggagagatgagggctatgaaatccccaatgaaccagaaaaactggtaggttgtctgaaatcaaagccctccgtctaagctgcgaagagacaacttttaacaaaaacaaatcgagatagaatccgcatactgcagtaaaagatcgcattaaagcgatagaggtattacaagagagcacaaaagtatccaaaacattctgtctaagctgcgatgagacaacttttaacaaaggcgaattaagacatccacatattgtggtaggggatccata

SEQ ID NO: 39396 - DNA, 567 bp, Arabidopsis thaliana columbia
  unsure (1)..(567): unsure at all n locations
taagcatagttaattatggaatcataggggagagagaaaaattgcattgaacgtgctcataagtctttgggtggtatacgatgatcacaacgaatcatgccttaatttggtggtagcgcaattgaggtaatctaaattactaaatttcaagctaagaacgctgttaaatcattgatgccattttgaaaacgttgttatcagtcttaagaaaatagatgtgatcataatactaatatatatatatgatggtctatcgtgaaattgtaagtcaaatcaagaatcaagaataggggacagagtttggaagacagagatcgattcaaggatctaaacatatcttgttttctatgttatctccaactgtaactactaactaatatcctcataatcttctctgcatcaaaacatgccttcctaattgtaaaactaatcagagtcttcttaaacccataaaaaagggtcttcctaaacaagtcttatgttttgcttcagacaataataccanaaacatgtacactgcccagcttaaataattttgtattatcctaatataatagtttatatatt

SEQ ID NO: 39397 - DNA, 357 bp, Arabidopsis thaliana columbia
aaaaaccatagttcaaatatcatctctatataggaatttggtttttataatatattcctcaatttccttttcttgaatttttcattttcgtacttagttttctttgttaaataatattttatgtaagttttttttttgataaaaaaatatatgaagtaagttgacattaaatgtttcatattttgacatgggatcaatccaagaggcccatccaattgacggataacagtcactcactcctataactgtcggacccgcatcactctctatttatacacacctgccttctctcacttttcttcattcatttcatacatatttgtctctcttaaatgtgtttattccccttttgtagta

SEQ ID NO: 39398 - DNA, 646 bp, Arabidopsis thaliana columbia
catatttgatcctctgcaatatgaaacggggtttgatgtttgctaactgtatctgcagcagcatgtgtcctatactcttcaagctctttggttaataactggccagctcttgcatgacgcgatcccatcctctgggcgcataataagactgcctgaacatcttgtagcctattcgatgtagtagcagcggcatccaagttgaagagaaccttatgtatgtttgctatgataatattcaatggatcatcggggtcatcagctaaaagtggatctagaccttctagatcaatatgttctgcgattgtccatataagacgcccgaggattcttggggtatttacctgccaaattgagatcaagatttttataagacattgaccacgtttcagtccacaagcaatagttctcctccacatttagtattaaatagtacttaagaaagcctaactaaaattcttcgaggaaaattgccaagggttacttctaactttcagctgaggcttaattacctcttggagatccttaacaagctcacgttgcaagttctgcaatcgtgtctcatttaatatttgatcctgggaagcaccatctttcagcctcttcactcctccacgggtatcatagatatggcacagctaacaagcaa

SEQ ID NO: 39399 - DNA, 451 bp, Arabidopsis thaliana columbia
tgatatatggctattgttacaaaactaagtatgaagcatttcgaaccaactatttaccttacttgatggctcttcatgagttagaccttgattggctcgcttcccaagatcgatctgcacagaaagctttgcttgcgacagatcaatgcctgcattctggagtgcttgtgttaatgagctcaataacctggccatttcagaattaatgtctcacaagattagtacacaatgcagttaaaaaaaaagggtagaagcgaacacatcaatggcagcacagttacagaaacgaggaagacttagaagatcagactcactcatgcgagtaggcaccagagatgctaatggttccaccttcaataaccaggtcattactttggcctagccatcactagttgcaggacattcattagcttgatcgccttgtaccattggaagaattggttgtagtggt

SEQ ID NO: 39400 - DNA, 272 bp, Arabidopsis thaliana columbia
cagagaaaacaaaaatccaaaactcaaaaacacaaacagaaacgttttggtttcgttttctcatctattattttctcaaccagatctaacaagatccccaacagctcagaaacatcaccgtcctcaaagattcctccgcttgcctcagcctctcactcgccgccgcaccaaatcgactcgattccagatctcctttaagcctcctcaccgacgacgacgacgacgcactctgtggagacgagaccgattctttgacggcagatcttaaagtc

SEQ ID NO: 39401 - DNA, 632 bp, Arabidopsis thaliana columbia
ggtcgactgatcccccacatttttctcgatcttcgatcttagtatccaacatcaatatgtgctcttttgtatctgcttgttctccaacatcaatatgtgctcttttgtatctgcaaaatacattctcatatttaatcaatctacaggtaagatatgatcccggtgtctcagctccagtttgcttagaagaagaaggcattttcaacggactaccagagttgagcagcatgccaaggacggcctcttacgacctagttgaaaactcggagttatacctagagctacaagacctcactgctccattaaatccccaaactgggctacaagacctcactgctccatttaatcctcaaactgggctacaagacctcactgctccatttaatcatcaaactgggctacaagaccacactgctccatttaatcctcaaactgggctacaagaccacactgctccatttaatcatcaaactgggctacaagacctcactgctccatttaatcctcaaactgggctacaagacctcactgctccatttaatcctcaaactgggctacatgacctcacttctccatttaatcctcaaactgggctacaagacctcactgctccattaaatcctcaaactggg

SEQ ID NO: 39402 - DNA, 975 bp, Arabidopsis thaliana columbia
  unsure (1)..(975): unsure at all n locations
atgttaatacaaaattagggtttggaatataggccacgcgatttaggtttcttgttgttgctctccttcgattaaatcagtcaattttataccaagatgttagggttttgcttcactgtctctttaagtcttgtttggttagggatttcaatctatattgatcgggtttggttttgagaaatttagtttcttagagacttaaagaagatgaatttaatttcttagggacttaaattcaatttcttagggatttgcttagaggagttttgcacttgattgtaagtgttaactctctaattaagctggttttttgcttctgttctttaatggccttttcagtaaatgcagaataaatcaccnaagagagacatcagctcttagaaaatcacaatcaaagaggtcttctcaacgtaaaacctcacctcttggttggttcccgcgaagaaaaggggattcctacttgaataggaagatcaagaagctacaggtgaagtttcgttcttgttatatactcacgtttattgattgagtgataacaacactatgtccagttctggaatattgaagctgtttgtacggtgttttgtaggaggttggtggaatgaatcagactcttgatgagactcttggcgattcaaatccacactactgcaaaattgtaagagaacaaatggctgttagagaggctgcgggtaaggctatggagcttcgcaaagctgctctggttgaagcatcttggtgtagaatacttcgtgctgctaggtaaattaaaggtttttttagtatccagtaagtttttattgtggtaactctttatcttttataactaaaggaattttcctgttgataggattccatgtttggaagcagaaactttgatggagaatgcagaaaaagctgcagtggaagcttttgaagcggcatctgcgttgggagtgataatgcatgataaaccaaatagctcgaggaaacaat

SEQ ID NO: 39403 - DNA, 596 bp, Arabidopsis thaliana columbia
tccattggctttactttattaagtaatgtttaagagtttagatttgataatacataagtttttctatctatctgttgttctatggttttgtgacttcttttgaagaggttttatcttgtttgttatagctaatcttcaattgttatgaaggtaacggagatggaagcaattttgctacagcataatacagcaatgccaggtcgacatattcttgaagctcttgctgataagtttaggtattttacttgttgttgctcaattccttggcctgaaagtgattttgtgtctttatcatctaaaatgtggttactttttgttatctgttgtctcagtgaatcacctgagcggaaggggaaagttgttgtgcagttcaagcaagtactggctttttccttcttgattcttaagttttatcagacagagtctgttgggtttgcttttaaaagttaatgggaatgttgttttaatgcatcacagatctggaactggttcaaaataggcgatatgctttacgagcaaggggaaacaaagctcctgggaagctaaatgtatctccatgccgcgtatggatttacaaatcagatgagaagtgtgat

SEQ ID NO: 39404 - DNA, 516 bp, Arabidopsis thaliana columbia
tgttaattccagggtttctctgaatttgaaagttatcacttagtaggtttccataccaaggctcaatccaattaagtccgtagcgtctaccaattccgccatatccccttttttaggatctcattatgatgtctttccttttttttcttatgccgaaaccacgggaatcaatacattatagatacttatcggatgtccatgatatctgctaataaacgcatgagctccagcgatactgcttaagtccaatcagccaagatcctaccatagacacgtgtgaagatctccacggccgtcgacaggctctcgtttaaaccacgtcctgctgatgtcagcacgggccaaacactcctcctttgtatcctggcgttcctaactatgagcttcgtgtgctgcctgagaactccgttcacggccttaacgtagttcttggagtcgtggtcctcaagactgaaccttccgagccataagctgcgcgttgactcagcgttttgagagggtgagggcggtttaaaa

SEQ ID NO: 39405 - DNA, 577 bp, Arabidopsis thaliana columbia
gtgagtaggtttggtgtatttctactaaacctaagcagcatgttaacatgcaaatcatattcaggtatgaaactatactagtagaaataaactatagagcaggagctatcaaatgcgtgaactaaagaggaaactaagaaatacggaaagcactcggccgagcaagatactaattttggtcgagcaagaaagtcgagcaaaataacaaaacaaaacaagcagcttaaacaataacacgaagtttgaacaatcaaacaaaacaatgctcttaagaatggggtagttggttctagaggactcctcaatccatttagctagctaacaaactcaatcaagctatccctagacaatatattcaaaacaagatcaatccactctcgtgacaatgatcctcataactttaccacttcctaatttcaattctcattgatgaaacatagcaaagcagaccttaagcaacaatctattgcatagctaagtcaataagcagtctaaacatctaatttcttgggctagaatctacaaagctctggaattcgttggttcagacatttcatcaacacattttgggtggaga

SEQ ID NO: 39406 - DNA, 630 bp, Arabidopsis thaliana columbia
  unsure (1)..(630): unsure at all n locations
ggcttattttcttcgttattacttattactaccacgctcaagtctcaaaggtccaatggtcaatgttttatttcaatgtcaccgaccaccaaccgcttcctcattattaagccaatctaaatattaataccagtcgatttgaccccaaaacaaaaaacaaaacttagaccacattattattaacccaatctgataaattttaattttacccgattctgatttttaatactcaagctagtagatgatttaaatctttaaaccttagactaacggctcttcgcctttttgctttttcctctttacatctttttctccagtagctttgttagtcaacacattttccaaaaaggttgaaaataagtcaaagtacaaactgaattacccaatacggcccaatatcctgattagagagttaggcccaatatatcatcagatttgcaatcgcaagtctctttcaacttctcgtcgaatgttatactctcctcagagtttctccggatctttcaaaaacaattccggtgaagatgaatcagttctgtgattcgtgatttatgttctcaatcgattctcatgttatagtcacgatctgtacgaaattttggtgtggatcacaagctcncaaatggagtc

SEQ ID NO: 39407 - DNA, 800 bp, Arabidopsis thaliana columbia
caataatatctttacgtttttagaattggattcatgttttacatttggaattcacgaaagctagatctcttttgtgatggatttttcttcaataagaaatctattagcacgtcagtataaatattttctgatgaatttacaaacatcatattatgttatattaatcaagtcgtataagactttgatacaaaaattattgaccgccttatttgtgaagaaaaagtgtcctctgcacaatttatctatattcatgtctaaattatattaaagtctctagctcgttgagaggtttttgccttgaagagttatggaagaagactctaaaaggttcttcgtgtagcggatccaggatcattttttactcaggtcacacatagctaaaaaaaaaaaaatttgataagccaaatatatattttctcataacatttaaataaaattctgaaatttagggaggtcacatgaccctcctttcttgtacatagatctgccggtgcgtgttatcctcatgtgttgcgaaagatctgtttcaaattttcacgtataaacttacattgtgggtcttctgctttgcgatcttttcttagcatgtgttaattacgtatgcatgggagaataacagactctctcgagctagctaattaatgtcatttagcgttttaatcgtacggatgttagcaatagttcttccataaaaaaaaaaattaactgaagagataggcgattgcgttggtgtgactaactttttgggacgcttgtggtgggttggtgctcagaggagaaggatggctgatgaaaactgg

SEQ ID NO: 39408 - DNA, 573 bp, Arabidopsis thaliana columbia
aaatataccattctgttgataattcacaaaagtattatgtttgagaacaatatctgttatttttggggaataaaatttttatttttataattgtttgttttcaattgtcacaatgtctgcttccaatatatagctttcttataattataacattaaatcataacccttctcttatgaatcgaaacagacatataatctctaacactaatgtatattgtttccatacttaatccaatttggaggggttttaatgattaatttagttattttatttagataatattatttttttaattcatttagttagatatggaaaaacattattgtgtaatttggagtggattaataaaaatccaagaattattcaataaacaatgatttacataactaaataattaaataatttttgatagattaaaaataatatgtgtggtttctgctatagctacttggtaccgtggttaggtaagctttcaggtagaagaaaacacatgtaatatatgcagaaacacgttttagctaggccaatttataaataaatatcaaacataccaatgaatttaaaacatattg

SEQ ID NO: 39409 - DNA, 602 bp, Arabidopsis thaliana columbia
gatctctccatgccaaacatctatctctccacgccggagaggggatccacgacggagaagagatctccatgaaattcaccacaaaaatcccttgagatgatggtttacgtggcactgtacctgccattttacccaaatcttcataatcctcagaccattttctgccaattgcaaagctaattgcacaacaaactataataatgaataaaccaaaaggaattagaatttacattttgttttattcgattcaaaagaaaatggaaatttagggtttgatagaaccgaagcagaaatcgaaaagattttaaagctctacaaaagtagaaaaatcttttgacttaaaactcatctcgagaccccaacttacatccgtcctcgcaaattccctgcataattgcgagggagttgttgcttgtaaatattgcgacgaattagcgacaggtatctctcgcgtcgcaaaattcttgaaaatttgtagcaaattgcgagggacattctccatcacaaatatcgaaagttaacaataataacatttattctgattcattttctgaatcattacaaccattttctgactcaacgccattatcagatttgccgaa

SEQ ID NO: 39410 - DNA, 655 bp, Arabidopsis thaliana columbia
ccgtttatctcaccactctcactcggtatccaattgtctgattttggatactgcgcaaagtttccacgactcgacatcacatctctcgactggttctcatccgacccctgccttgacatctgcatccaatccaacaacgatcttaggtttctaatattcccctcaccctctatcctaatagtggtgaacgatccggattatcctaagtgccttttgcgaccatttactcgatacaacgtttgaaaaacccgatcctaaaaagcatcaaaatcatgctctgataccacccgttgtgacgcccctagtccgcactagaactcggccagtccagcacggtccagagacgccacaatgaaaatgaattcccatagagtagccgaggttcagaaacacattccgaacggtagcccactcaaggttacccatttccccatttgggatccatttaggcttgccaaccctcacttcacccaaatgttgtgtcgactcgaacaaattcttatcagtttgaaacccgtatactttaaaataaataccgatttcattatcatagagttactaaaatacaaggaaaaaccacaacataaacatcgtttttatggccaaggcatgaggcccaaaagtacacgacacgaaaatacatactttaagtttt

SEQ ID NO: 39411 - DNA, 891 bp, Arabidopsis thaliana columbia
aattatcatggatagacaagatgaatctagcaggtcttgatattaccttgcttgtgagacccagcgatgaagccttgggatatagttgggaacttaagtatggaatctagaatgttgtgtaagcttgcagagacatacatgttggttaggatttgattagagctgctaggcatatggatttgggtagaatgattcaggtataaactagagaatgttgggagctcctttgtttttaaaacctcttctactggttccggttttgagtatggggaagttgatataaccctattttgactgttcttagctatgttttaggtatagctttttgagtctttttgttatttctagagtccttttatagtcttttcaggtattctatgattgggacaagaatggatgataagaagacattttggagcaaaagctgaagaaaataagtcaaaggacgaatttggtttcagatcaagtcgagagtgtcgatcgacacactcttggtgtagggaggaggcaacggaagcagaagggacacaaggaagatctcataacggaatcaagctatgctcgtgagacttattacggaacttagaagtgagcggaggctcgggattggatgagaaagaagcaatttcttccgtcaattgaaaaaacagtaaaccctaatttcccaaatcactgtctaatagcaacagcaccagccacgagtacttcaacaccgctttcatctaatacggcaccgtatcagattccacgaagggccacgctagtccatcttggccagagtctccttgacgaacctatcaaaatctcttttactttgttttctttgatgacacgaagggatcagctacaagaaaatagacgatttgcgaggcaaatttgcgatggcaaata

SEQ ID NO: 39412 - DNA, 674 bp, Arabidopsis thaliana columbia
catgtcaatcctctgaaatcgtgaggagatgtcctaatttctacaaaaagaaattcaatttgacgaatgagtaaagatgttttcgacttgtctttaaatatttgctagtttcttggccaaaaatattcaacttgtctttaaaaattttcttttatcatccaacttgtctttgattatttttaaacacatggtcactagaaaatgttttaggtcaggacgatattgcaaatatcaaaaatttgcttttatgtgctttccactagtcagaaatttcattttagcaaaagaaaataatgttcattggaagcaatgttgtatccacctatcactaactgacatgtgggtgacagtttaacagtctcagcaaacaattgagacagggtctccactctccaatctttcatgagaacggcctcccagcggaagttgaaagacgtgctaagtcatcatgagaacaaattaacaatattcagcataagatctagtcccacactattaacttttacgacacttgagttacctgagagaactcgatcgagttctttaagaaaaaattaaagatgacacaacccgcatgtcatgcactaaatattagggacaatgtccacatcggaagttgcgtaggacttaagtggtaatataagatatgggcctctcactattgcgattggttt

SEQ ID NO: 39413 - DNA, 444 bp, Arabidopsis thaliana columbia
gtaactttcctttttactgttgttcggcagtagctataaactttttgttgtatgattacatgtgttggttgtagatgtagagtttgattggtaaagttaattaaatattgaggattcaaaatttaagtttatcaatttaaaattataacataatattaaatgagataacaaataaataataaatagtaaatttcatatgtataacacattgtttggtcaattttataattttttttacctcaaaaatatgataagatttttttgttgtcttatgtttaaagtacaacgtactcatataatcttatgcttgtgaaagttaaaaataatttctgtcccgcttgatgattatgtcattttattctacaaattttttttggcaaccgatattaattagaattcaaagagttaatccgagagatattgtttatatatatggtatgatgc

SEQ ID NO: 39414 - DNA, 474 bp, Arabidopsis thaliana columbia
tgtgaaatatatatacaacatgcgatttatcaataaatcatattaaaagcgacataatgtagactaattttaataaatctctaacattacccttaacgtaatgcaatacaaaacttatgtaaagtagtcaatacattattacggtatcccatagaacaactagattaaaacccaactccagaccaaacataacacggttgattaaattaaaacatgttacatatatttaaaggatgtgatttatcaataaatcataatacaccctcaaataacgtagactaattgtattaaatctctaaaattacccttcacatactgcaatcccaataagtacgctattttaagttaatacatgctagacaatttaaaatcatgttatgtagaagtacattaactaaagttttatataacatgatataaagtataatagtatgtatttcataaaaggacgaaatgcaacgattacttgggact

SEQ ID NO: 39415 - DNA, 279 bp, Arabidopsis thaliana columbia
aatattttactccaaatgtgtgattgttaatatcaaagttattatacttaaagtatttaacagaaactattttaaaagttgttatcatgttataaggatcgtatgtgatggagcactttgcctttgtctttacctctatttttcgaacttttaaattgattcgtaaatttgatgaaagatttagggtcaattttagtacgttgtgtgaaaacattattactagtatgatatgcttatagttgttgataataaggtttggtggtatagtgggagaaatgg

SEQ ID NO: 39416 - DNA, 555 bp, Arabidopsis thaliana columbia
taacgaccgccagtgtgctctgctctaaagggcgtggagtttgcgggcgcccttcctcggttggcgctgacgttggggccagggaatctgcttttatttggacaagcctcaactgctccctaaatatcagttcggggtcgcgttggagctctaccaagaatttcatggcggacttcggaaggcccttttctcctacttcaggccggtagtgcttgaccgcatgaagcatctgggctggcgtcaggccttgtagctggaggagtgtgttgacgagagactcgaagtcctcgcctagtgatgagaagcactggagccattgcaggagctggatcaccggtgccagatgtttacgcgcggaatccatggtgctgtcgcccgtacacgtggtcgatccgttctcatagtgttccggctgtcggttgttggtacgagcccagtcctccaatgtcgacacattcatgcgaatctgcatcgccttagttcgggctagatatcgttttgtagagagaatccggttgaagagctccggtccagacagtagtagagttgcgagag

SEQ ID NO: 39417 - DNA, 584 bp, Arabidopsis thaliana columbia
ttttttttttgtcaaccgatattaattagataaaactcaaaaagccattcttgaggaatgttctttacatacgtgatatgatgcggttcgatacagactttccgtgccaaattgtctgctttgacatttgcattacaagaaattaacactacaacatattgtatcttgattgtactaaaaatgtccatctcttataattaaattttaaaacacaatactagtataagataacaagtcttaatctagatatatgcaaaatagaataatttaattttcctaacaccacattaacgaccaataccttctaattatgacatattatcaactgatttttttaattttgagttggtattaacaaaattaattgctatataacaattttttattgtatttttggaaatataactataattgctacattttttatatcaaaaaagataatatacagtaataaatatagattgacatgaagattgaatatccagtaaattatatcacataaatgcatagtaaatggaattaagatgttgaaatcaatgagaactagattataacctgcggtacccgcataattattttgtctt

SEQ ID NO: 39418 - DNA, 496 bp, Arabidopsis thaliana columbia
cctaaaataaattcctccattgactcccaagtcttcatcattagaacaagaatattcttgtatttattataatacttattataaacaatttccttttctggtgagaaaaaacaaaatcaaaataaaaaatttccttttcttagcgacacacatttacttaacccacaagtcgtcaacggcccaaagaatatggatggttacgagagagcgcatacaaagacgcgctcctaaccgacccaattagagaaaacacacgcttgcttacacgcgtaataaggttcttacacgtgccaaaaacccttgttatataaagaaacctaggtcacgtcaatttctcatcaccattgctttgttttgttcgtcaaatataatcaattttaaatttcttctcttctcttcaaacgaatcgcctttttcgataatctctttgcatcgatttcatcatggctactcaaacggatctcgctcagcccaagcttgatatggtaaattacgt

SEQ ID NO: 39419 - DNA, 535 bp, Arabidopsis thaliana columbia
atactatcagcccttttatataatgctttggtgacaacagaacgacaagaaaaactgagaagagacctaaaaacgattatagcggttttgattggttgaagatgtgtcacaattttttttgtttatttcgtttcatttttatttaatatgctagtaaacctgttttttttttttaaaactgtaataataaaaacgtgtctgttaggcctttaaagcccaaataagcccaatgaaagaggaaaagaggagacactgagatttggcccaaactaacgcatatatttgtgttttacatttatacccctatgaccgacatcaatttaccgacagactctactttcgagaatggcgggaacgtgaactgaaccctaatcaccttttttctcgattccccaccaatggctatatgattacagtagcccccttcgtgtctcttcgtttccagttccctctttatataataaatcgctccactctctttttccgagaaagaacacagtatctcgtctacaacacctgtcacattttgagaaca

SEQ ID NO: 39420 - DNA, 427 bp, Arabidopsis thaliana columbia
cttgtaaagtcaacccaacaacaacacatgatgtaattgccacgcgtcaacagacataacgtaggacccttctgcggataagaattaccaaaaaattttacacaaaaaaacattatttggatgagaaatgaatacggaactagggaattaaaagtgtcggtctacaaatatagcagtagatgctagaaatggtagggaatcatatgagtgataacataaagttaaaattgagtttgggagttgtggaattaagggtaacacgtgataatgaaaccaatcttcttatctcttcttcacttattgaatcatctaacgttatttcaatttttgttaggtacttgtaataataacccaaatatagcaggtaaatcatagaatcacgatctgcgtttcccctgaaaaaaaaaaacagagagaggcaaaaaaa

SEQ ID NO: 39421 - DNA, 474 bp, Arabidopsis thaliana columbia
gctactatcgagacatcacaagaacattcattgaacaagtcaatccgaaattaacaagtgttaatacaaaattcatgcaaaacactgacttttgatatgcaaatccagatttcgcactactagagactatccccactcaaaaataacagcttttttgctgtatcaaacaatggtgggtccattttaaccactgaccgtgattagcgaaatgaatatagtgtttaccaacaaaactttatgaacccacaaatcaaaaagcaatcacaaacccaaattttggattctcacagagcaatcaacaactaattgaattctcttaatactactactgttcagaaccaatcaacaacaaacaaagcaaaaaaaaagtaaactttatcaatgtgttaaagaattcaaaactttgatataaccttggatcccaaaatgagagcgccgcgttcgagaaagagcgtgaaattgctggtgaggttg

SEQ ID NO: 39422 - DNA, 619 bp, Arabidopsis thaliana columbia
  unsure (1)..(619): unsure at all n locations
gtttttggtttctgtcatcttttttgcagaaagattctgtgttactcgaatctctgagaaagcttgagtcaatgtctatgagtgtggacattcttaaggtttgtttttttggtgttgttttgatattgtatgatttggtgtagtggaagttgcttattctgatggagcttttcgaggctgtggagtgatttaagtgtttacgttcttgcaggatactgaaattggaaaggctgttaatggtctgaggagacatagttccgataagattagcaaacttgcaaagactcttttcgcgtatgagtttcatcattctcattgtgtgcttagtttcatttgttctcatactctcgcatctgtgatgtgaattaaactttggcaaaatgttccaaaaaaattgaacctccacggtttgatttagatgcaaaccagttgccttgtaggatgtctcaaattgtaaaatgtcattataaaagccttggttgatcattagggagctgctcttgtgttagctcaatacttagaccattttctcctccttacgttctggctcccgagtataaagattgtngttttatatatgggatcacagagagtggaagagctggtggccagtggatga

SEQ ID NO: 39423 - DNA, 469 bp, Arabidopsis thaliana columbia
tttcaaagtttcttgttctgtgcaggatatttcaggagatcaagtcggaggatatgtgattgcgagagacttccacaatagagatatttcccaatcttgtcacatgtggctatgtgagagagtcttggatcctggtagtacgcgatgggatctccatcctaatccacctgtaataacgcccgcatacgccatgtagcttacatccacaccagggagtggcaaatctaggcagacccatactggagataataggaggtgttccgacaacatcaatcacatgcttaatagtattattggaagaagacaaaagtatctaataagacataaaaaagggtgtagacacagatttcgtctggatataataatacaattacaaaagacagataaagctgagaaaccaaaagaaatcctgaccttcctataggagatctcattatggctactttggttggtctcttgactgctctcc

SEQ ID NO: 39424 - DNA, 913 bp, Arabidopsis thaliana columbia
gtgtatcggcggaaaagcgctccgtcgtggagaaatgaaacggtatgaaaagggcctgaaatcgcccaaactgtcgccctctgagaaccaagtttctttttatacagcttcaaaagttatgaactttcatataaatattttaacaaaaaaaaaaaaatgctatataataattgattgtaaatagatagggtgagataaaaaaaaatataaaactctttacttgctctttgagcgtgtgaaacatactttctaataaaatggtgacgtgtgacatgtgcggacccaaacaaattttattcaacatgttgaatagattcaacaccctaaaatccacgtaggtttttttcattttttaacacccacattacattgattaaacagttgaataatttattcaacacctccattacaagtagtctaacaacgaatgattattactatatttatattttactatataccttaagaccttaacaatactcttttttctctaatatttttcttttcttacatagtaatttagattaataccctataatctaactatgcggagatggacatccacatgtcacttccttctttcttctgctcttattcttatttctcctccttcttctttttttctccgagactttattgcttatttttttcttcaaaatagatttaaaagtaaattatatattagtgacaacaataaaaatattaaaaataataatattgatgaatggacgtctagacctaccttttaactccttgatctcttcaaccgctccttgtattacaatggcttgcctacatctttccatacctctttgaccgtctccttctttggtagacgagacctaataaacttgtaagttgatttgatcatgatcttaattctttctttcttacctgattgtgtttttgaatg

SEQ ID NO: 39425 - DNA, 514 bp, Arabidopsis thaliana columbia
ctaatataaagataaagaaggaatcagcacgcatagcataatcactatcccaagccatgatcgtatatatgaaaacaatgtacctaatactctgtcggtattagggcaaacattgtcaagagtaatgctaaatttcacttctcttctccatcctggtggcaaagatccaggctcgagatcaagatcgccgggaaaagtaacgatcattcttagctcctttgagaaaagaaagaagacgcctgaacaaaagcaaagtctcacatctaagaatcaaattccacaaaagatgagaaaaggatttctgtaatcgtgtcacgctttaccaattgcagccggcgaccgtgaagacgggagagtagcactgatctttcagagatgagaacttttccaaaacccaagtaaatttatcatgcatcttcagatctaatgacatgatcaccagttatcgccagtaaaaccctaattcgtggacaagtaacgtgcgttgaaatccagtgtggtagggtttgtgctg

SEQ ID NO: 39426 - DNA, 630 bp, Arabidopsis thaliana columbia
tttgcataactgtttgcgtagtttacaatcgtttttaaaacataagtatcatagataatttacaagggattttaaaagcttttaaaaggggtttacttcattaacaatcgtttaagaagcataagttagtggcagataatgatttacaagggattttaaaaagggtatgcatggtttacaaccgtttttaggcataagtaactagcatagaataatttacaagggattttaaaagcttaaagaagtgttaaacacgtttacaagggattttaaaagcataagtaagtgtcttaaaacgatttacaagggattttagaagtgtttgcatagtttacaatcgattttaaaaacataagtaagtggcatagaatatttacaagggattttaaaaccttttctaagggttaaacatgattagcaatcgttttttaagcataagtaagttgaatagaatgatttacaagagattttaaaagcttttagaagggttaaacatgatttacaatcgtttttaaagcataagtaagtgccatataatgatttacaagggattttaaaagtgtctgcatggtttacaatcgtttttaaaaccataagttaatggcattgaatgatttataagggatttta

SEQ ID NO: 39427 - DNA, 815 bp, Arabidopsis thaliana columbia
tatctctaatctcgatgtaattaagtaatgccctgtaacaccgcttttgaaatgtatatatatgaaaccccgcagtctgtctaatcacccttctctgcttctttccagtgcaaaatcatccatatcttacttacataaggtacagtctttctttttacgaaaactaaaccctaataatgaagtgggaacccaagcaatgatgcatcagtaattgtatacactgatttttcctgtaacataatcaatggggtaagccataacaaaccaaaaccatcaatctgcttttggaaccacagaaatgagtttgtttacacgtttgatgaaactgttggccgaataacatatgttttacttagtttcattatgctgtatgttggagatgcactttcagtcaatcgcgagcttgtacctgcaagctgttacagaaccaacgtggtgagctggcgagctggcaatgtgaagcgagctggcaatgtgaagcgagctggaaatgtgaagcgagctggcaatgtgaagcgagctggcaatgtgaagtcggggataagcaaagcacgtgttgtgagatggcgagctggcaatgtgaagtcagggatgttaagcaaagcacgtgtgttgtgagctggcgagctggcaatgcaaatggacgttaacggcgatcgttattaacgtggttagcgtttactttctttacctttttgtataagagcaacatgttatgctcatgctttcattatcgaagattgttatagaaactctctctcttctagaactttctttgtaatctctgggttttctcatcttgagaacgagaggag

SEQ ID NO: 39428 - DNA, 920 bp, Arabidopsis thaliana columbia
tactatttaaaccgcaccgtactttttccgtaccgcaaaacgcagtcaccattcggagcctaagttttttatcaaaaaaaaaatgtaaaagaaagtggttttagctatcttgaaaatcaatcataattagtagttgatcattgcataattgaaatattcgaggattagaaaatacgttttcatggcaagttgatgtgtacattaccgtcaaatcaaatataacgtggatttagaaaataaatagaaaccattgtcagtgcatgcggttcacgtggacgatgttaaatccaggattgtgtttttgctttcaagtcaggtcttatagttgatgggaactgaacttagctagctgtaaattgactttttgcatttatgtacaatgcctttacctgtttttttgtttttttggacaaccatgaagttcggagccggtactcgtatctccatgagtcgggatgtgttttaatttgtgctaatacaaatttgtgttgtagtctctctttgtacgtacgggtgatcgctacttttgttggtatacatgatctaacgcatgcgtgtaaatctatttaaagacctatacatagtttcgtaggtttcacgtaaagtcttcaatggttgaactaaatagtgttactcataatcacctatccatttgcaccagatgaaagagacgtattcattttcttttcccgcttaaaattatatattgaattgatctaaataaccgattcaccaattgtatatcttagtaaaggaaattgggccactattgggcctagtaaccagtctaacttttacggatccgacttagcccaaacacatcgccggttcagaacgctgccgtaaatcgctgcatcggaaaaagcacgatgatgctagaaaccatgagactgtcttctcatccgatcaacactctcata

SEQ ID NO: 39429 - DNA, 219 bp, Arabidopsis thaliana columbia
gtctcttggcatatataccacgagtgagagtaccccttccttatctcataccacgagtcccattcgatatatgatctcacgtaatgaaacgcgtcatctaccttgcaagtagacactgtggtgggcgttttggacaagtctgtctcttcacttattattctcactatccaccgtttgcgagcgttgcgtgttttcaaaacacttgtcgaggtccggaat

SEQ ID NO: 39430 - DNA, 195 bp, Arabidopsis thaliana columbia
aagtcaaaagacaacattgttgttggttattgaaatttctttttggtacgattatttttaaaatattgtgtacgtgctgcaaattgatattggagttgacgccacaaaagccatataggccagaattaaagggcatagagacttgtccctgaataatttgtagcctcgaggtagcaccccagcattgactctcag

SEQ ID NO: 39431 - DNA, 586 bp, Arabidopsis thaliana columbia
gaggatagcctcccgatcatatgctcctatcaatttctacaaactcatgaaaacgattactagctatataaatcaagcatagggttcataacatgcaactttaattccccacaattatcgcaaataaaattgtatataaagggtttatcgtaattatcataatgttaacattttcataatatagatacttttggtttgaccatcttttccttaatataagttaataaattaagatgctcttttacttgcaaacagaaagttctaatgtgaaaaagaaattgttattgcgtaatcatgatctcacttatccgtcagcataagtaacgatccactccacatagctacgtcacttaaagtcccatagtaactaattttctttgaatgttatagcaaattattagcaatgtatgattctttgggtcaaatcttacactaaaaacatgaaaataatttgaatatcaagagactcatatattcatattttataccaaaatatgtagggctaaattattgctcttgactaggaattcctatgaataattattaaggttcgtgaacagtgagggaaaaagagaagaagaagaga

SEQ ID NO: 39432 - DNA, 337 bp, Arabidopsis thaliana columbia
tatttgcacatatcaaaataaaacatcaaaatgggatctatgattgactggatttcattgcatggttgagtctgggatttgggcagcctttaatttaccatatgtttatattctggggttaggatgccgaggtatcagtgctaggcgtgataccaagcattgtccggacatggcaaaactcaaactccacttcaggctatgattggtcacggatccggtaataccgaaagtacatctatagaatgtagttaagcctgaattaagttgtggcgtggaccttataaaatgtattgagaaaaagaaagttaattagttttcccgtatcatgccaccactt

SEQ ID NO: 39433 - DNA, 512 bp, Arabidopsis thaliana columbia
cgtttgttaaatagaacttttatgtactaaatcaaaagtttaacctcaatctggcatcgcaaaccaggcttttagacccttattataccgcttatctccacttgctctgatcgaacacggtggactaatataagtcataatctaaagtttagcttctgtagattaagtgagactatatttaagacatagtaagctctgatataaattaaataaatatcttatatactaataaaggaagatctacgtaatgcttaagaaaaacggagaacttaatgttttagccacatactctttttgtgtgaaaagtatgagttttctataagaacgagtgattatgtaagaaatgaattcatcaatattttactacttttcttgatatcttatatcctttattcacctaaatctataagtagttttatgtattttactttgcgctaaatcaaatctagtaggttatttgcagtaaaattcaatgttaattactaaaattcgtttaatttaattgaagggag

SEQ ID NO: 39434 - DNA, 294 bp, Arabidopsis thaliana columbia
tttctttatccggaaaagctacaagctccgataggcgggatgtggagccgcctgtcagaattgaactggcgacccactcaggacgagtgattgccgaaaaagcgtgcccatcgacgcttctttcgccggccagaattgcttttctcattcttcaagaagtcgaattgcgtccgggggtacttcgcgaagtactgctccggatccgtctcaaggagcttgatacgctccgaaaacgttgcatcgaatgtggtgttttggttgggtcacttgagctcacctccatggcgtggattg

SEQ ID NO: 39435 - DNA, 663 bp, Arabidopsis thaliana columbia
  unsure (1)..(663): unsure at all n locations
taaaataaaaccaagcctaactacactttatttaatgcttaatttttgtccttgccaacattacaactttttagaaaaaccatttgatatgattttttaacttgggccgtgacattactaatgaggcccacaatgtacttactccgacgtgtaattgtctccgataaagacaaggaaccatttggaacctctcacgcgctttagctggaaattacgtggagttgagctactcgcgactctatcctatgtataattgtatatcagttttccgtctccatcaaatatcctagagagccacgaatttttccttctttgttgtaaattatgaatattaggccacataatacggaaagtcttaaagggtttggaccattctcaatcttatgttctagtagcttgatgattttttataaaaacaatatggaaatacttttatctctatccgatttcctatgtcaatatgtgtcacaggattttacacgtctaacttatgttggaaacgctatcatcttttgtttctcaatttttatagtaaacaattgtatttgttatcactacaactctaaaaaatacatttcgaaaaataggagagagcgagtaggaaataagaaagtggcaaccgagagtaggaccggaaatggtaanaagatctgaggataaaga

SEQ ID NO: 39436 - DNA, 524 bp, Arabidopsis thaliana columbia
cagtttgttgtggggtctcttccacttcccttaagtatgtttctatgactggaataccagctagcatctcttgtgagtcactttcctcatcttgaaccatttgagtgacggtagaattttccttctctgtaaactgtttctcatccttttgtgaaactttgctccccgtgaaggcctctacaacacactttaatttactgccaagctgtccaaatgtatagaagggattctcagttattggttgcacctcttgtttcgtatcaggttcaggtttagctggtgcaaggttttctggctcctgctgcttactattcataactgatttgaatatccctccaggtaattcccagtgttttcgacctcttcgtgcttgttcctcttctagcgttatgatatcttgctcttctaactcttctggcttatggtctgaagttgattttaaaagtccttcaggaactccccacagcttccgcgctcttttagcatgctgatctccctcgtttgaaaatgattgttcagaaggt

SEQ ID NO: 39437 - DNA, 298 bp, Arabidopsis thaliana columbia
aaaagtctctattcaatgcaatgtaaaattttattaacaaaatatatagtgagtttttaaattttttgtgtgttcacggtacttgaataacattccgcttactagatgtccagtctgtatagtggttgaataatccgccacatttaaacgtcatcttggtatgagactctcctagaacattgttttaaataagcaaataatctggggagatgacccctgtataagaatgaactcatgtatgttttatgtcttatataagtagtagacgagctgctccattgttatcatcagccaaaag

SEQ ID NO: 39438 - DNA, 536 bp, Arabidopsis thaliana columbia
gttgggttaactaataatacttttgcttttttcaagtctgatttttaattgtaagtttacgaacaacttcttaaactatacttttacgaacaacttcttaaacccacaagtcactaactatccaatcaatcaaaaaaattggagcagacttgattgtgtcagggcttatattgttcgacaagtttcaacaaactgtatgactcagcatcaggcctagctccacctagaaccatcctcttgaacagattagggtcatacactttagccttcacataagctttgaacagagcgttgtacacaaacgcatacctattatactttgcattcttcacctcttcaaacagtttctctgagttctctacatcacctttctctgcaaaacactctatgatcgatagagtcgtctccagccacggcgttgagcttcctatgcttttgctcgtctttagattcaaacccatctcaatgtttttgagagcttccttcatcagtttggctttagacatccaagagcaagatgtctatacgttatggaa

SEQ ID NO: 39439 - DNA, 578 bp, Arabidopsis thaliana columbia
cctgcggttttccttcactgtttcccaggaattgtatcacatacaggatattatatgaatcttaaccgtagttgtaaaggttttatgagtgttaattgtgtgcattattgtcttgagtagcttactagctttagtaatactggggtaaagagatccatcaaattttgatttaccctctactgttgtgtaatgtaacttacatttatttatttttatttgtagaaccctgaaacgatggagaaacggtcagcttgttgaatcttgggatgcacaccagtcgcctatccaggcagtgataaggctgccatctggtgagctcgtttcaggtacatgatccagctaaagctgtcatttgatgcatttgtttctgttttttttgttgttttcttgctgccatggacttccttattcgattgtattttctagtatgatcgttttgcaagcttaggttaaatgattttttggttgttcttaagatgcatatacttctttttgattaggcttgacggcatatttttcactgatgttacttgtacttaccaggttcaagtgacgccagctcaaactctggaagggta

SEQ ID NO: 39440 - DNA, 433 bp, Arabidopsis thaliana columbia
cttctcctccaaattaattaagtgggctttcaattggtcatgccttctttccatatcacgagtttcttctagccagcgggagtgatttgatggaaaggtggtcgcattcgtggagtattcttttgtaagtcttgattggaaaagctgtaaacaatgctctttctgaaatattgatggctagctttggatcgcgccatcgcggctaactcttggcaacaccaatggcttccttgtgtcttcttccatcaaagcgtgttcctttcattaattacattctcttttgtggccttctattatattgttgcgtagttttcagtctgttatttctcttcgttgtatctccgtgttatgtaaaaaatctaaaatttcgtataaaactttaaattttaccagaaaaataattaaaaacagacaaattctttagaaataaaat

SEQ ID NO: 39441 - DNA, 1058 bp, Arabidopsis thaliana columbia
agagtgtaagtaagaagtttgaagctgtggagactgatctgagagttcttaaagagtctcagccccctgtagtatccaatgaagctgccacatcaaacaacaatgatgaatatgaggcaaatagtaaccaacctgtaagtagatgtcagtttttaatttcacatgttttgcatttatgatttgaattctgcctttattaaaccgtatatgtactgtgtttttttcagtcttgggttgtagaggagaagtcaggttctgtcgatgggttgcctattcaaagagtggttaagaaggctgttaattcactgaagaaaaaggaagctgctacaaaggtccttactaagaagaaagttgcaaaatctaataagaagaagacaattgtcaatgtagagaaggtagaaaaaccaaaacctgaaatgaagaagacaattgttaaggtagagaaggtagatagtccaaaacctgaggagaagaagtcagttgcagctccgacaacaaagacatttgatgatgatgttatggatgtcactgacaaggttattgcagacaatctgaaaatagcttcaagttctgaagaaatattctccaatcctctagattgaatgggtaataaggcaatggctgatgcattgagagcacttcaagaaggactagagaatctagacggtgttactagtaagagttgatgagtgccacagctagcgggttctcagaaatatccgtatgtaggaaattcaatagtgaagcgcataatctcggatgaaccatcgtcttcttcggtacctgaacatcttcaacctgtttctgatgaccaatttgataggctgtaggattggctcaaaccagatttgtaagtgtctatttttcttcacatagaaatgttttgtgctatcattactcattcttttcttttctgcagtgaaaaagaaggcatgaacaccagcaattttaatgcccgattctactggcagataatgactccaagaagcgattggccaaagaagaatattgatggctgaaagactatgtaagtatagaaatatatcttaccagttttt

SEQ ID NO: 39442 - DNA, 512 bp, Arabidopsis thaliana columbia
accttaaaccgtcttaataatgtataaatagaggggtttgtcctgtattctagagatccataacttaataataaaatcctaattttctacattgttcttgagtaaatatcctaactttgtctctaagcaactttgttcttctttacgatcgagacttaattaacctaaaagcaacagagtttattgaatttgttttccccctttaaacaaatcattgtgtgactttcggaatgaacaattggtgctgcctgtagggacgacgagtaactctctttgaacattactctaatcaaataactcgaaggaagaaagattctgccaactgacgaagtcattctgcctgctaccgtcgttggaggaagtactggcacactacctcccgatgcaaccacgaccacgaagtcgaatctccttaacggagatagttctcactcggctgaagctgaattggcggccaaaaacagcgaaggaccaacgtgtctgcgaagcaaaccctaccactcctccaaccg

SEQ ID NO: 39443 - DNA, 851 bp, Arabidopsis thaliana columbia
aatctctttctcctcagccagccgggcctccagcagagtttgttgcctcagaacattctcgagcgtcgcagcctctttcgaacgctcagcttttagaacgacaatcttttttttcaaagctttcaactcctcaaaatccgccttagcttgttgattgttataagcaatggtacgctcggcattctttaatttgccctcgagctccagaatcttttcacgagccgagcgcagattgcgatcataccgcgagatcaggaggttattcgccccaacagcctgccaagcgcgcatattgtcttcgtcaaaaaaaaaaaaaaaaaaaaaaaaaaaaaaagggagtagagaaaagaacgtctttctacttgcagctaacctggcactctgcacgcgcccacttctcgaaaaggtcagcctcggccaaaaactcatgttccggttctccgggagctccaaccaccttccgaagaagcgagcacattcaacccggtcggcagaaaacggggagtccctgactttgtactcatagcggaatgagtgatcagcatttgccaagagacggggcccggctgaaaggtcgacatcacggctcccaatacgcctccttttgtccaaagctggaacgacctctttagaagaacagggacgcttagagccagaggtatcaaggccgctcctctccctatccacgctgcggccagatgatcctttctgaccaacggtgattggacgagctttgtcactcgggtcacatcggtaacgtcccgacgttcggcgccaaacgtaccctttttggtcttacctcaagcctttgcgattttctcggctcatcaagcgaccttgcctcatgagtt

SEQ ID NO: 39444 - DNA, 784 bp, Arabidopsis thaliana columbia
ccttggtcggacaccatgcaaaatgcttgccatttgtcattgccacacggccgaattcacttccatgtgcgagtgattggaacgcgcattgccaagtgtcgatgggcttgagctaagtatcttaggactctaactcttgccaaacgaccagaccctctatataaaccaccctcctcacttccgaacattcctcttgagaatcaaaaaacgacttagaagttttcgagagtttttagtgagtcttagtgagcgtttttgaaagttctaatgagagttttcgcgagaggttttagaggagattaagagacgtttcaaggagatggcggaggaagatcttgaggagaaagtcgagtttgtgagtttgcgcccaccttttcttgttgcattttcatgctagggtttcatcattttcgaatttggttgcatgttgataagctatgcccttaatgcatgtagagcacttagaaacctcatcgttcatcttttccatgcatgtcaaaaatccgactaagttaaatgaatctcatatagaactcatcacccttcatgcttgtctatgttattcataatccggcaaggttgtgtgttgcatgtagatttctagggcttgcttgtttatgtgtttcttgcttgtatggttgtgttgcatgttttgtttcttttcattgtatgtgagtcttgtaagtcctgcttgactgtcgccatctcgaatccatggcggatgagagatgtgcattgtttgagtgtctacgtgatcgtggatgcggaatccatggatcataga

SEQ ID NO: 39445 - DNA, 1032 bp, Arabidopsis thaliana columbia
ggagtccactagaaccaattaccccattcttaagagctctgtttcgttttattgtgcaaaactcgtgtctttagtactttgctcgttttgtttagttctcgtgcaaaattggtgtttttagtattgtactcgacctgtttagtagtttgctcgaccgagtgcttcactttgtgcttggtttactttctggttcttgcatttgacagttcctggtctttagtttcatttctgctcttgttatttgagtttttttatcttctgcttagtatagttccgtttctgaatttgatttgcatgttaacctattgcttaggtttagtagaaacacaccaaacctattcacacttggcttgacttagtattctctgatcacatcctgattgttagcaattaaacccaattggattgacaccttaaaagctacaatggcataagatgcatttagggaattgacacacaaaacccttctatcaaaattagaggagacaaacgaggacgtctcaagcgctaatcgcgtggacgaggagagacaagaggatgaacttagcgctagtcccgtggatgagagaaaatggtttgaaactccctttttgtcgagagaaaacctcatatctccatgaaaaaacagaagcaatttttgatttaatttaaattcgtaaagtgatgattttaccaagataccctaatcgaaatcaaacatttacacactgaacctggatctattcgaacccagacccgacccatatctctaaacgaatttttctttggtttctttttcttttcaacttcaactcctcaacgacgctccactctccttatttgaaacttctccttttcgatttctcaacctccttgacgcctatcctcttcgttctcttctcgacaactaagaacgagaaccctaatctctcatttctgaatcctaatcttctccttctataaacctaacttcccagtcatttaatccagccctaaacctaatggcgccgagaacaattccacctctaaagaagaggttgaatggagtagccg

SEQ ID NO: 39446 - DNA, 572 bp, Arabidopsis thaliana columbia
ccgagcatttttccataacgatattgatttgtttgcagttgagattttctagaatacaatatagaaaagctaaaaccgaatattacaatagtttcgattccagtgcatgtatgggtaaaccatgaatggtggcggttagactgcttcttgttattaacatatttgcattttttgtttgtttgtcaaaataatcttctaaatataaatacgtataaaataaaattttacactggaaagtaaaataacaattaatttgaagaatatgctataacacataagttagttgaagtttgaaaaattgattgggtagttgctaatgttttctttttggaacaaaattacaggagaaaaggtttgggaacgatcggtgttcaaagaggtcaagataaaagtataccctagttgtacacctcctggaggaggcagtggacgaccatgtcctcctcctagatcctagagaaattctatcatagaatatttgatccaaaagagagaatgattcatcatatatatgtaataatcttttcaacatttaataaacttattcataactaagaatataataggaaagt

SEQ ID NO: 39447 - DNA, 459 bp, Arabidopsis thaliana columbia
cactctctctccaattctgtctaagataccaatactttaaaaaaaactcctctcacagagaagaagaaacaacaagaagcaaaaatgttcttctttccctttttcttgtctgtgattttgcttcgtcttctccattgtaaaaatcttaaaaagagggaatatgttgtatgtattaatttggcttttgtcttcaaattctggttgtctcttatgttgtaaaattctaaaattcagatgataaaattcacaatttgtaatgccttttagaggaaaaaataatattttggtagaaaataaagtgtatatagtgtgactggtttagtcttctgagattcagagagagcaaaaaaaggaagaagacatggctacaacagaaacaatcatacaaggagcaattctggtgttaccttggttatgttctgggcgattaagtatctctctcaacgaggcctaaccaaa

SEQ ID NO: 39448 - DNA, 463 bp, Arabidopsis thaliana columbia
taaaattcttttaagttccaggctttttaacttatgtttggattcaataccaataaaatttgtcgaaaacgattcaagcagacaaaatttgtaacaattcatttttagtgtgagggtaataaaaatcaaccgatgcaaagtcactgtgatcaaaatttgaggatttatacttaaacctaaatacaagtgattgataaaatgttcgtttaaagttgtttgaccaaaagaaaaaaatgttctttttaaacttagagacgatatttaactcaaaccaaatgtatgctttttatttacaattttgttgttttcttataaaaatattgtaatttcacaaatcattgtcatgttttttaaggtctgaaaattaacatggttgtgccacgtcaacacgtttttagtaatcaaaaatacttcttaaagaagagataatatatagaggggattactaaaaattaggaaaaat

SEQ ID NO: 39449 - DNA, 512 bp, Arabidopsis thaliana columbia
ggacacttgtgtcattgtgtacggcccgagcagagcaggggacgaaatggtcatggagcccgagttatggccaaaggatgggagcaaagtccgtgaaatcttaaccaagtacagagacactgcgtcaagcagctgcaccaagacatacaccgtgcaagaatgcttggagaaaaacaacactaaggtggagaaaccgacgattgcgacaaagtatcctacatgggacaaaaagctcgaccagtgttctttaaatgacctctatgcggttttcatggcagtagaaaacaagatccaagaggctacgaataggaatcagacatttcctgacactagttgttggtctaatgaccaacttggtttatgcggttacaatcggcaatgttttgagcagtatcagttgtttcctctgcctactatggattacaacgggctctcttacttcccttttaataaccagatgacctcaaatactgcggaagtgtctccttctcgaatgtgacagagccgatgat

SEQ ID NO: 39450 - DNA, 528 bp, Arabidopsis thaliana columbia
cccaaaaggttagaatataaatgttaaaaaaggattacagaaaatgaagccaagcctataaaactaaatcatccttagtaaattaaacatccactcataaagattttgctgatgaaacgtgttgatgaagtgttttgccctatgacacgggccgagacgtcaagcaccgctgttgaattcgcgggaaaccgctagaattcaccaaaatgttgagaatcgtctttccttctgtcgatctcgaacccatgtccaaaaatcgtcgatattctttcggatcaagtgatggaagtcgcttaaaaattcttcaagtatcattatcgtcggggaagctccacctctgacgacacccatattgatgtggccggatctttgttcatgtgtgtgcataaagaagtggtatagatattactcgtcgaactaattggtgggaacatagaggatttgtgaagaaaccaaagacatcaacaatcagcaatagatggagatctaaactcgcaaggcaagagaggacttgataaaagtggtatc

SEQ ID NO: 39451 - DNA, 1341 bp, Arabidopsis thaliana columbia
tttttgaaagttggggattaaataacattttttcctaatttttagtcagtgtaggttttatatccttttttgttggatgattatgtcttgtgcccttccattcatacgtgactatgatgaatgatatcaacctagcaccacataaaatgagctttttcagatacagtatttcccaacaaattaaagaatcagaagtacaaagcaaatctatctattttattattttcatactaattaacctttttcactggtaatctagacattgttagagttttcttgttatgttcttttattattaacttagggctaaccgagagtgtttatagatactaaacgatctggttactcaagatggtctacatgtgttgtacacttctcctcgcaatacatcgatcggtctatgttccaaagtgtagcgctccggccccgtgtacacccctgtcttctccaatagccccatcgcttcctctcttccgtattttgactcatacagcttcaagtactcataatcctgattcattctccaaataagccaactggaacagtttttcgttgttatctgattggtaaaactataaagttgacgtacctgtaagccactaagaaggcgctctagcctaagtgaagcaactggctctgaagaagatgagaaaacttcaccggggtagtaaagaactccatcaccaggaggaagaccgcgcctaaactttacctattcatttggttatataatatcatgaagcaatcgatcaagaaacatttacaacagaactaaggataagaaaataacctcggcgcttggaaccgttgccttctcatagcaatttgcaccccagtacaagaacccggttccaccttctttccacacacgccacatcactgcccgttgctgtgtaccacgcatccccagatgccaatttgggtgaggatctgaaggtccaaggcatatgtatgtccaccattcctgcaccagcaagaaaagtcctctttatgattcttgttgctaaaatgctaacacatacaggaccactaatgagcacatcattaagatgaccttgaatcaaatttaaccattccataactacagtactttgatcgacatatgatgattccattactaccaaagctagatgtattcatgtacacgtgcaaacgttttcaaagcttatgataactaattaactatattgaccaaactctagtctttatttctattcagttaagtatacttcaggtgtatggaccagacgatttcaaacctcattgagaataacatagacttgggtcaatggataatattctctaaagaagaagtaaaagggttgatggagatctgagaga

SEQ ID NO: 39452 - DNA, 510 bp, Arabidopsis thaliana columbia
tttcatgttatgagactttgagagatatttggcctgattatgtgttttataactctcataaatgctaactctctccagtagatcgagcaagtgttcttagattgaaatgtttaggagttgtgcccatgtctcaaaaataaatacatttgcttcaaaaatatgccatgtgaaatcttaaaaggtatttgctttttggtctctcttcactccaaaaaagaaaacatattagcagctttaaattgcttttagattaagattccgattaatataatcttgtgttctttttgtatacgactaaaggtcgataaccaaaccattgttcaactaaacaaatatgatgaatattaatagattattacatccagatagatccagcgtaacggtatccaattttctcggtttctgtttgcatcatatctgcatttatagatttctgaagttttaaataaatcaattctattactatcgaagaaataaagaaaatagacaaataataatgatattatatta

SEQ ID NO: 39453 - DNA, 856 bp, Arabidopsis thaliana columbia
aaggaaagaatgttaaaggacgcaatctttctgtatttacaggcccagatatataaaaatcatagattttaaggcccagtattagttttcttttttcttttgtgtaactaggcccagtatcttattttagtttctttatttgctgaaatagcattttaacaaaatgcatgtgcactgttcgtaaatctacacgtcgttattatatcttcatttttgtatttacttttactgagatttgtttctttataaaaataatgacaattccgaaactctcatttatatagtctggaacggttgtatagttttaggcttttagcattataaaattgaatacaactgaaatatatatgattataataaactaaaaagaaacttacttttattgatagtaaattataattgtcaaatatcatatattttttctcattggaagttctataatcatttggaccagtcctaccatttaacggtggtgtttttgataaactgaggaaaattactgttaggaaaaactttaaaagtaagggttatcatgatcaagttcgtagcaaatgacaaattcgatattcaataacacagagctattctagcaaccaaactgaggtcttacatctatgcatattattgagtcaaataattagatgattatcctctttgtttgctcctttttttattactttatttttaggtcaagtttgaagttgggtactcacaaaaataccttttttttttgtcatctggattatattagaaaattaaaagtttcagaatatgaaaccaccgattacaaggctaaactaaaccaaagtgaagcgaacaagttagcctaccacaagacccaactccaacagggata

SEQ ID NO: 39454 - DNA, 557 bp, Arabidopsis thaliana columbia
catatattggtaaagaatttgtacaagtaatcagagagattattttatttcaaggtttggtggtcatgattgtattattgagttattaatttaagtatataacatctctcatgtgattgcctaattaattaatagtttcattacacaaaaaaaaagctagtgacatatgtccacagatattttgaggggagctaagttcagatgctacgagatgttacgtacaccttcgaattatccaccgttgattcaagcccactcaacaaattcctttaagagatttcgggcagctagcccagaatagtttcgagccgttcgatggttgtagataaacgggcagcttttgaggaacagcccgttgagaaaatatctaaatgggcctcacacatcttttaagatattttaaaatcttaccacttgtctctactgtaccacataaacaagtagcacaataaaatgatgacgtgtaccaatcagagtggagcaagagatctgtggacgttgatcactcgcaaataagagacgtggcgcaataagatgtgagcaatatattgtaatga

SEQ ID NO: 39455 - DNA, 1191 bp, Arabidopsis thaliana columbia
cataccttctacatccttgaaaaaagagaatgaggtaaaaataagttgacaaaaacttggaaagcatttaaacatctgagacgaccatgcagagctatatatatttgcgttcaagaataagttagaaggacaacactgaaccaaatactgtaagcaatacaatcagtgctcatcggcatatctacctttagagttttgtttagattattcctggcgttactcagcagctttatttggtcatgattgtcaatcaaagtttgacattcctgacaaagcctgtggcacaagaagagaagttagagggagagaaatgcaaaagttggtaactcagcttcaagaatctctagtcaagcaaaaacatacttgtcgatagaaatgaaattatcccgcagttcataaatggttttctcagatgatgaaagtgactctaacccagcttgagcttgttcaacctgaagtttgtcaacagctattacttaagaacaacaaaaaagtcgaaatacattaaagtacaaagaaggccagattaaagctgtacctgctcagcaaccatagtactgagctgtgcatcatttgcctgattgaaacagcaagcatcactagtcaggtcattaaaaatttccagaaaatcgaaaataaaagataacaatagcatatcaaaacctaacaactcaaatctagcattgctcaggaatcactaatactcagtgcaaatgatacttcaaaagccaattcagttccaattgcaattcaaaagcaagatgtcaaacctgttgacgagcgatgtaatcggccttgattgaagaaatagactgcaaaagttcaggtaagggtaagagcttcgccacttctcgcacagccgcttccttcgcttccacaccaagatcttcgaccatcatcttcgctaaatcaccttatttacgaactccgatcctaaattgaaggctacctctgcaaagttattcaaaattccagcacaattacgataacgcagaggagaatcaagagatctggaaacagaaacgtagaggaaaaatggacgcaaccgaataagaagtcattgagcaaatatcgagagccaaatgtgcgattctccaacttcaattacttcgtcgtcctcttatcttcttccttcgctgattctgaagatcctggaaacagtgatgttggacgcagatcagctgggaagag

SEQ ID NO: 39456 - DNA, 373 bp, Arabidopsis thaliana columbia
ttttttgatcaaaacactcacttaacgaaaagatttgtgtccgtatatgaacaataagaatcagtcaattgatattgacaatttattattcttacaccacttagtggccaacttttaggaccaatctctgacatttacataatttatgacatcacgagatttagaggaggaattgttttttttttttttcacatccagatacaaattccctacatgactacatctatcacttgactatgccagaaatgataattccggttcgtagataaccaacaaaattcagacacagaaattaaagtagacggggtcacaatcggtctagaccgccaaagagccgaaacattttttgcagggtgtttcagagattaacttt

SEQ ID NO: 39457 - DNA, 160 bp, Arabidopsis thaliana columbia
gagtacgccgtcggacgacgtcggcaccgtctgcgcatgggtgatgagttcgccgttgtcgtcctctgtgagcgcaccgaaggtgcgagcccgaattccacatgtgccatgccctgccaacgccgaggcgggacaaaagattccgtgtctgtgccgggtg

SEQ ID NO: 39458 - DNA, 581 bp, Arabidopsis thaliana columbia
tttcggcattcgacccataactgaaaactccacagatatagaacaaaaactaaaatgataacaatccaatatgacataactttgttgctcaatcaaaagttgactcataaagtttcatactagttatgagattatccggttagaaggaatcgccgcaacaaaactacaaaagtaaaaccaagttttaagaaaagtaaaacaaatcataatgggctaatatgttgatcaaattctgagaaagaaattgaaatctaattgggataaatgggctttctgaaaagtctatatcactcagaccgtatcattttttgaacatagagttttactaaaacaaaaaatgccacatgatctagagaagtgatctaatttggctcgatgggctatttcgaactttgattatggtacattaaaactaggaaaacgaagattataaacaaagactgatatagaccacactttgtcacattgaggttatagttcaaacaaattaatcgacgtgatactgaaaataaatacgaaatttaaaacaacaatataattgttacgagattacatgaagagtagcatatcctttaaaagaa

SEQ ID NO: 39459 - DNA, 647 bp, Arabidopsis thaliana columbia
atccccaaacaggtttatataaagtgatcatcatcaacaatactaatcaaaactgaaatgaaagtaatatcttatttctctcgttgttgaacagatgttgttatcagttaccttctcctcccaagattataaatccgatgagcatcagaacaggatgcagctggatcacataagaaaacaaaatggatcagaacacaaacacagacggattaaaaacaactgaagagatgtcccctttgctttggtaacacaacgataatgtcgatttttggatgctagttgtgaataccatcaactaaacctaaaccagaagatcgaaacatcatcttacgtacattcactcacactgtaataaacagaatacgaccccaacaacactcatagatcctaaatcacgtccatagcaaaacttgggacaaaccagaggactattgcttccaaaagagtcattttacaagctataacagatatcaagacaacaaaagaattctcctttacataataaagtcactcactcagaaacagtactgaggaacaaataagaagcttcgcagtcagatacaagacatacaaaaagtcacgcagatgcgagagacagaaaagagaaactttaaaggagataaagaaagaaccatcattgaagatga

SEQ ID NO: 39460 - DNA, 556 bp, Arabidopsis thaliana columbia
cgctaaatcttttgctttctcgccactacgtccagagtctctctctggttcagaagactcgaaatgggttaaacacgtattctctcattctccgtagttaattaatttagtgaaacggtaaaaacaaaatggtaaaaaattggcggtcgttattttgtagcggtaaagaaaatagtgagttagactatttacaagttaactgtttgaattaaaagttgaaagtgatttggaaaaagatgttgtagaatttcttcaacaccgttaattttgtgaataaaatccttgtacacatatagtcttagaaaatttggaaaaaggtttgataaatgtaacttagatgctgcttggattataaaaagtaagctttatggatacggacttgagtcccaagatcatttaggttcaatctgattttgaggtttatataagaagcttcatttaaaccgttgagtgtttgagctatatgaaacttcaaaaaaatgtcattcgtttaaatccatcaagaagaatgtgaatcacttttctttttggatgaaactagttttttgatatggta

SEQ ID NO: 39461 - DNA, 916 bp, Arabidopsis thaliana columbia
cgacgcttctattttccgtgaaattttggaatcggagcacaataaaagaagcctttttaatcattagagttagttttcgttatggtcaagtcaaaatctaaacccaggttcgaaccactgagtgagccacaagtagaccgacctttttcttcttttttttacgtgaggaaaaagaaatttgtgaattgaaatcttatctagaaaagaaaaaagaaaaaaaaaatcagaacaagcaggagaataatgtgtgtgatacaggatattgagtaaggccacgtggacggctgtgattagaagatcaatggacggctgtgattcaaattaagtgtgcgtagagctgaagctaataaatatcaagtgtcatcgtattttcatgttatcgttgaagttgttgttattcctttctctctgaaaacattccgagattcatcctctgcatagaacgtcgattcttgcgaggtgaatccagaaatcccttgttttatgaacattggatttcatttgttatttacatcgtaataataagtaatcggagttgttgatgattgctttggttgattgattgtgttgtggtgtggttttactgtattaaaggtatcagagcaaagacgtttctcggagatggtgatcgagactcgagctcaggagttagctcaagctcgtcgagagaaggcgttagaagcagaggaatcgatggagtcacagatggagaagatcgagagcaagatcgatgctcaaaatctgaagatcgagcgccatatctcggagatgtttgaggcgatcacatgctgtctccatctaagcagtcaaatctgggtgagactcatcaaacagctcgtgcttcatccgcttcagcaacagacgtggattacatgagaaggcataggtacgctaacaatcattcgggagtacaagg

SEQ ID NO: 39462 - DNA, 572 bp, Arabidopsis thaliana columbia
tagtaacgtccgccagtgtgctctaaaggcgtccaacctgcgtagtagtggtgcaagttttcgtcctccacgagcgctcggaatgctgttccctgccgagcacggtttgataggaatcgctcgtaatttggatgaaatttcaagggatagaagggcaaagcggtaatgtctttctccccgtcgaaatattccatctccaatttgcgccaacagacggtgtattcttcaccatcatggtccaggcagtatacatccgccagaagacgtcctatgtcggaggacagccagccgctgtcgtcgatgctgatcggatgatcggctgggattcgggtcaaacatcggaaaacagtctggactgctgatcgatccagcatcttcgtcgtcatgagcgagggggcgacgtagattagctcacccggctcaagcagcaatgagatttccgcataagacaatcttctactggtttgggcgtccactgtcggagagcggtatggatgggtaggatcgaactttccacgaactgaacgaagcacttcatctggtcaatgggcgacggcgacactgatggagac

SEQ ID NO: 39463 - DNA, 490 bp, Arabidopsis thaliana columbia
tatggtgcaacagcgccattaggaccaaatgaaggtttgaagccggacgtttccacggaaatggaagagggccgagaaaatagtgagtgtatatggagaatgcttggtgctctggtcttggctgcagtatgtggagccgtaggggcaatgtcagctatgtatctttggactatttgcagtgttaggcggtcaatggccgtggttccagaggaatgtgcagtgagcattgtggtcgttgcagttaaagatggcaagaagtaatgagaagtttgtttggctttggctttggtttaagaaggttgtcttgttgtagtgtaaatgtagtaccttcttccacttcctctggtgttatctttatttagtgttttgttttatttgcttcgttagttgcaggtttcacatgtacaatctctatgaaagaagccgtaagcttatttgatcttgcaaaataacttaatttattgatcttgcatttaacatgttttatatt

SEQ ID NO: 39464 - DNA, 451 bp, Arabidopsis thaliana columbia
taacaacatcaaataagaaagtaacaaaaatcgaaaagtctaaaccatagagtaatacaatagtatacatgcaaacaccactttactttattgaaagggaaaaaaaaagatgtaacaaggattcaacctttcatcaatccaaaatttccaataatctcaagcaacagcagaacaaacacagtaacgcaagagacaagcatagactatgcataaactagtttatatacatctaagctccacaatcacaaaatccccaaagtaaagtaatatcttctgatgaactagtttcgatttcaatttgatatcttaatttcttcatttttctagcatttaatcaatattcgagctcaaatgcctgggttacctatccatattctagattgattctaacaacatcaatttcatccaaagaaatagagaatgaagaattatacctgaagatccttgggga

SEQ ID NO: 39465 - DNA, 491 bp, Arabidopsis thaliana columbia
cccgtttgtcaatccattacaaacaaataattactacctcgttccacagtttaaattacaatttagaaatactacaaatcgattataaaagtcgattattaagtacttcctcgagtttcgaaatctaaaccatctgattgacgataaaaagaaaaaaaaattatatgattttttttttcaaccaaaaaaaccctatatgattatttataaaatctatgtagatatcttgtttgggaattggaacaaggttttaacataaaaagttatcccgacacaaattcataacgtagaaaaacacacatgtagtaataattgagatatcttaaggtttataacgtgagtgttttttgggtccatgaaattgcagcgacctgactaaagtagtgaagaggggacagtgtgttggtgtcacgagtacgacagatgtatataatatgtgtagctcagaagctggaggaatgtgatgttactgttttggatctttaagtata

SEQ ID NO: 39466 - DNA, 444 bp, Arabidopsis thaliana columbia
tggatgtggaatgtgttgaagaaggctgataatcacgtctttaaaactcaaaaatgatgaattagcaacgaatttagattgtctcgcaaggtgcctgacggttcaaatagtatcaaaaacggctacatatatattactacatgttgattagccaaaatttaggtaatacattttaggaaaagtatatgacttaaagtttggttatcccccccaaaattggtatttgtaacaattcaatatagttttttttatttattaagtaactaaaagatttatataaatttactttttgagttatttttctacaaaacattagataacaagagcttaaatgtgttatgatacggtgatttagatctcacctctataacgatttgaatgacaatgcgatgatgttctagggctttcgaacgatacttcatcggcaatagatgacatctcgtc

SEQ ID NO: 39467 - DNA, 597 bp, Arabidopsis thaliana columbia
atcgtaagatcctaacaaaaatgacataattttgctacttaaatgcttagtcaagacgatctaacataacaatatttgattattttcttgtaatttgtatttgaaacattaaactcttgtctataaatagacaataaaaataaatagtatacccgaaggtcttgtggatgttgtaaggggacatgaaaaggattaatgttgctactgaaaatgggtaatgtctttgtcaaatctctcttaatcctttggcttgatgtttcaccagaccctccagttgaagtagaagatccactgctcgattccaactccaaacatatctgttacacattatacaaatgacaccctttaaaaccttcctatacaaaaaaacccttaaaacattacacttattttgaaagaaaaactgatcaaaccatacctgaaaaagtctggtctccaaagccgcgattcgatctagtaacgatcctttgaaatacgcttctctaatcgccgtgcctctatcgattaacccacgcgtggtaggcgcgctttcgtctttccatttcggaaggttttgttgtctctctagattctttatctacataaaacaaaaacaaa

SEQ ID NO: 39468 - DNA, 336 bp, Arabidopsis thaliana columbia
  unsure (1)..(336): unsure at all n locations
gtgtaagaatgaatgggaagaatacacttcgagattgtatggtgaaaatgttgcaaatggtgccatacgcagttaaactgttcgtgtatgattttattgtagtagactgagaatggacacacgaaatatagcctcaggttaaatcagcagtacctccggtgttagaagtctttcagagatacccgtcaatacgaattttctcgccatagacttaagcgacgataacgaacctaccacgagagatacgagaatagtgattagataacgcgagagttgacatggctcatagaggtaatgacgtgtatgtgtgcnaaagaagacagacgcggaagagtt

SEQ ID NO: 39469 - DNA, 328 bp, Arabidopsis thaliana columbia
tggataacctgacggtgatgaaataataagaattctgtgtgggatttcaaggaaaaaaagaaacaactttgctgacaattatgtaatttttcattggtcagaaggatcctccgagtattgttatcttggattggtgatctttttcgatagaaatatgtattgaatatgaattgaataaaaaaactcgggagagggtaggctcattgcatgaaaaagatgggaagggaagtctcataaggtaattgattggagtaagtgagcatgagagccaaatggatcgaaagattcgtggtttgggttcgggaagggatcatagggcttttttttt

SEQ ID NO: 39470 - DNA, 589 bp, Arabidopsis thaliana columbia
tattatatggtaatttacataagtccctaatatcaatcatcaatatgagggacgaatggttgtgttatagtagagcttatttacatagaactcccaaaacaaacaatccagatcattagctgttatattgttatacatattatataatgagaaatacccatatacaatctacaaaatatcatcaaagaataaatatttttgaaacaaaaactttaaaatatggtattttagagaattccccatatatagtatataatttacaaaatattattaaagaattaatatttcgagactagaaagttagataatttaaatattatcaaaatattatattacataatgagtttccgattcaaataggtttggatcacacaaatgcaagaaaggctcataaatagagagtcgtgaggccattatataggctcaactcaatcttataacttttaagaaaaccggttcaaaaattaggaaggatcaaaccaactcctcaatcgcagagcggagagcacggttagggcaagagtgagatgtgaaagtcggagatttgtcacggcgacgtctggtgcctgtgctaaccatttctaataga

SEQ ID NO: 39471 - DNA, 554 bp, Arabidopsis thaliana columbia
tgattcagagagaaagataggtcaaaagcaaaacaatgaaacaccaactatgattgtcgctggtggatgggtcaggccaaatcgagccatgtgggcttcacctccaaattcctcgagctccaagccacaaaagaataattaattattgagagaagctggtggtaacatatataagaactcaaattaaatgttcaagttgggaagtagacaactgttgagcgagaacaaggccagtcgtttcaaaacatccattaaaaactcagccatggagggtgtggtggcatatatatgtgtgtagactctagatgggtgaattttataagtttattacatgtaatattacatcatggaagttgatatgtctatatatatatactgtatattgcgtgcctttgtaatatatagaattcaataaaacctatcttttttatttatttatttcttttttggtcagacatttttttaaaattcgtttttcaactattaaaatgatttaaatagatacatatatacttaattggcaatccataaaatagttgaattgttggaattat

SEQ ID NO: 39472 - DNA, 847 bp, Arabidopsis thaliana columbia
tttgtgacttatgatgagtttgtactgatgaaagcatatacattgataaacccaatcataaacaaatacaaaagtatgtgatgatgatgattgagtgaaaagtagctagctcgtaaataatcacatctttccgaaaaggaatatcaatatttttccatgtatcaacaataaagaaattagtttagtgttcataatctgaccatttctaatccagacaggttcacttctctaagatacttctttagtcttcttatttcataacacaacttttaatctctggtagagaactattcagagtagcttgatatttaccatccaatattaattagtagaagaactattcagagttaatatttaaaattcgagattaagagtaatttagccaagaaaatattctagtgttcttaacctaattagttttattctcagtagagaattattcaaagtttcttaatatttttaaattcaatatttgaattacttttaacttagatacaactctagtgttgttatgttgatcacttctaatctcattagagaactattcacagctgcttaatattgaaaatccaatgtttaaaataatatagattttcaatttgaactatgtcaaggatgaaacattgaatctcaaaaacaaagcaaccgacatggttgtagaaagagtcctcgaacgttagaccttatataaagcctttgcttcattgacaatcttaaacatcgaaacatttatctctttcttctttcaaacgagaaaatgagcaaaaccatacttttcttggcgttatttctatctatagttttgaatgtgcagatcagtttcgtcgtagctgagagcaatctgcct

SEQ ID NO: 39473 - DNA, 613 bp, Arabidopsis thaliana columbia
atgttattgatatatttagttcttaatagagttttaaacccttttttctaatgcatgttaagacaaagaaatttaatatgaagttcattatagagatatgacactctaattatctggaacataacggaataagatcttaatcaaattctggattccgttatgtagatttttatggaatgacaacaaaagaaagaaaaaataactgggcttattttgggcttgataccataatggcattatgatgtatcaaatctgccatgatgtattcttgacccactgtaggaaacctggattggtttgggcttaattggataaacaatctgtatagagtttactggtttcgtaattctctaagtctcggaccgctctattatgttatcgcaatttattatacccaagtaaatgtccaagacatcaatatcagttttctagagcctaaaagcagtttcgattatttgagacaaaaagtatcaattaacattaaaatactagctaccaaatttatgtacttcttattattactcacatattttgttacgagtcgagttaaatgaattatacgactgtttcattccatgcgcattataacgaaagagaacaaacttagaaaaca

SEQ ID NO: 39474 - DNA, 566 bp, Arabidopsis thaliana columbia
tctgtatgaacataggcataagaaatgtatggaaagaaatgctgccagaggttaggaaaagccatgatgttgtaataaagtcaaaagctttctcacttgtaagagaaatctatttccctttgtaaatcttatcttgtgttcttcctaataactgacaactaatttgtaagcaatgaagttgtaaaattttcgtaagaaaaaccaaactgttgtgtaagttttaatcagaatattctaatttcgggaacaaagcaatcattgaaaaggctaaaggtattctatattgttagacggtgttgaatgggaggacgaagctaccgaagcacgtttctgaccttgatgcatctagttgttgtagactagtttctactcttctattctcgcttggtggaattacaaatttacaatcattctctctcaagcttcttgattcggtttaaaaacgcaaaccgataatgcccagactacaacataattactaaaccggtttcaacattcactctctctctctctgccttattagctcacagcactcacagtggtggtcgtttagggtttggttgaat

SEQ ID NO: 39475 - DNA, 587 bp, Arabidopsis thaliana columbia
gagatagagatggctagaaacaaatgggatcatcactatctctatcaaatcaatgtgacaaaaatctcaatcatacatatacttgttaggtacgtttctttattttaattcttgtctttgttctctctagagattagatcgattccaatcactttggcttttcttcgtatctctcgagttctcgaccgacaaatatacctttaaattaatgcaacattttatttttacgatctctgtcatatcagattcttcccttttctctccttcgtgcacacgaatggatagtatgtataaaccagttctctacctatcaaagacaaattttgttttggtaaagcgtagttcgtccaaatatgatattttctttcgtatttcaggataacaaaacaagtggacaatcgacttactcaacatggaattattttactctagtttagtttctttttaacatattttttgtttgtttgtttggtgtaaaaaaagagtaaatcggagtaatgaatttttgtttaatatggttcagccatattagaaatttaaccaatcacacccataattagatgatcgaaatagcaaatgttataaga

SEQ ID NO: 39476 - DNA, 193 bp, Arabidopsis thaliana columbia
atcttgcatgctcttccaatgggagggcgtgatgctgaaaaagataagcagtttcaatggttgaaacagcgtaatcgttgcggtgcgaaaacattatgtttgagtaaagcatatttacaaagacaacaacaacttgatcgtatcctacaagatcgcgtgttgagtcagggacctttttagctcacgtaaattt

SEQ ID NO: 39477 - DNA, 511 bp, Arabidopsis thaliana columbia
tgaactatatcctcgaatgaacatatttatattattgaattatacattagcctcgacggacttaacatatatgtactcatcgattatttgagattaattagttcggtagactgcagagaacgaattaatgatggcgatgctgtgtcaacatcaaacatgcaactacatattaatattatacaagtcaaactcgttacgtttttgacctctcatcaggcgctgtatcatctggttcgttgcatgttatcttcccatgtatttgatttttaaaggaacgcaaaacatacatgcacatatataaaataatactactgtacgtgtttgttcaacgatacaaagtaaaattatgtagaacttatatctcctttgtttaatttcaattatatgtagaaaatataaattaaacattttgatatttgaaaaatgtccatcaattttttaaaaaaaaacctaaatcatgtccatcaattttatacaactgcgtacatctatattaatacacattgtatat

SEQ ID NO: 39478 - DNA, 513 bp, Arabidopsis thaliana columbia
cgattcgaccaactcactcaaccttttgtcactagttccagtcatatatttcttataaatactcgttcactacatctgtacagatcgaaagaatctcttgatatattacaacacacccataattcataaagactagctcatatacctttgatatatgagatttgatctatatgtcgttctccttaactagatatcgctaattgggcttgcattcaacaagcaacatatatcgcttattacattcgacgatactcagcttctacatcttaagtctctctttttttctgagctcaccatcaagtataagaacacaattctacctcttatttgtctactcccaattttttgtttttggttttcactattctgacatcttatcgtattatgattaacgttaagaatgtcgtctcgaaaatcacctacctagctattgtttcaagattcgactcccatgcgcgtcccatcaagaacaaaccatccagaagcatcaacctccaactattagagaataat

SEQ ID NO: 39479 - DNA, 539 bp, Arabidopsis thaliana columbia
atcttgtaggagtttcgttcgtttttctattggtgtgtttattttctctaaagcactttaataatataccttggtatttaatttatgaatcaagcatcatcatccctagtctctgcattcactacttcatcccctacctaaactttgtcgacgaaagagattttaataaccatttagatagtaatgggtagtgggaatgatcattattcttttgttcaccgtcctttgattttcaatggtaaccattttgttgtgtaagactacaaaagatgaataattggactatgaccatattatattagtcaagtctaaatcggtcgaaatcagttcacctttaagatgagtaatttgactaaatgcctccgcttgttcaacactaattataatttaaattattgtagaaggaaaacacaaagaaagtgaggttccgacatccacaatttggactaatcacatactacttaagaagtttaatgcatcattagagctaaatgaggggaaaaaaagctagctagataaacttgagacacttgtttgtg

SEQ ID NO: 39480 - DNA, 529 bp, Arabidopsis thaliana columbia
ggtattgttttatccactctacacttgactgcaattttctatgtgaaaaacacaatctggctggagtatgttgttcatttataattttgttgcagttgttttgcgcatgttaagttttggatatgattatcactggagccaactggattctcattttgatcaggaggtgatatatagtcttcctatctaacactctctgtcctttctgataaatcttttaccggtctctcagtagtattggaataggtgtagccatctcttatttttctatttcattattgcagaaacacgtaatgcgctgttccttatgtaagttggggaagacttgctacgtagtgcgacaggttgactgcgtggcaccaacaattcactttaatgttgttttgctattgcgttacttgtttctaacgtagtataacttattaggagagaggtctagcaagtgatagctgcagtttttctctatacctttgttatttggtatatgcacccttgtaccttgcggggccaattataagctttaatgcat

SEQ ID NO: 39481 - DNA, 556 bp, Arabidopsis thaliana columbia
taggtattattctttggtcttcttaattccttgagctccgaattttcgatttcgcttcctttgctttatccctttccggtatcggaggtttcaggtgtgccatttctgtggaagtcagtggaaatatatcgctctccgttaccgttccacgacatcgattctctctccgatcaacttgagtcgacccctttgcgtttcccttgcaatttccacgctgttttcgtcggttttcgatcgacggatccggataacttacgatctcagatacaagatggtataaatcagttaactcatcaaagttcacaatgtggttcttgtgattttccctctctgtcaccgttcaaaaccgagaagaccagtgctctgatacacttgcgcatagttctaccacgtgctcttaccgttgtggagtgatcaaaagaaatggttttagtgttggattggatgatacagtggatgagtcactgaatgatgtgtgtagtggccgttctgagaacagtgggaaaatgtacagtgttgtcgtggtgaataaagagaatgccaatggtggagatga

SEQ ID NO: 39482 - DNA, 482 bp, Arabidopsis thaliana columbia
aatgtttgtttgagtatttgttactaaaagtatttacaggatagaaaataacgtatatatagatgttttggtttttcttgagagatttaaagaccactttagtctagtaaacaacattacaatcaacgtagtctgttgtagtagagagtttgccttctttcatatatatatgattgtccatatttctaaattttcaattcgtttgagaaaaaaaaaaatacaattaaccaaaaaaagaaaaactgattatatgaagaaaaagaacaaaaaaaaaaggatgaaaacaaagagaatccagaaaaagaaagtgaagttattataattttacactgaaccaagaacaaaagcatcactgtcgtctttacttttctttctctgcctttgcaatgaaaaattcctttagacgtcatatgatgatacgtccactctcaccctgactcaggctcaacctcagttttgatctaaaaccctacacacgtctc

SEQ ID NO: 39483 - DNA, 241 bp, Arabidopsis thaliana columbia
cgtcgtcgttcgtgcgtgttttgttttcaatcgcttctaacttttttgggtacaatttcaggttggtttggatttggttaaagtcggtttaagtttagacatcaacttaaataaaattcctaagaaattgaatcactgattgaaaaatagcaccttccagactaacatataccataaagactgccatagtttttgcttcttgaagtacagtatttcacttgtacatataagtttaagtagt

SEQ ID NO: 39484 - DNA, 599 bp, Arabidopsis thaliana
atccacactctatttagggaaatgcatacaaagcatttagggaatattttaacatatttcttaaacaaaaatatataattgcaagtattctaagaagtatatatatcaaaattaatgcttaacccattcaagaattcattcgttttattacaattgtatattacatattttcaaaaattcaatattttgtaccaaaatctggtgagaacataaaaacagagatatatgttttctcttgacaaaaaaaaaacagagagatattgtagttttcttaatagagccagcaatggtcaaatatatcatgtgaaatagtttctaaaatacatcatccttttcttcttaattaataaaatagtcaaataaaaaatcgtctccaatctttttctctctctggatttgccaataaattggggataaccagctaccaaactcattcacacaaagtcataacagtcgtttaaagtctgatccttttcatttttctttagtgtgtgaaaagagaaatacagttatggcggagatctcgggaaacggtggtgatgctagagacggagctgtggtggtcaactcaaggaagaagacgacaacaacacaacaac

SEQ ID NO: 39485 - DNA, 572 bp, Arabidopsis thaliana columbia
ttcaagttcagttcacgggcatttaatcaagctgaggtaaatatgtatattgggccaactagtctagttaacccgtttctgaacaaagccatctcaagggttacaattttactatctcgcgtaacagcgagaaacaaaggatcaaacttggtaatacgctcaatacaccactaccctgaggctcaagccttgttaagatatcaattaagcattagccgcagttcttaagcagtccaaacaatctcgaatgtttgctccaacgcttcagcgtctaggatttaattttccgactttaaagaatcaatattactaacatagaaaccagatatctattgactagaactgatagatatgagaacaacgattggacagattaaaacccaaaatttcaaactccttcactttcagtaatagacaaattaagaaagataaaaacagagaatcaagccctcaggtcttaaaagacaattgttttacaacttagtcatagatggcacaacgcattggcttcttctatgccagagaccattaagatcatatctccatcgctgcaccgaacatgtatgtgtgta

SEQ ID NO: 39486 - DNA, 193 bp, Arabidopsis thaliana columbia
tgttcctgatcgtccaccttcttctggagttgtgccatcattcatggtcaaagacaacaagttggggggcaaactgttggggtcggatatcacccaagtacccgagccaatcggagagataccattcagagcttcggaagttaggctcaacgctattccggtttcggttactccagtatagatgcaccgagtc

SEQ ID NO: 39487 - DNA, 562 bp, Arabidopsis thaliana columbia
gtatgattaaaaaatggtgaaagataaaaaaaaagtgttaagttctgttcatcagtagctgtgaggactatttctattttctctctctctgttttgtttgtttgtaacaactgtttaagtttggtttttatttcatctccatcgtcgaaagctttgaccctttttgggtttttgaaagatcaaatcatcttccaatatagtacaaatgtgatatacaagttgtgtgacaatcttccaccttttagttgttgttgctgttgttagtacacaaacgcatactcttcactttggtttgttaaactttttagctcggctttggtcgtcttttctcacatgcatacttccaaattggagtcatagcgacaacattaatacaactagtcaactactatgttacaagtttctgtccactaatttctttctctaattacatctgaatctgtaagtacataaacatgtatgtacatatgaacacatgagtgtgtgtatatacacaaaaatttatgtaatacaagagcaataattgatgtaaaatgtggaatactgtatgatgatagctact

SEQ ID NO: 39488 - DNA, 639 bp, Arabidopsis thaliana columbia
ctcgtttttactacacttcacattctgaatcgcgtcccatctaagatcgtttcctttatgcggcttcgaaggagcaaagacccttttgaaattagcctcgtttgcatcgaaagattgagtcttttcgagattagcttcactgcttacactgttactgctacagaaacttaagctgatactattgttaagcctaacgtcttcagagccattactgctagttttgaagcttgcggatccagaaactggactagcattggcattgttgtaattggaagaagaacaatcttgtaaagattcaagatttggagtttgtttactcataataactgaagaagaagaagatgatcgacaagtgagaaagaagaaagatgtttcctttaaagaatctatgggttttgtgttgtgttgttgatggtcaaggctctgtgatgtgactcgaggtggtcaaagagagagaaagagaggatttttgaagacattgagattgttgaagaaaaaaacaaaaatgtgtttaattttttgtttttttatgaaggagagatcaaaatttgaaacagtggctctgtatgtggagggtaaatggagatttgattaattgttaatacaattaatatagtgttaaccgatgaagtactagtg

SEQ ID NO: 39489 - DNA, 418 bp, Arabidopsis thaliana columbia
agaggatcccgatgaggcaaaattccaaaatcggccatttttgtaaccagccagattatagttccaggtacaattgctttcttttgtgcttccaacgtaccggtaactttggtccctttttttttttgtttggtgtgtatatgagaaagggttaatacaggtttgtgtgttcttcttcctaacaatagcaactagtggcaaatccagcgcgcggtccaacctggccataccataccacgtcattgtccagcgtgtcttcttctgttttcggttttctacaaacacaaaaagcaaagaaaacaaaacatcaatgcatggtttataacgtcttgagttttaattagtgtttgtcctttacactcatttatgttctggctttgtcctgtgctaaacactacttgtctattgaataatatgc

SEQ ID NO: 39490 - DNA, 545 bp, Arabidopsis thaliana columbia
gagcgtgaagtattgagaaatggtttcaagaatgtcgtgaaaacggtcaacctctatcttgtcctataacttctaaggagttgagtatcactgatctaagtccaagtatagctttacgtaacactattgaagagtggagagcaaggaatgatgctttgaagcttgatattgctcgtcagtcactttatttgggaaatgctgagactaatattttgctggctttgaagaatgtcagagagatttgtaggaatatacgtaaaattaggcaacgtgtgtgcaatcctcagcttgttcggttgattaccgatatgctaaagagtagtagtcatgaagtgcggtgtaaggctctacaaactcttcaagtagtcgttgaaggagatgaagagagcaaggttatctctctgtttgtgtttttgtttgtctctctgtttgtctttgattcctttgtaagtgatttttagtgtgtttcaggcaatagtagctgaaggagacactgtgcgtactatagttaagtacttgtctcaagagccatcaaaggggaggga

SEQ ID NO: 39491 - DNA, 554 bp, Arabidopsis thaliana columbia
ggaagctgtccacaatattcatttcttgttgcttaagtaacctctctgacatgaaagccattttcatataaaattccggagctcggcttcctaaccataacacaatctacttattcttctctaatggataaccaagaagaagagcctaagcaacctccaaacaaacttcccgatctagccctctttgagcaagcaaattctgaagttgctcttgctgcctcccaagctaattcccattttgcccatgctatgcatgattcgtctccctcaatgatttcaatgatagaaagtgacgaagaatctgaagatgaagaagaaatcaatgagaactactacgagtatttcgatagcaatggatttggagtagatgaagacgaaatcaatgagtttcttgaagatcaagaaagcaattccaaccttgaggaggaggatgatttcttggaggaagaagatgagattgatccgaccaattgtcttacgaggaactgattgcgcttggagatttcacggagtcgaaaaccgtgggctactcctattgagactctacgtgtttg

SEQ ID NO: 39492 - DNA, 540 bp, Arabidopsis thaliana columbia
tgtgccgcgtaaaatcaagtttaatcattcactttaattaaaaatacaaatcgtcgactcttatatatcctctctacaagagtaaacagataacatcaaaaacatttgatcacacaaaacttcaatatctcacaaacgagaggccggttaggaggaaattacaaaaatgtcctcctacggcagactcgacgagcatgagcaagcgaaacttgaggcaagtcggaagacaaagaagagaattgccatcatcgctatatcttccatcgttctcgtctgcattgtcgtcggagccgtcgttggaaccacagctcgcgataacagcaagaaaccaccgacggagaataacggagagccaatatcagtctccgtgaaagccctgtgcgacgtgacattgcacaaagaaaaatgtttcgagacccttggctcggctccaaacgcgagccgatcaagcccagaggagcttttcaagtacgccgtcaaagtcaccatcacggagctctcgaaagttctcgacggattctcaacggcgaacacatggat

SEQ ID NO: 39493 - DNA, 556 bp, Arabidopsis thaliana columbia
tgacaatggtgatttgttgcaacagttgcagtatacaagttcacggtggtaaacaagtcgagcattctgattctattctctttcttgattttctgcccttgttttgttccaaatgtctctctttgaaaaataaaagttgtgaagttgcattggccatttatttgggcatctataataataatgttgacctacttattgatcaaatacattcattctctgcattggcaaatatgataaccacatggcgctggtttcaacaaccgtatttaatcaaaatggatccacgcaaagtacaaatcaaaattgtgcacgatttgagggacaatcccaaataatactttgattcatcccaagcttaactcttcgtgatacttgttttaaaatcatttccttaacctatatttcgtttgaactaaaagcatatacatgaagtaacgcttcattccaaaaaatctaatgctcagcggcaactgactgagagtgagagactgagagttaattcatttaggtctaacaaaacccataagagatcaagattccgtttatcctactatgg

SEQ ID NO: 39494 - DNA, 542 bp, Arabidopsis thaliana columbia
taaattaattgagcgagagcattcattctcattcatccacaaccaagagtggatcaccttcagtgataaagatcggaagctaagcactacaaaagtaaagatgaggagtgaaaatgagcttaaagaagattgtggaactgccgcttactactaccttgaggacaaggtagctttaaaaggagagagtaaggctaggggtagaggaatagcccatgatatagagtagaagcagaataagattagtgaaagacaaaagattccaagagcaactggtaaagtccaaaacaaagatgttcaaatggaagattcttggtttccacctatttggaccatggctgatcactatgagtggtaagaataccgattcaaaatcttttccaaaatttgtaattgtcgagagcgagccggaacagtcacaacaacaagaaactcataaaagcatccttgtggatattcagaccaaccaaattgaggctgccttcttggttgagaacattatggagagactgatgagtccctcacttatgggttagatgagtgca

SEQ ID NO: 39495 - DNA, 407 bp, Arabidopsis thaliana columbia
ttatttcctgcaatgttaagagaacacataaaattcagttcaaataaatttaactggagatagagaatacagagggaagaggatcatttatatgtacaactaactgtacctcttctgtttcccgtaatcgtgctcggaaccgatctctttggctgcagataacttttagcattgagctttgatcttgctctgatggaacatgtttctgatccataggctaataacaggaaacacaaaatgataaagagcagtagttagtgataagtctaattgtgaggtatataatataccatatcatggaaatacccttagttgtatgaagactttttaatggtttgacaagaagttcagaggtattttgcttttgaaaaaaaaatagatcatggtaaaatatatacggaccacga

SEQ ID NO: 39496 - DNA, 574 bp, Arabidopsis thaliana columbia
ccgctaactattcagaatccatcttaagagttctaggttcagcaatgagctactggttcaacaaagcgccatcagttggtgcttcaggtgcaatattcggattggtaagtctcgtgtagccataagcctttgttttagacacgtctcaaagactcatacaaatgaagttctttaaacgaatgtcccttttgtttgagtaggttggctcggtagctgtatttgttataagacacaaacagatggtcagaggtggcaatgaggatctaatgcagatagctcaaattattgccctaaacatggtaagtaatacaacagagaaaattgtataatctctcttaagttctaacaagcttttatcactatgcaggcaatgggtctaatgtccagacgtatagataactggggacatgtaagtaacccaattatgccttcaaatgtattaaccagtctccgattttttctcggatcagtggtctgataacatctccggtgaattcagattggtggcttacttggtggaacgcaatgacatggcttcttggacacagtggaagtatgaatatcaacaagagac

SEQ ID NO: 39497 - DNA, 243 bp, Arabidopsis thaliana columbia
caactgaactaaaaaaaatccaacactagaattcaacaacctataacccaacctacttgaagacgaatacgaacctggaaaagagaagaacagtcgagtaagaagcgccaagaatgctgcccagatgccatattcacccctgcaagttagatgcaaaagtgtgatgaattcaagacgcagagtatgaaaatttctgtcatccagaatagcaaaaaaaggaataaaatccacaagcataggtaa

SEQ ID NO: 39498 - DNA, 469 bp, Arabidopsis thaliana columbia
tatttagaatgaagtgaaacgtatttgatgaaactaataataaaaaaatgatagagatattagttttttttttttttttttttgtcgagagatattaggttttttcattaatttgagacagttggaaattaaaatagtttattccttcgatttttttgtttggtttgacaaatgtgctatagcagccagaataagtgttaaccatatggcgaaaacacttaatactttaaaattacccatggcatattcacacactctttctttcgtattatggtatcaaccacatatgctttcgtcctctccacttcacctaagactcatctatattcataaggggcaattatgtcattcaggaaaaataatattcttaataccacttaattagccacgaatcaccattcgtaaaccaccacgtggacaattgagcgcgtggactacaccggcttccagtctggctgcttcgtgagag

SEQ ID NO: 39499 - DNA, 546 bp, Arabidopsis thaliana columbia
tcaaagaattacggaatcacccacaaattaattcatacaattttaaaataataataatattcagtactgggccgtggtggccgtttagcctcgaacgcagcttaaaaaaaggtcccaccacttaattgtcggcccacgctgagcaccgctctatttctttgtgcgcctttggcatattggcgtgcctctttattttattttctttcaactttctgtttctgttactatttaaattttattttcttatctttggtttcacggcttctattttctattctatgaaaaaatgaattatcatgtttttttctttgcaatgtctatctggactctagacattttagtactttaagaaattaacttattatagtagtcctattttgtaatccaactaatgataggatactaaaggttgaacgatagtgcataacaaatatgattaggtgtaataaataaaataaataatagtatagaatggacacaacaaagtgattaatgacattaaactaaaaaagaagaagtcatatttattagtatcaattttatttg

SEQ ID NO: 39500 - DNA, 1210 bp, Arabidopsis thaliana columbia
tctcttcatctaaagcattgtccgaacgctaaccacagtctcagcttcctcatctcctccaaaactatcatccagtttttaaaaactccatacatcgttccatgagaatcgtctggagtaattccgggctctttctgtgacgaagtagagctctccaaggaagaagagtacctgttttcagactcctctgctgcaacttggctatcgtctggatgggcactcgtcccaggtttctcttctatctccacatcatcttcacttgaaaattctggggctgtaattacgagggcttgactgtattttccatcggtgatcgaatgtgaagacaataacccagcaagtgcagatgctaaagcatcatttatagacaacgaatgttttggtttctcttcaaatgaatgaccaacctcctcattactgatctcaggttcagcagaaatcatctcattccctgagattgagctattttcactctccagttccacagactttgaaagaatattatcaagcctgttcttcggtagtacaacagcacaatcttcactgttgtctatactagaggagtcaggaactacatccgtgtttttagtcaatccatcactctcatcggtatcaggagttttatcagtatcactgcgcagagaatcttgattgggtattttcgttcgaaaacccaaatcagattcaaatgatttctttcctagctgttcgagtttcttctcaactaactggagccttgcatcaatactattaataggtttcaacatctgatcttcaaatcttatcaagatagtttctatcatacttaccttgttaacaagctgattcagaatagtctccacattattgcaaggtatagcaggcttgctttctgctccagatactcgtgttgctgcatcaacctgctttgcaacagtatcaactaaaactggtgagctcactcctatctgatcagtatttcctatagctactggatctgtactgttggacttgtcggaaacttgtatatcccgttcttttctgacatcttttcctcgagatagctgcaaaagagcaggcataaacatagccatcaacgaactactagatgaatttcctgttccagttgcttcttccttctctgactcacttggatcaacaggatcagcaaatacataaacttcatctacaagtgcacatcttttatcctgaagggagaggagacgaactg

SEQ ID NO: 39501 - DNA, 580 bp, Arabidopsis thaliana columbia
tagtatagggctgaaaattcagtcaacccgttaattttatacgtactttgtttcttatacataatatatctgtaagcttatacgtactgtaccatggtactttaatttttctctttttggtaaagcacttatatttttctatttccctatagtgtagttaaaacagtataattcgattgtcaatcattttatttatttgaaaatacggaatttatcattgaaaaatagagagtggttggtccatgtgtgagtttatcaaatggaatcagcgcatcatccatgtgataagtacgtggacttaccattagatatgccatgatattagggtatctataatttatattacatgactgctaaattgataatgttacgtaaacgtacttatgtattataacgtttgacttcgaccatctttgaaatttcaaggttatatagtaggttgaagagccaaatagttatgtttataatattgattatcagtctgtgtctggaatatggatatcaagcaatctaaataaacttaaagaagttcattaccttcatggaggaactcaaagagatttgatattttgtcggttga

SEQ ID NO: 39502 - DNA, 593 bp, Arabidopsis thaliana columbia
caggaaaatgtatgaatgagatcttgacacaaaaacccaaatcaatatgcaaacaattttagggtaagcgagcttacatatagttaagtaaagaataatacagttccaacaaaggcacaaatggtataacctgcacatggaatacgctccagtcatttaagattttcccaagcttacgcctctgccatggggtattagcgcatagtattttaagtagattaaccatcaactgcaccacaaaatgagaatagagatcaaacagagatttctaagaaaggagccagttgaataattatctaactttttcaggatccagaggctaccaaaaccacaaaacatagacaaggcattctcatcaaagtccccattaaaacaaataattttttgttgtttcaatcttcttgatgattgcaaattagttacatccacacatgctgaaattctctgagattggggcttatacgccagacaccgaatattgaacaaaaccaatgaaagattattcttttcaaggttttacgaagttcaaactcttttcaaggaagaataaagagctacctcatacacgtttgtagaacaaaatgtcccaacgt

SEQ ID NO: 39503 - DNA, 594 bp, Arabidopsis thaliana columbia
ttttatgaaataacattaacggtaagaacattgagatcgaatttgaaggtaactaatttagttggcatgaataaaatatatttaatattcatttctattacacttttgctggtataatttctatatatgttcatcaacgtttggatgtgcatatatgtgaccatgtctgagtctaactctgtcccaatcataattagttttagttttgccttgacatataactttcttatacatagagctgaaaatgtacttattatatatgtagtgtagtcatgaatggtggtaacatacatttagctaattttttgcggtgtacatatagactgcaatttcatagttgtaatattatcaataattcgtatacgtatacagaattatcaatactagcactatttatttgtggtcataaaaccgttttcacaatacttgtggattgtaaaacataaacatattctcgatggagatgtcgtacgtccacaaaacaccgagctagctcggttgcaaaaaccaagccattttgtaacacaagtctatatatcatacaaattaagtcggtagaattagtcacaaaatgtgagaaaagcatgattttgt

SEQ ID NO: 39504 - DNA, 519 bp, Arabidopsis thaliana columbia
tggaaagttcataaaagttactcactgaaattcgtagacatcttttattcaacaaatcacaacacagcttgtattcgtagaattattcattagaggttgaacaaaagactgaaagagtaaataacatgatacagttgggccttctgactttggcttttgtatttttcaggtcaatgagttccaaaaaatcaggttaagttggagtaatcccaacaaagctatactcttttccctacattcattaaagaatttttattcgttagattgttaaaaagtgcatatatagttgttccaccattatgcaaatatatataatcaacacaaaatttcattatgcaagttttcattcggtaacttatatcattgtagttctgcaatgttaccaaataccaatccaaaccaatgtttttctataccggtgagggggttttgactttaccttgtagaggactcgagttcttcaacgtctgatctcttcctcttcctctgtgcctgataaatcttatgttcccgacgggt

SEQ ID NO: 39505 - DNA, 554 bp, Arabidopsis thaliana columbia
gtaagttcaattaatttttctttgattttgttatgcatcttcttaataacatcagaactaatcagaacatcggcgtcacgtgagaagaaaaaccacacgtgtctttttgtgacatgacagaaaggggcatgggctaacatacactgatgtgcatcttcttaacatgcgctgcatcggcatgtctaaacaaaaccaacgcagcagaagaaaaaaaaagaaacctacgagagagatagatgagagtagagaagagggattagcaaaaaccgataaaaaaggaaagcgagtttatgctctgagtcggctcaccgattctagctgtcgaagaagagcgataaaaaagggttctttgagcttcttttttttttggtatatttttttttgtgtgtgggttgttggtgtcgaaatagcaaaaaatggtgaaggaggagataataagtctctcacctctttactacttgtcttcttacgctttcttcttcttaattctttttatcccaattcttccctaaccctaattcttccttgcttcaatgtctcccttttcccaacga

SEQ ID NO: 39506 - DNA, 511 bp, Arabidopsis thaliana columbia
tgctcacctgtttgactttaataatatgttctacgtctgtttccattgataaagttctcttacgattcttgctcgagtaaaactatcattttatcaaaccatagaactcaatttagaaagacatgtttttctgataaatgaactcgattcttgattcattgtttacattgcgtgtggcttttaaagataacgtaaataattgataagttgggtgtgaaaagaaatacacaaagaagcagagacttttccatggaagcaatgggaatgataagatctttccatggtcatcattttgatctttccataccaaaactcataaagacaccagaaacattttttttacctttttgacgttacaaacagaaatcccaagctcaaaatatgactgagattcaaagatcccaattatcatctctcaccttcatttcacttattagcttttagagctgggcacttgggttctgtggcaattgttgcagtaactcttcttctaattcatcgtttggtgttt

SEQ ID NO: 39507 - DNA, 545 bp, Arabidopsis thaliana columbia
aaatactccttcacaatcttcaagctttcatctaaaggtaaagcatgtagagacaattccgcctccagtggcttaccttctttacatataggacaaggctggttgattaaatcgtaatacgaatgaatcgctccttcaatgtctaatttgtctagcttctgaatttcaagaagtctatcaagaactcctgagccatagacagcgtcagatactagttgtagaaagcactctgtcctatgaccgtcttctgattgaatgaagcctttgagagcatcctcaaaggcatacccgatttcggggctggttctcccggtgctttcacctgaaccccctaatatgagagaaccattcaagaatacgcggaaattgttttgaggagtggaatataaagcttttatagcttccaaaacactctcttttgatccagagaagagatcaagaggatcgtactcgctttcttcagatatctgtagaatggtgacatacttattagacatttcagcaaatcacaatctatagaccattaagattttatactaacaatg

SEQ ID NO: 39508 - DNA, 337 bp, Arabidopsis thaliana columbia
cgattttgtcttgaataattagcttacctctctaatcattaatcaacttaggaaaaatattatttttcaagtagtgggcaattgcttggcaaactgtcaacacaaaaagttttagaatttatattaggaaaatgattcataaatgtatatatagacagctacagaaaattgattgaccaccaaacaacaaatataacttcaagaaggctggagttaaaaggcaagtcagagaaagacacatcaatataacccaaaacaaaacatcataacagcaacaataacagacacatcacccatggcaaagcgacaactgttgatgctgggtattagaactagc

SEQ ID NO: 39509 - DNA, 441 bp, Arabidopsis thaliana columbia
cagacattctcatggaagaagaacaaattgaaccctctgatgttgtcgcctctgagaataccagtgaccatgagggtttcttgacgcctgacgcgatgtctctttcaaacatcaaagcgatgctcttcccgttttatcctggaagccaaatgatgaaactaaagctactccacggcgattcccctctgcagctctactgttcttatctgaaaatacggtttggagtcaatgggaagtttctggataacaccgggagacggaggttaaactttgttgttgatctgaatccaagcctttacagtatactcgaagcatgtgacagtaatgcgcagaaactatctgttgaatcaggttccacttctgagtggaactcggtcgtgaatccaatgaagggatttgttaactaccctaacgcaaggatacagtgagttagctaactat

SEQ ID NO: 39510 - DNA, 1022 bp, Arabidopsis thaliana
ggatataaactactaaaaagaaacgcaagagtgaaaagttctaaccatgccacagtaacttaggctattctctctcacataatcccagactgataaacactcgagataaaaggagttttaaagtcttgctactgcactctctcttcctcaaattatctatacacagcccagaatgcatgattaaaaaggaaacccacgactgcttcaactgctttaaccctggtaggggttgccactgccatcccggttaggtgggtagttgttctggtactgtggctgctgcattccactaccctgctgctggtagttgttgttctgtgggggtgcatcctccgtattgaggtggtggtactgctccatattgaggtggtggtcctcctccatagtttggtggtggtgctcctcccatgttgtttgctggtggtgctcctccatagttgggaggtggtgttcctccatagttctgaggtggcctcggtcctcccatgttgttttgcggtggtgctccataaggtggtggatgccttggtcctcccatgttgtttggtggtggtggtccatagttctgccccatgtgaggtggaggaggtgcagagccacccatatgaggcggaggaggtgcagagccaccgatgtgcggaggaggaggagggcctcccatgggaggacgttgaggaggagggcctcctgccatgttctctcttctcctctcaaagtttctgcttctatcattgttgcgaggacggtcattgcgtctgttcctttcatttgctctagcattgttccttatccactcctcgtggtacttaggatcataaggaacagccttcccatcgatgaaaggttcccctgaaagtcaatatatacaaaaacgcatcaaactaactctctaataggatcaccagaaagatttaaactctcaccaaagcaacatcactgcgacttctacaacaccagtctcacaatagatatcctagatcaaatctaacagatgcaccacaatgttaattactataaataga

SEQ ID NO: 39511 - DNA, 518 bp, Arabidopsis thaliana columbia
gtcatcgacgatgacttctacggactgagagataagatggatcgttcgttaagagacgtcggaactctgccagagctcggccggtatatggaactagccctgaaatgcgtagatgagacggcagatgagaggccaacgatgagtgaagtggtcaaggagattgagattatcatccagaatagtggggcgagtagtagctcctctgcatctgcgtcgtcatccgctacagattttggtgagaagcttttgtacggaggtactttgaagaagaaagaagcaagagacggagatggaggcggacgatttgattatagtggtggctactctgttccgaccaaaattgagcccaagtaaatatcaacatctcttgtgagattatttgtcgttactttttgtatgaatgaatggaaaagtcatattgatgaaaacttgtgcgagtattgttgacctgaaacactgtgaggctaggccattagtaatcgtgattctagaagagacttagtagttgggcaaataaa

SEQ ID NO: 39512 - DNA, 498 bp, Arabidopsis thaliana columbia
gttatctccattgtcccaacggaataaattttgtagcccaatgataatgtcctttatcgaataacgatggtccttacacgagacatgtcgattttttggatttccttttctagattgttggctttatatctatatatacaatatataggtatagattaaggtttttaaattggtaaagttgtgtttgaccaacaaagataaatggtaatattaatttgtgattcacaacttgtgaatgatgtcgatgttctcacagcaaaaactagattagacttaaaggcacgagctgttggaagaagtgtctctatattgtggtaaacaagattttatttaatacgataacagcttataaatgactcacaattcttgctaacgagtaggctgcaatgttttgtttgcaatgcctgatgatgataccactacaccatatggagagtttggagtctccttatataaggacgacaatggcaatgtgtccttagcactgctgtctgatct

SEQ ID NO: 39513 - DNA, 398 bp, Arabidopsis thaliana columbia
gatgtataactttatgttattagttaaccattgtgaaataattttgttttatttacttgtgttaaatatgaatattacccgttcgtaatatatatatatatatatatatatgtgaaatgttataacgattttttttgttctatgatgatttaatttcgttagtaacggtgaaaagaatttggcgctatattcctcaatccgtggcgcttatttgaaattttcatagactttcacttacaggtctacccgcccggcactatagtaagcgtcgatggaattaaatcaacggctaataagtaatctcattgttcacccggatcgttatctgcaaccgttagatctataaacacatctgacggttcagatcaattggatccatcttgtatataaatgacatc

SEQ ID NO: 39514 - DNA, 399 bp, Arabidopsis thaliana columbia
taagcttaggtgtgagatacataatctttcagtagctatctgtctttgttttgtatttactgttttctgtgtccaagaatgtgtagtttgatttcgcatcactgacattggttgcatattagataactgtctgtgtacatttggttttgatgcagtgcagatactgaacctaccagtttaaattgtgggaacaacatggttgtcaaaacttatccattaggaatggttgggactaacaatggcattgctgaaaacgaaggagattctggtcttgaaccttatgttggattagagtttgatactgctgaggaagctagggactactacaactcttaagctacgcggacgggttttaaggttaggactgggtcagttgtatagatctaggaccgatggtac

SEQ ID NO: 39515 - DNA, 593 bp, Arabidopsis thaliana columbia
ttttttttttttccttcaatatttggttagttggtgagagaaagacagcccagagattttgattcctcgtgcatttcttgtttcccgaaacaaatggcacaaagaaatttgtagattataatgtatcagcaaagcaaacttaggaacaaaccagagagcttgtaacattatcaggccagttttaatttgctttcaatgctctgttttcttaacattttcttctttgtctgttttttttttggtcattttttttcttatttgtttaactgtactttctctctaaggataaaatcttataatggtaaaagctctcttttgttctttctatgaaacataggctttgccaaattagagtcataatccgaaatctttacctgaccgggataaagttcagttaaaccggatcagactaagaaaacagagtaccaaacagagatttttgtgatttttgagagagtttgtgtggtggggactgaagtgaatctaaccacataaacacttggaagagagaatctgaaaaactcaaactttaaaagcttgaagctttgagtaataagaaaaggtttggacttttgccaataggactgaaggga

SEQ ID NO: 39516 - DNA, 819 bp, Arabidopsis thaliana columbia
catggacgtcggccgatatgatgtggatgtcgtggttgaacctttcttttgttaaaccgagataacttttcaatacaagactgtcacaaactatatgtaagtcatgtttataaattttaatcaaaagtatactaaactgtggtaaaacagttttaagaaaattataggtcccaatttgtatacatgcttcaaattatctaaaatgttgttaaaattcgatctaccgggtcatgttcgaccgttccatttgcaggctatataatactcaccaaaattatgttaattgacataatttttctagaacatttttgctgtaagagatattaaattttcttacacatacaaagttatttttaagggaaaataaaacatgtaaagctatatttagttaattacaaagaagattttttccatcttttaataaacactagggtaagacagatcatatactagaaacacatgtcaatacaatgcatctaaaggcctggaaattttatcttagtttcttttcaaatagaaaaaataactaatttgactatttattaccatttaagattacataaataatacatacagataaatttcataactccaacataaatttcaacacaactataaaatacaatcatataagatctactttacaactaagcacacaacaaaccattttcttcaataaatagaaaagtggatttttttattgaatttaaaagtatagttcatttctattatacagttttgatctaatataaatgataataattgattatttttttgacaactgtatcattttctcttcaacctctacttgcaccgtga

SEQ ID NO: 39517 - DNA, 882 bp, Arabidopsis thaliana columbia
gtctctccaatcgatacaaactcattttgatactatatttaaatgataccaataataaattgataaacttttaacttcgtaaattatataaattaacatttacagacaaacacaatattagtcaaattagtattatatcaataagcgaaattgatagacaaattaaaaaattaatccgtgcaaaccatggatactaacttagttatttattaaagactgattctatcttagatgcagccaagcaagccatcctaagtttctaatttagaaaaaaaataccacaatcgttcggtgaaccatcagtctcgtatatattgatgtattaacctaaaaattaaaactatgtgtgacgtgtatcttatatatttccatcttactatatagttttcctttattggcatgttttgttaaattatgagtttgtgtgattttaaggtaatggtggcaaacgttatggccactgacagagacttagaacggtcgacgacttccacgtgtgaacatttaattcgcaagaaaagaaaatatatggaaacgtaaacaataaaatggacacttacgagaagagaacaaagtgagactgtgacagagtagatatagattgttgtagacttaatgtagttaaagagctctctaaattccgcatttgaatcgatggcgaatttttagggttatgtgttagatctttcttttggagtgtgcattacgaagacgttttaagcgcttaagcgttgcagcaaaacgccggcatggttgcgggatcttaccggagatatgagtttgttcggaacagagacgattccgatgatggggttggtttctctttctttttgactttagggtttgatgtacgttaatttagatactctgtttgttttgttg

SEQ ID NO: 39518 - DNA, 301 bp, Arabidopsis thaliana columbia
gatcattgtgacgttgatctccaccatattggcatagcaggtagcgagaattgagacaagatctaaagaatccctaaagtgtagctgggaatggaaacaagagttaaggagagaacaaggcaccgattactcgatcgatttgcgagtagggcgtactttcaacgacagcccgagccgagagatcaactgctgaactacacgagcaagatgaggcaggcaatgcttaccactgtaccaagttcctcctgaagtcagtagcacgtgcatagctacatcatatgctcaaaatgccattctagca

SEQ ID NO: 39519 - DNA, 307 bp, Arabidopsis thaliana columbia
ggaacaattgatttatggtaaaaaaaaatgggtgtttaaaaaaaaagaatatatatgagttaattagattccaaaacatcagtttttcatacactcaacgaaagtgtaatagggtagctcatttacttgctaaacagggttgtctccattgtaactattactctgataatgtttgtccccctagttggattcttgaacaattgtatcatgacttttgtcactcttaatcaataaaattcactttcgacaaaaaaaataaaaaaaatatgagttaattagaaagctttatcaataaactattttagat

SEQ ID NO: 39520 - DNA, 428 bp, Arabidopsis thaliana columbia
taattaattaccaaaccaaacttaataaattcagttcaacttcatttcatactttccccaaaatgaataagcataaccataacaaatcgaaccagaaatcggatgagccgcctctacttgggaccatcgtttctaggatttaccaagctgtccttagccaaactagagttagcacaaagcatatttgtttgtcaccaaacgcacatggcccccaaatcttactcacaacactataagtttaagtaacaagaagacacaatttttaattctcatttgatccatcactctcacttatctctctccatataattgaattgtggtagatgcgagagatcactctatctctacacaacctcatatcgctctttatcacttgactccatgtgcctccccaagtcccatatacttccaagattacatgcatttat

SEQ ID NO: 39521 - DNA, 295 bp, Arabidopsis thaliana columbia
gaacagagatcattttacttgcttgaagttgacccttaaagaggtgatatgacatgtcttttcactgatatcacctttaatctgtacagtggtagattccgtctcaattgtaggagagtacctgaagaccgagccttggttgaagcttctatatgatcatcttgggtactttttcaaaattaaaatatgaaatcttcaaccaatcagctaaagcgaatcatatagctcctgacagaagcattcattttgtctggattattttacagactcaaatttgttgacccgacgatgaaag

SEQ ID NO: 39522 - DNA, 612 bp, Arabidopsis thaliana columbia
cttttggtgacatttgcgggaggcaatcattgatgaataataattatttgtacggtgattataaaaggcaatgaaatactatatcaaactatttgtaaacattgttcaaacttaagctcatatcgaaaatcgaaaacaacaaagatgctaattgcctatatgacgactttccgagttatgcaaatatgtgattatgtaatttcatcatacaacaacttgttgattcagtagttctatcgattaagtaaagaaattggaaaaggggggaaaaaggtgggagaggtggacaaagaagttagggaagatgttgacgtcttatccataaatatcctccaaaaataatatccaatcagaccggtccccatcaccctcacaggtcttccttgccttcatttatctcttttcctttttctctctttctccatttcaatgcgaatatatatatcacttccatttcattttattctttaagttattccatttagaaatttctagtttatagttttaagatgatttctactttgtctgattttacgacatcaagttgggactaatcacatcttggttatacattatccaaaaaaactaattttggactatcatatcaggttg

SEQ ID NO: 39523 - DNA, 991 bp, Arabidopsis thaliana columbia
  unsure (1)..(991): unsure at all n locations
gattgtaaaatatttgcaggcatctgtttgaccgtttgggttttctgatgaggtcattctcgatgtttcgaacagaacgcttgcatatctttcattctctacaacttatgtaaggattgtgtctaagagaatcggtttttggaattcaagtaaagattctgtactagaattagcttctatctattgctaattagctatcatcactaatattaattttgttgcaggttctcaaaaaatgtttcaacacattccacgcacagatacatcagcgtgtcccattggagtcaataaatgctctttcaacaaacaatgaagaacttggtagaggatcctctctgagttatttgtatttggaaggtaaagtgtttttaattaattttgctttttgtgattacacccatatgagtttcattgctaaatttgttctcattggtaacgattttgtacttgaatgagaacacatatgaaatggcgttcaagtatgattggatttgtccccagattaaatccttattattaaccttttgtcgttaaatatgtgattatgttgttattatttcagatattgctcaataaaataataaatgtataagcttcgagaaaaggacgaataatctgatctttatgatctttggtttttgttttggtgtgagtagaagaacaatcaaatcttaactctcgatgtgagtataaagtagtctattttggattccctcctttgtgggtagagagttgtactaacgtcaagattactagttcggtggtttatcttccacaaagatacatcatcattgaactcgaaaatatggagaaggttgagaatgttttagaagctttttacagtagaagaaaagctgatgtttttttaatactcaaatgtttttatgaaaaatgtttatttagattcaaatctaatcttttgtatcattttatatanaaaaacaaatctcataggatcatatttgtagtaaagaaatggtgacgattgcaa

SEQ ID NO: 39524 - DNA, 510 bp, Arabidopsis thaliana columbia
aaataattaaaatttaaactttgatcagttacttaaatcattgtttatataagtcgagtgacgttaaaatggtctgaaacttgatttgatccacgcgcctccgtccactctggcttcatgccgtcaaagctgtctttaccaatttctctttcgccacgtggcttctttcacgcacttttatattgttgccacacaaaaatgcttaccagacttgatctgtgcgttgccaaatatgtacgtatctgtgtggttagtctgtccaatgcaattaaatttaaaacaaacttctcaatttaagtattacacaataagttaatgcagatgacttaacatgcggctgttgcaacaatgacaagtttgcactcactagatgacatttcagtttgcacttcaaaataactagtaaaaccatatacttaaacttccatttgtactaatttaataataagtatggtagccttggtatgaatcatgctaattatatttcaaaactcaaacgacaagtgacgc

SEQ ID NO: 39525 - DNA, 724 bp, Arabidopsis thaliana columbia
ggcgtttaggaggtagaagtgacggtggagaggaaaaggaatcggaagatggtgaagaagctggttcgccatgagaggtgcttcttcttctctctttctctctctgtgtctctctgactgaggaaaacgacagagtttactgggagagacgtaaatcgactttgttattttctatatataaatatcctgacactattttatataataatgttattaaattatgtagaataacgccgaaaatgtatagtataataatttgttatttaaattggtcaattgatgtcaaaagaaagaaaaacaaaaggtggtaataattggtcaattaatgagtgaaatttgtagaagaggaggacatttttaaagaaaagaattggtttatgtatggcataggtagcactagcacacagtggtcaaattggtttatgaactgggtttaaaggtatacagtttaagtcccatgaatacagttttctactattattttctaacacaacgactctaataacgaaaagccaagaaaacttaatcattttatccaaaagtcgaacaaaactttatgatttaaatgacattttgaaagttcatgatttttcatcataaatttgaaaacttgcgcatattttaacattttttattttaaaattataaaataacacattttacattggtacgtgtttatgaaagttttatatatggatcaaagcaaaaaattggtacaaaccaa

SEQ ID NO: 39526 - DNA, 296 bp, Arabidopsis thaliana columbia
tgatgatttcgtatgtacccatctaaaatcttagaatagaaaaatataaactaaaataggtttggtgtttcttttaaattgagaattatataatcttacaaacagagtttggttgttgagctggttatcctattaaaacaactaatatcactagatactagatgaactctactgtcttctagaaacattgatcactcgacatggctgatcagttacatgattttcgagaaaccatcaatctgaaatttaccaccccttatataaaatatctatttacatatgtagctaaacaggtc

SEQ ID NO: 39527 - DNA, 562 bp, Arabidopsis thaliana columbia
taaaagtagtcataaattgcaaatgtataataatatttttttgaaaacgactactgttttgtattgcaaccagaccaaatccaaatgcatgcaaccgaacccatcaatgctttttgcagcggcattaacgaagctgctccactggctctctctcacatcataacacaaagccatttattttctcttcttctaatttacagttctaataaataagtaaagtcataatattaatatgatagtgcaaatactgtatatatacacgacaaattattaatttttagataattatatcctgtttcttaacataaacactgttgattcccaatgtcaaatcaatatttaaaaatttgttataagtcagtcactcaaaagacaatggtatgaaaaatgctgaaaacagacggtcaagatcttgtattcacgatgagatatattgttaggttaattttgatataaagcgaaataaaaagggaaaaaaggtagaaaagtctaagtgtacaattaggaaaaggcccacaagaatccaaatctgactagaatgaatggaataagaagcatgtgg

SEQ ID NO: 39528 - DNA, 396 bp, Arabidopsis thaliana columbia
taatttattggattgtttaaatggaaataaataatcttaatgagataatgttatataatattctgatttttaatcaaagagtaaaaactaacaatttttttcaaatcaattaaggtgatttccaaaacaaacaaatgcatttatttttctattaatgcaaaaaagtgtgttttgagtgtcctacatcgctaaattttcaaatggcttagaatcatctatataaataccaaatgatttgagatttgagtaagtatggaacttaatttttcaagaaacaaaaggtttgggaataaaaacatgtcacatttatattttggacgcaaatgagatggaaaaagtttatttcacgaccaaaataacattaatttttgggtagttttaaaaaatgcaatagag

SEQ ID NO: 39529 - DNA, 502 bp, Arabidopsis thaliana columbia
gccagtgtgctctaaagttggtgaaactagtccaagtgtctggtcaaggttggtcagatacagttggacgctcctcgaaaatatcgttaagttcagacttacgcgaaatggggagaaaatcctagatccagcatggtacgtattcctttgagcagcctcatcaacgaccaccttctgtctcttggcaagcggcaatgagaagccatcattatttgtcaatgacatgttcacgcatgtactagtcactacctaaattggttcaacattgaagtttttggaaattatttatcagatgactaatcagaaaaggcgggcttaggaccggatgtgtcagattggcggatccaaaatgtgggtccacttacaacgggatagtacgtcgcgacaccgggtaattagaatccaactcggaatctcttgagtcagcaaccagtcacttaagtgcagttaatatgctgctgagtctgcctgccacaaggcagcttagcatttaaaccatact

SEQ ID NO: 39530 - DNA, 248 bp, Arabidopsis thaliana columbia
gaggatgacggtaccgagttttacttttttaccattgaatttacaactattatatagtgtgggtttgttgctaaataaagaatgtttgggatgggtttagttatttgtaaccattgaatattttatgaggtcatgcgcactgtttggtgaaccatacttattaattttgtgtaaaatagtgaaaatgatggaaattttaactgccagtgaaagaaatgatcaaaacaaatcatcaaacaaatgatcga

SEQ ID NO: 39531 - DNA, 349 bp, Arabidopsis thaliana columbia
aagttgctgagcatgtctttgcctggatatgtgactggcaagacattgactggaagattattaacctgtaaaatgttcaaagaaacttgtgacttctaagaaaagttgagaacttaagctgaaaaacgaacaagcagccgttaataccccatctgaaataccaaaaggtctgggtctcttcaacacactttcagaatctgccgtctgataatccattgataggctattagtttggaggactcctgggacgctcacgctttaacatagacactgcaaggagaaaaagaagaatagatagattatggtaagctatgcaattggtagacacacacaaactgatctccacgtt

SEQ ID NO: 39532 - DNA, 603 bp, Arabidopsis thaliana columbia
taacccctttattatttaattgacctaaaaaacacccccattaagtttcaatactggttctatgttttagattactttggcgttacaaatatgttaaagaaggaactcagatagcatgtggaaaattatatatgtctcttcatcaatacaaatatgttcaaccaattaaaaaagtcaaacaaataattaagtttgttgtagtaaaaaaaaataccaaaaaaacaaacaaagacataacagaatcttctctgaattcacctctgcaccagacttttgcctaatcaacaatgtcagatataaactatatatatatatccattctctgtttaagcaagattagtatctttcttagtaacattgctttccagctttggtggacctgaaaaccgtcttacagtcttaggagatcccgagaaggaaagccgttttttcgctgtcttctctgagcttagaggactaaggtttgagaatcgagctcttgctttggcggcttgtgtaggtgccatgtagcctggaactgactgagagaactactggtgaagcttcatcgtctctagttgatggaattgaccacaagtgctatgctacgattcaaggttgtgg

SEQ ID NO: 39533 - DNA, 475 bp, Arabidopsis thaliana columbia
aatatcaaaatctcaaaaactataaaaccaaatcagagattcatgaacaacgccctaaggcacacaatatccattgtatcaagacaatctacagacagacataaactaagactcttgaaagcatttagcagagaatatgtcatctagttgacacaagagttcagacacccaaatccaaatttcagagcttggaacaaataaattatacattagcaaaaagaaacaaattttatgcacaatgagtatgatccagctgctaaaaggagcgtacttgagaaaaattatatcaatagaaccaatggtttaacttgagcagaaaaaactgaaagaacatacattttaagaggaccaacatcttcgatgtagggcttcttagtgaattcaatttccatcttcgtctccatctctacaaacaaaagctaccaaaaaaattacccagaaaaacaaaaacgacttaagttttgaatcggcgtaa

SEQ ID NO: 39534 - DNA, 549 bp, Arabidopsis thaliana columbia
cgactctagaactctagaggatgaattgagaaatcaaaaacctttttacagaaatcgaacaatgaaaccttagaaattgcaatttctttattggagaagaattacctggtctaattggtacaaagttgctgcgattatctctttgtttgcttcaatctctcttccccttctttctcaggtccgtgacaatggaagcaaatggctaaaggagaagcgaaatttagatgggagtctggcgggaatttaaaaatatcaaaaaatttcaataattttatcggacggtgtttcaaaaatattttttttttaaaacaactcgtattctgtccaaaaataaaataaataatatatatatacaccgcaggcgggcccttctcacaaaataaaatatacaataaaatgggcccttcaaaagtaaactataacctagaactacggtatgacaaagataaatttaactttcgattcatttgtaaactttttaactgagtgaacatagagtcatagagacaaaatggtgaagggcaacaacaaatttctctttctttgttt

SEQ ID NO: 39535 - DNA, 525 bp, Arabidopsis thaliana columbia
tgagagcgatttgtagtgatccggtgaaccaaacaacaaattcttcgcccgattaagcaacgttacagctaaattcctatcagaaatttcccaggcagttcgagatctagctaggtttagatccagaaacaatttcttttctccggcatcggaaattttcgcgatatcaattttcgagacgatttcggtggctctctcgaagcaatcggaggcgagatcgaatttcttgagactgtgataaacaagaccggtcttatagtagaatagagaggacttaatcgtcggagatggaacaccggtaacgtccttagcgagaaaaagcatatcggcggcaacatgtctgagattcgcaatgttctcggcggaggttaaagaggattggagagaggcggcgttacggagatcaacacaagcattccagaggcgaaacgtgagtttccatatggtaagcttgaaggagttatcgggaaaaggagcaagttgactcagccgagttaggaattgtctaagagaaatagggagaga

SEQ ID NO: 39536 - DNA, 270 bp, Arabidopsis thaliana columbia
agaggtaatgtgaaggcgtcagacacaaaatgtcaacttttccattaacatcatatgatcaaatataagtttatttaaacacaaaccgaatttgcataaatctctcaaatctttatataagagcaaaaccccttagttaagccctctctatgttggaggaggtgaaggaatgactgaatcagtatgagttgagttagctccgtgtgatgtccaactatagagaatcattcgcaatacgagtatgattgttcctcccatgaacccttttgg

SEQ ID NO: 39537 - DNA, 529 bp, Arabidopsis thaliana columbia
gaacacaccctttgcagtttctgctccagcagtcccaaccacctcaaaatatgcttccacagcagatacccacactgcctctggaatatcattgtttcccaccatacctctcagctccttctctgcctcactatgcctcccaagtcctaaccaagccttcatcgccaacacaggtaatgaagcatgttgatcagctccatcactaccatttcctccattccttagaactttcacacattttatcacattctcgaactctcccttctgcaaatgcactgctgatatgaaacgcagagttttgattctcatggccgtgaactccgtagtatcttcccgagtttttgctgtacctaatcccttctcacaaagatccaacgcttcattcattaacctaagagcgtcgtttagactgcaatcgtcgtcacctctagacaaagagcttttaccaaacgcaaggaattgatttgagagcgatttgtagtgatctggtgaccaaacaacaaattcttcgccgattaagaacgttaca

SEQ ID NO: 39538 - DNA, 482 bp, Arabidopsis thaliana columbia
ggatccctatagaccacaaacattattagctttgactataaaattgatcctcaaggtgaaaagtaggctaactcctataaatctccaaggcaacatccttaattttgagagtcattcataagaagaattgtgttcataactttttttactagatcagaaaatacactatgcaataagtaataactaggttttcaaaaggcataatcatctgtacttctttgtatatgaaaaataaatatgcaaatgcaactaaaggttttgaatcatcttttttgtttaattaagactttttaatgtaaaccaaattaaacacgatatatattcaaaatgaaaacagaattatcaacgctgctgtttctcctgacttaattcttgactcgtctccaagcaaattaaagcgtccaaatgagagatttaataataatcaaagataagtaatatcatcaatgacgaaatagtcaacataaaataaagtttattgt

SEQ ID NO: 39539 - DNA, 503 bp, Arabidopsis thaliana
atccccggttcacaggctggatccctgattctttgaaaggcattaacttgcagtaagtgttgcattcctttcttcgattcttcgatcttttctctaatctcactaattttttcctgaatgatcttgaaaacagaaaagatggcaatttattaaattccgggcctgcacctccaccacctcctggtacaccaccgatcagtaaatcatcacctactccgaaatccgggaaccgtggaaaccgttccaatggtgattccagcaatagcaaagactccagcaaatcagggcttggagctggtggagtagcaggaatagtcatttctttgatagttgtaacagcagtcatagctttcttcttgatcaagagaaaaagatcaaagcggtcatcatccacggacattgaaaagactgataataacattaaccaacccattatactagcgtccaatgactttcatcaaggtaataactcattaaactttttttactgcaaaaagtattat

SEQ ID NO: 39540 - DNA, 546 bp, Arabidopsis thaliana columbia
atctcctccatcaccaagctgtaaaacagaagaaagattagcttataagaatctaagaaacagagtggcgattttgacgtgaaaatgtagtagaaagagatatacctgtgattcaacatcctcatcttcgtcttcttcccaatcttctatgacctcaacatcatcagttgctttatctgccaatttgattggaagcaatgttttatgagaccaattagtatcttatgacctttatgaaataccagattctaaggacaagaaaaagcattaaaatcataaggtcaaggaagcgagagagcaagcaacattgagaagatacattttttaggcaggagacattttaacaaacaccttaaagacaagaaaaaggcaaacacacagaaagaccgtaaacaaatcctaaaacccagaaaacagagaggcagtcaaagaaaacaaggtttatttattttatcttacattcaaaagtgtcttcttcgtcgccattactaccggcggtttttggcggtcgagctgaaggagaaggagaagaagacgaagaagaaa

SEQ ID NO: 39541 - DNA, 130 bp, Arabidopsis thaliana columbia
gctcgggcgtgctgcgccccatgaagccggacatccggttgaacatcaccagcaccgtgccggcggcagcacgccaccggccagcgccacgacctcgataggacggggtttgcgccacgcatcaagcgct

SEQ ID NO: 39542 - DNA, 923 bp, Arabidopsis thaliana columbia
tagctccacaaaacctctcgcatgcggcatcgtccactttgggtttttgacaatcagctaggtcgtagcattttgcatactcttgatttataccaacacctattaaacaagaatcattaagccaatattcacaatcatggaaaggatacaaaaacatatgcatatttaaacaaaaaaggtgagtagtatgataataagctaataccagaagttctatcggagcaatgaacaaaagatacggctaagaggatagtgaggacaaatgtggttaacattttcttgctgatagccattttgtttctatgattttttgcttctatttttattttgagttttgtaatagactgatcttcgctttgtttttctcatgtactacatatgtttatatatatgataacaccaacatacctaaagatatttattttttgtaaaagagaaacaaatcttgatatttaatttccttgatttctataatcaaaagaaaataaagagattgattttcttacctaatataattacgtttgaatgtatatatgatacacttgtctaatgtgatatatttttttacatattgttaaaacataaagttgtttttccaaaatctagtaaaaaaaactttaaaatagtccttactaatgttaaggttctataaattgaaccctaccaaaaaaaggttctataaattgaaattaattttaaggataagatgtaaataacctcctaagtatatcatatttagttgatatataattccaagaactatatttagttaatatttaaaattaggataaactgaaaaattatttaaattatattaaatgcattccttcgttacagaactatccaattcttccaaaaaaaaaaggccaaaaaaatcttgcaatttatgtcattatattgtctaaggccaaaatcccggaaag

SEQ ID NO: 39543 - DNA, 577 bp, Arabidopsis thaliana columbia
tgtcatgatattattgttttttgtgagtcttattgtaatattctgattgtctcctcccctctagactctagttacagtcttacaaaaacaactaatctgaagtgtgaatagattagacggtggatacaatataatcatatgaaataagcataacatatatagctagctattgtcaacaaaacatcaattttaccttgcaaccatagaaatgttatatatataaaaaagggtatgaaacacaattatcatgagcaaaacgagaataatagactagagagggttgaagtcacgaaaagaaacatataaaaataaagtaatattggttggtaagaaaataagtcaaaattaaataatcagagaaggtatatggagtatatggacatttgcatctttggcctatggacgtatatataagcttagcgtgtgagcaactgcatactgatacggttttggaaaaatcataactaagacaatgaaagaatgttgttattacgaaaaagacaaaatgcacgaccaaattattcgtgatcatattaatcgacatattattgtgtagttatatatataactgggatac

SEQ ID NO: 39544 - DNA, 464 bp, Arabidopsis thaliana columbia
gttcaaaaagttacatgaatctataaacaattgccaaaatcgaataccaaatcacagcattttttttgcccttacttaaacccgtgagagcttaaactaaaggcttttgattgaagatttcgaagaaagtgttatgattaacctttggatcgtcttgatcgtaagaaggatgattgatcaggagcacgattcatcgatccttccacttccatcattatcccctctctcgactacttaacttcactgatacatcgggaagaagaaatggtttactccgccgcggggataaaaactccggcgtctctcaccggtggatcgatctagaatcgcgtgctctctggtagattccactgatctaagatttttttttgaatttgtaaattaatctctcttcagtaaaattaaaagtatatgaacatgaaaaagttgaaaggaacaaaaaagtttgaactataaaaaaagga

SEQ ID NO: 39545 - DNA, 414 bp, Arabidopsis thaliana columbia
tctgcttgtcagcctgcaatcgcatggaccgatattgatgcaggtcatcacccagatttgcatctggtcggctggaataatgtgaaaattgagatatggacacatgcgataggtgagaatcatggtctctgtgtttttgatatgaatcttatcaaatgcctgaatctcaagaagcccctcatcaagtgctgactaagtgatatcggattcttttgcaacaggtggtttgacagaaaacgacttcattcttgctgctaagatcaacgagctccaagtggaagatcttctgaggaagaagaaagttgctaagtgaaatggaatcaagatgaattctgcaagctaaagaaacatctttaaagactggctcagaggtcaatatgaataagcatcttgaagccataactgggatgtgtt

SEQ ID NO: 39546 - DNA, 598 bp, Arabidopsis thaliana columbia
cgtcttctaatcatgattgctactttaatataaaaactaactatcatatgattgttagtaatctatcaaatacttgaaaatacaatcgaataaagctaatgttgattaagattatattgaaacaaaaacaattagaattggttaaaaggagccagctggcttttgggggataaacttggtaacgcgcaaacgccgtccttagtgatctgtgatttgggccccacttttgttcttaacggtttcttcttctcacgttacgcgccgcctctctctttctctgacgccgtcgactttatcccggaggacaataaaactaataaaaaagacaaactagccgttgctctcttattttaaataaaacatttgtgataagaaatactatttcgcaataagaatcgatcatctaatggtctctaaattaactttatgcatacataaacgttgaaacactcaaacacacatggattatcgtttctaaattatatatgtggatagtcaaattaatcttatttcacggacatcattctatctaaataaattgtcacgcagaaatagtgctcccatgaatggagtgtatagattagtaccatgtttggag

SEQ ID NO: 39547 - DNA, 563 bp, Arabidopsis thaliana columbia
  unsure (1)..(563): unsure at all n locations
gtcgctaaatctgaatcctgcggacgtcagaaaaagaagatgaggaagcaaccaaagacaaagatgaggatatcgccgaacacagtgattccgaatccatatccgagaaccgtccgaggaagaggacgatgataagtgctactactaatctgaagaaatggtttctctgtctttttcttttcttctttttctcttttgcttttgttaaattctccatctactttgatcttttctaacatatgcctgtaattccttgctataataggttagtagtaagtagctcagtaaaagttccctcacttcatatggagatgaacaagacttgtattatgttattttggattatatatgtgatagggtattttgtatatatgacaaattatgtaacaaattttttcatgttacatagtgggaagaaggagaatgaatagaaaaatgtaacggacgctatttgtgtacgttgcttgttcaaatcttgtgttcactgacggtaacttggattgctanagcgatttgaagatcctagtcattaacctatcatagagattttttattcttaagaa

SEQ ID NO: 39548 - DNA, 565 bp, Arabidopsis thaliana columbia
  unsure (1)..(565): unsure at all n locations
gagggaaacctagctaagccgtcaccacgtcctccgctgccacaactcaccaccacaaccttcaccacggcaccactacacacacaactacatcctcctaaaccaccaccaccaccaccttcaccacggcaccgccagntgagtgtatctttatttttctttgtcagcccagtgtctgtatcttttgtcgacaccccgtatggaaaacaacactccaatatttgtcccactacaaacgaaacagcaatgaggattaataaccaataaacagggtccatgatctctctctctctgcaataacaaatcagaaatatgtttatcaaaaaacgtttagttggtttcgtaataaatacaagtgctgtatttatattatagtcattattatttatattcaaaatttgtaaaaagcaaagaaaaacttagttaggttttcttattatttttttccgtcagaaacgcagttaagagattatcaaaacaaagtaaatatcaaaatgatatcaagattacgataataacaaacaacaataatatcaagattacggcaataacgaacaacaataat

SEQ ID NO: 39549 - DNA, 459 bp, Arabidopsis thaliana columbia
tgaaaagattacaagatattggtgacgtgaaagatagcaagagctctttaaagctttcaggaaaatcatgctcgtcattggttcattccagtattgctgttcttgcttcagaggcattcacagaaccagaaatctttaccccagataaggagaatcttaccccaagctctcacatgctaaaacgtttgcgagaatttggtgatattaaggatacaaaaggctcctcctctaaagcaacacgtaaaccattctttgatattcgtatggaagaaaacgtgatggtggaacaggaaccagaagatctacacagcctgggcagcaaatctaagctgaagcatgagcctctggcaccaaagaagaaagctgagcgggcgccttttcaacctctacttgaaaaatcttctttccaaagtcagtcatacactgaggcttcttcaactgcatcagcaaggaataata

SEQ ID NO: 39550 - DNA, 512 bp, Arabidopsis thaliana columbia
gatttcagatctatttcaatagtgtgatcaaactctttaatttcagcatgaccaaatctaccatataatgtcatataatatctctatcaaattttcaggtgttggttaaataaactgcttagtttgaaaatactttgatgggtaaaatgattcgtagacaacactttgatgtaaaccatgcatatcagaaaccggtggttgttatatggttacatcctgataataatcaaagacgatgatgatatgacgcctcggccatctaaatttctaaaagaagtaattgtgtacgacaaaaaaatcacatccattcgggagatgcgcaaatgcacgtggaactaaaggtattagggttttggtcaggagcaagactatattgtcggtcgtacgttaacgttgcttttcccgtagaatctctttttcttaccattttgacactttcatagcttttttaactaagaagattgttaccctttccaaatgaatatgtacacagtggctatgtttagtttgac

SEQ ID NO: 39551 - DNA, 499 bp, Arabidopsis thaliana columbia
  unsure (1)..(499): unsure at all n locations
tctatttaggttgtcaatcaatatgtaaaccggtccatatttgcaataattatatctcagaacattcattaaattgttataaatgccatacgtatggcccatatatttttaatactaaaatagcaattttggtgaagaattttccgtaaatccatcacgaatgttagtaggtatgtggtcatgatggatttgttgttttgttgttacagtttcaattacgagtgattgattttaaacccgttgttgatagtttggcaactcattgctatgagttttggtgattaatgatcacataaatttttgaaatttggttgaagaattagcagcaatgaaataaacatgaatttactatcgaaacaagatgttatcaccaaaatatgttggttttccacgaacaaaaatgcctgatatatctttggtttaganaagtaagattcacataacatgtattggtacacgtgtcccactcctttcactgtagatccgcccgctatgttga

SEQ ID NO: 39552 - DNA, 470 bp, Arabidopsis thaliana columbia
atatggataatattacatagtagtgtataattgcccggaaattaggattaagtaagctaattacacattgttatggttgccaaattccgggtggagaacatgtgcgcaacgagattagcgagaaaagcttacatattttatgagtgagtcatttataatcaattgatattaatgcgcatactgcgaccgatttaggctctaggaaatatgattactatctgataaatttatcaaaatgctaatctttggtattaattgcacacatagattaatggcgttaaactggtgtgacaaagaagattagtgtttaatgttttcctacatatatatgcgattcaccataatatttataaggtaagtaaaagtactatcaatctgataaactttttccaagcctttgagtgagcacctttttagtttacacttgataagtcttcttggattactcataacaaaaacaaacaaaaata

SEQ ID NO: 39553 - DNA, 805 bp, Arabidopsis thaliana columbia
ccttacaataattgctggagtgatgttcatgctgtaaagccgtcgaaccgccatttgcaacaacatcctcgagggaacacccagttttcatgcccactgttttgttgttataatccgtgctttagttctcaaattcttgtttgagtaataataattgtacgatataaggggaataaggtaaaaggtggtggttgagatttgtgttatctgtatacgaggttcaatgagaaattgagttttttgaatcaaccctagtatccttttctgggatctatgtgtttttatatttcttcatcaagtcgcaaatcatttctttgaaacaaagttcatagtactgacacaatgttgttaacaatctaaaaaatagctgttgcccatgcaaccattttgttcatgttcatatatcaagaatgcatatatcagctcatcatgtgattgtactgagttttggttatatgagtgtgtagtctctttatcagcgttagagttttttgtatctcactttaccatttagcaagggctttcataagctctgtttttattgaggttggattttctgttggcggtttctgcttaccgcatgctctccacaaagccaagtcaacttttattcagtctttgggtagcaaggaagcactcaatagaaggagcctgatccatcaagtctgtgtggagagtgaagacaagaattgctattgcagtgttgtttacatcgtctaatggttatctgtgtctattgttggatttctagttgtcagaatatgtgttagtattagcttgaatgtcatcttggtctgtgcttttg

SEQ ID NO: 39554 - DNA, 716 bp, Arabidopsis thaliana columbia
ttttcgttggtagtgattaatgtagttatcttttaaatgttggttaccaaactatgagataaagcaaaacaatgtgaatactcttaaaacaacgaatctcatgtgctaagtaagtaacatatggtattaaacattttcacacattgtcttttctattttgacatatatgtacatatattcacacattgtcatgtctgaagcatggcaatcagattgttatgtaatggatccgagacatggtcaacaagattttgtacaggaccttttccagtgaaagcagcctgtgcataaaatccaagccacgcgaccatcgccaatcgtccatttttaatctctttaaccttaagatcttcaaaagctacaggatcctcggaaagattcaagggatcaaaaagcgtccctccaggatagttaatgtctcctggcaagtatattcccagtggctctaaggcctcaatgccacagtatcttgcgtattccggtcctacctgtatagcaaaaaaacgtttttggtataagagaaatgtatgagataaggaaagcaagtctcgaggtatattaccatcaagagtacttggcaaatggcaattacaatgacaccttggcttccagctacatgaagccctgggatgccgaggtactccaatgtctctccctggtgaaaatgaaagcgtacacgatcatgctactgactagtactttgatagtagatggtg

SEQ ID NO: 39555 - DNA, 933 bp, Arabidopsis thaliana
ttatttcttatccgcattgttaatcaatttacatttgtgtgcgtgggatatacactaattttgacacatctttacttaatctttacatatgttttttagtcaggtccaaaactaacattgcaaaacctgttttaaaaaggttcaaaatagacagaagaatgcagtcaatgaagaacataaattacaatcttaggttaagaaatttgggttacatatatacatttcttacatccatttgtgccaaagaagccaaaagtagacatagaaggatgtagtcttcactcccacatcatcacattcttgatatctcacatttctgacaacatcatccaaagccttatttttcaaaacaaccctctaaaagagtaagatcctgtaaaccttaccaaccgaaacttcttctcctattcttcttcttggacactgtcacaactcttttcccagacatggtcgcaactcttttcccaatagaagcttcatactcttctctccttctaagcatacctctagtcttcactcccacaaccctcgaaaccaaactcttatcatcatcatcatcatcatcatcatcaacatcaccaactcttgatttctcacatgccttatcagatttctgacaaaccaaatctcttaaactaccaacaacatcgtccaaaatcttatctttcaaacaaccctcaagagaataaagatcctgatacctattcacaggaatatcatcaaacgaaatatcaacattcttcttcttcttctcttcttcttcttcattgtaatcttcccaatcataaggaaaccctaaacgagaacgattacaaacctcaatcgaaataccattctctagacaacgagatcgattgatgaaacattgatagaaattgtaatccatcaattgttcaagagttgtctttcatgtgctttgagattgtcctgatg

SEQ ID NO: 39556 - DNA, 400 bp, Arabidopsis thaliana columbia
taaaatatataaaaatacgagtgtgtgttgattgcatcgaaatctctatatatatagtttaaaaaaaaaatcaattagaaaggagaaaggagcatccgatcaacgattatatctacaagattgttaccttaaaggtccatctgttcttggcaacagacaatatatgtgtatatattgagtgatcgatgagtacacaaagacaacaacaccatatcaacaactcgatcgtgtgtacaaaacaagtggtgtgacctaacgaggcaaacttcaaaatacgagagaagcgacgagagaggactgagatattggcacggctcaatcagatgagttagtaaaagatgaactgagtgaaccaggccaatatctgagggacctctcggaaacatagtgtatctgtttt

SEQ ID NO: 39557 - DNA, 582 bp, Arabidopsis thaliana columbia
taattaatatatatgattgccattttaaccatacatatatcaccaccacctagaagactctttagaagagcataccgacgaaaacaaactctatatacatacatatttaattagaacttcaaaaagatggaggaacaattattttagttttagagatgcagagacgtgtcaacatcgtcgtatcgatcaatcccacccatcttcttgtcatctttatttggccactgatgacaaaagcttggcttttcaatggattcagaggtggagtgtgagcataaggagagggataggagctgctgtgacgaagatgtttgagagtttataggtagaaactgaaagaaaccgaaactagtgggttcgctgtaatattgcaagatgttgtcttggtggttaggtttagggtttaggagctctcgttcagctcttaactctcttgctctctgaagttgtctgaatctttcttgaagcaagacgattgaagaatggatcaccatttgttcctttcggtctcttgctattgaactcatgacgtaatgatatgagtcttagagagagtccttgctagggttggggccatgttac

SEQ ID NO: 39558 - DNA, 603 bp, Arabidopsis thaliana columbia
aaaaaaaaaaaacccatgtgtaatctctcctgtgtataccacaaacttcacccaatgtgctattgacaacaatactcgaaaggcaaatagttaaatcccttaccaaagtttctctgcatggttgtacctaattaacaaagaaaataaaatagcattaatcttttgtaatgacacatcaaaactatagagataatttagagaaactaatctccatatggaaaaaacaatttacttgggtcggagagggtatggagctaactcaaccacgtcaagaaaaatctcacgactgcgcaaattttcaccattcatcttttgcagcgcctatagtacaaaatatttgattagttttcgtactttcgaaatacactactttcgaaatgactacaatacttttttatcattactataaactactctcaccttctgtgcttcgttaacagaagcaaactcaacaaagccacagcccacatgctcacccctgtggtttacaataagtcgaacacgaacaacttctgcaacatctttaaaaaacttgatgctgtaaaaatggatgacaaaatatccgtcatgaaaaacttgctcaaagaacgaaagagggggtac

SEQ ID NO: 39559 - DNA, 185 bp, Arabidopsis thaliana columbia
gaggatcacaagtttctagcttcgggcctataatcagatgtgagatcagatagaccggcaagcatcggaaaccagtaatgctctgtcacatcaaaagtttcatcctcattgccaacaacgggcttaataacatcaccgggtataagtccctgagaatcatcatatgccaggcaaatgagcacatg

SEQ ID NO: 39560 - DNA, 466 bp, Arabidopsis thaliana columbia
gaaaaagatttaaaaagaaatcacggatttagttttaaggtttagggtaaagtttattaacaaaaaaataaaaataaaaatagtttagggtaatggatttatggaaaaaaaaaatataaaacaaccaagagagtatatgaggttacaaaatttgattagaaaaataatagcaatttttcatagaatagttccgcatggcatataacagtttgagttttttgaagttttgaattgccaaaatcatacttttttactttcattacaatctaaatactttttcaacaatccatgtacgattttcattaggcatatttatctatggacctatggtcatctcggcattgacacttatcacattatccgatcgtacatgatccatgaattaattaccttaggtcctttgggtccgtgtcccatagaggagtcgaagtggtgcgcagctacacaacggcgaggcaggccatga

SEQ ID NO: 39561 - DNA, 479 bp, Arabidopsis thaliana columbia
atcgatctggagagctttatgacgatcttcctcagtattctatcagcgctgagttgactgatgtggttagttctcagaaattgctaaactaggttcagagctcagatttatttaccatttcatgactcactctaacttccaattggcactgatgcgttttaggtggtgactctgaatgaatttcaattgcagcagattcttattctgttagattatttgcaaaccagccagttgcgtgagaggtaagctttcattagggtagcgataatttttcctcaattcaaactttttttcctcctgagatttagctctattattggatactacagaacgtttttttgaagaactactgattaaagaacgttttaaatggtataggtatgggcggtatcgtccctgctccacttctttatcgaggaaaccacttggatggcagaaactttggtggcactatgcccaaaattcagttttatctgatg

SEQ ID NO: 39562 - DNA, 404 bp, Arabidopsis thaliana columbia
taaactgcttgatctgcctttggtatggcacacctttcatatcacacagcaatgccatgcttatgactgtgaattccgttggagctacgtttcagctttgctacattatcctcttcatcatgcatacagacaagaagaacaaggtttttggattgtttctacttcttactcacacaaacaaattattgtttttttttctaactctaaatcaacattttgatcatggcagatgaagatgcttggtttgctttttgtggtgtttgctgtggttggagtgattgtagctggaagtttgcagatacctgaccagctcacacggtggtactttgtcgggttcttgagctgcggttctcttgtttcaatgtttgcctcgccgttgtttgttattgtaagtcccaaaaaat

SEQ ID NO: 39563 - DNA, 580 bp, Arabidopsis thaliana columbia
tggaaacatgatcgaccttatcttgtagaagatttctttcccctattaagatggtatacttaaaataaaaagtaaatatataattagatttaagttagaggatggatccaagtcagttattctttatatacacgaacctatatatgatacttaaaaagaacaatatacatcattaaaaggaaaatctataccatcatatttggatagaaaccataaggagccgaagattgtgatggtatggatgaatatcctccttgcatcctcacatcctcctatactcaaatttgtatacgaagatttaattaatataaaattacttatactcttgaaaatatttgatttagatagataattagagaaatttagtcaaacttatttcataaaatctaaatattctgaagtatatagcttaggaaatgagtggaaactagcctcgtgaactttacaacaaacataggcgatgacccgacaaaagcaaaacctaagaactcgatcagaatatacgtacatatgtcttaccaacttatggggtcttaatggttcattatacacatatatatcgtgtcttaattaatttgga

SEQ ID NO: 39564 - DNA, 580 bp, Arabidopsis thaliana columbia
gtcaccggcatcgatttatatgaataattctcagagtcctcgaccttcgaattcgaatttgaaatcgaagttacgaatctagagaagatgcacaaatttgaaatcggactatgaaagtgaaacaaccgagtaaaaaactgaagtcacaataatgcatttgacacagaaattcaaacaagtgagattgacacagagctcagatcaatcgctaattgaagacgaaactgtggaatcgatttctagactactttaacgaaatgaaaaatacctttctgagtagaagaagctttcggaaagtgaatgagaatgtaatcgaatcggaatacttcaaattgacttggagagaaacgatatcgaaccgacggtggagtgaataggttgatcggcgtaatgtggccggagaccgttacgcagacggcggcgagacggagagagcggggaaagagacaaacgtaaatgagtgaaataaaaaaaaagctaagcaaaaagtaaaatactaatataaaattgaaattttgatgtggcttttacttggagaaaaccagcggttgtttcacaagtcactgttttggctttttgg

SEQ ID NO: 39565 - DNA, 764 bp, Arabidopsis thaliana columbia
gtttaaaatgttcattattgttagagtgtgaacagtgaaaggtgtctctcggtcaatgatttttttttttttagtcggggaccaaatttttattttctatttcttatgaataatgtacttgatatttctatttattatacttgctattttgggtcaaggtttgaaaaaagccggttcgattgatccaaaatttggagacaatcatgtcacggaccgtccggtatggagaaattgcccatatcgtcggttcggcgggattgggggaccgctttcataatattccgtccggttccgttaaaatgtttattcggcgtgcttagctggcaactgtagcgaaacagctggcatggtcactctcgcacgtggccagcgtcgtcctatatttactattttacccctatatagcgctttcctaatatttctgttttcttcgttctacatccatttattttagtaagctacggaaccatagagtatatatagaaatggtaaatatatcagaacactgattaaattttgataaatgaatatttgtgttattaatccaagaaagaagataaaaattagcaggctttttcgagtgaaatgccagctatgcatcagtaaatgagccttcacttctcttttgctttattttccctatttttctgcttttcttttctgttcttttgccctactctacatataaaaatatgttgtatttcccattttcatgtgcaacgaatataatttttaacttagatcaatgtaagtgtatatatata

SEQ ID NO: 39566 - DNA, 582 bp, Arabidopsis thaliana columbia
tgagttttccccctttaagtacggtatcttttatttttgctaacttaagtacagtatcttttatccatcaatccctatgcatacctacatagaaataaaagaatccaaaggaatcaatttttctttataccagataatttatggaaaatctatttagcatctctagatattggaatccctttctcggaaataaaactaataaagaagaagagacgagaagttagggtagggaggcaggtgttttgtctgtagtgaaaacgatcaaatatcgtgtcgtagcacctccactactttacaccttcaccgggacagacccaaagttaggcataattaagaaccctagcgtcacatgcacgacacgtgctttgcgtgctcggtgcttcattaaatttctctttcgtttgggtctctctaaaaggtagttgaaaactaaagaaaaaaccttttacacttttccataaattcaaactcttaacttttttttgctacactattttaaaagcaattacgtatttgtcatgcatgtgtgtgaaggatatatcatcttgaaaagatccacgtaactatctcacaacatgttga

SEQ ID NO: 39567 - DNA, 516 bp, Arabidopsis thaliana columbia
cctaagtgtgctttgtctttacattttagtatatctagggatgaaatccagtctgtgagactcatccaaagctagagagtgctttgaagttttataccaagggaaacagtttctttgttttgggtgttttattttaagcctttctgatttcaataaggaggagcttttcgtttttttatttctgttcatgattctttactctataaatatgaaagtaaaattataaattgacaagaggatatcaaaaccaaatagttaccttattgtcctgattttcatcatcgtcatcgctttcctcctcatcctcttctccagatgatgagtccgtggcatcataaaactgctcctccatttcttcatctacatattcaccattggggacatcttggaacttggactggacaaccgtggcggaagtttcatacttgaaggctgggtttgctccaatgtactcgttcagacctgatatatcattaacaagaacatgaaacaaaaaccgatttggaacttgtgaca

SEQ ID NO: 39568 - DNA, 503 bp, Arabidopsis thaliana columbia
cttgcatcatttcactgacacactactaaacttgttgttaccttgattttgcacataggagttccaatcttacattcgttttaaataaataacttacatttatcgatgataagttattgcttggtaattttgttgttcttttatttgttgacctgaaacattatttcctttccaggtgatggcttcgcagaaggagatgcagagacaactatcaaatgctgccactggcctatcggaaaagaaagtaaaagactagaagttgcgttagggagaatgattgagaaatccagcaagtcaaatgctgatgctctatgggcccgcatccaggaggagactgttaagaatgaaaaggcattacgtgaccatgcccagcaaattgtgaatgcaacgacaaacttcatgagcaaggagttaaatgccatgtttgagaaaacgataaagaaagaattggctgcaattggtccagcctagcacgttcagtagtccagttattgaaaaactgt

SEQ ID NO: 39569 - DNA, 518 bp, Arabidopsis thaliana columbia
cttggcttctccagctcctcttcaggttttgtctcgagcacttgttttcctctgttgacttcctttgacaaacatgcactcttagatttctgctatatggaggcctctttgatgatccagttcttatttaaactcatggtaaaaacatgctcagcatgtagcagttatggacatccagcaattagcacgtgactgtattgtggcaacgctttttgatggatcaaatgagtttgctggtggaagttctgaagttcattatgcattacgtggaagatttgagggtagattgcagcatttattcacatgctcaagttttgtctactatgtctgggcttgtacaatactaatacttcggtattgtgctgttgatggcccaggattgcttcagcagcttctctctttgaaattggaatgaaccagaacttatgaaagtgcatgtccactatctggatgcaatggggccctttctcaagtattttccagatgcagttggaagtctcagcaatacattatttgag

SEQ ID NO: 39570 - DNA, 581 bp, Arabidopsis thaliana columbia
tcctataaaactaaaatgttgcgacgggctttctcgaccagacttagttaaaatccgccacgatcagtgttgctgattcagcatgtgggccggcccatggttatctgttagtaaagcttccacgtaatctaagaaaacaaaaaatgagccgcatggattaagaagataatgtacactttcaaatatatgatgaattattttcaattttgtgacaataaaataggttattatcaattctgagacagtttaaatgttacgataccttttatctgtatcttagataaacatgattcaacagatttaatatttcaatagcaaattttatttatgagaggttttaataagagcacaatggtttgtcagcattaagaagacaagctcattaagaggcaagagtaagaccaaagatatcattagccaggaatcatgatttaatgttcgttctttgaacttgactcttttttatttgttaatgcattgaataagcattattgaactgcgattttcggttaaatagtacatgaatcatgacataatgacaatggttatcgaataagcaagattttggtttgattatatat

SEQ ID NO: 39571 - DNA, 626 bp, Arabidopsis thaliana
cccaacagcagcaacatcatcaagaccatcagatttttggtattaatcctttgtctcttaacccatggcccaatacttccctcgggtttgggctttcaggttcggcttttcccgacccgtttcaagttaccggcggcggagattccaacgatcctggctttccttttcctaacttagaccaccgacacgccaagaacaccggcggtgggttcaggttatctgatttcggcggtggaaccggcggcggcgagtttgagtccgacgagtggatggagactcttatcagcggtggagactccgttgcagacggtcctgattgtgacacctggcatgataatcccgattacgtaatctacggtcctgatccattcgatacttacccgagtcgactcagtgtccaaccgtcagatctaaaccgagtcattgacacgtcgagtccgcttcctccgccgaccttgtggcctccttcttcgccattatcgattcctccgcttactcatgagtcaccaaccaaagaagatccagagactaacgactccgaagacgatgacttcgacctagaaccacctctcctcaaagctatatacgactgatcacggatctcagactctgaccctaacgaagct

SEQ ID NO: 39572 - DNA, 1302 bp, Arabidopsis thaliana
tccaacaccgactctaagatcctccacctcgagatcccaagacaaacctcagctcacagctaacaatggagactacaacgaagacctagagctgctaaaaatgtcccctcacgctacttatccccttctccttcacattccacgacgacgacgacgaccactgctacatctactgtcacttcgtcttcttcgtctgtgatactgaggtctagtaagcgatatccttcccctttgctctctcgcacgacgaattctgcttctaatttggtttatacgccttcctcgttacctaaacggtctcaatcggtggaccgtcgtcgtccgtcggcagtttctgacacccgaacggaaatgtcggcggcgacgaagatgcttatcacttctacgaggagtttatctgtttcctttcaaggagaggcgttttcgtttccgattagtaagaagaaggagactgccacgccggtttctcaccggaaatgtactccggagcggcggagagcgacacctgttcgagatcagcgggagaattcaaagccggtggatcagcaactgtggcctggtgcttctcggaggggaagttctgaatctgttgtgccgaattcgctttctagaagcgtggattctgacagtgatgatgggaggaagcttggatctggctttgtgggaaggtcaatgttgcagcattcgcagagttctagggtttctggtgatgggagattgaatttaggttttgtaggaggtgatggaatgttggaaatgagagatgagaacaaggcaagacaaagcacacatccaagattggcttctagcgtttcgtgtgactttactgcatctgatactgatagtgtttcatctggtagtactaatggtgcgcatgaatgtggttctggtgaggtttctaaaacaaggagcttgccgcgtaatggtatggcttctactaaattctggcaagagactaatagcaggttaaggcggatgcaggatcctggctcacctcaatgttctagcccaagttcgagaatcagtagtatctcatcaaagttcagtcaatcgaaacggttctctagtgatagtccgttgacatcatctcctcgtggtatgacttctccaataaggggtgctactcgccctgcttcaccaagtaagctttgggcaacagctacatcagctccagctaggacatcatctagtccttctcgagtgagaaatggagtttctgaacaaatgaatgcttataaccgcaccttgccttcaattctttgtttctctgctgatattaggaggggtaaaattgggaggatc

SEQ ID NO: 39573 - DNA, 469 bp, Arabidopsis thaliana columbia
tacccgcactaatgcacttgatcctatcagaacaccacagttaagcgtgctttgggagagtagtactaggatgggtgacctccagaaaagtcttcgtgttgcatccctctttttttcggtttttctcttttttttttggtaaaaaaggaataacccaaaaactttaaaacggtaaggcaaaattgggaaggggaaaccttttggaaaggccaaagaaaactctccgaagaattagggaagggaaaagggaatcccctaatggattttttcccaacccaaaatttggacctaaaggaacttttaagggaattttggtggccttggcaaaatttgggggggacaataaaaggtcgggcaatggtttcccaaaatttggaaggaaccaagagcctaaaaataaggaagggtaatcccaaaaagccggtggggcccagggaaatggatccttaaatcctccaaaaaggattgg

SEQ ID NO: 39574 - DNA, 565 bp, Arabidopsis thaliana columbia
tataaaatctgcaccctcctctatggccctctgcaatcaaaaaaaccttgtgaaaccagacaaaattagtgtaaaggtaagagacttttgtatagatccaataccatatatgcaggagcagtttcttcagggagctctccgtttgatcctctgtgtgcaaggttgtaaggacgggaagtctgaagtggtttcttggttgcatgttttgcttcgcttgggagacgatacaaaggccttgaggcacaattagcaaccaacaatgacagtaaaagcaatggtagaagatctgcaaaaattataacaaaaattgctttaaacgaagaatcaacttagacatagaaacaatggagatttgacacttacacttgaaggccatgactgaatttgagctagaaaaattcctccaacgaccacactgcatgaatccaacattatatagatagacctgcaacttatctttagaagatttagccaaaaaatcgtaacaacccaatcagcattaagaatattcctctgagaaatctagtatgccaatagaagataactccgtgttgtttgaaagtat

SEQ ID NO: 39575 - DNA, 531 bp, Arabidopsis thaliana columbia
ccacactggactttaattggataaattactccataaaaacaaaatgcaccagatagtttttttataagaaaaacaaaaaaggtacattccagggaatataccttatgattctcaaggattattgcgccgcgagcactcggccacgtacgaaagcgttttggatgccgttaaagaactttccgtaaaaagaacgtacgaaaatatcataatgccttcaatttatctttcgagaatttgttctaatttgttctaattttccaaaacattgaaattttctcacggaatataaaacattaatatatgaattaatgtttttccaaagcatacgtaagcctcgctataccgttgcccattccgaagttgcgtatcaaaacgcaaaaggattacagtgaattaacaatacgagaagaccgttcatgagagtgagtatacgcacattttcaattgaagttattggagttgttaattagttgcatgcatctaacgatctaagtctccgattttgacgtacaaagatttcgtccattattg

SEQ ID NO: 39576 - DNA, 606 bp, Arabidopsis thaliana columbia
gtgttgggactttaaaataattgaggcccagttgtgttatatgattgattggcccatatctgttgacattaattttgtttacttcaagaaactctaattctaggcgaacactatcgtcacttcttatttactgcattcgcatatgttattctctttcagacttcaggaaaccaaaagtcgtttgtatcaatggatcgttcaacttttcccccttcttcgtcagtccctggtaaccaaacccctccatcacccatgcctccttctccaataacttcgtggagtcggcactatctaagtaggtctaatagagatgtgggattccgattctgtcgtcaaattcctcaaggtgctgttgaaccgacctatgtgtggaacaggttaacagttgatggggatggaccatcctttcagcctgaaggccgagatttcgttcctggatctgttctattcccggaggattttatgtccagtgcctcccaacaggattgcgagcagctacttcattggcatgatctggttagttttgacttttatcatctacttaagtttctatatgtatttaggttttgaatcaacgttcggcgtatttgctatatggatttagag

SEQ ID NO: 39577 - DNA, 482 bp, Arabidopsis thaliana columbia
agcacaaaattatggagagaatcagggtaagaaaatgatacatatacagaaaacattcaggccagaaagcgagctaaactcttgataacaaatatgggcatcacaagctctcaggaaacaaaagctacaacacctataagagatttaatggactcttctaattcaaaaatcccaaagaccagaaactctgaaaattctccatacaaaccttcgaattcgccaaatttctatctcttttcgcagcttcagcgattaaaccaatatgatccaccaaatcattctgcgatggcttcacatcatatgacctagaaacaacatccaatcactaaagttaaaaaccaaaagaatgaaaactcccagagagaagaacaaaagacctgaaaagcacaaatcaatcacctcaaacttctagttaatttctcccagagagctttctcggacgcttggggattcctctaaggaactgaatggaatgcaacgtg

SEQ ID NO: 39578 - DNA, 510 bp, Arabidopsis thaliana columbia
tgtctcttgaagaaaggaagaagatctagatctacgatggtgaaaaatcttcatctgaggcagtgaagaaccggttgaagactgcctctgccaagaaggatacgaccagaactggtgctaagaatggcggagacaaaagatccaaacatcaagaacccaaggatgaggagattaagctttaaaaatctagatctagaaaactagaattgattccgttggaagaaaaatcatagatgtgccaaaggaaagagataaaacaaagaaagagaaagagtttcaccggctccggtgctgtggaagccaccgaaaccggaaaaacctaggcggcacgtccttttgtttttagagagaagggagaggatttttaggtctagagagataatgggccttttgataataatactcatttaaaaagtgactttagatcccttgttttttgtagtgggttcctatttgtatttatactacaagatttttgttttaaatagataaactaaccctaagaaatga

SEQ ID NO: 39579 - DNA, 700 bp, Arabidopsis thaliana columbia
ccgtaatttttggtattcatatatttccgattgtagctgtaattaacaacaacatataacttagattgtatagagataatattcttttcttggcctatgctctggactctcttccttcgcatatgtcgtgtgaataggcatggaatagaatcatcctctcgcatatgccaccccttcgtagctgtccctaattataatcacactattagtaattctctaattacgtcctgaactcataatatatacacataacatgtttcttacattattttatggagatcagtattagttttattttttttaataatgaagtagatatgtggatattctttggaccattaataatataaaaccataccaagcaagttggagttgcaatttttttttttcttgaccaacccaagaatcaaatccttctccgttgtaaacgctttaatatatttttttattttttgatattttccgccgttatcctccacaattatcgtttactaattagaatagttagctctaaagtaaactaattagcgacctcttattagggcacaactgcgataacagaaaactaatatgctttcgaataatacgactaattaaagatatgtgtgttataagcttacaactatgtccgataaaatcacaactctaaccaatagaactaagtaaacaaagttaatttagaaagtagttgaaaaatcag

SEQ ID NO: 39580 - DNA, 1099 bp, Arabidopsis thaliana columbia
  unsure (1)..(1099): unsure at all n locations
tttataatcattgatgttactttaattttcatttaatatgaatattaaacgtagtagctatatcattgggttggaattaatgactgagaaagaatgaatgaaagagagaaacgtgtactcgcagtagaccatataaccattggtgaacaattttatttggaatcgtatccataaatatcatttttatactagtacgcttgcttttacgactactataccttgtgtgggcggaccaacaatttaagaagggggtgtgggtgtaactggcccggtaaaccataattttgttttggccatgtacaaaatgagtttttggcatacggtgttttgttgtatttgaagatcccactcaatatcatttttttttccccaatttgattaatcatttgctttcttgaaagattattttccttataaggataagaataaacagtttcctttttcatggaacaaatttttcatgtttcaaagatattttcattttgtctgaagtatcaaaacagttttacattattatttgtctttttctgttcaaaaaatttaagcaaattagtatataataaataaacagatttgtgtatagtattgaaacctatatccatgagcaaatgtgtggtatataaattagataacaattcttttttgacatcatataaattaaataacattgaatttgaaattaatcacatttttaaaatgtgattgtacgttatttattctttaaaattatgaatactaattaaccaatatatgtcatcgaaataactcaaaatattgtaaagaaaactatttgcattttacatatagatatcttgtaaagttaattacgatatccatagaaatgttatacaatctttgactaaaaacgaaagaaagaattctaataattaataacctttggtgtttttaatgagagacgtggactctctcggtagaaataatacaatgattaacatacaaatttgtaactatcattagccgtcactcgccacccctcgataggacctatatacacttatacacaacactagccacacacatcctcaagcgatacaccacaaacaaacaacaaacganaaaaaaagaagagagagagaga

SEQ ID NO: 39581 - DNA, 573 bp, Arabidopsis thaliana columbia
ggcattggatgaatcaatcatttgattctggcaatttcagcaacggttatcttctctgacaacaaaggactctataacatagtacagaacatgctggctacactaagaaagagagcaaagatatagaaacctagttacaggtacgaaatattcccaaacgcagaggaaccacagatattggcaagcatagcatgttcacagtaacgaaaaacatctaatcaatcagtcaaggtctcattcccaacattccacatgccagtgtttattccttatcttttcgaagctccaaacaacgtagagaagttacatagaaagaacatggtaaaagatctagaaactacaaagtaaggtaagaagattagtagattacattcatccacaaccacaagttcactgtttcaaacaattagattgctcacagatgatctcaacctcaggtaacaatgacatcaatgtgaaaggtttagcctttcagttttcaagcctagctcgattacgatgcaagtgaataagatctctcattattcacactaacgattatgtaatcaacaagagcgttgtagtgaacaaaag

SEQ ID NO: 39582 - DNA, 270 bp, Arabidopsis thaliana columbia
gtacttagaagatttcgtatcttggtttatataggatatcacgggtattacggtcttgggaagcactacttcgggtgtctactttcatacacatcggccctttgattgtagaatccgccgtgcctatgcatactgaaatcgtttattgacactagctagtacaacattattatgattattctcggtaagatgtggagtattacctcactagtctactactatgatacgttctcttatgtgatcctctaggttatgctcacactagttgtg

SEQ ID NO: 39583 - DNA, 1257 bp, Arabidopsis thaliana columbia
agcattgttctcttggtacctgtttgtgtacgtaaggagaaatgtttcttcacaaatagaaccaaacattcgcacatcccttttcatatatgcaaaaaccaaatcttcttcttcttgatttgcaggagagatcgtcttcacatcacttgtatattgctttctaatcagagcacacgagggctgcaagtggttccattgattgttccaaaatcccattgcattagttgttttccccctataggagaagattccaccgcgaatcttgatcaggatggtgttgaatacattaacgtgttcagagacatagctaaacgtgtttgcaaattcggcccaacaacacttttcttcccaacgtttactgtcacccaagacacaaagccatatcttcttgaacattccgtgtgtgatcttcggtagagtatgtgatgatgagttaatatccaagctgagagcatgtaacttcaacatcaatgcaagaacaagcgcatttgtagtctccttacccaccaagaaacgaacatttgtagagaaacaagccactacgaagcttaactttccacaagtcaacagttttcttgattcgcaagcaacttcactccaacaaataaaagacgcccgagactctcttgaaatcgatgtagtcgggaagactaacaccatccaaaaaacatgatgaagcagcacaaaaatcacatgaaccattgatgactccatgttgacgagaacctggtggtgatgcaaaatatggacttttgacaagccaccaatcataactacaccgccaaaagaacccacaacaaccaaaaggtgatatttttcaccatcagtgtgctcctcatatagttccccagagttgttgttaccgcaatataacaaactatccttccatctacgacaagtcatgactcgaattgagaaccccatagaagacctcaaaacatgcatgagaaaaccacctatgactttggatttgatcttgtaattccctctctctgcacatatatatattcaggaatagagagatcacctagtggccgctgacggcgtagtatcaacgagtcttcttgtgaggaactatcccaccaatactggctcattctgctccgaagtgatgcgatcaacgctgccacttgactgcaccattccatctcttcttgacattggtgattgatcgaggatgatgtctcttgtactaaatcatggcaacgcttagtatcaaatacgttactccggccactttttggctcgtggcgcaca

SEQ ID NO: 39584 - DNA, 493 bp, Arabidopsis thaliana
taaccaaatctttggattcactttaacacaacaaccaaaaacaaatctttggttcatatacatagcaatgctttaacaatgctcataactcttgaattattttgctacatataacatgataatgaatgtctatttaaagggcaatatcagtctaagacgtacttctacagtcatagacaatatcttccgtttcgtacaagcaggatccgattattgggtggaatgccttgtgatgtgggttatcaacccacccttagtacagacatgggtactaacttccaatttgggttgaaacagagagggtttagggatgatgttcatcagagacccgcacattgggtctccggagtttgctgctacaactccaatttctttgttggagtttgcttcttcttccgggaaagcaactgagtcaccatttaagctgtcaacaatctcgtcaatcttcataaactggtatgccacttgctgttgtcagaactgcctcagacga

SEQ ID NO: 39585 - DNA, 443 bp, Arabidopsis thaliana columbia
atccccccaaaccgtgacgctcctctcacaagctccacaaacaaaatcttccgtatctatgttacagcggcggggatcgtcgggcttatcattccgatctgttacatcttcgaaggaatcgttgaggatgataagaacggtgttagcgcactgcaccgcacgtgtttcttttagcgagtcagatttttatggaaggattagcgaccatgtttggcttctctgctccggcgaggattcttgttccgattgtttacaacgccaggagggttttgactcttgtggagtggattatgagtgagttctcgagggaggatgtgacggggacggtttctgcgcggcggatgtatgccgggaaagttttggcggcggctaatttagggatttggtcgtttaatctccttggggttttgattccggtttaccacccagagcgtttaagaggt

SEQ ID NO: 39586 - DNA, 524 bp, Arabidopsis thaliana columbia
aatgtcactaggtttgtttctcaaacatcaaaaccaacattacttctactgtctattttgtccaatactgaactggtttgacaatgatcattcaagtactagagcttattccggcagtcgagagactcacagttacaacatagagacttgatcaggccttaatagcgtcagctctaggtttccatagccctaacctgtatttctggccatacttcagtatcagtttcctctgcaaaaccaaaattcagaactgtgagatccataaggtaggagacttgaataactgagccaacagaacatatatagtataaggcggtgttattccataaccccatcaacgtttatgtgacaaaataatatcaggatatatatgataaagttggataatgaaaataagaatacagatatatccatcccttcaaagttgaagagcttaaatcattaaccctcgaacaaattcaattttaatggactacctaaccccctaagaacattggcatacaattatggtttcagatagttta

SEQ ID NO: 39587 - DNA, 599 bp, Arabidopsis thaliana columbia
tcttatcgaaccaataacgattctgacgtcattcctgacatataatgatattcctatatttatcacctacccacgtatatcttttgtctatagcaagaatttactacttggggaacaagttatcaaatactacttttctaagaaaagaaaaactactagttgcaattttattccaaacattgatgtgagagtgactacaccattaataaatcgtgtgaggcgctattcagatttttcatttttcgatgaagtgtggatttgttttgtcatttttattgtaagtttttgttttggtgcacataaatatttaatttctattaatttaaaatatctgctgaatgacactaattattggactcattaattcactcgatagattattgacatttttttcagtaggcgtagtagacctttttccgggggaagaaaaaaagtttaagcggttcgatcccactaaccttttggagaatcgtgtcacgtgtcgaatagacccaaatcctttacctacatgtttgaactgtataaattccgacgtaaataagcgatctgaccggccgagacccgaactatggattttgaattggaacccacctcaaatt

SEQ ID NO: 39588 - DNA, 466 bp, Arabidopsis thaliana columbia
tgaatgttatggtaaaagttgagaaaacgactctatttttaaaacggacaacaaactatcgcagaataaatttgtctcaacgtaaaagcggtccgtagttagtccgccgcagatttgttatacttttttcagtccgtactactacagattataatttatgaatgtcaaacaaaaaacggccaaaccgcaaactgatttgtttgctttaaccgcttcaaacattcgataccttttatataataagatcttaccgttaccaacaaaaaatacaaaattaagttgaaacaatttacaaaaagaaaaacaaaaacatatattaatcgcatacacttctaactgaaaatgaaaactcaaataaataatactaaaaaatataatttaatttatttcatatttctaattggaaagaaaattgaaataaatcaaagaaatattaaattaaatcagcacgtttatataatttagt

SEQ ID NO: 39589 - DNA, 268 bp, Arabidopsis thaliana columbia
agaggcgagaagaagaattgtaactcaccgaagaaaatgttgtcggcgagaatgacgacggtgataaggcgaacatttagggagtctccacacctacgggagatttatcgaagggatttgattattattcttgggtgaacgagttttaagaaccggacgagtcaaggtacgagtaatcacatatctttagacaacaactttgacacaaagcctataaagcttagattaataaaagcccatagattgcaaatatgaaagaccctaagaa

SEQ ID NO: 39590 - DNA, 234 bp, Arabidopsis thaliana columbia
tccccgtagagaaagcactaaactttttgcttagagaaagaaaagaaactctttattaacaaagataggaataacatataactctgatctagacatgctgaatttatcatttcattcatggtgcatattctaatgttgttaaaagtaaaatatttcgcattagtaaggttaacacagacaatagcaaaggcatatcatcatatcattgttatattatatatagtggtttaaaat

SEQ ID NO: 39591 - DNA, 552 bp, Arabidopsis thaliana columbia
gtatgctaacaacagttgcgtgtgttcccgattggaccaccttctttccttggatgttgtttgcagtggcagtttctccacttcctgtagtcccgaccaggtctatggtttgaattggatgtgactccgatgtcaaaccatccatcttcggatcttcagccatctgtacaaagtctctgcactccgttcgtttgttacataattcgaacaaacaatgatcaatcaaaataaggatcaccattgcaaaatcttatcaaatcagctttccagattctatgaataataagagtgacattgaaatatataaaaaattaagaagatggtaagtgacattcccgtgggaagatgctagttattcatggccaagcttttatagatttaagaaaccttatcgaaaaaaatagagaagaaaatgtaggataaggaagaagatacctgttattgaaatgggagaaacgttgttttgtagcttcatcctcccattcaactatttttacacttgccctcaattatcgttcaacttgattcctatagtcgctcagagttgaatgg

SEQ ID NO: 39592 - DNA, 915 bp, Arabidopsis thaliana columbia
ttctcgttcacttcttcaccgcttctcaacatcgattccacctccgtagaataaaccctagaaagctcctcctctgtatccttcaacttcttctcgtaactatcgtgcacttcatccaaccgcacaaccccggcataaatctccgactccttcgctgcttcctccggcgagacgaatccataatttgagcgatcttgaatcgagcagaggaaaccgctaagggatcaggtcgagagccgagagagttgaagacgaaaagcgtctgtgtgatcgttgtggggatggattgagtcaacatagacatgatttctggattggagagaagaggaaaagaaggaaggagagtttcttgcgcggccatagacggcggcgcgtggagattggagtcatgttgatgaaggacgtaagagagtaaagggaatttgtcgagatcgtgatccatggtttttgtgattattagtcaaaggtaattggagattaagagaggttttagtaaaggtatgttcatggttgaacaagtcagaaacattgaagttgatgttgccatgtttgtgagcacaagtctagttgggttgaaaagtgtcgaagttgaccgaggaaatttactaggttcccatggttaaggccatcggaccatcttttttggataatcgattcaaagaccaatcctgtccagttaatgtaataggatatatggcattaacaacgagattatgatatcttataagttaggggaattgtccgcataggaaaaaaacaaccgttaatcgtttgaacattgatctaaaagacttggtccgtgaaaccaatgtggtttttgagctacattcttcaattacacttgatcgtttctaatatttttgggttcaactcggaagcacttctatcttacatcatatgtgtttcatattttct

SEQ ID NO: 39593 - DNA, 525 bp, Arabidopsis thaliana columbia
ctctagttttcaaccatataataatgaacattttacatagaaaaagatggataggatgaggaagaaaatgaggaagatgaaagggaagaagaagaagaagagtgtagcgaagaagcggacagtgaaaataacaatgacaacggctattaaaaattaaaaaagaagatgacaaaaagaaatatgaagagaatacaaaaataagtgatggcagcaatttgaatataagaaaacaatattgattcgtgattcttttaatcagatttaattcttaagcactataatttttataattttagaatttcgtatttgaaaaaaaaaatctttaatagaaattaaaaaaataaagaccaacctatgatagttacataagataatatttaataacaattatcactcaaatataatttcatcaaaatatatcaaataaactcaaaacctagttaatgttaataatccagcctaaatgaagagtcattgcaatttgtaaaccgataaaaactctctctcacgcttccaactgcgatt

SEQ ID NO: 39594 - DNA, 736 bp, Arabidopsis thaliana columbia
tggtatagtacgcagtataagttataactttgttgcatttgtgtgttggtatcatttcgcaggaggagctttcagattcagactcagaacatgagatggtaaacatagttagtactttaaacctatactatagcaaagccaagaaagagatggttggaagttttggcctctgagacactattttttggatgtggacgacgcagaggcagtgaaacttggtggtggagaatggaagcaattagagatgcaaaaaggagacacttttatatttttcattcggaactctatttgtttttcaaattacaatagaacagcaaaaagtctttttttttttgttcataacatagtagcaacacctttgttatatacacttatttccaataaaaattgattcttttaaagttcaagtcaaaaacaacaaatttctctagcagcactatcatggtgaaaactatatattatacaagtagcaatatttattattacaaaacaaaaataactttagcaagaaaacgcggatcaggcccaaaagcccacgcattatccacggagttttgtttactctctcttatcttcttcttttttgttttcctatttattctcagcagacacattctctttccctcacttgtcttcttttttcctaattcaagaaaccatataatcttttcctgtgtatttttttacaaatgcctcaaagaaacaaaatttacaagatcaagaatgtataacgaat

SEQ ID NO: 39595 - DNA, 480 bp, Arabidopsis thaliana columbia
aagaaaacaaataagttgaatgataaaagggtgagtttaaaatatatacatggataaacaataaattaagaatttatacataaaaaactattatttaggtaaataggaaagagaaataaaatataaaccaaaattatctttcttttttagattaattacagaaatatcatcgattcaaaataactttaatatttgtaaataagtatataactatttgtttaacaaggtaacatatataataacgtgataaatttacatattatatgttaaacaaatatttatcaatttaaaattatggataagtatttttatttatatatatatatataaacacaataggatacatcatgttacataattaacatgataacgattataacaacatgttacatagaataatagcatgctggtatgatcatcgatatatgaataatatttatttgaacgtactaatgtttcatttaacgtacgaatgttttt

SEQ ID NO: 39596 - DNA, 660 bp, Arabidopsis thaliana columbia
gggtaccgaacttattagcaaaatttcacggagttccaataaagaaaaacatttcttgatctagtaaacaaaacatggccatacattagattcattgattcttgataagagaaattgtatctaatggcaaagatatcttgatgattttaaatgctattttcttaagaaaattttcaaatatgatatgaaaccaaagatcacatacaatctaattttagtggttaaaaaaacaaaatcaaattaaccaatttaaacaacaatttataatgattgtggtcctcagtttacaaacttttccaaattgagtaaggctattacattttggtaacaaagggggcacggcacctcaactttccaagaaatttgtatttttatgtgctattcaaacactacattacggattcctctttctttttcatgggaactacattacaaaaatccgacaaaactgatagaattattaaattcacttgtcgtaagatgtgagttattaccaaaatttcacggagttccaataaagaaaaacatttcttgatctagtaaacaaaacatggccatacattagattcattgattcttggtaagagaaattgtacatttatatgtcatttgcctcgtcttcactttgagtaacaatggcagcaatgatcaacgttgaat

SEQ ID NO: 39597 - DNA, 771 bp, Arabidopsis thaliana columbia
  unsure (1)..(771): unsure at all n locations
taaattctcatagaaaaatgatgagaccaaaattcccaatctggccgaagattcccacattcctgtttttgcattattagtaagctacacattagttattgacaaaaaaaaaaaaaaaaaaaagtaagccacacattagtttttttttttccatgaatgctttattacctaggtagtggtgttacagttaaataaaaatcatcatcggttgacaatatctgaaggcaacgtaatgttcaaattcaaatttgacgagcagaaaccaatttcttttagaactttcacgcttgaataagactacatatctaataaactaagtattttatgttagggaatttatatgtgaatgcatcatgaatttatattatattttaaagctgaaaatcttgatttatcgatcattcatatatcaagaataagaccacataacaattgttactcgtttaggcgtttaccatctattttcaaacttaaattagttttcataattcgttatatattattttatcagcgggcctcgctggtgtttaatatttagttaaagtcaacttctgggcctcgctggtgatgggcttcatagtccgaaactatgaccaaacttgctaaagcaggtaaaccaaactgacaaagacattgtagcccgcttaaccggtccaatttagcattgtaacagaaaatgtcatttttgcagtcccaaaattatgaacacaattcatacaaaaaaaaaaaatcttcaaaacaagaaacaanaaaaaatgaatatgagggata

SEQ ID NO: 39598 - DNA, 594 bp, Arabidopsis thaliana columbia
tcatgtagaagacaatcagaatccatgactctgagtatgaacacagctcaagctcgaatctttatacttatatgagagattagatgcatcaccttgaagacggatcttctaagagaacgttggttttcaattgaaactgagacagcaccagcctgtatagaagaaatttaaactccatcagattaaaactcctttctgataacaaatgaaactcaaatacaggatcactaagaaaagatcgttaatcgaattaaagacaagcctaaacccagattaaagatcaataaaacctcaaatcaataaagtttttaaaaattccctcgttttctccgaaaacagacaaatggaacattaagacccaaatcaaacccctaaacaaaacagaggattcgaaactctccagctataatcactataatcaagaagatataaaatccaatcgttgactaaaaaaataaggaaatgtgtggaggatctgacctgagaaacagcagagtgagacattgttatcgatctgagaaaggattattagtctcgtcggaacctgattagagcaatcaataatgagaggaagatgatgatgactctagggtt

SEQ ID NO: 39599 - DNA, 623 bp, Arabidopsis thaliana columbia
atgatgctgttatgataagtctccgataacgaatcagacagcttctcaaaacagattgaacaagactcatcggaatccatggacggttccacagtttgttcctcaagcaatctctgaaacacatccaccggagcaccactcgacggagcagaaacaggggatacgataaaccgaacctctttgatgactctcactttcaccgtcatgagaaaaggtctttgatagagagtgtaattagcacgcgaaaatcgaagagaagagattttctcagccaaagattcacaaatagaagtatcacggtgaagttgacgacgaaggagacgggagagctgttctggtaggaagctacgtggcttcaggagaacatgagagattggcgacagtgatgccaccacgggtgttgttccagtaacatcttcgagcatctcatggattacttcgtgtagttcgatttggacagcacttgtgaaccctagattcgaaggtagcttcgacatcctcgtagccacttgtagtctcaaagtttcggtttccatggtgtagaagaagaagaatgatcaaaaccctagtttcgttcgtttgcgacaagaaagagagaacacgaaattaaacaaagagagatc

SEQ ID NO: 39600 - DNA, 484 bp, Arabidopsis thaliana columbia
agatccccatctggttccgagtttgatatagagtgggcaaaagagattatttgcttaatgcatgatactactgaaatgaactccgactctggctccggcatcgtttgtaaatcttgagtactaatgagagacattagttgtttcataagtgatatgaatgatttaaattttggcaactcctccggcccaccccgcaactccaactccgcatttgtcttaatcgcaaagattgagtatatttgagaaaggagtgatatgaactttgactcttgctctggatccatctccggcttcggttttggctctggatctggcaagataaagagggagtatatttgatcgatggttgatataagctttggcatcggctcacggttgcatgtttcagagaacatgtacatgaactctggatccgcactcagcgtgttggtcgattaagacagcaggacggtggtcatggaagtcgaaatccgctaaggagtgt

SEQ ID NO: 39601 - DNA, 549 bp, Arabidopsis thaliana columbia
taccattagtggttggtggtaaatttgaaattttgtcttacatgctttgtttgttcagaaagacagaaaccatgaagcattttcctaaggtataagaacattatcgtaaatctgttttctagttacacagaaacaaactttcctctatcattattttatcactcagcaaacttaaatcattgaagtgaaaagacaaattgatcaacctcatttgtaaaatctattcacaatatatatgtataaattattagttaccgaatcttattggtactctttcaaatattaacaaatatacgatgatggagtacaacataatatatgattttttgaaaagagtataaataagtgaaaaagaggaaagaaaagaagatatgaaaacccatcaaaagttaaaaaaatttctttttgtcaaatgtataaataattgaaaagaataggcaagtcaagtgctctctctcccacacccatcgattcctctcggacactgccccaatctctctctctctttcgacaaagaaaaagtcagcgccgtcctttacgccatagttt

SEQ ID NO: 39602 - DNA, 783 bp, Arabidopsis thaliana columbia
taagttatgttacaaaacaccataatcattatatttacttcttttttttttctcgaaacctattaaacttactatttatgtgtaatggttgccaaaattcagaattaaccgagattgactagtgctgataaaaaactatattatttatttttaaacacataattaaatacatttctccaacacaaatattttatatactattgaaaatgttttaaccaaataaaaataatatttactctcttttaaatattcaaaactctagctattttaacatatcattttgtaagaaaattatatgaaactcaaaaatcacaataactcagtgaataaaattaaattaaaagagctactcacttatgactatgaagagtcatgctcatgaacaaaagaattaaaaaaagaaaacacgtgctaatgcttctcctcctcctcctccacatcgccgggttttcctcttcctcccccgtgaaaactgcatttatatcaattcttcagattccccaaaccctaaattctctctctctcccaatttttctccgtcgttttccccaaatttcctctcttttttatgtcttcaaacttcaaatccaatcttcttctctctccagctcattgactcaaccaaatctagatcaaagtttgaatttttaaaacctttcttttttttgtcgcttccttccaaaaaaaaaaacgtttctttttctttcttcttcttcttcctctgcatctgaaagtttgtatttttcctgggtttctcctttcttggtttgaatagcaaaaggg

SEQ ID NO: 39603 - DNA, 771 bp, Arabidopsis thaliana columbia
ttcataattccagaagacaacctcatacttacagaagctttctagtccaagctcaagccagcagggtaagagatctggagtttgattgtttttaaacttgtatttgtagtcaacagaagctctcttatcatcattttttattattatattaaactctagtgttattaagacatgaactatttataattttatttattaaaaataattgcagaatataaaaattttgaataccaaatattctctacgagtttataattttttacaaccgaataaaataaaaacagaatctaggaaaataaaattttcccaagtgtaataacagtatttaccactagaatagaaaaatttactaaaggttaaaaataattatttttctaagctttatcattatctataaacaagtttccaaaaatattttttactgttcaatcaaccaaacactagttataatagtttcttaaaaacaattcaacacaagttaatgtaataaaatcattcttttaaaaatcattgagagttctttgtaaattcttaaatcaatatgcgttaagttatcatcttaaaagtaaaaataaaactaattgtacatctaaagatatactgaatttaagaatatttttatggaaaacagtttgttcatttaactattatggatatggatcactttcacaatgaagtatttttaacaatcaaatttctctcccagtgtgtggtagggaatataacctggtatacataagtgcaaggaaatagacattattacacaaaata

SEQ ID NO: 39604 - DNA, 558 bp, Arabidopsis thaliana columbia
tgcactctccttcttctccgcttctctgctgctgcttcgcctcccgcttcttccgtgtttcctttatcctcgtcacattcgtcgttctgccgtcaagattaacgccgttatccttctcgaatccgacggcgttagattgtccaaatgttttagatttctccgttttcttgaaaggacctcccagggaaagacatagctcgagctcgagctcgacctccacattctcatcttctacaaacttttctgccattgataaagattcaacaaacatataatgtcaaaaagatggtctcttgtcttccgcaaaattttcctcttgaagggttttgaagcttcgccaactttgttgtatgagaaaggaatattataaggggcggagataatttaaaaacagaatggtaaaggcttcggaacatgacacatgtccgataaggatagtggacatgggcggtttcaaaattcactaagagaaaggttaagaaactttattagcgctacaatttcggattatcgataaacgctttccatttattttgttggtttctatttccattggtt

SEQ ID NO: 39605 - DNA, 719 bp, Arabidopsis thaliana columbia
tgtcttggatccggtgatgattgccaagactgacacctgtcattattagggtttaggctacatcaccttgtattcaatataaaaggactctatgatgtaatgtgaaacctaagtcgaaatataagaaagagaagttctctatatttcagattacgttcaatcatgtcgtccagttgtgcagactgcttctgaaattgataactttagcttgtttcctcggtgccatttgctgaatgtatgaaacaaaagagtaaaaaatagttttcaactgaagcaaaacagaactgaagcaagtaaataaacacacaattcaattacttaagagagaacacacaccaaaaatgaaacagtgaaacaaatatgaacagtgtaaaaagttactaattaagcaagaacacacacattcacttaataaactatgagactattcacactcaattacggaaataagaacctagcaaatttctcactccacactatcaggttcaagcacaagtaaagtcaaaggtgttttttttttttttttttttttgcagaatccttctataaaatctagtcccgagtctatagccgacaaatcagtttaccatcatgatgtgaaaatccaaaaaacaagggtagaaatcaaatcttttaccttttagaaacttgtctttttcttgaaaatgttcattatggttattgtcttctctttgagtgcaggaagaattctccaaacc

SEQ ID NO: 39606 - DNA, 1636 bp, Arabidopsis thaliana columbia
ccacatacacaggcaggaattagcagcaccctaaactagactcgatctacgatccatggactccgcgtccaagatcacctagactcaacaatacaaaaatgcacatctctcatccgacaaggatttgaagatggcgacactcaagcaggacttacaagactcaacaagcaaagaaacacacaaacaaacaagcaagccctagaaaactaaatgcaacacacaacgtaacctagctggattaagaataacaaagacaagcatgatgggtgatgagttctgtatgagattcatttaacctagccggattttagacatgtagtgaagaaatgaacggtgaggtttctaagtgagctatatgcattaaggtcatagcttatcaacatgtaaccaaatccgagaatgaatgaaaccctagcatgagaatgcaacaagaaaaggtggacgcgaactcatagaactagaaacggctcgagaggttaaggctcggaatgcttcaccggcgatcttggttacccgactttctcgtcaagatcttcctccgccttctccatgaaacctctcttgaactcctctaaaagctctcgcaaaaactctccctagaactctcggaaactctctttaaaactcactagaaactcttaaaaacttcttagttatttttggattctcaagaggaatgttcggaactgaagagggtggtttatatatacggtccgatcgtttggcgagagttagcgtcctaggacacttggctcacgtccgttgacacttggcgaggcacgttctacaactcgcacatgcaagagaattcggccgcgtggcaacaacaaatggcaagcattttgaatggcgtccgaccaagggactagggcgccaagttttgttcgcttcggctccatgcaagccgacttggtcacaaagtttgccatatttgatttgcatggcttcgcctgaatggattcggctccaagtttccttctcttctataaataacgcaaccctcattcattcattccaaacacttagacaaaaataatcatcttctcctcaaaaatcttcaaagtctcaaaagttcttctgaatccaagctctcaaccatagatttcttggtcgggtgattcagcttgatctctcgatcgatgaatcctttaatttcatcctattctttcttccctaatcggatttcttctcacttctctaagctttgggaaccactctcgcgggtcaagtcatttcaattcaatttgagacgggtttaaagcgagggcaacataatcacctttcttctcgtctttgtcctccagtaaggtttttcttcttccatggagttcacctttgctcttccccttctccttcaatggaagcttacttaactcacgcaaaagctcaaaatcctgctcaactcctccagacttcttacttccctataaggggtgctacaatacgcgtcatagtgcaacctaacaactgccttaatctattcaagcattcacattagcgaatttcctttaacatttttaagcacgaacagtggatcaagcaatgcaatgtttatgaactcatttggtttaggggctaaggctaagagacaaaaattgtccctctaatgaattggccgagtaacaggggactctta

SEQ ID NO: 39607 - DNA, 578 bp, Arabidopsis thaliana columbia
agtaacgtccgccagtgtgctctaaagcctgcagcccgtcaggcccgcttcgagtacagacaccacccttgccgaagccttagaggcagccaagtcagccgtgcacgagcaactctgcgattcattcaacactcctggcatgatgaactcgatctctgagcttatcaccaaatacaacatcgctgataaatcgacgctgaacccgaaggacgtcgaggcagttgctcgctgggtaacttacatggtcaacgtgcttggtctcaacggccagacgcctgccgactcgcgtgagatcggatggagcggcattgacgttcctgaagaagccaagccgttcctgtatccgctttcggccatgcgtgatgctttgcgacagtctgcgcgagcaaaacgcttaacgcgggtgagatctcgaagattgtcgaacaggaagccatcccagaggcaacaacagaaaagaccaagccctacgccaccgtagtgtctaatttccgcaccaaggtatcgtcactacaagactccggagacctcggaaaggaggttcttgcgctctgcgaccgctccgagatgttgatctg

SEQ ID NO: 39608 - DNA, 863 bp, Arabidopsis thaliana columbia
tttgtcaacccttacgatattcaagtgttgtgccgactcggactaagtcactatcagtcgttactcgtaattttgtacaatacccgatttatttctgaagtagaagtattttacaacatgttaccaaaacatttataaagttcttatggccaatgcctagtgcccaaaaccatggtaaacatatttgttttacaaaaggcacaaatctactccaggtttcctatcgtccaccacgccctctattcccctcaatgggtttcctgcaaaacaagtagaatcatgagtaatctaagattactaaggtagctcgggattccttgcaatagatattagtttctaacacaaagcacaaaaggtagtttgccaaaggtaattctaaaacaaagcacgcatcagagaataacaacaaaaggtagttcgccgaagcaactacaaaaccatgcaaattcacttaagactccaatcttattaaatgttatatggcccgatatgctgccttcaaacacccacaccaaaaacacactcccgtgatctcatgcgttaccaccacaaaggtacgtaaccgtagcatcactaccaaaatgctacaccgtcgtgttgaaaactcggccagggtagctagccccgtctctcaaacccttcgcactacgtggcgatcaagtaacaacgttaacaagacccgacgatggcacgattcaaaactgatatatccctagttttaccggttttaaagtatgatttaggataggtattagagtctatttgttatttctttagtcttttgtagtcgtttttaggtttttacatgtttgggatatatttggagcttatggagcattgtggtgcaaaatagagaatttatg

SEQ ID NO: 39609 - DNA, 1242 bp, Arabidopsis thaliana columbia
ttatatttctaaataggttagagatgatattatatgtcgtaagttattaaaataaattaattctgggaaaatatattagttagagaatatgtataacttttcgaataacaaaaaacaaaaattttagaaataaaccaataaaatgcaacaataaaaagattttgagagaaaactaaataaataaataaagaaaaaacaaatctaaacaaattggaaattatataaaatctggaaatgagacgtttatattagaggaaaaataaacaataaaagctaaaatttagggaagttaataaaaaaaaaggaaagaaaagaataaatgaaaaaaattaaaagggcattatgggatttgattttgagtttatagggggaaagttggttcaaatttccatttaagctaacaaatctttattaaaatcaatgaaaatctagaaatttgataatttacccggggcagctgctcctcttttccctacatggatccgcccctgtatatgtctatgttactatgattataaaatttaatacaaataaggctaaattatgatagagtaagaaaacatgtaatttcgttgataggctttgttttttttaataagggttttctgcaaaaaaaaacctcgaagtcgatctcgtttgcgaatctaccatccatgtcccaactatgcaagtcaaccacatcagctctaaagtcatccactaaacagtccttagtcatatcgatgatgtggcatcgctaacgcggcgttttggaatgtctctgacatccaaaaatcttgacattttttggtgttaatttagaaagtggaaaacaaaaattgggtatttattttgaaattagggttcgtgggtttaccttgagcattcttatttatcgacaatcttctctttttcttctgaattggcgaatctggtatgtttaaaatcgatatcttgtttaaaattgaagttcttgtcattttatttgtcgaatttatatttgatttgaactgtaaaatttggaggtgatcttgttcactctttgatgacagtaacgatgtttgaaagtagctcttccacaagtcaacagagaaggggtccatcaatgtcgcaaaatggcattactaggcgatgtttctgtggtggattagcaattatccaaacctctcggactgccacaaaccggggaagaatattctacacttgtgtaatgagtggtgtaagtcaatttaagtgtttttaaaatttgctaagggaattacg

SEQ ID NO: 39610 - DNA, 563 bp, Arabidopsis thaliana columbia
aaaacaaaatagaaaggcatgttaatttatttttgttgtgtcatgtatttgtcaataattcgtcgataaaactaatacatttttttaatacatagatatgtatactgcgatggatccatcatgtgaattagattcgtgttctcgcttttgtctgctcatgtctttcatgatgtagacacaatcatggtgtctgacataagatgtccatatgacccataacccttctttagctatatgttatgtacattaataattgcacttacttgatctatttttgagttttgcatcatttgttgataaactatataaactttacaaaccaactcaaaacaaacatggcctcatggaaaatgaaaccaaggctgaatattggtagatatctagattaatgtttactttgatctaattttctggttcttctttactctcaattcgaaatttttctcgtccatctccaccaaataaccaattacttttgaggattatttttttcctctttcaatgttgatcatgttggataaacatctccaccaaataccaattactttttaagaaaaaaaaca

SEQ ID NO: 39611 - DNA, 638 bp, Arabidopsis thaliana columbia
tagtaacgtccgccagtgtgctctaaagaagaatttggttataagtagtttaatactagtaatatactctactttattgctgatatctataattataatatctatctatctatctagggaccagagttgtttcaggatctaggagacaataacctagtaatactctgttaatatttcaaagtatctatccccagctaggcttgcagccttctttaatagtaagaagaccttgccttgttcagttatagtaattatatatcctgttaatattacttatacctgtataatcctatccagaactttccctataagggtaacctagatactatatagtctaatagcccagaggctagaggaggctgggaggtggaggaagatatagtagttagtcttatttaactgctttagcttttgttatgctagttacttagcttgtatatagtattctagggtaatagtttgccagttctcctgaccagctcttagggctgtcagggatgcctaggttataggctgcaagatttgcctctttagggggcctttgcaagcttcaggagtaggaggttagtttagctgttctatctgcctagatagctatgggggtgcactgctgttattagaggaatctgctaagaaga

SEQ ID NO: 39612 - DNA, 1217 bp, Arabidopsis thaliana columbia
tcgaaccatgaggagcgacaggcgtgatgaccctcccgccgttcaccagctccgtcacgttgaacgcgtcaattttctctttccactccttaaactcttcaaacgtactcgccggtatagggattttatcctcatcggctagaaacttcagacagctaagtgtaccggttgcttgcgcatgcatcttcaccatatgcgaggcattttcagtctcggcaatatggcgaaagaatttttccgagcgttcgtaatacttgttcagaagctcggcacgcgtcttcgcatttcctctgcgaacttctcttcccgaaaacgccaaaaaatctctttctcctcagccaaccgggcctccagcagagtttgttgcctcagaacattctcgagcgtcgcagcctctttcgaacgctcagctttcagaacaacagtctcttttttcaaggctttcaactcctccaaacccgccttagcttgttgattgttatcagcaatggtacgctcggcattctttaatttgccctcgagcaccagaatcttttcacgagccgagcgcagattgcgatcataccgcgagatcaggaggttattcgcccatacagcctgccaagcgcacatattgtcttctgggggagtagagaagagaacgtcattctacgtgcagctaacctggcactctgcacgcgctcacttctcgaaaaggtcagcctcggccaaaaactcatgttccggttctccgggagctccaaccaccttccgaaggaaacgagcacattcaacccggtcggcagaaaacggggagtccctgactttgtactcatagcggaatgagtgatcagcaattgccaaaagacggggcccggctgacaggtcgacatcaccgctcccgatacgcctccttttgtccaaagctggagcgacctcttttgaagaacagggacgcttagagccaaaggtatcagggccgctcctctccctatccacgctgcggccagatgatcctttctgaccaacggtgattggacgagctttgtccactcgggtcacatcggtaacgtcccgacgttcggcgccagacgtaccctttttggtcttatcctcatgacccttgcgatttttctcggctagatcaagacgagccttgtcctcatgagttttgtcaactatcgctagacgaggtttggattcagcgtcgttgcgagctcgtttctcacgcatgaggg

SEQ ID NO: 39613 - DNA, 548 bp, Arabidopsis thaliana columbia
cgtaactcgtccaattatcagtatggaaaagacaggtgctactacagtcacaatggctccaacaagatacaagaatgcagccaaaatcagctcctttctccttccttgaaaatttagtccaacaattcaatttctttcagatgaaggagactgctgctacatactcagatgaagacagttgagaaaaaccaacctataatgtcggcaacactaaatgcaacaatggagccaattaaggcaccatacagtgagccactggtctgcacaaaagtatgaaaattgtcgtaagcaaatttctttgtccttccacaagaaagatcacagcttcccaatttagggagaaaataagaacaaaaaatagtgcaataaccaacatgtagaagatccaagaaaggtagactcacaattataccaacatccactgaagacaagtcgtaccatgaaattccacttagagtaggcgactgaggcaaaagcagattagtcattcagaatttaataggcttagacaatcgaacagatgtacatgcataacaactatgcaggag

SEQ ID NO: 39614 - DNA, 520 bp, Arabidopsis thaliana columbia
tttttgtacactgaacaagatcacaagaaagctgactgatatcacgaccacctgatctgcaaatgaagccatagtcagaaactttacacaaaaaatagtcactaatcactcatcaagataagattatgttttttgaaagctttgtacaatcattagcccctattcagggggcagaagagtttaccctcttctttgttgtatctataatctaattgaagtcaagggacccaggatgcaaccattaaagacccataaaaagttttctggtccaaggaatacatatatccaaggaacgattacaagttttgaaagccagacgaaatcatgctcgtgaccatacataggcgctaataaacgtcaactagaattagttaccttgttctataacaccaactccaaccttcagaccaccgatagcagacattactgtgtccaaaaaagagggtaaaatttagctgcagattattcatgcaacgataatgctcacatgctttttctctatacttgatatgtgacatag

SEQ ID NO: 39615 - DNA, 575 bp, Arabidopsis thaliana columbia
ttttcacgaaaatatacaatatttgtgtttatatacttttatttttattttttaacaccataatcatataaaaattaactagcgataatacttgttttcttcattatatacttcttagtttagcatcaaatttcatttcgacagtattatttattgtttcattttgagtaaatataaattttcagtctgtattcttgatcatactccatgcataatgatattatctgttgatcattcacttatttactctatgaacatttagctaattttggtttatttgaagccaactaatccccttttttttccttggcaaaacgccaaaaaatgttttattctataactaagtttgctggatttgacgaatcaactttaaattagctatgtgctgcagagacagcgccaagctcttgtagctctcctggccagcgaaggcacattaatgtgcaacgcttggtaggttcgatgctcgagcaaggcatggaagagacagagagagaagttgatcatgatcatttcacatgtgagatattctaaaatatctttgtctgtcttttcttttttttgtgtagatggag

SEQ ID NO: 39616 - DNA, 974 bp, Arabidopsis thaliana columbia
  unsure (1)..(974): unsure at all n locations
ccataatggtcgtcacaaatgttaaagaagtctagccagtggcagaatcattatacattatgttgaagagttgtgctggaacagaggaccgagaagtttactcaaaatttaaaaagagatacaactacgaagaagcagagggattgtgtgaaacattgaggctccacataaaattgttgaagccaaagtagtgtggaacgtatagtgagaagtggtgtttcaccgacagcccagtgtgttgggatcacatcaatttcttgatgaatacaatgggagaccatacattgtagagcagtgtatagattgtatatgcttctgcttgtctagagatattatggaaatgtcttaagttactaatgatgaatgatatgtacttagacatttagtaaaattattgttcgagcctagatcccattgttcttttgttctttaatcaaacgaaatggtaataatgtttttggcttaaagatagtccaacgtgatggcattatagaaattgatttagccgtaggatcaattataaaaatagttcccattatcaattggatagatcttagctttgtttgtttgtttcaacccataaaaatcggcaaattttggtacatctatatctatcacacttatccatggcaatattacattagaacacaacttaggatccattggtttttctaggtgtaaaaatctttatattttatgtaaaaaaaaaagaaagtaaattgaccagagtttactgtgtaagtttgagatggaaatttgccgccaaaacaatagatcatcaagtggtgggaaaaaaagaaataaacatccacgtatagcgtaatatatagcaatgttcatatggaagtattttaaggttctgacgcagtctagatcttggtaacatataccaaggatatgaaaagtgaaggtaacatcgttgtcttatctcattaatgaagataaattanaaagaataataaatattttataat

SEQ ID NO: 39617 - DNA, 1395 bp, Arabidopsis thaliana
gttcaaaatcttttaataaacttacaaaatcttcaaatcatagttcaaaacttgtacctcaccaaaatcccattacccagattaatccaaattctgaacaaaatcattacataaaaccaaattatctttttattcaacatcgatttgttcagagctttgtcggagcgctacctgttgattgttgagatctactttggcaaagatgaggttcatattacttctccgcaatttgtgacatctcttaaaacaaaatcaattctctttttaagagagattgtttacacaaaatcaagaataatttacaacagtattgaagagactaactgaagaccctagaaaatatggagacttttatttaacctttggagaaggagatttctaaggtggaggtagggagctctagacatatggtggtgatgggaagctgtagacatatggtggtgttggaaagtagtattgaaactttggaggaaggatcgtagtactctggtggtggagagttgtagatatatggtggttgtagtgacctcgccaaggggtaagcgaacatgcaagaaacatcgaggaacgtccaaagaagaaccggaagagaaaggaactagttaagggacgaaacccaaagagatgggcaagacaaaaatgaacatggccgtgcaatgtcagatgaaatgccgagtctgattcatctggtcgtatcatgggaaaggagaatcgtgaaatggtagattctagttcaagatggggtcatctgggcgaagccaaaacaggagaaagttaccccgaatacagggtcgattgcccatatgtgcccaaatgcgataaatcttcaatgggcaagaatgggcaacacgggcgtgtcgtgggacaaagtttgctccgccgggcgttgaacgccctttgaccgcgccaaggactcgtgggccggctaacttggagcccaaaaatgtagcttggagccgaattcttgaggagtggagccaaatttaggacccttggagccaaagccactccgtccacgtgtcgtcgtcccatccctgctgcatatgtatcttcaagggcgggtgacaagtgtcatgcgaggtgtcaccaccggatggcatgcggtcggttgtagcccaagctgtcccgcctataaattcttgaccacctcgggctttttgatgggagaaaagagcagagaggctgtcgtacgtgatcgagaaaaccatgtagtaacatcgtcaagagtgagaaatcaatgtcgtgattttgtctgatcgagaaactctgcccgtgatcaagatcctctgtccgtgactaaagaattcatgtccgtgatcaagaaaacttgtccgtgaacaagaactccttgtccagtaccgagaatctgtgacgatagtacgtgaatcttgttga

SEQ ID NO: 39618 - DNA, 1540 bp, Arabidopsis thaliana
acaaaattggcgacaaattttggattgaggaactttgccacaaaattttaaacacaagtagtaacaaatttgttacaaaaacatctttctcgcaaaatgtatctaagtggctacgggtagtaacaaattagatacattgtttattaaatcgtaatctgttactaatttgtaactgataagtagcaaaatgttgttacaaatatatgtggtcgttaaaacggtagctatatggtcaaaaaatttaggtcagcaaatctttttcttttttttttggataattttgtttttcttttaacatttgaaattatgcatttatattggagaaatttagagatataacatataaaaatttataaattaggtaactaacaaaaaaaagtttatatgaatgcatttttatctttcttaaaaaccatcactaccaccaccacctccggccaccacctcttccggccaccaccacttccggccaccacctcttccggccaccaccacttccggtcactactcctcataaccacctccggtcaccaccacttccggtcactattcctcttaaccacctccgaccaccaccacttctggccaccaccacctccggtcaccaccacctccggccagaaccacctctggccactacccccggccacgatcaacacctccgaccatcaccgcctccggccaccaccatctccagtcaccataaaaaaagtcaatttggtcaatatactaccctttatggttagttactatattttgaaaactatagtgttagtttgttaactagtttagaaaacattactcagatagcatagaattgtatgtttattcctagaatatcatataccttttttctatatgtttttactacttgtgtaattatagttaacacccttattagtaattattaaataatattatttaattcatttttaataaaaccccacacaaaaacattcataacatataatccacgtcatttcacataactgcataaacctttcggtttctgcctgaaaaaactattcatcagcgggaaaaaatctgtcgctttctctctcgagcgggagacggcctctgagacataattccgtcgccgttttctctttctctcttttgttccggacgaaattcttacgacggaattgcatttcttatccagtaaagtcacatccctatcaagtcgcatttgaactgaacttctcaaaggtccagtaagtctatatcctaactgtatttcgaattttcgacaagattccgacatctaagttcaatagcaagtgattcacgcgacctttaaccgttttccaaaaactatcatgatgttattgatggtttttaacgatgcttattccggcttcttttcgtcgtcgttgattgacatatggtggctgatttgttagatctgtttgattcgatggctgagttattgtttgtttgccgactgatttatgatttatcaatgcatatgtgtctgagtttgttatatgttgtggttgagtttgttttatgttttgtttgagttatggtttaaccttac

SEQ ID NO: 39619 - DNA, 1084 bp, Arabidopsis thaliana columbia
gttgtgtgaacctattataaaagtggtgcattataacttttgagatgcagccgtttttgaatccttaagattacagaatgtttttttgcccaaataggcccatcagaagatttcatcttgctcacagaagaagaaaactggatttgactcaatcctgaaacacacgtcgacataaccacgtgtcagatgagcaatcttaagcgaaccgacttcaacctccaccgtcggagcttcagttccagggacagaatcactgtcgataggactatctaacatggattcttaagggtttctcactggtagatagtaaagaggctccaattaaagatacatcagcaaattggcaatgattaataagcgacggattccacttcttatcttcatcataattctcagatctctgatttgatttctgcaatcaagtctcaacatgaaatagatcggaacataacactagaaagctagattacttacactgtcattaccaacccatgtatgtgagattattaaaagcaaacaaaagtaaaaacacagataaacaaaggaaagaggatgcataggagaaagctagccacatgccaccgtggaaacgcgacggtgctggacgaaagccggacacctctactatgtgagccagacaattccggacgggagccgaccaacggcggagatgaatccaccgaaatcggacgagaaaaccagtcaccgtcgttgaggtaaccaactgtgttgggcatatgagagccaacgcaagtgaagaaacatgtcgttgccaccaaaaacaaccatcggagacattctctctctgaaggattaagagagagaagagaaagaaagtcgaagataatttatcaaattgttttaacgactgatgatggtatgtctattttggcatgattaatatgttttaaatgtaggcatgaccacggttaccgttattacggttatgttctctgaaaatttgataaattatcttcaactcataaaaacaaagagaaatattgtttttctaagttttgagattagacgcaaaggaactagcattctgggtttgatcagtttgtatgcgtgtggatccagtaga

SEQ ID NO: 39620 - DNA, 523 bp, Arabidopsis thaliana columbia
tgttaccagaacccaatttatcaccttgagagagtggaaacgctacagagtttggatcaatctcactcagtggattcctcctatacggagaatgctccgttttccggctaagcttcgacggagaaggctgactcgcagctctcgccggtgactgagacctcggagaagccgcttttccaacgtttctcttaacagtaatccgtttcacagatccatctccattgttgttgcttaaagctttatctgttgcaggaacagatacaaatttcccaggtctattgttgttactcgaattcacagaattgccactggaattagggtttatctccgatcttcttcccggagatctactcactcgtcgacttccaccaccgttaccactacttcctctctctctacttcccgatcgattactcttcgaatcatccctctctctactcggagttcgtcttctccgttcccgaggcgattctccacacgttggcgctgacgatgaatcctcctctcagcttcttcgtcttct

SEQ ID NO: 39621 - DNA, 554 bp, Arabidopsis thaliana columbia
aacttatatcaaatttaaagttcaaacgataatgaacaaaataattctgtttcattacattgattagtcttctaaaactaaactaaaaccaaaccaaactaaagtcaaatcaaaccaaactgaaccgaacatagattgacccaaatcaaaccaaactgaaccgaacatagattgacccaaaccctaaccaaaccatatactagatcggctgcggcataaaaagtggtgatgatgttttattctatgatttatacactaaccgatgtcaagttggacttttccctgatgtagaacgagattggattttcagaagaacataaacttcttaactacacatctagcttggttggtataccgtatctctaaattacaatttatttcccttagataataaaattcttaataatttgtaccaatcgtcattgtgacgctggtttatgtatcctacatttgaaggctccataggccaatggatttctattatatatcgcaattgctggtataggtacaagaagaagaaatagagaaaaggaatttcatgactaacttggcga

SEQ ID NO: 39622 - DNA, 500 bp, Arabidopsis thaliana columbia
atatttatttttcatgctttagtttgttaattatatctagttttatcatgttctataacccttttttaggcactcaacataaatagcaaaccccgatttagttcaattcgcgaatcaatttcgtcttggttattcttttggctttggtcgtatttaattatgctagctgccagatcttaggcacatcactttgtttagataagattagaacatttcttcacagttcacttagtcgtcacatatcaaacaaagtagacaacattataaatacgagaattccacaaataatttctgcttatatatatagatatgtaaccaaatcacaaaattccacataattagtctcacatatacttgtaactagtcagacacagacaatggaagaatcacaccgtagtagtactgtcttgttcgacaaatacaacatcggaagacttctcggaaccggtaacttcgccaaagtgtatcacggaacagagatctccacggcgatgacgtgg

SEQ ID NO: 39623 - DNA, 616 bp, Arabidopsis thaliana columbia
agcggatctgaaccgaagcttcgattttttgttggccaaactttgctctttcctttttagaatttttctttctttttaaaaacatttcttttatttcttcttactttaaaacgtgtgagagatcgctttgctccgaaatttcaacccctggttgctttgtttgatccctagattttcgccgtgttatagaagaatctcattttttgccgtctgaatcgaaatttcgtgtcgagaactcctccactcctccacttctcgttttctctttttaatttattttactctgtaagtaaatttcagtttctttgttgtctgtttctcttgatactccattgatacggtacatggtcgtttattattgaaattaaagtcaaacttttgattcattatgtcttgtaagaactcatgttctgttgatggtttcttgtttttgattttgatccttgctggtcattttcacagtagggatgtggattttaggattcgcctagatctcgcaattgggcttagttttgaatcagaaagttttaattttgactttatttgactgctaagttctctatggttgcactatgtcaaagttgctttcgatttatgtactatcatgtgaacatgt

SEQ ID NO: 39624 - DNA, 940 bp, Arabidopsis thaliana columbia
ttcaactcgatatatattcttcaacacactccctaaaatagaatattcagcaaattaatagtacgacaaaaagaaagcatcccaagtcccacactaagaaaataaaattgctcaatggcgttttccacattgtaacagaattattgtttttgtcatattcttatatgattattccaaacttattacaatattatctatcaaaatgtctccagcatcaaatactagatgaactaacagtcttcgaaagccgagtaccaacccatacaagatgacaaaaacaaatttgatattattcatcaatcacaagtagagtgtcttaattttcttttccatttttgtatatatggatgttaataaaagacaaaatataaaatataaaaacaaatatttgattatttttccctagcgggaaaaacatgtccaagcgacaaaggcattgaatcacaattcacacaaaacgcgcatcacaagccgcgtgactttggtgagacgcatgaatctcactcacctgaacggtgaacgctcgacgcgcgttgtcctaacaccattttcctcctggtgtcttgtgaacgctattgggcttttggttgcaatcagtgggcccaattacatttttgtcggcaatcaatgggcccactaaaacaaaacacttatttaaggaaacaaatctgtattatggtaacaaattgttcattgaaatgtttatttataaagatcttggctgattgaacgaaaaatctatcacggatttatctaccaactaattaatggtaaacaaatttcttattttgtaatgaaattttcttaaaaacaaattttttcacattggattttataagtacgagaagatttacataaactaataaatcttttagttgttatctcaataaatttcgtggctatcgtttctatttatttaatttctccattcacattatta

SEQ ID NO: 39625 - DNA, 397 bp, Arabidopsis thaliana columbia
gatcatcttcaccaaacctgaagtcgtattgttcttgaacatctccgaagctaactccgaacatcaaaactgtatcttcttctcctcctcctccatggcccttttcacaaaggttagttacttctcagaattcctagtttatgcattggagccgtctcgaattaggacatccaacaatgtcagctcgtgtacgattgccatttcgactacatgcagtcgcagccagtgacggcctgataaactcaccatgctgatcctcaaaggcacgtatacatgtcgtctcttcgctatagacatcatggttataatcatcgtcgatcatccgatgttcgcagtgcactgtatcttgttcttagtttcagggacaaagagtatatggtgtcagtaacttcaagct

SEQ ID NO: 39626 - DNA, 519 bp, Arabidopsis thaliana columbia
ttttctacgacaacattttgtaagatattgatatttaatatatttaattgaagccttctcgacgaaaagttcaactcgaccttcgaaattttaaaaatctaatctttatgagtgtaaaaacatttacaatatatatataagggtcatattgtgtattattttagacttcataggattaatatgtgtttgttagagatatatggtaaaattgcaaaactatatgagttagatgggtgttttgcacaaaaccctatatttttaaaaaacaaaatatagaaaaatttcataaccccatcggatatatacacaagtaaaaaaaatcattcatatatacaattttttattcactatattaaaatattgaacaaattctattaaaaatcgtttatagattcaaaacagaagtaaaagttccctattttgtttagaaaaatattaatacgtgatttaatattttctaatttcgtaacttaaatatgtctctctttttatttcttaattttatttcattcgattttt

SEQ ID NO: 39627 - DNA, 396 bp, Arabidopsis thaliana columbia
tgactggcattgacgatggaatgacctttgattcttcccaggtttaagacggatttcttgtagatacatgttcttgttttgcttggtctaacatgttttgaaattattcgttgtctatcaagttacagcctacaccaatgtaatatatcggatcttttaatataaaaatgatcaatagaatgtaccacaaagtatcttaattactaattttcttattagctgatcatacaagttcttgatttctgaacgttcgatcaatgcagtactcacttatggacattatggtgcatcttcaggatgtttcgtggaacatgtcactgttgatgaggattcactttcggttggtgaacacgtggaaacttccccttttaaaattgctgttagacgattgggaat

SEQ ID NO: 39628 - DNA, 502 bp, Arabidopsis thaliana columbia
cgatccaacggtgtgtaatcaaggagatacgagaaccgtctgattatttttaagtgtttgtgccacgtaattccttagaaaatcaatgtgtcagacacgtcagcaagctagagctgaaaaaaattgtactaggacgacatgggtttcctatgacgatgatttgaatccgtactacgactttgcattatttttatttttcatttccgattttttagtatataatgtttcacttacgaatgtttaataaaatgaacaaattaatctatcaccaaataatttaatgactaaacgtgctaaccaaattaaattttttgttaaaatcaatttttacccatatacgtttaattaagactaaacatccaatatttctgaacgcatcatctacttcagtgatatatattcaaatattgagcactagaattattgatgaatttcttatgtacttttccgcaaccatatttataaaccaattatgatcaacttcgttaaccgggtcgggcgg

SEQ ID NO: 39629 - DNA, 603 bp, Arabidopsis thaliana columbia
aacggccgccagtgtgctctaaagtaaacaaatgccaattgtcaataccctgtacgacggaagtgttacggaagcaaggattatactgacaggttgatcacaccgatgctgcgctagacgtttttgcaatcctccaagctgaccttgtgacgaaccgactgccgatgggacgttgaatccaaacagcgacacgattggcaacgaacgaaaccgtcgacgacactcccagtcgaggggtcggtcaaagcgaccagcgtcaacgcgacgagcccgatactcgaggttgtggacgaccagaagatgtgccgaagctgtggcaggtcaacggaatggcctggatgctgtcgcaggaggctggccggtgaagggccgcatcctagcgaacaattatggtctagggaagacgttacaggcacgctgatccatgctccgcaacccgcccgggccctgacgaccagccctatcgactgatcttgatcctgtgtccggcgagcctggtgggcacctggttcgccgggctcgcacacggttcggcagcctgcttccagtgcggatcttttaccgggactgagaacacacctcagacgaggatagggggcaggg

SEQ ID NO: 39630 - DNA, 550 bp, Arabidopsis thaliana columbia
ctctagagtggaatttgttggatatgtgaattcgcacaaaatatattgatttctgttaggtcagatattttgatttcggaaacttgttgggctatttaagttactgaaaattcgagtaagtcttgtacgttctaatttttcgagcaaatacataaatttgtataagtatttaatctgataattatgatgattatttgtatttgtatgcatcaaatacagatagtatcaggaatattgtttgaaagtaaaatatgattttaagtggtatatataaaatatgaatcttcgtatctattgcttattgattttgagttgaaagctcacaatctaatatggtatcagaattcgatccgaacatactcaactcaatccatattggttcggcccaatactttgcttaccgatctatgcccaaacatatcaagattaatggttagaaaaactattatttcgaaggaatgtattagaaatattgtcaagttgaatagaattttaggtggtatatataaaatatgagcttcttgacctattgccaattaattttgagttg

SEQ ID NO: 39631 - DNA, 662 bp, Arabidopsis thaliana columbia
  unsure (1)..(662): unsure at all n locations
nnnnnnnnnnnnnnnnnnnnctaaagctgcatacaacaagcccgcgtttcagctgtctctagcccgtaatccgaacgagcctgtaccgacatacgaggtctcgcgatacggacagctccctgagatccaccacatcttcaagagcgatcctcagagcccgcccgttgccgttacgcttttattcattgcgatagtgttggccatcttccctgttctcggcggcgtggtaagtaccctctatacatctccttgtgcaaccaccgcggcgtggctgacttgtcttttagtggctctacctcggtgccaatatcaaccatctccccgtagcattgaagtcggctcctatccctcacgccgtgttccttggctcgctcctcgccattgaaggcatcttcttcctgtactacacttcctggaccctgttccagatcctcccggccgttgctgccgctggaaccgttgcatttattagcggtagcgtgcgcttggagaagtcagggcagacgtctggctggtctccggtgaacgacactgcgcgtggcatgatttgtcgcgaaaccgtctccacctctcaatacagcaaccaagtcgccctagcataagtgtgtaaaatacatatacgcatctacctaccacaagttgtatgtccatttaagaatagt

SEQ ID NO: 39632 - DNA, 569 bp, Arabidopsis thaliana columbia
gaattaaaatctcttggaagcaattgattgaatactccagatgattcacaagcatatttcttattggcagataataacttagcccagaacaagtcttctttggaggccatgctgtcatcagcagaagaaacctcaatagtttcctgattggcaaaagcaggtgtgttaatctctttcgaagaaacagctgccttcatagatggtatgggcagtatatcttcctctctttcaacagtggcaaaagattgggatagaggtttaacttccccaggactatcttcaaaaacatcagcaggaaccttggctaaaccagcctgatgcacaggagctctcaccagtgttttagctacagaagaagctgttgccttaggatccaaactacaagaagcctgctccttgggcacatttgcatctccatcacaacagtatgaactgggtccaacaacacgagagtgtcttctaccttcaagctttagtgtcctatgtttgtttcaaggagataatttctgattcagtcatctcacagctttcaaaatttcacctttccaggcaagtaatgtgtcattgat

SEQ ID NO: 39633 - DNA, 1710 bp, Arabidopsis thaliana columbia
acctctagagctacaaggcatgtgatatgtctataatttgcatgttttcagtgttcattcatcatcgttttgagtccagtttatatcattcatcactattttatatcatttctcatcattcttgcatactttgcatgattatgatagctttgcatacatattgcatttctgagttgttttcaggtgatttgacctgtttgcgagcaaattggaagaagcgagccagaaccagaagacatacttgaccccctggtcgagtatcatcactcaccaccaacaccatcactcgaccaagcactcgatcacatcttcataatctactcaaatccgcactcaaccagacaagctaagcacaaggaagagaagaggagaagaagaagtgtttggaagcggcctggagctccatcggatcacgaagcccatctcgtcccattatcactctatgggccgggcgattaggttactgaaccgtctactatcattttatttcattttgtataaataggtgtctgagggttttgtcctgggacatctagtcgacattgagtttttgcttcagttttattttatgttttactctagctgcgccgcttttgcttttgcaacctgtaattccagatttttccaagttatttagattccgcatttgatttcatctgccatcttgtttctgtactctttatctctttacttatgcaatattatcatttatctgcgtttatgtctttgagcatgttgtctgagtagtgacatagagttcttaaggatgggatagaatggttgtggaatccttagtctgtagaatggttaagttttagaattgattgaatcccttcaagactagttgtgtttactgcttatttctttctgatcaactggaattcgatccaaagcattcccgcacctagtaggtgttcgatagaaagcttgatccactacttcctgagatatgcgtctatatcccaagggattggtcgtttagagcgtttattgactttatcagtcggttcttattgcctgcttaggtagattccgttaatgggaattagtttgagctagctttgtttgaggatttctatcacgggagtgaattgatcagttgttaaacttgttgtcaagggataactttattgcgcttgttaaccattcaaataggctagataccactccatttgattaccccatccttaggaatttctcgtctatctgattactcaaaaaccttactcgaccacacctagtgtccggtaacagactatgcagtcgagcataattgtctcatttcctgtctattactcgaccaacatactcgaccacactcagtgtctggcaacagactgtgcagtcgagtatagttatttcatttcctgccttttactcgacctgttactcgaccacatcctgcttctggcatcaaccagttgtggtcaatgattttagtaattcagttaaaatttttgtattctgcatgttcgcttaggactgttagaaacctcaaaaccgttattgcttggcttgacttagtgacttctgatcacatctcatctgtttgcatcacacctgattggattgacaccctaaaatactacaacgacaaattaatgtcttaggattaattgactgaaaacctattgtcaattgttctgaatgctagttcaagagtagtaactagaacttgatattagatacataagtatgcccatcatgagt

SEQ ID NO: 39634 - DNA, 992 bp, Arabidopsis thaliana
agtgatgaatttaagaattgatactaaattcagttatacaatttgacaagttctcaattccagagaattaacaaagtagacacacaattaattaggctttgtttcacaaatagacgttggaataatatacaaatgagaaataattcagttaaatgtagataatttcgtttaggtttaaaaaacaatcaagttttgttttactcacgtttttcagtttttctcaagctaatgtaaaccaattaacaaatttacttgagtcaaacacaattattaacatgatccaaatcattcaaacaatttcacaagttcagagattatgattagtgaaccaaatcatattttcaattaatcctaatcacgtaacaaagcagacaagagagacattcacacgtaccacaacgttccaacaggtctctatgaatgaagaacaggcatcaatctccttgcttcctgagcttgcaaggcgtcaatggacatttgaccatggttaccccttccacggccacgtccacgtcccataaatgcagccggaattcttcctcttccacggccaccaccaccaattccacgaccatctccacggccatctccacggccaccaccacggccgctaccacgtccaccattaccacgaccattagcacgtccaccagagccagaaccaccagatccagaaccaccagagccagaaccaccagatccagaaccaccagagacagaaccaccagatccagaaccactagagccagaaccaccgccgttaagattcatcttgcacaatatacatcaaaaaagactagaatagttagtagggtttaactgatgaaaaaatctttggtaaaacagatgaaaaaaattactgttttttctttacatctagggtttctataaaaaatcacaaactcgtcaaaaagtcgatattaaaaatctcccttggttcaaaaattatatagcttcaaacaattgcacacgcaagatttatctgggaaaaa

SEQ ID NO: 39635 - DNA, 447 bp, Arabidopsis thaliana columbia
ccctccaataccatcagaacgttaacgacgtcactcaagtttatggtcttaaaaattgcattgtttggtgagaaacctatgagactcactcactcgctatctctctctgttatttaaagtaccacaccaaaaagtaaacaagaataaaaaagaaaaagacaaaactaaagtctcatacttttaaagtgtgttctcatttcttttttgaccaatttcgagatcaaaagaaacattttttctttattctcctcaaattctacatcgggatcttactgggttttcttttaaacattaaattcgtaaattcccaaagaaacaaaaaaaaactcgataccttttgttttacaaagtcgtcacaattctgaaacccttaattgaatccaagagaatttttgattaaattaagtcactggaccctgaagtcccacacaagcaagcttcgatgga

SEQ ID NO: 39636 - DNA, 452 bp, Arabidopsis thaliana columbia
gttaatatcgataatgagacggtcagggaggcgttagggatatctggaatccttctttgtgtgtttggtttgctctatggtggattctggagaattcagatgaggaaaagattcaaattaccgagttataatttctgtttcggtagagccgcgattgctgattgtgcgctctggttatgttgttgttggtgctctttagcacaagaagttaggactgcaaactcttatgagatagtggaagacaaattctgccaaagaaaagaagagaagaatatggtatctccgaatttggtacacctttgcctcgtgaagacggtgtgtttgatcctcggtttggtctcgggagctccctaagaacataagtggagctagttccctagcccgagcaggttttggaaagaggcacatacccaaatgtacagaccctagagagaagaagaggtaaaacgatg

SEQ ID NO: 39637 - DNA, 539 bp, Arabidopsis thaliana columbia
ggcgtaactcataaaaatacgatttgcttttaacgaaaaaagattgcttcacgcttgccgtcttttgttcgtcgataaaaaagattttattatatatatgatgccatttacagccgaataatcctccattttggtcttcacgttctttaacttttaggtcgatgcttttttcgttatcttattatatgtgtttgtgtataatgttcaattgtttaattagtttacttttgatatgcatatgattttcatctgaatctgtctttctcactcatgagtcatcatgacatttcatccatgggacgatcgtagtactattaggtgtttggtttactgtaaaagcatatttagttaaagatttctgatagattattttgcaactctttcttataaaaatcgatggagcaaacgctttaagttaagtaggcatacatataatcaacatagacatgttgaattttgaaaatttcaagtttacacagtttgattaaatatgtaaccgtaaactgcatcgattcatagatatcaatattttacaatgc

SEQ ID NO: 39638 - DNA, 619 bp, Arabidopsis thaliana columbia
tggactatagacatttcattcatataaattgtcaggtcagctgggatctgaaatgtccatgcagacccagatactaagcacaaaagatgcggaactcaaaggtgcaagagaagaggtacatagttttcttttggttcttttggaaactattgtagccttggttaggtgaacgaatttattagtcatccattcttaatcacataacgtgaattattatggaatcaaagagccattttgagctttaaggaatgttctgctttagctagtcttcatttaaccatattgaattccttgtaactgttcacagatcaaccggctccaaagtgaattctcttcttacaagatccgtgctcacgcgcttttgcaaaagaaggacatggagctggctgcagctaaagactctgaacaaattaaatctcttgaggaagctctaaaggtaagttatctagaatcttaagatggagatatttttagatggttgcaaggtgcttaccactaattatctttttgggtggtgttaggaagctgaaaaagaagtatatttggtatctcagagagggataggggcagcaagatcttcagagtgctttggctagcgttgagaaagaccttgaagaga

SEQ ID NO: 39639 - DNA, 589 bp, Arabidopsis thaliana columbia
tacgatatcgatcgttatactactagcctactataagtatgtatatagaaattagagtttcaaaatctaacaagtaacaacgataaatattttatatatcaaggctagtactgagacgtaaattaccgcacatttaaattgagacagggtactaattaaaaccaaacagtttagagatatcgatcaacttatcttccatgatggagctattcgcatatatctttcctgattttggaattgtgcatgcatgactaatctaaagtacgtcatatttttcctccactccaccaattttagatctatcatttttataactaatcctccaaacataattatgctttgcgattatcatatcacttctagttctagatatcaaacattttaaaaatcaaaatcaatagtactatgaaagtttttttggggttcacttttagattaggctttgatagcctaacccgaattttgcgattcaccaaaattttgttattttgctgcgttttaatttgtgccaaataataataatatgtgtcatactactaatataatcattcacgttgagggcgaataaatattattcacaacacatgta

SEQ ID NO: 39640 - DNA, 638 bp, Arabidopsis thaliana columbia
tgttacttaagacactttttatatgtttcaggcagcttatgatgttggaggctatagcgtaaacccttacattatccaaagctcaatcttaggcattcgcccacatttttcacaacctgtatgcaacacacactctctttgtttcttttgcttcactttcactacgtttcataacttgtaactaggaattattgcaaaaacagttgttgcagacattgttttcgccatcaagaaagtcgaaaacttgtaatgtcaaacacatttacgccttggaatatcccgaggcattggctcattttgctctttcttcaggattttctactgatcctccggtaagagaactggctcatgattactatttttaacagattctttcttgaaactcttggattttaatcttttacagttatgttgtttatcaggttcgggtttacacggcagattgcgtattctgggatctaagaaaatccaaagaagagtttataagaaacaatgttcgtatacacaacgagacaaagatattgttgccaagattgttcattactatgctaaagatatgtcactggaaccatctgccctcatggaaacaacggtgaagtgtttaccggcatccacgaagagaacagctcagaaattgt

SEQ ID NO: 39641 - DNA, 589 bp, Arabidopsis thaliana columbia
agggacataacagcctcgagcttcacgcacctggtcgcgcgtggatttaacaacgtgtctcaaccaatggaatggctctgctctgtacttaccgtctgctttttgctttcctcctgatccagtaggacccattttatttcctctgtacaattaaaaacgaaagagacatctataaacgtggtattcacgcgcgcttagactaacgcgtgaggaataatgaaaagaacaggctcaaccttcgtggcgggtcaaacctcaaaggtctatagaacaacaattttgtctcaaaagagtattcgtcagacctcagaaaacatttattgtactataatattagtaattcttgtattttgatattctttagctttagttttcaggataagtggggatttttataaaaatttgtaattatgagccatagattttattttccccaataaaaatattacaatgtactgatgtagtgattagtgagtaaattaatacgccctttgcttttcacgagcagagcttagaaaaggttttggacttgagtttgcaggtctgtccttgtccttgtgtacataacgttcttcttgcttttttagag

SEQ ID NO: 39642 - DNA, 387 bp, Arabidopsis thaliana columbia
taatccattgaatagtttttgtctcttttctcaaaacggagttcttaattgaagttttacactaatgttgttcatgacttaattcatacatttctttttaatacatagaatgaagtatagttcaattcgagaaatgtttgaagttttatgagtagtttagttctacatgttattaaaattcgcagttatctgatataaatattttcctggttactaatgggaagaaatcaagcttcggaagttcagaagaagagtcggtgatggctgattgttttgattagtaggtaacatttcactggttggtctcacgtgtgttctttggctttgttatgatttggcttggcttgatgacgatctcgagaatcttgatcgtagccctgtgatcgg

SEQ ID NO: 39643 - DNA, 443 bp, Arabidopsis thaliana columbia
tataaaccaaaactattcggggtatatacttaaataaataaaagtacacgatagggaacatttgtaatacacagaacttagtggtgcatacaaaaataaaattgaagaaacagagcatagatcagtgatccggactctgttttggaagatctctaaaaagcttaggatcatcatcggcatcgcgcagatagaaaccatcatcgaaattctgcgaatagctcacgacatcgtagtgaaacgtaactaacgttttcgatttattattctccaatccgcaacttctaaccaataataatcttctcatcagatcccttaacttcggactaggtcttgtcttgttgttgtggttactgattcgagcgtactctgtttcttctgtatggatgagacagagataacggcgagctcaagcatcgacctgtggagtacgattgtctacggtt

SEQ ID NO: 39644 - DNA, 623 bp, Arabidopsis thaliana columbia
  unsure (1)..(623): unsure at all n locations
cagaaaaaggttagagtggtccccactgtaggatctactgacttgtgtcggccgttagtggttttataaagctgacgtgtcccactgaataaggaataccgttgtggtccctacggacaacgtgggattcgacgccagctcattttttaattttttcttgaaatcttttttaaaattttagacgatgactcaatcttcgccacgtaggatccacccaataaaaaagggttaacaaaatcttatctttaatgctaaattagttgagattaatccatgttgtttaaatccgaaatgatgcatataatcttgtttcttataatcattaagatttagactgaagatctaattccaatttaagagagtcactaaaaaaagaatgaattcaatttcagacaaatccgacaaggtcaaggtgacgtgttcttgatgccaattctagtgggagccacttgacgcgtgcagttagactcncggtccaagacataaatttacgttaatacctcctttattgggttattattgggccgtagttgaattattagaccaacctttttatcctgtcttgattggcacatctttcaaaaagttacaaaatacttttattcaaggcattcaagagaaat

SEQ ID NO: 39645 - DNA, 467 bp, Arabidopsis thaliana columbia
tttaccctaaagaatcaaaacaatcctcaacacttacaaagacaaagacaaagacagctcactctagcttaatctatttaactaccaagcaaactaggttacaatttttgtaaagagagatttgcttacatgttgggatcttcaatcaaaacagcagtctcttgagcaaaagtatcttgcaacacaagctcctctttctctccttcagtttcagttttctccactggtttcacttttccgatgctagattgcgccgtagaagataaagctgggatacctaatttcctctctcgcagcttctgcaaaaacttcacctcctctaacgccaatctgtagatcaaacaaaaatcgaaccttttcaacaacccatcaaataaattgaagaaaatcaaaaccctacagatttgcttttcaatttagagctgaccttcgcttctcttcttcctctgaaattgcggctttgttta

SEQ ID NO: 39646 - DNA, 497 bp, Arabidopsis thaliana columbia
ttcactcctcaaacaattatcccttatttaagtcacccaaaaaaaaaaaaaaaattatccattatattccttggcagtcacgctacttatttaagcaagaaaaaaaaaaacagagcaacaatgtctctgaaaaccaaaccctagaatttgaaagagcaataataaacagagcacgataagaaacatggaacgagttaaaaaggaataacgatgataaaaaccctaatttaagaaacttattactgcctgacccaggatccgttaacccattcgtgatgctttctcagagagtaaagcgggtactcgagctcctcgtcggtcgtcgaaaagtaaacagagtagatgtttcttctcacagcggtgacctctccgacccaccacccgtctttgtcgaaagcatcgaccttatctccgcagcgaatcaatacgtggagagatttgggaggcatcggacgtagttcgtcggctgagatgacttcgactaaccgtttagattg

SEQ ID NO: 39647 - DNA, 563 bp, Arabidopsis thaliana columbia
cgccagtgtgctctaaagcgttctcggcctggctgctgcgggcgtagttgtcggggacgtgagtgtccgcgtcgtaagcagcaaggaagccgtcactcgctacaaaaagagatcagtatcttctgtccgttcgggctaaagggtatgcttgatcggtaaagggcaacgtacagcttaaattctcaccaaacgctgcgaatccgtccagaccgtgcgcggactcgtggatcatcacatcgacgttgctgccggttgtgccaaagaaggcgacgttgccgttgatggcgaaggctgaattcgcgccgggcatgaggaggatctggcggacctgcaattgttatctgttagccttttttctttatattttgtgggaggagtgagcaaggggcttggaatgaggacggcatacccagtctcgtactttcacaggcagcttcgagaacgtctctgcggccgtcgcgatgtctacctcgacatccctgtgccggcagaagagtcaggagtcggcgcactacacatatgtcagcaaccgatataactttatgagagttgtgtttgaagat

SEQ ID NO: 39648 - DNA, 507 bp, Arabidopsis thaliana columbia
tataatcaatgttcaaaatatcggcctaaacattacctaggcgttcggctagacgctcgaaacaactaagcaccgcgattttcatatagtcggtgaaagaaatcatttctccggttcaggcgctcaaaatcggtttaaatcagccaaatcattcaaaatgttggttaaacattcgatttacagtttttttttctatatctaaattgcgtcgtttggtttagtaaagttagaaaaaaaccaagaaagaatcagactaagacgtgtgcaatattatttaaaatttaaacaatttctaattttttcttcttctttcatctaacttcttcgacaaacagaaactactttaaaaaacattccttgctttttcaataatcatttagtgcactacctcaataatatcctttagatcgatcatatgctttcatttagtcgaattcaattttttctgcacttgtttaattaattaattgtattcagttttattgttctcatataatatggttttgc

SEQ ID NO: 39649 - DNA, 477 bp, Arabidopsis thaliana columbia
catcatcaatgtatatgtgaccatagtgagagttatgtagcaatatgagtttcaagtcttttgcagctgcaccaatctagctctcatcttcctcttccattgtactttgagtttttccttcaagccacctttctctcaactcgaagactccaagtccgtcctctagcggcagtctatgtccaaataaacctctccgagatcggatttaccagactctcataaaactcatttgccgtttcgcaaaccgcaaatcaaaactattcaaactaaaccgatatttgacacacgacgaaaaaactataatcatcaaaatcaacaaaagaaaactgaaatcatttaaaaagtttgattgatttcactccctaaaccatctttaacttaagattgatgaacctacttgtaatcttgtcgttcatagattatagagtggttgtgccatacagaatatgaataatggttacaagtatgtgtatgcat

SEQ ID NO: 39650 - DNA, 133 bp, Arabidopsis thaliana columbia
atccgcagtgaggcaggtgcggtcggcaatcgcttccaggtgatggggcttacccgccgtatgtatcttcttctcttcaaccggagcgcccgacgtgtcgtaagccactaccttcacttctcccggttcataa

SEQ ID NO: 39651 - DNA, 562 bp, Arabidopsis thaliana columbia
tccatcgttattcaaaaactcataattctctttaagaaacctctctattttgttggattttctcttgcttgttggctcaaccttctttcttccaatggtggtttcttgatgatactcccaaatcttttcaaaggtaagattgtcttttaagatattttttttcttttgtatacaagttcgagctaatgggtatacgttcggttaattacactaaaggtaaaattcaacgtcgaaacattagaatttcttcattaattttgaaatcccaaatgggaacaacgaagataatatacaaataattgatggttactatgaattatactagacaaaacattaaggttgtaagttactccaaatggggttctctgctttatcataatcttttaattaattgaattttgaaaccaaatttgagagatgacctacaataaaactcaattggtgacccaatgcgattaccttaattttataaccttttttgtgcgaaaccgctgtatgaatatcgtgaggtagacctaacttttacaaatatatattttgtactactttaggaaacatattt

SEQ ID NO: 39652 - DNA, 713 bp, Arabidopsis thaliana columbia
ataccccgtagccacggaccttgagcaaagagtctagtgtatgtgtctatatatgcgtgtcacctttatggataagaaatcactttcaagctcctctttctacatagagagaaacctggatcttgtactttttaagatggacacatccataattaggtatagattaagctgatatggcaaaacgccaacataatcctacaagtatataaatcttgggccaactataatggtcctaatagatatggacttagctacttagttactagtcacagtctctgctgccaagattctagacacattcttaacacattcttcgaacaaagagaatggtttgatccacaaaggatgcaatgcgcaccgcttccacaacatttgatctgtggcataaatcaatcatgcaccataagggcttgaaactttcagcttttgccactaacactctaacgcatacttgtgttagactgcgaccaaacgttctatttgagaagcaccatatccattaacagcaactatgagccccttataatgatttgcctccatcagtgtcttggatcgctaacactatccagtaatcagcctagctggtacttatacagaatcttttcatcatctggatctgtgacaataaatgtaacatgagccattgactaagagctagctctaattaactcagtcagaacgacgatcacaagattgaactattgggaatggaa

SEQ ID NO: 39653 - DNA, 618 bp, Arabidopsis thaliana columbia
cgatgcacaagattaagctagacgaccgtgcgttttctgtttctctaagtcttaatcgtatctcggaaaatccttactttcttacagttcgtactgttatgtcgctgatgctttggtctcaatcttggagtctcaatatttggagctcacgtgacactttcaattatcaatatctttcgttatttctggatctttgttacttcatttgtatcactcttgttagtgttttagtgttggactactcgatcttactgtcgcgtttggttaatgcaggtactgataatgtgagagagaattagtttctttgtacaagttggttgttttgaagaagtgtgttgttgttgttgtttgaattaagaagattgtttcagcaatggccaatcgcgatttgatgcttggacaaaatcgtaatatcggtattgggcagggtcaatctttggtgcttggccacagccacagtctagggcttggtcaaaaccatgttgatgtggagctaggccaaggtcacaatatggatttaggacttgctcatcatgatcatgatcatcatgaaattgatttaggagatctcatgatgacatgagctgacttaggaaatagtgagatcacgatggagag

SEQ ID NO: 39654 - DNA, 525 bp, Arabidopsis thaliana columbia
atttttccaagtgaccactgaccataatgtaactgtcacagattttaaaataactaaaagcaataattgaaaaagaaaaaacactttcgaaaaaactttacagccttctaaccattcaggtctgaatcagaccgtctgattcatagttccaatggaatgccaggaacgtactcctctaataagactgatttcgcacttcaacgaattttttagagcaaaatatccaatattttattaaaaattggccttccattatgctctatcttaaatgctcagttgctcacccaattttctgtctacgtatttaaagcttaattatgtagaaaacatttgcacataattttttgtctttgggaataaagttaaggattgatttggcaaaccctacaactaataaatcggaaagaacatttcagaaactaacatcaaatttattaaatataacattgacaaaaggaataaacaaaaacattcattacatttaaaggtaaaactatctaaatagttggtgtttgacagaaaaaa

SEQ ID NO: 39655 - DNA, 463 bp, Arabidopsis thaliana columbia
gtctatatattcttaaatgtgatttgttttgtttaataatataatgtgatttgcttggtttcattttcaacaaacaaatagataaataatattttctttgtttcaaaatataggatattttagaaattttttatttgttttaaaatagataatgttttatcatttttctgcatatatttctcttaacaccattgaaacgtatctagtcaaaaatgttttaaaaaggcaaataccagtcgcaattcatattgatggcttccgaaatctcaatgaccattagtattctttttctaataattgagtctttttttattaaatgatgattttcaaccaaaacaacatataaatacatagtaacttttcaaattcatatctcattaaaatcaaagaaaatctatttatctaatttaagaaatttagagtttttcttaatacggaaacataacatacagtacagtttatg

SEQ ID NO: 39656 - DNA, 231 bp, Arabidopsis thaliana columbia
cactaaattaggaacctcaaggatcacaaccgcaatacgtacaaggatcacaaggatcacaaccgcaacaagtacaaggatcacaaggatcacaactgcaacaagcataaggatcacaaggatcacaaccgcaacaagcacaaggatcacaaggtgcaagagctcaaggatcacaaagacaaagagcatcatcaagagctcatgttcgatcacaatcacaaccacaagcac

SEQ ID NO: 39657 - DNA, 506 bp, Arabidopsis thaliana columbia
gaaaaaaaaaaaattaatctaattttaagagaaaggtttcttttaaaaaaaaatttttccttttaaaaaagtctttttccttttaaaaaaaaattttggtaaatctttttatgagttatgtgtatgagaatttttgtctctacattttggagttcgattttcgttttagtttaggatggtgaagtatttacaaaaaagaaatctatttgcgaacctaaatatcgaataatcgtatctttagatgtagatggattagtacatatcgtgatatcgatagatccacacatagtttgtaacaaaaattatcaaaatgactactagtaaaagtgtatttatcaaaataatctagtagttagttaaagttgatttaaaaagaaaaggaaaagtatgtggatccacgtcaggttgcgtgcacgtaaaagtcttttcattccctagttcttctgctctgttgccgttgtgaacaaatttaggtttctaaaacaaaaactaacacttgttttggg

SEQ ID NO: 39658 - DNA, 506 bp, Arabidopsis thaliana columbia
gaggctcaacgaggtagtcctcatctctcacattgttcatcaatctcgctctttaattttctctctcagtctctagtttcttaagtacttgttctctgcgttgtttttctctcaaacaatggctttttccgatgatctcccaccaccaccacgtgtgaacgatcatgtgaagacgagaagatacagaaaaagaagaacgatcaagacgaagcaacttgaagaattgataagcaccgccacaagagccgctcatgttgcaagagacaaagggttttacatagtctctccggaagccatacaatgcgttgagatccttagacatatgcgaaccttacctctaaacgctcgtcttattaccaaaaccgacggtttacgcgttcttctatttctctctaagaacggtaaccctaaaatcaggtctgagtcaaaggccgtcattgatcactggaaaagcattctcataccaaagttcattaatggaagagaagagattcactgatcaggac

SEQ ID NO: 39659 - DNA, 974 bp, Arabidopsis thaliana
tactaaaataatgacttcaaatacaaagagaaaatgtgtgtcaaggacttccacaaagttggaatggccctaggagtccattaatcaacaatttgtgttcttggttcttaaaaaaacatagaatccgcgtctataacgcaatcgctatataaaaaaacagcgatcaagaatagaataaacctaaaacgcggttttgagaccaaaaaaagaagattcatcttcctcaatgagacattacatgatcacgcatccactacccgacgaactcgacatccgatactgcggttctacgtaagagtaactatgcaacgttcttggtggtggcgccggtagactataatacggcggtgttgtatgcgggttagttgcctgccgtggtgcctccgagtgccgcgggggatttgacggcggatgagcatagtttccgccataaacatgtggcggaggaggatattgatacaacgaaggatatgcatagttaccacgggaggtggtaggaatgtaatagcctgattgaccgtaataaccaccgccgccgcgaggagtcataacttctccgtcgaaacggagattagtgatctttccatgttcaccgtaccgttcagcaacagccaacaatacattagggttaactctggccttgagtttcattgagttgtcgtctccggtgaaatccacagagtaaactcctgcaagtaatattagaaatatgaatatcaaccacaagaatcatcaacaaaacaaacacacacaaacgtagacagacacgtaccgtagacacaatgcatgacttctgacactttttgccgacaaagctggcaacctctgttcactttcatcacacagctctacagagtaaattaaacaagatttctgatttaggaagaaataacacacatatattcatgggcttaagcagattatatcgtttggctaaccatatcgacagtgtaatccattgatgaagcttgtga

SEQ ID NO: 39660 - DNA, 504 bp, Arabidopsis thaliana columbia
tagtaacgggtctgcatcagcgacacttcatatctcaatagtgctggacttgatttttggcttatcacgttgccattagcttttatgtttcatttgttttcaagttaggcatcgaaacttatcttttctttactaaaattttcaggatgaagaagtctcaaagcagagtaagaaactttcgaagaaaatgcggaagatgatggagcacgaaaaacatttacaggaaaaagaatttgaacgagccttctttagggagttctggcccgataatgtataactaggttttattcttttacttcttattgacctgaatgttccaaaagcttctgtatttactgcaaatttagaataactctgttctattgccttatcaatgaagaaaaatagttatagaatcatgcgctcaaccttatacctttagaaaatgggaaaagaaaatgaagttaatgcagacacttcaagtaaaggtttttgttagcaagtttctaaagtgtatgtccatgt

SEQ ID NO: 39661 - DNA, 716 bp, Arabidopsis thaliana columbia
catcacggttttgcaagatccgcttatcccactctgctattgcatttgcctgtttccggaatctccctgtgcgctcttgtagctcagtattccactccttgataatctacaaataaccagcatttttgaatattatatatataacatggctaaaaggataaatgtagaagagggaaaagatctatctacctcctcaacagttttgccagttatttcagatggcaactttggagaaccagccactggagcaacagctgtgctcgtcctaataaataacaagaaacatattaaagtaacatcagcaacaacataatcaaggtgaatgtagaacatgtacagccgttttggtcattatgtgctggtcaaaatatgaaaaaagcatacccactacttgaaggaacaacaagagttgtctgtgttgtagtagcagaactagtagcaggagcagtagtagaagtcgaagatgggagacctgaacaacaacaatatttccttcagaaagaaaagaaaaaactatagcttctgatcggtaaaacaactgggcaggtatatatgtattcatgtcatagactataagcagaaggcaagccaaagcataataacgcgtatatatagattaaggtagatcaagtacatcgatcacatatctaatcctaatcaatgattcccataattctctaaattgttaatcctaatcatcgtagcaaatgggatag

SEQ ID NO: 39662 - DNA, 1044 bp, Arabidopsis thaliana columbia
cacatttttcagaaactatttatttattttctagagtataataaatcatagttagaacattattttctggaatatattataatttatagtacttttattttggctttaatggttgtggcagatagaccaacaaaactgtttgtagactgaaccatcttttggtttttgtttaccattcacaactggcagtacgtaatggtgtggacgacaaaaaacataaaagaaaatcattggcgaaccaactaattacttttgatgtgtagtagattattgtccaatatatgatatgatggtttagtccgtttcgttgacaacatccattctcatatcatcactagcaaagttgaccatagtgcgctctactttagattttgggcttcattagatcggcccttaagttacggttatcaaatttttggtccacaaaaaatatgagtctgatacatgtcaaggtttacaataacttcaacttaaaaccacctaataaaataattatagcattggtgtgaagtgtaaacactgaagcgtgtaacaggatgattgagcaacaagtcaggagtctccgactgactcggaggctttaccctagaggccaagattgtcttagctggcttctgctggctccttatgtcaattgtgttagaataatcatttcttatatttctttcatacgcatacttcgcatattttctgtactaaaaaaaaaagtttggtctgtaagtcaaggagaataaaactatttaaaaactcgaaacagaccacgtttgcgtctaaaacgcgtggtttttgatgcggctcacgacgcttatgatatcgagccctatcagaagcattattagccattaggcggctccaaaccacacttgactcgttttagtggctccataaagtttgaccttaccctcatgattccttcaccgtcacgttaaccaaaaaggctacttgaggtcaaagcaacatcgcaacactacaacgacgactctctcatctctcttttataatgcttaacattatcacttcttcttttatatatatatatatata

SEQ ID NO: 39663 - DNA, 701 bp, Arabidopsis thaliana columbia
ctcatggaatacaaagagaaccacaacttgtccacatgacacttgtgaatattgtcaaaaattgtttgttaaagttttttcattttttggcaaaaaatcatttacattatgaatatgtagatatttacaggtaatgatcgcagagaagagctctacataactgtgcttgggaaagaaaaaaaaagctctttttcctataaaatgttggaggtatcctgatttagaccaccgaattcttatcgtggtttctataaatcaagactttgaaagatcaaaaacagaaactaaatatcaaacaaaatcttattccttttctaaaaatatgttattcatttctcgttgaacattgaattttttttaattagttgacatttcacaacgttttgatgatgtcagcagtcatatcggcgatatcatggacggctttgttacgtgccgtcaccggagattccccggcgaactggtcctcacaataacctggcttcgccacaacgtctttcatttcagacatagcctcaggatatttcttcgcctttagatcagccttcaccgccggtaaaaacctatcaaccgccgcaccatactcctcgatgcaagttccgtatctctcaaagtctacgcggcctctgacattctttaggacagagatataatatgttaacgtcacgttgaatttctttgtcgtagcatcgagagagatc

SEQ ID NO: 39664 - DNA, 624 bp, Arabidopsis thaliana columbia
aggatattgttcatagacctaagtttcatatatcaagtcttttataaagttctttgcaaaactctattgtgagagacataagctattcatcgattattcttcagagtttcatttagatctatatacagtgaagagatcccttctttccccttctctatttactatgtttatgctttttatctcaaatatgttgtttgtttcatccgatatgtcttgagtaatctgcttgttaggaatagggtttctcatttgggattcatatggtttagtagattgccccctttgctaggttatctatagaattcttcatctttaattatacctaatgctagatctagagtaattaactagatcatgaatccagacaatagatatgctcgccataggtatctgtagttggatctattatttgatgagtctggtttataggtgtgtaataagaatcggcctatttactaagatgaacaaattgaactctttaagaatgcgtatttaggttgatagtttctcggcttctccggttattattagctatagatatagggagttttgcggcacgcccaccagttattctataattagagtttgagtttaagaatggttcgataacaacctagctttcag

SEQ ID NO: 39665 - DNA, 578 bp, Arabidopsis thaliana columbia
tcctctagtaacggcgtcagtgtgctctctggcgaaacttgacaaaaattatggatctctctgtaaaggcgttcataaggaagacggggtttcgcgtaagtttgggcccatttcagctcccgttccccaaccgcgtgaaagacatcgtgtgatgacaaccctatgacggattatcaaattcagttctatatgttgctagagttgttcacttacaagggcccctgtcgattttgagtactgctctttcctcatgccaccaactgtaatgctacaggtcccatacagaacttatgactgttatctggcagagggaccacttctcctgaaagaacatcctttcgatagtatatactaccggacgcagggaacttcaacgacatcaatcgcgtctcccacttaacaatctgtttcatgattctgtgctgttcttttggcgtcacgataaaccatacatcgcccagaggagtgccgtccaatttctccataattatgtactcagcaccaacaggattcgcccgtgttgagcacaacaatacacctccggtgtagtgatccatgcagtcggagatagtcatagt

SEQ ID NO: 39666 - DNA, 621 bp, Arabidopsis thaliana columbia
ctcaattctaagccaatgacaattttcaggactcacagcactgcttcaacatagtattgtatcaaaacccaatgaactaaaatcttaacctaattatgactcaaatcagtgattctacctaattatgttactgcattatcttcaggaaaatgaagcaacagaacacattttgttgtaatttcaatgaaactccattggagcaagaagaagaaacttcgttcttgatttttgatttttctcatttgatttctacgcaaatcaaaactagcaaaagaagaaaccacacacaatagcagagaggttttaatggaaaaattgggtatgaaggtacctgaaatgtgaagatcctcgatcgtcggagatttgcttcggcgacatcattttagccggaagattaagtgatgcttaagttccagtataaaattaaaatcactgttgaaatatcaaaatccttccacgaaataagtcggaactcagaatcttaagaagatgtaactgcagaaagatttgcgtgaagctgtgatggaaggagaagaagtatcgtcttcttcgtcaaggaacgcgaagtcccgaagctctctcaactccagcgatctattgagatcggagagagagagagga

SEQ ID NO: 39667 - DNA, 1106 bp, Arabidopsis thaliana columbia
gtttgttggtgcctcggtattgctcatgcgtgctctagtgcctgcagcggctttagcgcgtcccatatctatcaaaagaaacaaagtaaagtcaagaaatcactcaaaaacaagtcaaaagcttaaccattgtactttagttactaaaactaacaatgcatcatgaataatcaagtgtcaagctttcaaactcgttttatccttttttttttcaaaaatggaggaaaaggtcggttttttgtactaagggaaaattttcaaatttcaaattaagccttaacccagcaattaaaggcacaaataggttctccaaactatcttagacaagaatctagcatcaaataactcataagcatcatgaaattcaaggaatttgagatttttcacctttgaaaaacggaacctaaaagaggaatttcgagctcatacctttgcagattgagaaaacagacaataaatatggaaagagggcaaaaatccgagtgaaatagacaccaattttgtcaaaaacgaccaaaaaatgacagagatgagtttagggatttccggtgttcttgagacaccaaaaacctgaagaagatgaagtggatgtcgtgaatggggaaggggaattcgatccctggtttttgtgttcggcgtccggttcgatttgagtgaagaccggttcaatttcggttcaaaaaaattcgccggtttggaccacccagggatcgatcgatccgaggaggggatcgatcgatcccattcctgcgggttttttctcgattcgacgtcagcttcagatcgatcgatccagcctgtggattgatcgatcactcctggcgggtttgtgcactaaaaacatactcacaaccccgttaaatacaaagacttatcgactcaacagctgagccgataagtctaaactccacagcggagagatacaaaccaaaatcaaaggaaaataaaagaaagaataaaaagtatgtacaataccatgtgggttgcctcccacgaagcgcttgtttaaggtcgttagcttgtccgtaatgaactgattaggcttggtctggatccgttagagggactgccgtgcctcttcgggagtggaatgagcaaggtatggt

SEQ ID NO: 39668 - DNA, 463 bp, Arabidopsis thaliana columbia
  unsure (1)..(463): unsure at all n locations
tatatgaaccaactatataaaggtggttttgaatttgatcatacaatttacaagcaaggatttggtctaaacagcatttatactttgatatgtaagtcatttacaagtaaagattgtttgtggaccttttgatctaaccctaatcagttcctattgtctattttgttgagccatttgaaccgcagtttcgccaatggggtcatcaaggggactagtatgtatagatcttacaaagtggatcctgaaatgtctaagtcgttgtgagaggtctagattgtccacaagaatttcccatttgtcgcggagacagagaatgacaagtaccgcaagagcgaaacanantgacacaccgatgattatcaacccaccgcggaatctgtaaagagtaataggatttgatgtatcatcggttgtgtatggcagtcgattatcacaccatctttcctccatctcatttagcttc

SEQ ID NO: 39669 - DNA, 517 bp, Arabidopsis thaliana columbia
gtttaattataccgtaaataattagtcttctattctagccttggtgtggatcatcatatacaaacatttatcaaaaccaaaatttcagtgtactacaccgtaagtgattaattttgtcaatacatcaaactaaagattaaaataatgatgaagaaacaaaataatcaaagcaaaacagaagctgtggatcgagaaaagttcgtcagctttacaatctttaatcactgacaaatcaacacgtgttcagaaatctgaatttactatcatctgatcaaattatgatttttttattttatttttttattatgaaattattatacgccacaaaaaaaaaggaaaaaaaaaagagaggaaaacgccttcacaatgtcgtgccttattactaggaagcagattgtaatctctaaatcttgtcattgtgaactatatctcagttacatataaaagaatctataaaaaaaatatggaaattcttattcccaatttttatcgggatggattgttgttacgttattat

SEQ ID NO: 39670 - DNA, 463 bp, Arabidopsis thaliana columbia
agtggtcaagttagataatttaacaatcttttaccaaatttttttaatgcaatgacatgtggtttatctctttttatgtattattttatttatgtattgttcttctagttctctatctatgattgttcttcatgctctaattgaattaggccaatttgactattgcttacgagcgaattcatcaagccatcaatagtggtaatgaatccatggagcgatcattagatgggcaaataaaccttcactaaaacctaaggcacataacattccaatttcgatcacattcactaccccttcttgtcgggttcatacttagacctgccgttagcaaagacgcaagagtagaatcagttcaacaagaggtcgtgtcttgagtatgttgcgaaaagaagaccatagataaatacgtgtggagtggatatttcggacataatatccttctctcgcttcaatggaatgaaca

SEQ ID NO: 39671 - DNA, 518 bp, Arabidopsis thaliana columbia
tgctgattcatgaatctttattccgctatctttcatctgagctggctcagtagcttgctcttccaatgtttgtttcgtcttgccaagtttaagctctgagaacatctcagtcagtgaatctgcagtatctgaagtcgctggtaggacctgagaactttcactttcaaggtccatctctagttccagtaattcttcttcgatatcttcatcatcaatatctggatatggagctgattctgccgcattaacagaaaaaatctagctaaacacaaaagttgatgaagtaatcgtgtatgtatgtttaaacgacaaaacaccacttaccgagagctttttcgacttgcttctgtgattcaatagtttcctcaagttcttctagatagtcatgaacatcatctgcactgatcttgatgtccttcataaccctagctccagttttaattgcttctgagacctgccaaacacacatagatacttctaaaatccataattgatactattacatagacccaaacatg

SEQ ID NO: 39672 - DNA, 388 bp, Arabidopsis thaliana columbia
ctgtctctacaacgtggtagaacagcttcattaatacgttacttgaagattcactaattatttatacatgtacacttcaataattacggcaaaaaggtaacgttaattccacgtcgagcatcttaatattactagctattagtcacatagataacttttccttcattcgtaaagtaacccgtaaaaattacgatgcttaacgtgaaacggtgaaatatgaattaattatttatccaacatataatccgatagatgtcattttcgtgtcagtacacatttagtctacgatataaccagaaaaagaaagacataaagaacgattttttaataaacaaaatagatagtcgagaatagattaattaacaagactttgatttagctaacttga

SEQ ID NO: 39673 - DNA, 231 bp, Arabidopsis thaliana columbia
gatcccctttttattctcactatatggaccatgaaaaagagaatttaaattcacatgacataaaaaaatgattgttaagttatgtcatttatatggttacattatttgccttaagtacgtatataaacaattgggaattaagtatctacctcatggttttgacgcatgcttcacatccgcggagatgcttgaaaaagatgcgtaagttgcgtaacatagttgctgatatat

SEQ ID NO: 39674 - DNA, 559 bp, Arabidopsis thaliana columbia
ggaagaaggtgaaggggtcgtcagtttatataaggaattggatgagcgagaaatcgaaaaccctaggatctcgaaacgtaacactctatccaagaaaaatctctgaaattgcgcgattcagttgcctgttttacttcgaagatatttgttttctcccgaaataacgctctgtaatttttgaggataagctatccgagttaaacttaagtctccgaagagatctacttcgaagacttggggggcaaattgtggatgttgaatctcgatttcagcccaacccgcagtttgatttctaaagaacggtcatgcccaatgaaagggcccattatagacccggcagttcgaagctcgatccagcatttattcggtaacggacgaatctcgacttgaatgagaagcgttaatggtccgagctgaagatcagtaacgtgcaaagttaatgagacgagatcacggcatgagatcagctaagcttttaattcgtgttattcgacatgattgtataaataagggttgactatcattgtaaagggggacggaaaaattattatacaaaaga

SEQ ID NO: 39675 - DNA, 379 bp, Arabidopsis thaliana columbia
tcaagttcgattctagcccataaggccctataaatcaactaccacaggttgtagcacaatattcattcgtgagttagattaaagagtattacacaagattctgccaagcataaaactcctaagatcatgtactaggtgggtgtagcgagcatagattcattacggacaaactcaactagacaaaagacagtatatacaataacggccaaacatagttaacgccacttcaacattagatcatcaacccccctttgactagccctttaaacgcaactagagatctactcttgcatggtcaagggactcatcaaagggtttattgataaggctgataataagtttttagtcaattaatcctacagcactaacatggcgttgt

SEQ ID NO: 39676 - DNA, 537 bp, Arabidopsis thaliana columbia
tctaggataatatgaaatttagtttcatgaatcttttgactgatttgtgtgtgttttggttcctgcagaggatagaaatgttggaaatatcactccatgagactaaaaaggtaaagagagacaagagaagctaaatggttacacagcatatgagttttacttgtctatgcttaagatccaatggtcttcctcctattttcaggtcttgaatggactcgcggagatcattgaggccattcaaccgaatcaacctataaccaaatgcaaaccggtttagaaagcaatatagttaagaatatgtccggtttgattatctgaagaaaagaaatgtattatgatgacgataatgatgatgatagatgatagatgatagataagtttgtggaatccgtactacggcgttaaatgcaatcatgtgtggagccaatctgtctcacatgcaattgcacgtgtgatctctgcaccacaactttcttctaattccacagctcgatttgatcttctcctgatgacaaatgctccatagaaataacaata

SEQ ID NO: 39677 - DNA, 1104 bp, Arabidopsis thaliana columbia
atttcattcatcatcatcatcgcaactataaacagcagattcattgtaagggtaagtaagaagaccacacctcgaacctccagacaagccatttgccgcctttagtaaacatagtattggtcttgtcggcgacaaagcttccgagaaactcagcgcaggtgtcaggagcggcccttgagagtcggtagttgaaccactcttcgtactcgccaaattcctcggcccctcgtactcccaccttgacctgcgttggttgatatcaaagatgagtcttttatttgaacaaatagttttcttcagtttcaggggttaccttcttgaggatgactctctgcttgaattcgccggtaaagtccatcgctttagctcttgctttgctaaccctaacgtcatcaacaagagtagaattcttggggagtaggacgccggcatagacgacgccgaaagagccttcgccgagtttctcagtgaccaagaaatcggacctcttcaacctccttccaatcagagtgtcgaggccaagctggaggggagcgagaaggtaggcgtcaatggcgccgttgagaacaccaggcctcgccgtgaggtaaaaccagacgattccggcggagacaaagaacccccatttctgggtatccgaaaatgtggcgagggagttctgaaagtcaaggaaaggagggagatgagagagggaatcaacaggaatgtcctgcggagaaaaactgcatctcatcatacaaccccggcggctgaggagggacaggctgctgttctgggatgaaatgtgagtgggagtggagaatccggcggtggagcaggaatgaaatgcggcggaggtggcggtgggggtggcgggagagagaagagaggccatcttatctcgttgaagctctcccttgcttttttttggttggttggttcattttatgtccaaatgtcgtcatgtcattcatatgagtgacatcaagtggcccaatatagctcgatcatctcaataagagccctacatggcccaatcaagccgccaggaaggtcaattaaaatggtaatttgtaacagtccctgaggttttactttcgttttttggcaccaactacttccgta

SEQ ID NO: 39678 - DNA, 527 bp, Arabidopsis thaliana columbia
tttctaaaatggtcgtcttgtcgaatctaaaggtgtcgcctttgtttgcgaattattgtttttgttctcttataaaatatttcaccggtagtcgtcgcttagaggacattattgtgtaattcaattttgtaatttgtttcgctcttatctgatgctttttggaactgttttaaaattttatttgtacacttattatgtttttggctgcatgtgtttaatgatttatatgatcctgatatttcttctatttttaattacaaataaatttaccatttatttttggatggcaatgctcacaattagtttttttttatataaaaaaaacatttaaattccattataaaattattgttgattaaaatttccttataattccatttctttttaaaataatttacactactcatgaaaatatgtttttttaaacaaagtttttaaaactttaattgtttttttactggtcacaaaaagatttaattatctatgaataattatgaattgggccatactaagcggcccattatgaa

SEQ ID NO: 39679 - DNA, 718 bp, Arabidopsis thaliana columbia
  unsure (1)..(718): unsure at all n locations
gagttgtaatatgggtagtttgtgcaaaaagttcaaacttcgtgtagttggaagcttaattgcaatttttcatagagttgaaccgtaatctattctaaaataataataacaacctttatagactctaaactctatcgttagaactctgaaaaaattatttacatcacctcaaaatgttgtgaacaagaaagttaacacctcgacactacagtattcacgcctgacccggacccgccggttcgatcggttaaaccacgacccaaacatttctccggtttgagtttaatattaatagcagacaatttaaaaataaaaaaaaaccacaaaaatccaccattaactcgcgacccagtgaaccggttgaaccggccggcaccggtnaatgtggttttaaagaaatcatttgattttgaaacaaaatttaggattttagactttgtttagtaatttttagaactttttgagttatttttggaacttttaaaacttaaaagtcttgaattgttgattaaactttttgaattgagttttagttatattaatagattgactcaactaagtgttcttgatgttttagattttgatgaatatttaacaatatggtgaaagagataaccgagattcgttgtttgaattcatgatgttttataaaatttttccgtaattgccaatgagtcattaataatctcttacttcttagtatttgtttgggaaaaat

SEQ ID NO: 39680 - DNA, 583 bp, Arabidopsis thaliana columbia
tgcctgcaggatcttagtaacggtcccctgtctctctttcctggtagcaggcaactgataggggcgtgttaaacgttgtccgacaacgcccagcgcttccattgtaaaatgccagacagtcctggtggaagaatctcgttccgaagctttttcagacatgagctgatccgaagtttaatgcaacaactatgacacgagaagatagcatttgtctgatcctcaaaccaggatgacatgacgccaccaatggaatatacataaatatatgtggacagagttcgtgctcacacgcctttcctttgtaagaatctgtgtactgtgctccggctttcacaagaatctgtttagtgctgtgtttaattcgtgctttatagatgtaatactctgtaaattatgtagatgtggtttctttaatcatttttaacaatatgataagcttgatgacgtgatttgcaaaaatttctataatcaagagtcttcagttagtgatttatgaacagtgaacactgaacagtgatgaatattttcttcttcagtaaaagaataacgtatgactgtagcataacacaaaaccgacaatgat

SEQ ID NO: 39681 - DNA, 921 bp, Arabidopsis thaliana
ttaaatattttgaaagttttattttagtaaccaatcgtgtagttaatgtagagagattttaggaaaattgttaaatgtcaaatatttaattcgaagattttttttctaattatcaaaaacaaatattaaaatccagtggcaaccattgtaaataagtctcaactacaggatttatttcacaaaatgactgcaaaaatgtatatatagatgtgaaccaaatcatattttctgttaatcctaatcaagtcaataacaaagtagacaagtaacttttaattatgttctataaaaaccagagatacaataatgatattgatcgatatcaatcatacaatttttcacaagttcagttatactcaaataacacaatcaattttccacatctcatctatataaaaaccagtgatgaaatttataatccatcaccaaattcagttatacattttgacaagttcttatatttatcaatttgtgaagcaaattctgtcatactcaagttaaaaacaccaagcacacaatcactttgctaatctcttatatatatatatataagagagacattcacacataccacaacgttctagctggtctgtttgcatgaagaaccgacatcaatctccttgcttcttgagctagcaaggcttcaatggacatttgaccaaggttaccccttccacggccacattcatgtcccataaatgcagcccaaattcttcctcttcaaaggtaaccaccaccaattccacggccatatccacggccaccaccacggccatctcctccacaaccgttatcacgtccaccattaccacgaccattagcacgtccaccgaatctagaaccatcgttaagattcatcttgcactagatacatcaaaaaaaacaagaatagttagtacggcaaaaagaaagaaaaactgt

SEQ ID NO: 39682 - DNA, 1093 bp, Arabidopsis thaliana columbia
gaggatcccgtatctttaagggatgaaatctagtcttgtgaagagcgaactcaacacttagaattcaccaaaatgaaatacatttttctgagaggtggaacttgtaaaactccttgagggatgaaatcttgtcttgtgaagagcgagctcaaaacttaatttcaccaaaatgaatatatttccaagaggtggaacttggaaatcaatgaggaatgaaatctagtcttgtgaagagcgaactcaacacttagatttcaccaaaatgaatatatttttccaagcggtggaactcggaaaaattcttgagacatgaaatctagtcttgtgaagagcgaactcatcactaagatttcaccgaaatgaatatatttttccaagaggtgaaacttggaaaactccttgaggaatgaaatctagtcttgtgaagagcgaactcatcacttagatttcaccgaaatgaatatatttttccaagaggtggaactcggaaaatccttgagggatgaaatctagtcttgtgaagagcgaactcatcatttagatttcaccgaatgaatatatttttccaagagtggaacccaaaaaactcttgaggggtgaaatctagtcttgtgaagagcaaactcatcaattagatttcaccaaaatgaagcgactacaagtacataacaagaaattcaacgcagacttattaacagatgcaagcttggtttcgttggaaagataagtcttggggctttccgctgatatgtaaatagtcttgtggttccatgtagttcgccgggaaacccttcccgaagtgggcttgtttgaaaagcgtggacctgtgtttttcaaatttcgtacggattgcatatggtgcaaagctttgacgataattctcaacagacaacttcgtttgatgcaaagtcgtgctagttaagaagttgactcttggggcaacgcggtggtaggttagccttcacgaggtttcatctgattcaccgtgaaactcttctaaacgttagcttgattgacagaggcggatctgcgtttcgggaatttcatacaaactgcatctattgcaaagatttgatgatactctcggcagata

SEQ ID NO: 39683 - DNA, 654 bp, Arabidopsis thaliana columbia
acgataaagaaacaaagaatatagtacagaacatcttattcatatcacttcaccataactactttgagaacaacttcagttaaaaaagaaacatcatgagcttacaaagaaaaaaaaatcaggggaagatatttgtaccttgcaactagaaacagcgatgatgttcgaaattctttgtagtccaaagggaagttgccctgcaaatatgagcttggctggttatgctgacattgtcaaattaaccttcttcacccatggaagcgccgcaactacatcatttgcctcattctcaaactacaaaagagtggtaatccatcaaacaaacataactacgatacactaaaaaaacactgattcattgctcatataactaaggatatagctcaaaaatctttagttatatttttggtttatgtcatttaccaacgaaacctataacagaaaaccaataaatttcagccttgaacaaacaatctaaaacagaacaaattggtacctaattaattttaatctagcttcggtaccttaagtttatttgggtggaagacgaagcaaatactggagcaaaatcaaatgagttttgtattatttgtatgatttggaatgaaagacgaacctgcaatcgaccaaggtatagtgatttggatgaaagat
